United States Patent Application Publication US 2004/0031072 A1 - sequence listing, part 3

SEQ ID NO: 9563 - DNA, 535 bp, Glycine max
  Clone ID: PAT_MRT3847_108645C.1
ggggggaaaaaaaacttttatttccccggacccgggggcggccgcgggggagaaaacatggttttacccgggaacccggggccggccccggggggggccccggggtccccacggggagatccagaaggggtcgggggaggcaaggccatttccgttttgggggggaaaaagaaacccgggcaaaattccgcacaaaatacgacccgggggaaaaaagggcaccgccgggggggcccaaagagggaccccccccacataaatgggggggcccccggggccccctttggggggggaaaccccgttgggccggggggataaaagaaccggccaacccgcggggaaagggggtttgcctattggacaaaagggggggccccccccccgcgagggggacgggcaaaagggggccccccgggaccctctggccccgaaggagagggggaagcgggtcatgccgttttccccccgggggcaaaaaaacttggtggggggggcccccggggggatacaccaagggggggaatcgggtgggggg

SEQ ID NO: 9564 - DNA, 375 bp, Glycine max
  Clone ID: PAT_MRT3847_108646C.1
ttgggacagctatccctcatcagcatgctgctgagtatcctgcttgctttgtttatgtctaccgatttggaagtatatgtgcgccatggctcaggctaccgcacatatcctcaccgtgttagttcggcatttggagggcaatgaagcaatgaggtggcatgtgccaattaaacgcgtggtgtagaagcaaacaccatagtcaagtggcagactgttcctgcatcttgcctcgaatgcgtagctgactactttctacgagaccaatactgctcagattccataacagttacccaacaagcttatttctatgccaaatccctcaaactcaccatcacttatgtctttgtcttggacgttcacgaccctactctctct

SEQ ID NO: 9565 - DNA, 316 bp, Glycine max
  Clone ID: PAT_MRT3847_108647C.1
gggccaaaagtgacaggattgcaaataaaataaatgcctattacggtgacaggtccctaatagcccagatggaccatgaagctgcaccccattgcttttactagctagacatttacagtttgagccaaaatggcttgctaactctttaaaggaaaattccataataacattgcggggaaaatgggcttaaacgaaactgctcattaaacgatgtataagcgggcacaaatcctgtaaaaacgggcaagcctatggcgcatgggaaaagggttgctaatttacatgaccgtgcctccatcatgggggaaaactcgcc

SEQ ID NO: 9566 - DNA, 1024 bp, Glycine max
  Clone ID: PAT_MRT3847_108648C.1
tagttttggttacaagtatttccaaacacataataaaatcatctattttttatatgattttgatcattatcatttctcaattacaaaaatagatttgatctcaattttctttagcattctgattctaccgcccgaagaaaattggtcatctttcaaagacacctttaacataaaccatgcctttttcactgaacttgagttccttcctcatttgctcgacctgttgatcatcaccttggacaatgatttctgataagtttccttcatttccaacaatcattttcactttaatctgctcctttctggatgctcgagtccaataataaaggcctgccaatggactcaagagggtgatccaaaaccagttgttgccaacatctggtacggttatggtaagcacaagtgccacacttgccaagctgatgcaagtgcaaaaagttaatagcgctgcttgacctctgcttggaaccatcattccttcaaacgtgattgtctctcctctgtcagtcactgcaaaattgttacgagtgaagaacgatagaatctccccagcaacctgattcggcgccttcttttcaccttcacctataaacgtcttctgcacaatcttggatttgacagaacgtttgatgagagaccagagtccaggcacagagatgacaaagaggcccaaagaagtgtaataactggccaaagagtaacccgcactctcgccagcaagacaaggtgataggggttttgctgctgttggtggatgatgcatgaaaccaaagggtcatcatggagtgacacatgagccacatgtttctttggttttctcgtgtgctgcaccactaatgggtgtacttggtgaaaggtgaagaagggtctgattccaagtttggtgggaattggaagggaacagaaggggtgtggatgaggagggagtaacaatgccttagttactaccattgtggttacaaagagggtgggtttagtttagcagatacgatgttccacggttgaattggttatgatatgttgc

SEQ ID NO: 9567 - DNA, 187 bp, Glycine max
  Clone ID: PAT_MRT3847_108649C.1
attgaacccccatagtactgtacattaaggaaagaattatcaattgaagctgtcttgtgatcaagactacccataaaagcccccaaatcctcggctacattcacgagtcaacatgacttgtcttaatcatgaaactggactccttgaaccaaagaaatctggcctcactgcaaataggcaaagagag

SEQ ID NO: 9568 - DNA, 491 bp, Glycine max
  Clone ID: PAT_MRT3847_10864C.1
acgaggtaatttgatatcaagaatttatgtaataaagttttgtattgaaagtcaacatagattacccttaaaaattccgctaattccgatcaaagttttatccttattcataaatttatatgacaggaagattttgttgtcaagcttagcagaacaactaggatatttgtgaacttaaaaaccattaatctatcttgccctctaatgtcataaatccaaataaacaagtggtcataaattagcaattttggtcaaccttttcaacctgcctgcacggggttccattctttgtttttgtattgtggaaatgattcattcaaagataagagacagatacagagacaactagacaactccttttcactcaaagatgtaagaacagaagcatcaagcatgcacttagtcccaattgcaaggtcaattcagtaggtggccataccccattatctcactgttcacaatttttttgggtataatcctcttcttccctc

SEQ ID NO: 9569 - DNA, 218 bp, Glycine max
  Clone ID: PAT_MRT3847_108650C.1
agaaattaaaaccattcaaatattagactatatttgttttcctcgtttgttcgtgttactcggtgaaacgcatgcctatgactcaaacttacatcacatttcatttcactaagttcataccaatatctacaaacagtaaaaaaagctcaatggtgcatcaactaaacaatcaggattttcatgtgcacattcacaatgccaattgcactcacatgttc

SEQ ID NO: 9570 - DNA, 724 bp, Glycine max
  Clone ID: PAT_MRT3847_108651C.1
gccgcgtccggtttccgcgcctgggtccttctcgctgttgaggctcgccagaggagtcaccccgagtgcggcaccacggaaatgggtgctctggatcacatctctgagctctttgactgctcccataccagctccaagctcaagaagaagcgcaaacaattccagacggtggaggtgaaagtgaagatggactgcgaagggtgtgagagaaaggtgaagaaatcggtggagggaatgaaaggggtgacagaggtggaggtggatagaaaggccagcaaggtaactgtttccggctatgtggaaccctcaaaggtggtttctcgcatcgctcaccggactggtaagagagcggagctatggccatacttgccgtacgacgtcgttgcgcacccttacgcgccaggtgtctacgacaggaaagcgccatctggctacgtgcgaaacgctgatgtagaccctcggctcaccaacctcgcacgtgccagctccactgaggtcaagtacaccaccgctttcagcgacgacaaccccgccgcatgtgtcgttatgtgattattcattttctctcttgtatcatagtagcaaagaaaaacatcaaatgttcacgtggggaacgcttttggcacaatggacatgtatcctttaaagtgatgttcggaaatttgatatcttaagatggtaattaattaatgattctgattttataaatctataacaaattaat

SEQ ID NO: 9571 - DNA, 392 bp, Glycine max
  Clone ID: PAT_MRT3847_108652C.1
gactttcaatctctactgtttctacccccaactgcggatttggcctaatgaagagacccatgtctaacaagaacttctttcacccaacgcacctttcattgaggattctacccagcaatcgttcttctattcacacaccaaaattcaatgcacttcccaaagatgtcccatccaatgtacccaaactcactgcatttttctattgcaatgcacgttatgacttatattgttctagaaagccataatccaggatcaaagctccacaagaaagaaacttttgagcctgttacaatcattgatacccctccaaagcctcctgtcgctttgagatttatgtgttaactccacctggactcccaccattgaacactgtcattgcacaacattttaat

SEQ ID NO: 9572 - DNA, 377 bp, Glycine max
  Clone ID: PAT_MRT3847_108653C.1
cactcccccaccagccccactcagctctcctccccctgcctcccctcctccttcatctccaccacccgcatctcctcctcctgcttctcctcctcccttttcaccaccaccagcaactcctccaccagcaacgcctccacccgcattgacccctacacccctttcctctccaccagccacttctccagctccagctcctgccaaggtggttgctcctgcactctctccttccttggctaccggccccagcctctccaccatctctccctctggcgatgatagtggggctgaaaagttgtggtcctttcagaagatgattgggagcttagtattcggatgtgctttgctgtccttgctgttctagacatcatcgatct

SEQ ID NO: 9573 - DNA, 441 bp, Glycine max
  Clone ID: PAT_MRT3847_108654C.1
aataatttagaaaaggtgacagacaaggcagtagtccagtggatgttaactctgcatcaaataggtcttgatgtggctcgcactgataggacattagttttttatgagaagcaagaaaacttgtcgcaactatgggatattcttgctgtttatgcttggatagataaggacgttggctatggtcaaggaatgtgtgacatatgctccccaatgataattcttcttgatgacgaagcagatgcattttggtgctttgagcgtttgatgcgcagacttcgaggcaactttagatgcaccgagagctctgttggtgtggcggctcaactaagtaatctggcttcagtcactcaagtaattgatccaaaacttcataaacatttagaacatcttggtggaggcgactatctgcttgcttctcgaatgctaatggttttgtttcgt

SEQ ID NO: 9574 - DNA, 1095 bp, Glycine max
  Clone ID: PAT_MRT3847_108655C.1
aagatggcgactcggtccgttgcctggctgcctgtgatctcccctgtagttacccgcagaggcatctgatgcccgtgtccgtcgccagctcctctgacgccgcatgcctcgctaccacccaccgcaacttctcatcctatattctcttcttggatggagactcatttggttttgttgcttgctttgatcttcactgtagttgccggcgttggagcccaaggcccatccacctctcccgcgcctcccacaccccagtcttcaccacctcccatccagtcttctccgccacctgttccttcctcacctcctccggctcagtctccaccaccagcttccactcccccaccagccccactcagctctcctccccctgcctcccctcctccttcatctccaccacccgcatctcctccccctgcctctcctcctccggcatctccaccacccgcatctcctccccctgcctcccctcctccggcatctcctcccccagccactcctcctcctgcttctcctcctcccttttcaccaccaccagcaactcctccaccagcaacgcctccacccgcattgacccctacacccctttcctctccaccagccacttctccagctccagctcctgccaaggtggttgctcctgcactctctccttccttggctcccggccccagcctctccaccatctctccctctggcgatgatagtggggctgaaaagttgtggtcctttcagaagatgattgggagcttagtattcggatgtgctttgctgtccttgttgttctagacatcatcgatctctgtcttcggacttgcagatttttctgccaattcatgttatttttctatttaccttacctttatatattattattttgtggatgtgatcatgggagtttattaattactgtatttgaattatatacgtacattgcttgcattcttgggagatttgaggggaggttttgtattcgaggacagttattttgtatggcactattattagtgtatcgatcgttgcattctagtatttaaaactattagtttatcgataaatgcattcgagtatttcttctattcataattcattttt

SEQ ID NO: 9575 - DNA, 537 bp, Glycine max
  Clone ID: PAT_MRT3847_108656C.1
agactcggaatccaggctcgagtggagactcatttggttttgttgcttgctttgatcttcactgtagttgccggcgttggagcccaaggcccattcacctctcccgcgcctcccacaccccagtcttcaccacctcccatccagtcttctccgccacctgttccttcctcacctcctccggctcagtctccaccaccagcttccactcccccaccagccccactcagctctcctccccctgcctcccctcctccttcatctccaccacccgcatctcctccccctgcctcccctcctccggcatctcctcccccagccactcctcctcctgcttctcctcctcccttttcaccaccaccagcaactcctccaccagcaacgcctccacccgcattgacccctacacccctttcctctccaccagccacttcttcagctccagctcctgccaaggtggttgctcctgcactctctccttccttggctcccggccccagcctcttcaccatctctccctctggcgatgatagtggggct

SEQ ID NO: 9576 - DNA, 277 bp, Glycine max
  Clone ID: PAT_MRT3847_108657C.1
ggagaaggggggttcagggataaatgcattttttttcctggttaattataacttggcaccaattggaagtattttcatacaaaattgcaactcaagtcactccagtccaaagtaggaaaaggatgccaacggatagaaatcttgaatatttacaatgattgtactgccatttgaccttgaaagttgaaacaaaaaacatttgtagcttaatgttttcactacgcttctgtaatcttatcttgtaccctttgtcttttcctaaatataggtttcatga

SEQ ID NO: 9577 - DNA, 708 bp, Glycine max
  Clone ID: PAT_MRT3847_108658C.1
ctccctcgtaaccaaaagccatttccaactcaaaaaacatggctccttttcctcttatgtgcttcgttattttgctcctatcctccactgtttcagtcacagccaccgccacccaaacaaccttaacagtgggaaaactcgaccaagttccacacataatgtgcaaggagtgcgagcttccacccccaccccctaaagagtgtcctccgccgccgataccactagcacctccaccaccgttaccaccatcacctccaccaccgttaccaccatcacctccaccaccgttaccaccatcacctccgccacccttaccgccacctataccgctatctcctccgccacccttaccgccatctcctccgccacccttaccgccatctccttcgccgccaaatctaccatcaccaccaccactggctccaccaccaccattaccaccacttgcaccaccaccaccaccgctacccccattgccgatcccaccaaacggacccggcgaatacctagtgccaccaccgcgcgatccgaacctgccagatcttgacgatctcaacggtgcaaagattattaatccactgctatgcttttcaaacactagttacttctcgttgcactccttcactcttctggtccttctttgcctcccctattactttttcatgtgatacatgcatatatataaataatagaatgcattgtttcggt

SEQ ID NO: 9578 - DNA, 488 bp, Glycine max
  unsure (1)..(488): unsure at all n locations
  Clone ID: PAT_MRT3847_108659C.1
tcggttttgcggctcgggntnccggggggggctcctcacgatgccgccctgctgtcgctccccgctcccntccaccgctccactggctggtncaggatcgtgcccgccgagctgctcgggaagctcgtccggggaatccccccgggtcccggttatctccttccgtgtctcaccgcatctggctggggccctgtgaatcctacgatgtcaagggtccctgttccgaggccaaccctaatgttgactcgtctagctgggttttgtgcaccggggttcacttggaaaccctgctgttgaaaaccgttgagctttgtgcaatgacactgtggcctagcccgctgctttgggctcccgggcggagatggctgtccaagcgattctgttcaatggaccctgttccggtgccagtgatttggcaacggcgtgctgctatctccttggcttgttcgacggcgggaccttggacttgcctgagtcccgccctgcgt

SEQ ID NO: 9579 - DNA, 264 bp, Glycine max
  Clone ID: PAT_MRT3847_10865C.1
gcttcgcgatcgctcacgcgtccggataaaccgcgatcatggggtgtctaaccttacaaccggtaacaaaagcaatcgttacttgattccaaaaatctttgagttctgttcctacttgggggagaacaacactctctgggctggacaatcactctctgagctggccacagactccttgaatgattttctgttgcaaccttagctatatttgctgaacactctcctattagatataggacttctggtcagatttcaacttcttgt

SEQ ID NO: 9580 - DNA, 388 bp, Glycine max
  Clone ID: PAT_MRT3847_108660C.1
ccccaaacatttttttttttttttttttaaaaggcaaccatgaccttaacacacccattaaaagtccaaaaaacttgaacttgttaaagggcaaaaaatgaccactttattttaagggggtttgtttaaacacaaaacacccgagggcaacaaaatacaaactacataattttgaaggtttgaaactacaaataggttttataattatttttaagggccatttttgtttgaagctttagctttccaacaccttacttgcaagggcaggggttgcaagtccaattagctccacatttggagccattgttttcagggggaacccccatttaagcactttcgaattgagccttaactggggccactcccatgaacaaaggcttgggggggg

SEQ ID NO: 9581 - DNA, 413 bp, Glycine max
  Clone ID: PAT_MRT3847_108661C.1
cccacgcgttcgcccacgcgtccgcccacacgttcgtccacacgttcgtaccggtgtgagaggacacacacaaagggaattatgttatcactaaagacctcaatccaattatgcctcactagtttctacattttgacttaaaataaaaatattttaaggaacgattggataatgaatcaactaaataattatccataagtaattgatccaaatgaaattaaggaaccattgtaacaattattttatgataaatatagtgatacacttaaatttgttataagtaggataagagaatgtagctaagattagtcttttgtttataaataaaatacgaattcaccgcgtttattattagtattcttatctcttacaagggtgaaatcttgttttggactatgttaagaatatcatat

SEQ ID NO: 9582 - DNA, 258 bp, Glycine max
  Clone ID: PAT_MRT3847_108662C.1
tccactctttcgcttctcttgagagagctgggaacggggaaatgcatgtagctgatatactactgcgtgttccaacttatttatctttaagacaaaggaaaacaaacccccaaagctcatcaatgaaaggctaataacggaactactagtaacgcgaggccccactagccaaaaaaccttacctggcgtcctaaaaatagcacccaccctacagacgggaaaagctggcaccctgacacctgctaaagtatcataaac

SEQ ID NO: 9583 - DNA, 312 bp, Glycine max
  Clone ID: PAT_MRT3847_108663C.1
ggctcgagctcgagccgaaaaaaaaaagtgtgtatattgtgctccacatgatgaataaaaaaaaatcactgtgtgtgtgtgaaaaaaaaaaacacaaaaaacaaaaaaaaaaaaaaaaaacccaaaaaacaaaaaaactagaacatactctcaagatccaaaaccaaaacggctggccgacccctaagagattacgccacccgcgatttacatagcaacggtagcttagtaggaggccacttttctgtttccttaaccccattgatcatccgagaatgcgaggctattccgctaacagtgacaaaaccttta

SEQ ID NO: 9584 - DNA, 271 bp, Glycine max
  Clone ID: PAT_MRT3847_108664C.1
attcttttttttaggccatttttaacataacagtcataataaaaatggaggtttggggctatattaaataaaccggaatggtggggcagtccatgggaatttcagaccggaaccggcaggcgttttattacataaccagaagaggtaaaatgaaaggcggaagttatcagggaaatagaatggccctgtgtaaaaggaaggcgggctaagcaagcaaaagaagctattgacgggagggaataaagggaaaaggcgggggggccaaaggggg

SEQ ID NO: 9585 - DNA, 475 bp, Glycine max
  Clone ID: PAT_MRT3847_108665C.1
acgaggaaaaggaattggttcaaaaaagggggaacatccccccaaaatccaacaaaaataagaggaaaattttaagacccacaaatggcccggggggacaaaagttttttttaatacaggggaaaggaaatttttcccccccatcaaaacaaaggtaatctaaatccacaattcatattttaatttttaaaccaaatctggaaacttttttacaatttgcccccccttaaaaaaaaacagggggattttattaaaaacccggtctttaaaagggggggcttgcaaggggttttaaatagcaaccagacaaccattttttgtttttcaactaagggcgggccccataagggagaggaattcagcctttccctaggggttttggtttaaggttaattgaacctttgcaagggtttgggtaatacccccggtaataatttgacaaacccaaaaaaggttaacttcccatcccgggggg

SEQ ID NO: 9586 - DNA, 278 bp, Glycine max
  Clone ID: PAT_MRT3847_108666C.1
ccaagaccaacatggtcatggtctttggagagatcacaatcaaggccaacgtagactatgacaagattggccgtgacacatgccgcgaaattggattcatctctgatgatgttggtcttgatgctgacaaatgcaaggtgtgggtcaacattgagcagcaaagccctgatatcgcccagggtgtgcgcgggcacttcatcaagcgcccaaaggaggctggtgctggtgaccagagtcacatgtttggctatgccactgatgaaacccctgagtacatg

SEQ ID NO: 9587 - DNA, 378 bp, Glycine max
  Clone ID: PAT_MRT3847_108667C.1
aagaaatggggaaagaatattaggggaagggcccaaaaaaaacaatgaaccacaaacaaaaaatacacaataccccaagaaccaaaaactggcctaagggcaaaaacaatacggacccttccagggccctcaacacacaaatccaccactacgacacatgcaagccaaggcctgaaaggtccaaaagggcaaccaaaactaaatcacagggccgaccctaacaaacagaccaacgggcaaaaccaggcgtggcccaaacaaaatcccccgggcgaacaaccccgtcaaacagttgggccacaaaggaaaaaggccgaacccggcaccccaaccaaagaaatttccaaccgaaaggtcaaaggcaaccgccccggacac

SEQ ID NO: 9588 - DNA, 208 bp, Glycine max
  Clone ID: PAT_MRT3847_108668C.1
gttaggaaaaaaaaagaattgtagatgatatcataagcaaattttcggccagacacttataaattattgtgggggaaaacaagatgttctcaggggggtttatttttttattcgaaatgaacccccattgggggcttttaaaaaaacaataatattgtccaacattattgatccacccttgaggattacaacaaaatgggggggtaaa

SEQ ID NO: 9589 - DNA, 263 bp, Glycine max
  Clone ID: PAT_MRT3847_108669C.1
gtgaaaccctaactcacatcgaatcgactacgagtgtgccgagcttctgcgaaatcagttttctacagtgggaacgaaaaagacagaggatgatggaccatctgataaggtcaaagatagtagcaaagatcctcggaagaaggaaaaaatttctgtctctgccatgctggccagtatggatcaaaagcctgataaacctaaaaaagtctcttcttcctccagtaagccgaagcccaaatctgctccaaaagcttccacataca

SEQ ID NO: 9590 - DNA, 325 bp, Glycine max
  unsure (1)..(325): unsure at all n locations
  Clone ID: PAT_MRT3847_10866C.1
aaccaactcaacccacagcnccaaaccgcaggcacacgagggaaaaccccctacgccccagaagacagagccancacaaaaccgaaagcgggaccccacaactcacgcagcgacagacaaaaagaggaaccacaacaacaccacacactcgcagccaacaaggacagcgcaaacagcgacacacncaccaaccccngacagacacaggccggagacgaccccaagcggcaccagcccaacgacaccacggcaaggcggcagccaagagagcangagcaccggcaccgacaacgccggcggcaccggaccagacacacggacaaca

SEQ ID NO: 9591 - DNA, 229 bp, Glycine max
  Clone ID: PAT_MRT3847_108670C.1
gttgtcccagggtgaacactatggttcattatgagtgtatgaccaacactgcctgttgaaactaccacattccatccatcgacaacttcaggcagtgtatgttcacacaataaaactgaacctaactgttgtcccagggtgaccaatgtgcaatatgccgtaaagattcagaatatcactgtaaattagtacgatgacatgtatcaaagatggattataccatcggcct

SEQ ID NO: 9592 - DNA, 250 bp, Glycine max
  Clone ID: PAT_MRT3847_108671C.1
agcaagacgacagaaggggttgtgataaactataccaagtacaagaagaaaaatatatcatttggggatcttgtttgggttgaagaaggtggaacacacactgttaggaggcgcattgtactggcaccaaatggaattgtatgagttgtactttgacttttttactccttgatggagcccccacaacaataaataatttgatcgtgaagcgaaaaaacccaaatccccctcaaaaaagaaagcggccgct

SEQ ID NO: 9593 - DNA, 1566 bp, Glycine max
  Clone ID: PAT_MRT3847_108672C.1
gtgaccagcaagatccttccagaaccatctgttcttgagattgtttttatgcaacattaaacttttgctttcattgtaatggaatttgtccagctaacattttgttaacttgagtttcaacaactgcactttatccctgtagctgggcaagaggtgtaagtccacccatcctaatattttggagcttgaggttaattcctcataatataataaacaggtgatttacatctgaccactgagatgctcaatcagttagagcttcaagttgatggtggtttcaatcagaatctgaattcaaagactttgtctgctcccaatctcagtgcaatggactaccctgcacttacttcaccagatggccagactgcttcagtagaatatgtggttgataatgtgcaacaaagtggcaatccttaccgatcatatgacagtgatgtgctgcttttcaaatctgtctcttcagtttcatctaggggtggtgctattgactttgcttcagctgttaggaagttggcttctcgggattctggtggtatttggaagtatgataaaaatggctctggtgatgctgctatcggctcaagtaggaattcgaatgttctggctagtggttacaatggtggacaggggagagcacactttggtgatcggttacagaaccgtggttcagctcgggcatttcctgtttggcttgaaactggtgatgcagttgcaaatatgtattcagagttgcgggaagaggctcgtgatcatgcatgcttacgtaatgcatattttgagcaggcacagcaagcctaccttattggcaacaaagcccttgcaaaggagctaagtgttaaagggcaactgcacaacatgcatatgaaggcagctcatggaaaagctcaagaatccatttacctccagagttgctccagagttgcagggcgatggaagaggaaatgagaggataatagacctacacgggttgcacgtaagtgaagcgattcacgtgctgaaacatgagttgagtgtgctgaaaagcactgccatagctgccgagcagcgtctgcaggtttatattcttgtgggcacaggtcatcataccaggggttctcgcactcctgcaagacttccaatagctgtacagcgttttcttcttgaagagggcattgacttcacggaaactcagccaggcctacttcgtgttgtgatatattgaacttgccaaggatgtgttttttgacacagtataaagtccaccaacactgggatattttactcatcgatgtatctgtatatgcccgaagaacaggaaaagaaaagaagaaaaaatcagttaggggagaaggaaagataaggttttgtagcagaattgtatcattaaggtttaggggcggcatcagatttacatttagtaagcaggatttctcatctgcccatgttatgggatcattttccttctgttaattttgtaccctaattttcatttttttgattcagatgtaattgatagaactcaattacgccatagaacaattgattttgcaaattagattcaatgtcaaacaatttatatctcacaac

SEQ ID NO: 9594 - DNA, 1555 bp, Glycine max
  Clone ID: PAT_MRT3847_108673C.1
ttctgctcgggcagctcctgtttggcttgaaactggtgacgcagttggtaaatatttatgtttatacgcttgaactgtgagatgaattctttctataccgtgtttcctttaacaattttgaatggcaggcaaatatgtattcagagttgcgggaagaggctcgtgatcatgcatgcttacgtaatgcatattttgagcaggcacagcaagcctatcttattggtaataaagccctagcaaaggaactaagtgctaaagggcaactgcacaacatgcatatgaaggttgctcatggaaaagctcaagaatccatttacctccagaggtttgttgttccccaatgctttgattcctgctctccatgtaagtttggaataaaaaaagtttatatggcatcatgatgttatcatattttgctggcccccacaacctgtgtatatttattgacatgaaagaattccttttgtttggtgagctggttctaccccttttgattgtaaacatatttttgcttgtttcctccttaaatattttttatgccaattacttgtcattgagaaggacaatgattgtctctcgcctattcaagaggtgtgaacaattcgaacccttcaaatagaattttgtgatgccaatttgttatccgtttgcttctaaagaaaactgtatgaagcttgagtttattttaactccatggagaacatatactgcactaagttgctgcagctcttcctttttctttgtcacatgtacaggctgcctaactgtttatttctggaatgattaccgagtcctatactcccatgccatatcactgtatgaaccagaatgtttatttacattgtttgttgggttctgcctcagtcattgcaagtgttgcttttttcagaaatccagttgctccagaggtgcagggcaatggaagaggaaatgagaggatagtagacctacatgggttgcacgcaagtgaagccattcatgtgctgaaacatgagttgagtgtgctgaaaagcactgccatagctgccgagcagcgtttgcaggtttatattcttgtggggacaggtcatcataccaggggttctcgcactcctgcgagacttccaatagctgtacagcgttttcttcttgaagagggcattgacttcacggaaactcagccaggcctacttcgtgttgtgatatattgaacttgccaaggatgtgttttttgacacagtataaagtccaccaacactgggatattttactcatcgatgtatctgtatatgcccgaagaacaggaaaagaaaagaagaaaaaatcagttaggggagaaggaaagataaggttttgtagcagaattgtatcattaaggtttaggggcggcatcagatttacatttagtaagcaggatttctcatctgcccatgttatgggatcattttccttctgttaattttgtaccctaattttcatttttttgattcagatgtaattgatagaactcaattacgccatagaacaattgattttgcaaattagattcaatgtcaaacaatttatatctcacaac

SEQ ID NO: 9595 - DNA, 859 bp, Glycine max
  unsure (1)..(859): unsure at all n locations
  Clone ID: PAT_MRT3847_108674C.1
gtgacaacagataatgttgaagagggtgagatcatcttataagaagacagagtcctctcaaaactagcagactgtttcttataagaggggaggaaatgtgacaacagataatgttgaagagggtgagatcatcttagaggatgatgaatctttaaatgtaagcacagtgataaacatgcaaacacctgagcaacaaagacatgttctgaggatgctagagaaatctttagcaaatgaaatagatcttgagaagaatttcatcgactcaaggcaaattgaagaaaagctaaaacaaaagatggtttctttagaacaagagctaattctcatggaggaagaagcaactgatgcttgtgagagatggcttgaggcagataatgcaagtgagatactgacgggaatttcaaaacaactgttgggtagacttcagatttcccagttcaatttgaatggtttaagtcagcgtgaatctgaactcagaactaagcttgaaacttgtatagaacaattgaaagagaaggatgttgtttcggacaagattgaacaattgaatgataaactaattcttgccaattctcaggttgttgctttaagcgtcgaggtgtgttcacttgagaagcagctaaaagaatctgaatgccaggtactgaatgtgaaggcttctgctgatgaatatcagaaacagtataatattctgtgttctgaagtgagagacatgngaagaagttattggttgaattgaaagaaaatggtatctaatnggcggaaagtcggggctaatactgcagaatctctgtgtaagttattgacagagactaacgatgaactcaaccagcagttggctcttttgaaagatggg

SEQ ID NO: 9596 - DNA, 360 bp, Glycine max
  Clone ID: PAT_MRT3847_108675C.1
gttagttgttgtaactcgttcttatttttttgttggtttccgtaagcgtttgttttttctctgaactgaaaatgtctgggtgcggtggtaactgtggttacagaagctcctgaaagtgcggcaactgttgaagaggctgaacgatgtacctatactggatctacactgagtaatccatcaccacaaccttggtgatgggagtggcacctgttaatgctcaatttgaaggtgctgaaatgactgtgccgcatgagaacaatagctgcaaatgtggaccaaactgatgctgcaaaccttgcacttgcaagtgaggtgatgcgagagcaagcttcaagcagatattgccattaattaagaata

SEQ ID NO: 9597 - DNA, 552 bp, Glycine max
  Clone ID: PAT_MRT3847_108676C.1
aaatattatagttaaaaaagaggtaaaaaaaaaaacaaaagaaaaaaaaaaaagaaaaaaaaaaaaaaaaaaaaaaaaaaaaaaaaaaaaaaaaaaaaaaaaagaaaaaaaacgaaaaaaaaaaaaaaaaacaaaaaaaacaaaaaaaaaaaaaaaaaaaaaaaaaaaaaaaaaaaaaaaaaaaaaaaaaaaaaaaaaaaaaagggaagaaggaccggaaccggcaagggaaaccgcgaaaggaacagggagccgaaaaaggaaaagaaaaaaagatagaaaaaaaagaggggaaaaacaattgcaaaaacaaattgataaaaaaacaaaacaccaaaaaaaaaaacaacaaaaaaaagaagccaaaaaaaacgaggggaaaaacgaaaaaaaaaaagggggcaaacaaagaaggggaaacgggcaaggcaccaggggggaaaaccaagccaaaaaaacgactaaaaaaatttacaaacccaccggacaagagaatgggacaaccggcacgaagaacggtatactgaatagcaccgaaaggggcaaattcaa

SEQ ID NO: 9598 - DNA, 229 bp, Glycine max
  Clone ID: PAT_MRT3847_108677C.1
gaaaaaggcagaccatacttgttgcgagtaagatcatgaatacagtggaatttatggggctgtcgcagttactggtgctgctgatgggatgttgtgggtctgctactgctgctgatgacttgccaaccaaatgttctgcggtgattcactaatgtaagacagtgtccgaacttcgctacggagaatgaccaaatgcccttcaacgcaagttgcgacgccgccatcgcca

SEQ ID NO: 9599 - DNA, 359 bp, Glycine max
  Clone ID: PAT_MRT3847_108678C.1
atcttaaaaacggaaagaacatgggcgggcttcaatttaatgggcgactattactcgcaacacgctatcaaattttgaactagggccaacctccttaaactgtataattgctgcttgaccccttgtatatgtaacgccccataaaaaaaaccactgactggaaaagtgcctctctagtttgaaacaccataagccttcgaaggacggcgcgattctagtcttgattggcggtgccaaaaagctaactatcctgatcttggtcatttaacccgttggaagccacccacttctccccatttataacggggcatctcccatggagcgatggcggatcactctctcctttaccatagcctttc

SEQ ID NO: 9600 - DNA, 294 bp, Glycine max
  unsure (1)..(294): unsure at all n locations
  Clone ID: PAT_MRT3847_108679C.1
cgataatcccaacactttccaaaacttcatccatcaacatactgaanctaanactgggcgaggttttatatactggtgaagcacactctaacattcctcctnttaaacacgctaatacaaatactaagggtagcaacatctaagaagccgattaaacctaccttaacttcctactacctttttataaacaatgattacataaacacactttttactatcgtttattacaactgaattatccaaattacccaacctttactaattatattccccatgcaatacattctctattgt

SEQ ID NO: 9601 - DNA, 373 bp, Glycine max
  Clone ID: PAT_MRT3847_10867C.1
cggacgtccttcatttttctttgtatccgggtactactgtgcggcggctgttcttgctctgttcatcgctatcctcgctttaaacatcatggggttgttcatccagaagaattacttggaggtggatggcccgactgacttgctgactggtggctccactgacatggtccgtagcatggccaagatcttatcacacaagggagcacatatcgtgattgtttcgaggaaccacactcatctagctcaaacactctctggtgtcagcgctgcatccaacgatcccgccaaacagcttttcaccaccatctccaacgactaaagcatccctgatgagaatgtacatatcttgacataaacaaccgcttgccacaat

SEQ ID NO: 9602 - DNA, 405 bp, Glycine max
  unsure (1)..(405): unsure at all n locations
  Clone ID: PAT_MRT3847_108681C.1
aaaaaagggtncttgggccaattaangccnaaanngggcccggntttaaacngggttaaaaaggcctttcccgggggaaaaatttcccgngggcnttccnggaaggaggcnatttnanccccnaattccctgggggttaaatnggaattctnggaaaagaaaantnccangttaagttcaaggtancattaacanttnaactagtcgtgtgagagnatnnttnaacattgaacctntcaactttagatcccanggtaaangnggggtcttttcaanntgtaanangggnaancttgnttnatntaaggnnngttcaatttgnnganganttnnngangttggnggggtctggaaaaggctntgnattnatgggggnanccggtnggaaanaatgtgtgnnatanc

SEQ ID NO: 9603 - DNA, 163 bp, Glycine max
  Clone ID: PAT_MRT3847_108682C.1
ggctatgataaatcccaatgcaccatgtactttttccttacacaaacaaacgaccggctgatctctttggctgcaaagtatgcttctgaatccaacttcttggaactcaagctgtctaaccaaaaagcgcgtgtgggggacttccatctcccaagatccaaaa

SEQ ID NO: 9604 - DNA, 1076 bp, Glycine max
  Clone ID: PAT_MRT3847_108683C.1
ccacgcgtccggtcctataacgcaaagatatagattttggcttggcaaaactgggtccttcagctagtcaatcccatgtgacaacaagggtgatgggcacacacgggtatgcagctcctgaatatgtggccacaggtaatgtcacgctgttctaattgtagtgcatgtgcttatttggtaaaactgatttttttcttctgttttcaaaaccatgtcagtaatttttgaattataagctatgttaaatacaaaataacccaattgaaacgtgaatttaaagcttgtgatgatattttgtccagctgattttgtcatgttcaagtattctttttttctttttgtggggtgtggctggaaatttaaattgattattaaagtagtggacattgaaattttgttggattattacgtagggcatctatacgtaaagagtgatgtatacgggtttggagttgttttggtggaaatactaacaggcctacgagcacttgatagcaaccgtccaagtgggcaacacaaactaacagagtgggtgaaaccctacctgcatgacagaagaaaattgaagggcattatggattctcgattagaaggaaaatttccatccaaagctgcattccgtatagctcagctttctatgaaatgtcttgcatctgaggcccaaacatcgggcataaatgaaggacgttttggagaatttggagcgaattttatctgccaataaaaaacctgtggagcctaaattccgttttattcatgccgccagctgtaaaggtcaccaggttgtgcatcatcgttttccacgtcaggatggtagtaattagtttctcttaaaaaaattaatcccgttggttggttgtgttatctgtctctccgttgaaaagtttgcctgttgttcattatgtattttttggactaacagatttgtatgggtaagtcatgtattagtattgtaaagtgtaaattattatttgtgttgtgataaacaaatggaccgccctttagtacaacattatcaggtaagtgtttgcaaaaaaaaaaaaaaaaaaaaaaaaaaaaaccgcccgctctatgtt

SEQ ID NO: 9605 - DNA, 691 bp, Glycine max
  Clone ID: PAT_MRT3847_108685C.1
tacggctgcgagaagacgacagaagggggatcacaacacaagtattcaaaatatctctatatattccctccatttctgagaatggcgaaggctgcggagaagaagccagcggctgagaagtctccggcggagaagaagcctaaggcagagaaaaagattccgaaggaaggcggtggcgagaagaagaagaagaggtcgaagaagagcgtggagacctacaagatctatatcttcaaggtgctgaagcaggtacaccctgacatcggtatttctagcaaggccatggggatcatgaacagcttcatcaacgacatcttcgagaagctcgcgcaggaagcggcgcgtctcgccaggtacaacaagaagcctactattacctccagggagattcagaccgcggtcaggttggtgctgcccggggagcttgccaagcacgccgtttctgaaggaaccaaagccgttaccaagttcactagctcttagagttagggttttttttttttttttttttttctgtaaagctaagtcgtatagctagtggcttcttttcggattctatatgcctatgaatttgtgattctattagtcccgatgaaaatttatattcagagtaatcgataaaaccaaaaataatcgatttgacaagtgaataatactcgcgttgcaggaaaaaaaaaaaaaaaaacttgag

SEQ ID NO: 9606 - DNA, 396 bp, Glycine max
  Clone ID: PAT_MRT3847_108686C.1
aggggagcggtaaaatcgcttaaaagccaaaaacccctttgcaatttaacgtatttcctaacggccttcaccgaatataattacaaaagaccggattaaaaaggccacacgcaccccagggtccacccgcaaaaaacggaccggccccggcaagtaaacaaaattcccaaacacagaattggaaaaaaactcgccgcacacatggccaaagatgaacccggaaagaaaaaggaaaccgttaacaaatccacaccccaggccagcccgaaggataaacaggaaaacccgggggggctaatgggggggccaacccccatccaaaggggggggcccactacccccttgccaaacgagaaacccaaacagcccccagcgcaaaaagaaacccccaacccc

SEQ ID NO: 9607 - DNA, 477 bp, Glycine max
  unsure (1)..(477): unsure at all n locations
  Clone ID: PAT_MRT3847_108687C.1
ccggaccggaaccgcagggacgtcccactcccacgcttgggatcgagagcacgacaacaggggaaagggagaggcaaaaaaggaaacccaagctcgacaggacaaacaaaaacaagacggacgaagagcaccaacacaagcacaaggcagacgccggagccaccaaaaccaacccacagcaagccgggaccaagcgcaagaacggcnacaacgacaacaaaggacgcccccgcaaggcggcggaagaaacgacgcccaaaacnggaaagcacggacacgccaagagccacaaagacggaaaagaaacgaacacagccaagaaacaagacgacaacgcgcccnccaaccacaaccgagacgaaccacaggagaaacgaacagacaaccaacccanngacagagacgaggaaggaaacaagaggcagacaaccgaaaaagggaacaccaaggacgaacccaagcacccaccgaggagag

SEQ ID NO: 9608 - DNA, 180 bp, Glycine max
  Clone ID: PAT_MRT3847_108688C.1
cgaaagggaaagccgccacccgggaccggaccggaccggaagagccgacccgacccacgcgctcttacatttaaagcccgttaatagaaatgcacagaggcgtgtacaaacgatcgaatgaaagcacctcaacacaagggatgagcaccaaaacataccaagagcaacgttaaaccccat

SEQ ID NO: 9609 - DNA, 235 bp, Glycine max
  Clone ID: PAT_MRT3847_108689C.1
gctcacgacattcgcgctcaaactcgagacgcttctctgcgagactctggatctgtccatattggtcaccggcctgtcactgagattttctgctgcgggggaacggcagaataatggccttgttatgaacttctacaaggaatcatgcactcaggctgaagctctcatcacagaatcagtcaagcttccctacaagcgcaacaagcacagtgtttccccgtggttccggaacatg

SEQ ID NO: 9610 - DNA, 591 bp, Glycine max
  Clone ID: PAT_MRT3847_10868C.1
gaattccagctctgtacccggggatcctctagagtcgacctgcagagtgagctttttctcctttgtgtacagttctattcatgaatcttctctttctgtgcactttcttgctataatataatccgaaggtcttagactgtaaagatgaagagataataatacatttgttacttcagtatataatatatacagatttagttcataatttttagtattttttgttctgattaccacctattgaagtttttctgactggctagttctacactccaggtaatgggacatgaaaatagaagctctataaaacaagttgctaaagatttaatcaatgaagatggttggagaggcttttatagagggtttggtccaagattttttagcatgtcagcatggggtacttcaatgatattgacttatgagtatctgagtaagaactcttcctctctgattacattttctttaagtgtatgcgcacttgtgtttatgtttattattcgtttatgttttcttgctactgacaagcaaatattctagtaattgttcagcttaaactaacatataatattagatttaattagctatggcctgaca

SEQ ID NO: 9611 - DNA, 179 bp, Glycine max
  Clone ID: PAT_MRT3847_108690C.1
ggagttgaaacatataactgtgggggggtcattgggtgttgccactcttctctcttgttgtacacttgttccttttggttttgagaaagggacatggaagctgggtgtgctttttctgttggctcacttctcataccaacagcgcatgaaacatcaaactcctttaggaaatccatatt

SEQ ID NO: 9612 - DNA, 646 bp, Glycine max
  Clone ID: PAT_MRT3847_108691C.1
ggtgttggagatttcttctcggtgaaagggtgttggagcaagagaagaaatccagttccagagattttctctatttgaggtggggagcaattttggctttatgcggtaacccttagctcccttgaaaagtttttttctgcttgcttgtgttgagtgtttaagtgggattgctgcaaaattcccttgctgatttacatcgtgttgtgatgctctatgatccgtgcatgtgttcctttgtgggttacttgagtcatggagtccgattggtgttcagattttcaagtagattaaattttgctaggtttgattaagaatgaccaagttgtactgctcaaaaaaacaaaaaacaaaaaaatggctagctgtcggttttgcacagtatagggatgaattgccagagagagagagagacagagagagactgggggcatttaatctgagcgttacttgctgaagcttggcaaggtcttcccacgtttccggtggctactctctaccactttgtcttgctctgcattgtggttactccctattatatgatggcaattatctaattggcaaatatgtgttccattacaaattccaaaacagtcgtagtgatctaaagatttgatattgaagatctaatattgcactgcctcgcctg

SEQ ID NO: 9613 - DNA, 238 bp, Glycine max
  Clone ID: PAT_MRT3847_108692C.1
tgcaccaatcaacgatgggactactggaacagttatagtgctcacaactccagatgcacagcgctcgatgcttgcatatcatggcacatcatcatctgcaaactatgatgcatcacgtactaatgcgatgtaccagaccaacatacttcggctccggaaggcatctatttgaacttactgattccctgaaacaatcacctaatcatgtgagaagtcacggcgcacggctccttgggtg

SEQ ID NO: 9614 - DNA, 301 bp, Glycine max
  unsure (1)..(301): unsure at all n locations
  Clone ID: PAT_MRT3847_108693C.1
gacggttcacgagattgctgcgagctataacctatgttatcgtgcggcgaatatgaactggtgcgatatcactgctgctggattcggtttggtaacatcgacataccatgcngcatgctaccgacggttccctctacgaatgaaaactgactacggagagctgcctttgcaagtagactgcgcaaggtttaggcttgctgtggaagcacacagcatccgatcctttaagaccattccatgggactgcgttgaaccaacaacggactgcattaatggcaaacaatatagatcatactctaat

SEQ ID NO: 9615 - DNA, 187 bp, Glycine max
  Clone ID: PAT_MRT3847_108694C.1
agattattcttttcctgtagccgacaatgtgagggagtatatgaacgacccaagtaaatttgaccgagccaccgatgctgctcctgctgctgcatcatgtgctccaaccgctgcatcctaggacgatgaatagatagaagaaccatctgaagagtctgacgatgacatgggtgtcagtctgtatgac

SEQ ID NO: 9616 - DNA, 221 bp, Glycine max
  Clone ID: PAT_MRT3847_108695C.1
aggatagagagaggagaagagaagagaaaaattaagatggaggggaaggagtaggatgtgtagctgggagagaacaagattgaggagagagagtagattgggatggaggagagatggaagaagatggtaaggactactaggagcaggagcaggagctagtggttgaaaagatggagtttatgtgatggtggttttacagagtagggatagaagagtttgtg

SEQ ID NO: 9617 - DNA, 868 bp, Glycine max
  Clone ID: PAT_MRT3847_108696C.1
gtcttgggggggggggggggggtaagcagaaaagcaggcgtgagaagaggcgatagaggtgggacacggcagttgatgccgaaaagggataatgaagcttagtaagagggaagaggcaattgggcgaacgcagaaaatcgtaggacgcataggccttctactttggcaaaaggcacgatgtagataagcctactgcttggggggggggggggggtacggcaaatgaaggcagggagaagaggttcgtatacggattcggtagcagaaaacgagaacaaaagagatgaaagctagctgaccagatggtagcacacgacaagaggtgagagaagaagctatactgttcagcaggaggggataggcactcgagtgcgctgtcaatcgagaggatcctggatgtgagaagctatataatgttctgtcacttcaaggttcactggatcgatctcgctagctcatcgtagactgtggtgagacgcgtattgaaaggtaaggtatgccttcgtcggggataatcgtcgcatgcccaaaatttgcctcggatttaatggaagtcttggctactatagtttttgggtcttactgcctcgaagactcaacacctttctattcagtctttggtttaatacggctctacttgcaagcctcaagcccatctctttgcggagtcctctaggaaatcgtccacccgcgccgccgggactctagcgcattgtgatatggcttaatctttgagtcttcgtgttgggtctgggtggtttggttgggtgtcttatcggtctctctgggttttcgtgcgtgtgaaagtccccgtgtttgggacccggttcagggaacgtgggatcgtattgtcattttaaaaatggca

SEQ ID NO: 9618 - DNA, 990 bp, Glycine max
  Clone ID: PAT_MRT3847_108697C.1
gaaggtttcccgtcatcactgtatgacgtcctccttctttgggggggggggggccgtagcacagggagccgggccggcgcgggagactaggtggccagagccagtagcgattggcaatgtgacaaggagtgcaaaagtgggcgggtgtgcgagcggagccatgcgctaatgggatatgtaagccgaggcgaggagccgtggtataaagtataaggcataagataggatggcaaaaaaaaaaaacagtgctacatggaagagaaaagaaaaaaaaagggggggggggggggggggggggggggaaagaaaacaaaaaaaaaagtgcgaaaggaaaagaaacgcccaaactatacagtggcgagcagtggggcacagaaactgaaatcagggcgataaaactaacagaatccgaataaaatggtgagcagtcggtattcacaaattacgaaaggctgttttgtcacttcaaggttcatgggatcgatctcgctagctcatcgtagactgtggtgagacgcgtattgaaaggtaaggtatgccttcgtcggggataatcgtcgcatgcccaaaatttgcctcggatttaatggaagtcttggctactatagtttttgggtcttactgcctcgaagactcaacacctttctattcagtctttggtttaatacggctctacttgcaagcctcaagcccatctctttgcgactcctctaggaactctcctcccgcgccgccggatctctactcgcattctgatatggcttactctttgactctttctgttgggtctgggtggtttggttgggtgtcttatcggtcttcctgggttttcgtaactgtgaaagtccccctgtttgggaaccggttcagggacgctgggatcctattgtcattttaaaaaatggcaggacccgcagccggtatcgacgcccttagtctttgcagacatccgggggtctttggacatcggccacgttatcggtggaagac

SEQ ID NO: 9619 - DNA, 358 bp, Glycine max
  Clone ID: PAT_MRT3847_108698C.1
gggacaacaaaaagataacattaataacaattaacaaacggccggtgtctaaaaacaccgccgttacgggcctattttttttgatccaccccttctttctttatgctctttcaccggggaaggatgtggtgggaacatcaacaatctcttcttgctaaagcaacttctttcatctcttcttgttagcttcaacacaatccataacccacaacaataagcccgcgctttacctttctctctctataactccttaaggcaagtaagaaaatggggagccttataaaggggaacaatgacctaaacctggtttaaaacaataattacacataaaactttaaaccctttaaaggttaaaagt

SEQ ID NO: 9620 - DNA, 818 bp, Glycine max
  Clone ID: PAT_MRT3847_108699C.1
gagagagagattagaatcggcggctacccgaaggttcaggaaacatttgctagagtatcaggttactgtgaacaaaatgacatacattctccaaatataacagtagaagaatctgtgatgttttctgcttggcttcggcttccttctcaaattgatgcaaaaactaaagctgaatttgtaaatgaagtcattcatactattgagcttgatggaatcaaagattctttagtaggcatgccgaatattagtggtttatcgactgaacaaagaaaacggctgaccatagccgttgagcttgttgctaatccttcaatcatatttatggatgaaccgactacaggtctagatgcaagggcagctgcagttgtaatgagagcagtgaagaatgttgttggaactggaagaactgttgcatgcaccattcaccagccaagtattgatatatttgaggcatttgatgagcttattctcatgaaagctggaggtcgcttaacctacgctggcccacttgggaagcactcaagtagggtcattgaatactttgagagtataccaggagtgccaaagattaaagacaactataatccatcaacatggatgctagaagttacttcaagatctgcagaagctgaactcaaatagacttcgcccaaatttatagggagtcaaccttatatgaacagaacaaagagttagttgagcaattaagctcaccacctccaaactccagagatttatattttccatctcattttccacaaaatggttgggaacagtttaaagcatgcttgtggaaacaacatttgtgctattggaga

SEQ ID NO: 9621 - DNA, 339 bp, Glycine max
  unsure (1)..(339): unsure at all n locations
  Clone ID: PAT_MRT3847_10869C.1
aaaaatattaactccctctcttttctttttttctacaatatttttcttatcatttccataccattacgcaggctaccaaatcttccctctcctaataaaaactatctattttaagccttcttcttatataaaatgctcacactttangctttcttttgaatcacacaacattctaacctttaaaaccattccttaatatttcctttaaccaacaaaatactacattaatttctaacaatttacatcatactcttaaacagttaaccaacaaactttcttttattctaattaactcgaattccatcacaactacatatttatattcttcatatataacac

SEQ ID NO: 9622 - DNA, 1207 bp, Glycine max
  Clone ID: PAT_MRT3847_1086C.1
gatttgccatggtagcctgttttagaactgtttctttaatttcagtgttgatagtatggataatagggaagaaaaggatcaatccaggtggagacactgacaaggttgaactggagtaaattcctgtcagctcttacagtggagttcatcctgaggttgacaaagaggctagcctagtggtattgttcccaaataaaacatatgaaatcaaggaccttaccatatttgaaatattaaaggccactgaaaatttcagtcaggcaaacataataggatgtgggggttttggtttggtttataaagcaacgttaccaaatggaactacagtggccatcaagaaactttcaggagatttgggtcttatggaaagggaatttaaagcagaggtggaggctttgtccacagcacagcatgaaaatctggttgcattgcaaggctattgtgtgcatgagggtgttcggcttctcatatatacttacatggaaaatggaagtctggattactggttgcatgaaaaggctgatggtccatctcaacttgattggcctactcgactgaagattgcacaaggtgcaagttgtggattggcttacatgcatcagatatgtgaaccacatatagtgcatcgtgatataaagtcaagtaatatactccttgatgaaaagtttgaagcacatgttgcagattttgggctggccagattgattcttccttatcaaactcatgttacaactgaacttgtaggtacattaggttacatacccccagagtatggacaagcatgggtagcaactctgagaggagatgtctacagctttggggttgtcatgcttgagctgctcagtgggaggaggcccgtcgatgtaagcaagcctaaaatgtcaagggagttggttgcctgggttcaacaaatgaggagtgaaggaaaacaagatcaagtctttgatcctcttctgagagggaagggcttcgaagaagagatgcagcaggttcttgatgcagcatgcatgtgtgtcaaccagaatcctttcaagagaccaagcatcagagaagttgttgaatggctgaagaatgtggggtcatccaaaccgcaaatgaataaagactagagataaatgtttgtccttgacaaatcttgacaatagatatgtatacttgtgcaaagaattttgcatttcaatatatacagaatcatttttaccaccgt

SEQ ID NO: 9623 - DNA, 182 bp, Glycine max
  Clone ID: PAT_MRT3847_108700C.1
ccaacctgatgctgaaaatcattgcacccaattaaaaggcattgggttgctcatttcaattgatcctgcaagtgggggctgctaatggcacatttccttttaaatctaactggcttttatgctattgaaaggtgagatggaccttttagcaggggtccttaagttccccttcttgaaggctt

SEQ ID NO: 9624 - DNA, 415 bp, Glycine max
  Clone ID: PAT_MRT3847_108701C.1
catacataaaatgacatttaatgattcaacatgtagcgacatcaaggacaaagaaatatgaatgccgccgagtcatctaccataatacaccactgcgctgccgttacgatattcacaggccgaagaattcgtgcaatgagacaagcggcggatacgtaataatgaataagaaacctacaatgctccatccacctctgaattacaacgaagaaaagagaataagctatgattgcgccctggcacgtgaaacagacgatacctttagtactagcacagcatgcgtatggatacaacacatggggccccagaaaggcatgatgaagaggcaacacctggctgatagttaagcactacccaacatgagaaattactttgtgggctatagaggccacgctggcatgataagcgtacaagc

SEQ ID NO: 9625 - DNA, 262 bp, Glycine max
  Clone ID: PAT_MRT3847_108702C.1
ggattcctcaatgatctcttccccaatgttaccactgtcaaccgttgcccgcgccggcatgtatgctccattctctggcctcgagtccatggctgtcttccccaccagaatgaccaacaatgacattacctcctttgctagctacctgggaatattgcaatgcatgtcggggtgtgcaccagatgttaagaagacgtttgatactctttcctacctgccagaccttgatgatgcactattggactatgaagtatcaatactt

SEQ ID NO: 9626 - DNA, 507 bp, Glycine max
  unsure (1)..(507): unsure at all n locations
  Clone ID: PAT_MRT3847_108703C.1
caaattcaaagtcattcgattgttctttcattataataatctaaaaaaccaatctgtaatgatcatatgcagttcaatagtttcacgataagtcgataaccttgcaaccagaaaaaagatgaggagaagaaacatttctttagaagaaaacaaaagtaggccatttaatcatacccttttgaccattgcacccattatgtcatccaaggtcccaaaagtattctgcataaatccatcttgggacttcatttgctccaaaatgtaggcttcatttggcttcagtcgaatgtctgaagagaatttctcaacttcagtgcacctgctgattgatggggatgctccatttagttggccaaccaaagatgcatcaactctattgctacaaattgtattatttttggtttaaaccatgccccatagaacttttcactccactggaagaagcatgtgaatntacaggattaaaggaatgacccacgttttggttataatccagtttatgttctt

SEQ ID NO: 9627 - DNA, 632 bp, Glycine max
  unsure (1)..(632): unsure at all n locations
  Clone ID: PAT_MRT3847_108704C.1
gcaaccgncaaattcaaagttggacaattgttctttcattataataacaatctaaaaaccaatctgttacgatcatatgcaattcaatagtttcacgataaccagaaaaagatgaaacatgttggtttctttcgaaaaaaacaaaagtaagatatttaatcatacccttttgaccattacacccattatgtcatccaaggtcccaaaagtattctgcataaatccatcttgggacttcatttgctccaaaatgtaggcttcatttggcttcagtcgaatgtctgaagagaatttctcaacttcagtgcaccggctgattgatggggatgctccatttagttggccaaccaaagatgatgcatcaactctattgctgcaaattgtattattttggtttaaaacatgccccatagaacttgtcactccactggaggaagcgtgtgaatttacagaattaaagggacagctcatgttttgggtataatccaggttatgttctttccacctttgtcgtggtgtgtaacttgaaggctggacaatatttccaatcaagccctcttggcatctcagctcatttttggggtcctccaaaggaacagaaattccatcctagaagaaaaataactggactg

SEQ ID NO: 9628 - DNA, 368 bp, Glycine max
  Clone ID: PAT_MRT3847_108705C.1
actaagaatagtggactttctgagacatccggcgagaaaacgaagacactagtgcgataactgatacaattcgggcggaactataaataggcgccgacggatgaaaatacagagggctttaccgctgaaaaaaacagtcgtatacaacacgaatatcataggccgcgtacctatgagcttacgaacagtcaaacacatgcgcatttatccggttaccagggggggcctaaatattattcgaatacctaccaaatgcagcacctaggacaagtcactaactctgggtcgcgacggacaaccaataataaggctcagacgtggtaaacaatcgaaatttcctctacaacgatcattggaaaacacacaaa

SEQ ID NO: 9629 - DNA, 711 bp, Glycine max
  unsure (1)..(711): unsure at all n locations
  Clone ID: PAT_MRT3847_108706C.1
ccacgcgtccgctgccagtagtcatatgcttgtctcaaagattaagccatgcatgtgtaagtatgaactaattcagactgtgaaactgcggaatggggcttccattttaaanaaaattccaaaagtttttaattagtttttgttttggattgggaattctaacttactccgggataacccgtaaattaattccttagaaacttaataaccgtggcccaaccaaaaaacccccccccgaactttttctttggggaaaaagggggaaaacccccctttttttttttttaaagaaaaaaaaaaggggggtgccaacacccccaccaggggggcttttttttttggccccccctctggtttggcgccccctttttttttgggagaggggggaagattttcccccccggcggggggggaaaaaaaaaccccccccctcgtcccggggggggatatttctccccccccccccgcgcggggggccttcttttttttttttttggggggccgccccccccgcgcgnggggaacaacccccccccccctcttttttttttttttttttttaaaaaaaaaaatatttttttttgttttgggggcgccccccccctcatttattataaaaaaaacaaaaaaaatttttttttttttttcaaangagagagagggggggggggcgggcggaaaaacaataaaataatgggggggggggggggg

SEQ ID NO: 9630 - DNA, 281 bp, Glycine max
  Clone ID: PAT_MRT3847_108707C.1
gagcgtatttaagttgtggagtagttctctacaggcccctatggtgggtcgtgtattctgtaagtaacactatgagtaactcaagagcaggtttgcattacatcctgtagaattcgatgtggaactctataatcaactgttgaaaagtcacctcaggctcggagattgtattctgatgatatattatatatcaagtggccaactattatctaatttaacagtccggtacacgcactaggtctataccagcgggacatttggagattagatagcatcaagtc

SEQ ID NO: 9631 - DNA, 121 bp, Glycine max
  Clone ID: PAT_MRT3847_108708C.1
ctcagtggaggggaaaccaatgaactatgtgatcagtttaataacaattgtcactgtttatgaaattgtatatctataacttaagtagtgatctcatttgttatgattagaatagttactt

SEQ ID NO: 9632 - DNA, 224 bp, Glycine max
  Clone ID: PAT_MRT3847_108709C.1
ttctactcgtccggaatgtatgatcgtcactccgattcctttaccaagcgacgccattctagatgcggaccagaccccaacaagagatatacaaagggatggatatggaaatgaagatagagggagactggctagtgacactaatgcacaaaatgaagcgccttaatctagactacaacacacacaaaagatgcaatacaagactcatatgacccatataattc

SEQ ID NO: 9633 - DNA, 267 bp, Glycine max
  Clone ID: PAT_MRT3847_10870C.1
tcggcccgagttttttttttgttgggaccaatccctttgagtccgatctgtgttctcatcgttctcaggtcaatttgactggtaccagtggacttctactcagactggcacatgagcgagctggatttactctagcaaacgactattgggtagagggccaagtggccatctggacagtgatgctatcataacaaacggtggctccattcatctaccaagtgcaccaacagcaactccagcctccatagctccaagggatgttggacc

SEQ ID NO: 9634 - DNA, 894 bp, Glycine max
  Clone ID: PAT_MRT3847_108710C.1
caaacaaaacgattgaaccccatcaaaattcaatttcaataaaatccagtaaatggaattcagcaactagattcatgctataactaccctttatttacttctagatgtgaatttgtgattacaaataaatacatcggactgaggcttcaaaaccaccctaaatgagttgatccaaataacatattttggcagaagaaattcccaaaaattagatataacatggtgtcggactgtcagaaaacaaagcaaaatgagtagcggcacacattcaaatggcaccatattttctttccgttggtctccatgcagcacctgcaccttgagaaggaccaggaggacgttcccaagaggtttcactgccaaatgcactattgatgtcttctggccgtgagtagccttgcccagctccactaactgtctctaagcacgcagaaagaattgtcatgccaggcaatgcatcaattccacgctggcgttccacttttgtcttgtaaatgaaccctccacaacaaaagagtgttgaagagacaaaaaatatgcaagatagcactccaaatattgcccatcctcttgtgcgacctccccctggatcctgtttatagtcacatgtttttgtaagcacaaattcaattggctcataaccctcaacagggattgtgatattaacttcatatggggtattacgggccacctcacatctccaatcaacaatcaacattgagggtgacaacgttgtaggaggcttccctttggcagcagacccagacaatccaacttctaggcccttatctggaagtacctttaaactaggcttgtgaaccagggaagaaagtgaagcaactgcagtcataaacagaactacatgattttagctttcatacagggcaaactcag

SEQ ID NO: 9635 - DNA, 405 bp, Glycine max
  unsure (1)..(405): unsure at all n locations
  Clone ID: PAT_MRT3847_108711C.1
aaaaatttgacctttgccttaacgcccaaggatgcacgtgttccttccaccgcctctctttttctttctatgccggtttccgttatcataacataacttgcctcttcccccaagacccaagttttctcttttcctcataaccccctctctcccttccaaatttcaatttcctctttcctcccttaggttatggatccattggggaaacgccctgctgccgaggacgattccctaatttccgattgcgagagcggggtttccgctggagacacgccgncgncgttcgtcgaaaacgccgacctcgtccggaccagattcgttcgtggcctcgtcgcgcactgcttcaaaccccgagttctggcagttcgcaggnacgtgtgttcctccgtcatggcccctgcgcgt

SEQ ID NO: 9636 - DNA, 256 bp, Glycine max
  Clone ID: PAT_MRT3847_108712C.1
acaaaccatgatttgctgccttgctgagtatagcgccattgcgatagagacacgcatgtgcatctcaaaaccagctggctggtccgctgcatctcatcaacaatacgggcttacacgttccacagcacaactcacatctctatacagcagatagcaaccctgaaccgcagtatgtattgaactcttgctagaggtccaaacatgaaatatgaccttggaaggatcgatggaaaaaagccactggcatgagtcttga

SEQ ID NO: 9637 - DNA, 234 bp, Glycine max
  unsure (1)..(234): unsure at all n locations
  Clone ID: PAT_MRT3847_108713C.1
cgtccaagaagtaacatgttaatgctgcttggttttgtaacgtgcangaacccacacaacataagaactcgattccacgttgtgaacatcatgtttttggagttatcactaaacatgctaagaaaatatacaacacttaggaaactgctttttatagaaatgctaacgacgcttattccatgtggttgtttcccatgcctgcacgacatgatttccaattttcttttactccaa

SEQ ID NO: 9638 - DNA, 472 bp, Glycine max
  Clone ID: PAT_MRT3847_108714C.1
agccacgcgtccgtacggctgcgagaagacgacagaagggggaaccatggccaccgtttctttcaacgaaaactagcttctgtatttattcttctgtttgtgaaatatgtttttgtcttcgttactttttatatttactcgtccgatgttttcgatttgattatttttgttttgacggaggaacaggatgtgagttgtggttttctctgtgatgatgaaaacgatgacgagtctgatatgatatccattccttacaatactgacgacaaatcgaggcatttgtctgagaggattccactctttctcccgtcctttatatttgggttgtttaattttttgcgcgtggtttgttgtttcgattgtttgtattttttgtgtttttttgaaattaggcatggtgatgattgtttattgtcatctgatgattcatttgatgaatacataacctcctactcattccgaatgcctattg

SEQ ID NO: 9639 - DNA, 368 bp, Glycine max
  Clone ID: PAT_MRT3847_108715C.1
ggaaaaaaagagaggctttttttggggtggaccaaaccacaggaccaaggaacccaaccgggaagaaaaatctatagggggcagggggcaaaaaaagacaaccaggagggggcggccaaattggctagtcaaaaacccccttcgctacaaaaaaactaaaatggaccataaacatgggtgggcacctggggggcatcacaggggggcattacaggggcatcaaaaggggggcgaatttcttcattaggaaaaggggtttgggcaagaacctaataaagggggcaaatcccctgggaagggttcttcttaaattaaaaaattgggggggaggcctttgaagtttcctggtttgaatccatggcccggtt

SEQ ID NO: 9640 - DNA, 321 bp, Glycine max
  Clone ID: PAT_MRT3847_108716C.1
actctaccaaatcctccctgctttctcacacacctgacagattcctggcgcacattccaacactacctttttgatttgaaacccaccatgtaaactctagggcgttaaacaaacgcaccaatttgggacctcaactggggccttgtctctcagtggtggccagagggttttcctgaaactttggtgaaccaaagacaattgaccagaccgccccggggcctgtctcaaccaggactgaagaagaggggggctcatctgggagggccacttattctttggcaacggcaccggtactaacaccagcggtagcacacaccggct

SEQ ID NO: 9641 - DNA, 426 bp, Glycine max
  Clone ID: PAT_MRT3847_108717C.1
caaaccgtctcgcgctaaccttgccgaagaacaacccttacaggaaacctcgtggaaattttcaaaggtaatcgtcctaaaaactatattctacagaattcttaactactgcgttatgtacaacacgtgtgtttataattctgaaaacattgatcgtgacgaacgcgtgtttggatattccctattcggcctcactgactcaaaaagataattgccccgccgatcatgccaccaccccatactacactgttttagttacttggattggagcagagctaattcgacacttacaacttgggcaaagaacccttgcatccgagcgagggaacgaacacccggaaaatagtgcctagcgcgcataccctaccacggggggcaagagtggaacctggactattgacctcccaattgtgtgcaaaattaata

SEQ ID NO: 9642 - DNA, 688 bp, Glycine max
  Clone ID: PAT_MRT3847_108718C.1
acccacgcgtccgcccacgcgttcggttttttcaatttcaatctacactacacaggctacgcccctccttatcccccaccacagggttacccgccaccgggttacccgtcagcgccgccgcagcctccgccggggtacgtgccgtatccgccgccgcagtacgaaggctaccaaggctatttcaatcacgggtatcctctgccaccccctcccaattaccactgccatcacgctcagcaccatcacaatgataaccccggttttacttctttcttgcaaggctgcttgacagcattttgctgctgttgtttgctagaggagtgttgcttgttctgataatcatattaaaagatgtatctgcagtttggtgtacttggttggttatagctctccggataaatggtgctctaattgtcttgatatgtgcgggacctggctagtgttgctcattcttgtaactcctggtttttaccgttgccctcactcatctctgggctgttcatagattgtgatgttatctttgtgaatttctttgtatgggtgcttaatgtacattggcaattgtaaaaaacagtcatttatgtggaatagcaaactaatatattatggttttgcccattgtaaaaaacagtcattttatgtggaataacaaactaatgtacgagtcttacaaggcttgaacatgatt

SEQ ID NO: 9643 - DNA, 286 bp, Glycine max
  Clone ID: PAT_MRT3847_108719C.1
attgaatatctgaagcctaatattcaaattttacttaagttatagttaagacaattacagcatttgtcatcaacagactgttgctgggttcatgtcctcaattcttggtgctggctatctgtaaataacaagagaagccatatccacaaaagcctgatatacatgactcctgcttctagtgtgataagttgagcaatcttcatcgttctatgggcagcatgagcaggctggcgcagaaccagtgttgtactggtcaatgcgatcattgatctctcgatataagtct

SEQ ID NO: 9644 - DNA, 223 bp, Glycine max
  unsure (1)..(223): unsure at all n locations
  Clone ID: PAT_MRT3847_10871C.1
gatagttctggtcagaaaacgtggagaataaaggagacaagtgtctggtaaaaaaagagagaagtaaaatgaaataaaaaataaggcgaatgaatctggtggtctggtggggagtggggactccgcgatcctcgacagtacaatttcaccgagttcccatcaggagtgngaaggggagtcccatggctgactccaagcgagtagttgtctgcggcggcggagt

SEQ ID NO: 9645 - DNA, 697 bp, Glycine max
  unsure (1)..(697): unsure at all n locations
  Clone ID: PAT_MRT3847_108720C.1
ggtgatttttctttcaggagagaaacaagagaagataaagaaagagcagaagctccatgcgaagaaaaacaagatgaaagtcagtgtttgcttcttaatttccccaattttctttttatgccgagattttcttttatttgtggttgaaaactatgggaatatgtaattttttttagggtttcttatgtttgtttcggatttaattaattttgttatgtaaaaaggtgttaacttttttatgtgagtattttagtcactgaattctgagatagtggtcaaatttaaactctttgttattcttgattagttgaaagctgaagtaaccaatgttttttttttttatttttttattgcaaatgttaattgttagttttgttaggggatcaaacccgcgacctttcattcatttccatctttcttaactaccctatcaactttatatctccactgaagtaaccaatgtagttgggtctagtggaaggggctagtccccaataatgtgaagaactgagtttcaaatttttgttagtagaggattgtacattttagtgttctacaatgacttgagcatgattacctccaaaggttaatacctgcagagaaagaaaaaaaaaagttgaaagctgatgtangataaacaagagcctatgctatatgatctgaatattagattcaaactttggaatggnaggaaaac

SEQ ID NO: 9646 - DNA, 227 bp, Glycine max
  Clone ID: PAT_MRT3847_108721C.1
acacgcgtcaaatatttgttgggcatcgatgtgcgaatcacaagttcagatgatcttccattgtgggggtatgttggcgagttacatcccgatgagaatggtgataatggcaagcatgtacgttacacacacaagaacatcaatgttcagtagaatgcagggtcagggtagtcatgtgaatctaactaatgactaggcaaggcctctggaagtaagaaaagctttgg

SEQ ID NO: 9647 - DNA, 877 bp, Glycine max
  unsure (1)..(877): unsure at all n locations
  Clone ID: PAT_MRT3847_108722C.1
ctcgccgtacccggacatcaacaagggtctcgaggccggtcaccacgtcttccgactgggagccagccagatccaggccgacctgaaggacgtgcgattcgcctttaagcgactttccggctggcccaagctcagcgaccacggtgtcgctgatgttgtcattgccggcaagggtatctcgctcgacgtcgagatccaggcgatcaccaaccgacgagaccgagtcttcaaggtcaaccacgtcaaggtcgagctcgacaccctcagctggcgaatccacgacagcaagcacgacttgctgtacaagttcctcaaggccaccgccaccggtgtcatcaagaaggctatcattgccggtatctcggccggtatccgaactgctctctccgaggcccacgagcagctcctgcaagtcaggaacactgccgacgacgcgaagaggtccgacgagaccacccgatcgcaggctctcaaggacatgttcgccaagaagaagcaggtcgccgaggagaagaaggagcacgccaaggagaagactggcaccttcaagctggtcaccgaccgagaggacgagatcaacnccgagatgctcaaggacggcaagtcggtgtcgaagcgactgttccagaccgaagactacgccgccacctccggccacaagggatggagcagcnccgctttcgacattgtcgactcgaggaaccacccggccgttaccggcaagctgccgcagggtgtccaggctggagccggtcactcgaacgtgaacacttccgcggtcgaggccgctcgaggcaacctntccggcgcgcagaccggtgctcacactggacccgcccccgttggatcgcagggaatctccaccggtagcaccggc

SEQ ID NO: 9648 - DNA, 517 bp, Glycine max
  Clone ID: PAT_MRT3847_108723C.1
attccttttatgatttttttttttttttcttcgccaggggacggggtgccgaccttttatggcgaaagactacctctcacaacatggatgatttagagtgggatgacattgtattgatgacggcaagcggagcacagaacttttttatttactccaaggactgcgagcgaattattgactatataggtccccgggacaaacacctacctgttgagatggggggtatagtgaaggatcaaatgaatgaggccttaccctttagcgaggaggtgattttgtgcctgtggaacctaataaacaactcatccaaaaaaccgggggacattgaaaaataatgcctggacaatttgaaaaatgaagacgctacaccggaagaccatactccggagcctgataagattctggactcctattagccttggggtgaaggctctattttaaactgggattgccacaaagcctttctttctggtggggaggctcggcatccacagaacaggtaattacctttccctgc

SEQ ID NO: 9649 - DNA, 162 bp, Glycine max
  Clone ID: PAT_MRT3847_108724C.1
acacatctgcatggactctatggcaaaagtttcaatttttacatggatcaagctcatgatactcctattattactccagcaaactgccaacatattattactgtgcagcttcatagcatgaaagatattccaaatgtttccgagaatgctagaagtactctt

SEQ ID NO: 9650 - DNA, 518 bp, Glycine max
  unsure (1)..(518): unsure at all n locations
  Clone ID: PAT_MRT3847_108725C.1
aacttacacaaaaccacagcattttcaaatattatttaaatgttacatacattattttacatcacaagatctttacaattataatggtcaaattatctcaattttcttaactatctatatataaaaaataaaaataaacaagactctaaatcagtatatatggagttcttgccgtcaaacaaagggactacaaaaccctacaattactttcatgaccaagaatttgaatgtaaaactatgtcagacaagatgcaataataggggactgaactctattactggggcttatcttatagtttaaaagtctcttggtcactttggctgatatgcaaatcttacttcaagttttataacancctttttaaaaaaatacttaaatttttagactcttaatttctaattatccaaacaataattttattaaaacaaaataaaaataaaatcattggtaataaatatactaaaaaatacaaagatttcctatgtaagtggaagaaattttaggaccacaatcgaat

SEQ ID NO: 9651 - DNA, 383 bp, Glycine max
  Clone ID: PAT_MRT3847_108726C.1
ggcttcgtttggcttcccaaagctcgaataacttttggtgcattgcataagcttccatagcgtgacactacttaacagtatgcattaagtgcgtggtagctacactgttacacaacagatcactcatggaagggtagtatatcgtttccccgagccgtcctatcttataagcataccggggtcttggatcggatgctctcatttgattggggacgccaggatgctgaggatccgttatgcattgcgaattacgagagagcaccattaatatgtacaaggaatcgtgttccatttatttctattaaatgcattcagtagcgaaggccgttagactgttgtctagacattgccgcaggaaaagaatgctgggatggttggtgatt

SEQ ID NO: 9652 - DNA, 255 bp, Glycine max
  Clone ID: PAT_MRT3847_108727C.1
caaatcctggaaattttccaataatttttcactcttcaattttcaatcttcaatcttctccttgccttataattattattccccccttcaatatcaatcattaataatccatatatttcataattttcctttcaattcccaaaaacactttattaaaaggaaatcaaatcaaagcaaagacaacacgcattcttttcttccccaatttccaatccccaattcttctgccctagattttgtccctttttttattgc

SEQ ID NO: 9653 - DNA, 938 bp, Glycine max
  Clone ID: PAT_MRT3847_108728C.1
gatgggtcttaattagagatgaagacactaaaaaccagtgagaatagagatgggacactggaaattggggggaaacagcttggcaacacggttcactgttggaaaggatgctggagaagtaggtctttgcttagaagcaggggctagggttccacgtcgggggtgcacggatgtgagggaaagcagtcatgtaaaatgacgtttcagatttccaattgtacccactccccccaaaaagatttaaatgcccaacagagacatggccatgaactgctgtgatagtggctgtgaatcgtgttgctccagctgcaacagcaaggtgtgacactatgggattctggggagcagggtcttcccgtgacatgttgtaatggcagtacagtgctgcctgccattgcacacaatcgactaatatggggaaaacagagaaatagtgtaccatatatagatgaaatacttttgaactttatttataagtcattgtgtattgcgactcttctcatatcaaattttctgtctattttttcagtgtttaaattgtttgtaattttgcttgaaccaacatgacaacatggtggtccaaatggaatatgttgagttgttgactgaaagctatgaaaagtccatacatacatgtcaaaatttgcctataaagtagcatttggcatgcagataaaacagaattgcacaaaatattttgttcagttctccttggtggaacaaaattgtacttattttctaacctcatgttcaattcttttgtatttttaaaaataaattaacataaaccagaacttgtattcttttagtgaggaggatagaaatttaatctattttgaaattaaattcagacacacgagatatattaattactatttgaaattaaaggtaccattgatttggctatttcacaatttgtgtagtatatatgcctttgg

SEQ ID NO: 9654 - DNA, 692 bp, Glycine max
  Clone ID: PAT_MRT3847_108729C.1
agtgaaaacatgatgcaatatttatatttaaaaatgaaaaaaataaaacattttctcagtttaaatagccccatagagcaaaatcaccacaaagaatgcaaaaacagacaatatgattttgtttggcccaaaactaaggtgtataagagaagaaagcctcagaggcccagtgataatgataaaggcctcaaagtgtatgaaagaaagaagtaagaaaggaggggtccaactataggtggaccattcagttaaggagagaaaaataacagaaggggacaactgttaataaggggttggctatgaatagtgtctaggagagaaggtatttggaaaaggtttgggaagcctactggcttgagggaggagttgttcatatcatttccttttcttcattttctttgcactcattttgttttcttattgcaagtcagatcagtatttgcttgtatgaactgttccatttgaggtttttcattgttcaatacatatatatctcttccatcattttcttgttcctatcagattgacaacgagatgcatttgttagttaattttaaaactatttgcatatttgttatatttataggactgccaagtacctaactaggtagactgatgtttttaaaaaatttatgagaacatggtagtgataatgggaattatttttctctattatatctaatgcagcttga

SEQ ID NO: 9655 - DNA, 837 bp, Glycine max
  unsure (1)..(837): unsure at all n locations
  Clone ID: PAT_MRT3847_10872C.1
ccggtccgcgcgtcccggctacgacccacgcgtccggtacttaatttctgaaactctaaagttctaatctttgtgctaacctctcctgtctgcttcaaaaaattcatacatcagaggaggggtttctgctacagtctacattgtgctttaggaagtgttttttgttaagaaacattgtgttttatgtgtcagatctctcgacattcacacattttgtttggttcatttcagtgcattttatgtttctaggttactccatgaagctaatagttgtctctgctgaagaagctgcactgcatttgtaaagtttttctattttttgttgaaggacagtgaatcacttggtggttgtttagttaggacacttgtggttttgaagaacccctctttgggattttgctgtaagtaagtccttcactaagtgtggactgagaagcttgaagacccaactctctcttttggagactgtgcttgcttcttttctaaattggtgcttgcttttagaagaaccaaagaagggtatcttggaattttatctgtaccttttttggtgggttgaagataattgcttatccttttgaactaaaagggtgaaagctccctttctgtcttcacttactgtgaactacacagaagtaaacattctagtgtctatagaagactatgaagccttttagccttttagagttatctttatatttcttctctgaggtagggcagcttccctctcaggacattntaacattgctggggagttaagaaaggcatcaagcatgaccctactggggtatgntctcaattcctgggatgagggatccattgactttgatggatgcc

SEQ ID NO: 9656 - DNA, 1489 bp, Glycine max
  unsure (1)..(1489): unsure at all n locations
  Clone ID: PAT_MRT3847_108730C.1
ctgcaggntaccccggtnccggnntattcccgaaactttggtgtgcagccgtgcatctgtaacagtgaaggaaaggaaaagaatgcaatgactcaactctagatactagatagtgagtgagtgaagctaaagctacaaaaaacaaccaaacaaaacactcaattctcttctcttctcttctgggtttttgctttttcctcattctctcattctcaaacaccacaaaaaaatgggccttgtttcccaggatgccctcaaccaactccaagctctcatggatcaagtgctacttgaggaggagccactgcagagaacgtttcagaatgttcatcaaggatgtgtcaccgaaaccttaacacggtttctaaaagcaagggagtggaatgctaccaaggcccataaaatgatagtcgattgtttgaagtggagagtgcaaaatgagattgacaacatattatctaaaccaataatccctactgatttatacagaggcattcgcgattcacaacttataggattgtcagggtactccagagagggtctgccagtctttgcaattggtgttgggcttagcacgtttgacaaagcatctgtccattattatgtgcagtctcacattcaaattaatgaatatcgtgatcgtgtaatcttgccttcggcatcaaagaagcatgagcggcctattaccacatgtgtaaagattttggatatgacgggtctgaagttgtcggccctgaatcagataaagttgttaacaataatatcatccattgatgatctgaactaccctgagaaaacaaatacttattacattgtaaatgccccatacatattttcagcttgttggaaggttgtgaagccacttttacaagagaggacaagaagaaaagtgcaagtcttgcaaggttgtgggcgagatgagctgttgaagatcatggattacgcgtctctgccgcatttctgtagaagagaaggctttggatcatcaagacattcagggaatggaaatgaaaattgttattccttggatcatcctttccatcagcagctctacaactacatcaaggagaaatccagaatccatgaagctgttgaacccatcaagcagggatcattccatgtagattttcccgaacctcctgcagagaaagcagagattgtcaagacattagagtctgagctacacaagtttaagatcagcaatgtgaatggtgattgaagattgatactgttgccaatggtgtcttggccatgttggtcttttacctctcctactaaccatttgaaccaaactaatgttgtaacaatggttcttcctccacactattacaatttacgaggattccgcagtactagttagggagtagtcaaaataaagcggatcctagctttgcattatgccataatgcaaagtgagaaatgtcaactatgatgataattaccatcatgtttcttctaagcttgatatttgcacatatatatttttttt

SEQ ID NO: 9657 - DNA, 572 bp, Glycine max
  Clone ID: PAT_MRT3847_108731C.1
cgagatgagctattaaagatcatggattacacgtctctgccacatttctgtagaagagaaggctctggatcatcaagacattcagagaatggaaatgaaaattgctattccgtggatcatcctttccataagcagctctacaactacatcaaggagcaatccagaatccatgaagctgttgaacccatcaagcagggatcattccatgtagattttcccgaacctcctgccgagaaagcagagattgtcaagactttagagtctgagctacacaagtttaagatcagcaatgagaatggtgattgaagattgatactgttaccaatggtgtcttggccatgttgtcttttacctgtcctactaaccatttgaaccaaactaatgatgtaacaacggttcttcctccacactattatgaggattccgcagtactagttagctttgtttatcttagattgagaagtttagtgagtagtcaaaataaagcggatcccagctttgcattatgccataatgcaaagtgagaaatgtcaaatatgatgataattatcatgtttcttctaagctaaaaa

SEQ ID NO: 9658 - DNA, 246 bp, Glycine max
  unsure (1)..(246): unsure at all n locations
  Clone ID: PAT_MRT3847_108732C.1
gtatgttttttanggtacaaatttatgtttttgtaaattatggagcaggggatttttgttgaaatattgggaaagaccaacctagaaacacaccgcccacacccggtgttcacaacccgtccccctgaggaaaaccggtaatgctcacatgaaccgacatttcctgaccaatttatataaaaatttgacacccctgacacctaatgggaaccattttacacttccacacttaacaaaagcctggac

SEQ ID NO: 9659 - DNA, 1224 bp, Glycine max
  Clone ID: PAT_MRT3847_108733C.1
atacatactttagggttcatatgttagttttagtagttaggtccattctttgttcaacagtgcctcagcttgcatttgacaggctattccatgaactaatgttgaagtagattctttggtggcatgttatccgctcgtggcagaaggctcccgaaattgaagattttggtttcatcgtttctccaagctcaacagttgccccttgagcaatcatctgctttgcccagcttatattcaaaatatggaatccatagcttacctgcaatcttactggtgaatcagacatctagggtgagatatcatggaccaaaacttcttaacttccttgtagaattttatgagatacacacaggtaagcattatcccgaatcttgtttgtaatttctttggaaatttcctggaccacctttttcacccttattgctgatttcatagcctggagcttatactgtgttgaaaaaagaaagccaattttactttagtagttcaaactccaattgagtgataaaattgataattgaccttaccatgtctcatcttaagatttgcaggcaacgtatgactcctagttgttgcttatctgacttagtcaatagtatgtctatacttccacatttttaaagtgtttcatctttctaagcacctttttaacagggaaccttacttggcattatctatattgtttttctgtttaaggattattctatttgtattgcccacgattattgtcacgtctcaaagaattctggacttcctatgcttctcatttgaacatgcaaatatttggcgaggtgatggaacgtgttcttaatgtaattgatgtcaagaggatttggaccaagctaagactatacaagaccaggaactttcatgaaagggtgaggagtgcccgggtttgggcatcatctctggcttctgtttcccttggtgactcatcagctaggtgatggtctcaaatctcaatgtttgaactttgaactaaccatgttgttctagtcattttgagggttgtgaagagtttatcagatgaccttttgcacataactccctagttctgttactaattttgtttgttagtagttaaaagatgctgatgtctgagttggactttgggagaaagtagtgaataggcgtgtaaatttgaaatatctttcctttgtaaattctgaatgtatatatttacacacgttttctaagttcaataaaatgttcctttttctttgt

SEQ ID NO: 9660 - DNA, 203 bp, Glycine max
  Clone ID: PAT_MRT3847_108734C.1
accatacgttgtgtttttccctgatcagaatttacattcttgcgcaactgcacttccaggcaataattctgctatatcaaaaaagaagaacaaggtagtgggttctagaggaacaacgctaaccatgccgagaatccactcttttataattgtcaattgggttacataaattgaccgcccttgccccccgttgaaaatgggaa

SEQ ID NO: 9661 - DNA, 298 bp, Glycine max
  unsure (1)..(298): unsure at all n locations
  Clone ID: PAT_MRT3847_108735C.1
tgtctgggctgcaatggtttattgtactactatagctaatcatagtattgacaaaattattggtgctactgttgaacgtggaaaaaagagatcaagaagacttgggacttgtgtatgaaatggaaggaggtcaaaancaggggattttaaacctcctgccaagacacgcggtggaaaaagagagcggatttactattagactcgaactactataaggccacctacatttatgtgctgcatcaataatacaaaactttttcctaagactgaccggcgctatataaagaagcaactacgt

SEQ ID NO: 9662 - DNA, 362 bp, Glycine max
  Clone ID: PAT_MRT3847_108736C.1
ggggacccgggggggaaccccggggaaaaccgggaaataccgggccggcccccgaaggggcacaatagtggcccaaaaaaaaagcttaaaaaaactgggcaaaaaagggtaaaaggggaaacctggggaaaattgaaaaccccccaaaaatcccaccccaaaccaaccggaaaaaaacggggaagcccgggggggccaaaaaaggagactaacccaatttaattgcggggccctaaaagaggggaaaaacggggaaaaacggtgagaacaaaaaaaaaaaaaacccgccaaaaggcgggaagaggaggtcccaaaaggagccccaaggtggcccttttatacaccaaaaaacgggcaacact

SEQ ID NO: 9663 - DNA, 224 bp, Glycine max
  Clone ID: PAT_MRT3847_108737C.1
cccacgcgttcgaagttttcactcacggttttctctgtttgttgttcaaccacggtacttctctctgggtttggttcatctgccaacgtgaccgggtatacttccttctataattaactttatcaaaatcaaacttttatgtttctgcttgtcttaattacttctctttcttttgactaatattattacactattgtctttgaattttgttcctttcctctttt

SEQ ID NO: 9664 - DNA, 809 bp, Glycine max
  Clone ID: PAT_MRT3847_108738C.1
gctgccactggggtgattcgtcttcatccttcatcggcattgcgcttcacaaattctcagtctacgacttgggtgttggatttcattaagttgtgataaacatgggaaaagactcaaagccaaaggagtccggaggcaagggaaaggggaaacaggctgcaagtggaagtgatgagaatgcttctaagggaaaaggaaaaggtgggaaaggtggagatgggcttggtacttgcacctatgtcaaagctaggcatatcctatgtgagaaacaaggtaagatcaatgaagcctacaagaagctgcaggatggttggcttggcaatggagacaaggtcccaccagctgagtttgcaaaggtagcacaagagtattcagaatgtccatcaggaaagaagggtggagaccttggatggtttccccgaggaaagatggctgggccatttcaggaagttgccttcaacacacctgttggagctactagtgctcctttcaaatcaacgcatggctaccatattatcttaagtgaaggaagaaagaactgatccctgaataagaacgaaactgaatttcaatggcatcagggtgcttaactgtctgattaaatgatctgctttctttccttttgtgattgtggttcagaatataaacctgcagtttctagtatgtgtactgatcttgctttctaatacttcaacaattcagagaatataatgtggatggttttactacgcatattacgagtattactgctttggtcctattcaggtagacctccaaatttatctgagagagatttatgattttctaag

SEQ ID NO: 9665 - DNA, 259 bp, Glycine max
  Clone ID: PAT_MRT3847_108739C.1
gtgactgctctcattctatcttcctcaatggttctaatttaatttgacatgcatacattggagtggacggaaccacaaactcagggtgatctattatctcctagggcaggacacactggtatcactattgatgaaagctggctgatagttcgaggtcgagataatacatgtggttgccctgaaaccctggtattagacatgtctaagcttgattgatcagtattcactgttgtcaagcacaaagattcactttctaatg

SEQ ID NO: 9666 - DNA, 289 bp, Glycine max
  unsure (1)..(289): unsure at all n locations
  Clone ID: PAT_MRT3847_10873C.1
gcannacnccantncaaccaccacacctctcntcgttcangctannnaaatnctgctgttcttctacctgtcaagttttgaaagtatanagatggcaganacattcctatttacctcanagtcggtgaacgagggacaccctgacaagctctgcgaccaaatctccgntgctgtcctcgacgcttgcntcgagcagnacccagacagcaaagttgccngcganacatggaccaaaaccaacttggtcatggtnttcggagaaatcacgaccaaggccaacgttgactac

SEQ ID NO: 9667 - DNA, 411 bp, Glycine max
  Clone ID: PAT_MRT3847_108740C.1
ttgcctacgcgtccgcccacgcgtccgcccacgcgtccgaaaaaaaaaaaaaacaaaaccgcaaaaacacccacaccccacacccaaaacgcacacccacaacaacccaccaaacctccagacccttagacccgacccacaccccacactctacatacggggggggccggcctgggggcccccggctcccgcccccgggcgggcgccctcatggctccctataggggcccccaaactccaattcccgggccggggcgtcccccccccgggggcggggaaaccccgggggcccccaacccaatgggcctggggcgacaccccctttcgccccgtggggcacaacccgagggggccccgcccgatcgccctctccccactggggcccccccgttgggcataggggcccccccc

SEQ ID NO: 9668 - DNA, 350 bp, Glycine max
  Clone ID: PAT_MRT3847_108741C.1
tttgctttcatgtattctgaagtcagattttttaaatgaggatacaagaatctccattcaagttccctctaattttgagaatatgagtacatcaaagcaagtacaaatcacaatttctgctgaagagtttggggccaaagaaaaatctccctatctttcatatgcaggcggtgaagtaccgtcctcatcattatctcacattatcgggttgagggaaggaaatgtcatgtttaattacaggtattacaataataagttgcagaggacagaagtcaccaaagatttcacttgtccattctgtttggttaaatgcgcttgttttaagggtctaagatgtcatttgtcatcgt

SEQ ID NO: 9669 - DNA, 1275 bp, Glycine max
  Clone ID: PAT_MRT3847_108742C.1
gttttgatcacccttttgaacacatctcatctcaaaatattttactcttctatcctccatgatgaggctagagtggagaaggcaaaaacgtttctgctttgaacagaaaaagttaggactcaccccattaaagtgctgtcaaagaaatctcatatatatttagcggcagcaaggacctgccacggaaaaacgaagtagctcatgtgtcaacaccaccatcctaattaaagcagcaacattattgctcaaacagcatacagaaaaagcctatgcgcaaagtccaaacttgcacctaacataaacttgccggaattctatcatgaagtttctatttggaagagtgaggtcttcgttgtcataaagtgcaaccccatgtcctcattctacatattcgattttctttcctttcttccttgccttgtttcattctttgcacaagggagaaaaggggtcaagaattttgtacaaaccttgggagttgtgagatcttatctgttatagatgatgtttttgtaccacgagaaggtttcagctgaaggagaaatatgatagtggaatatcacaaggaaagaggaaaatccagaaatagtagtatagtacttcctatgcaataagtaaatggatggactacctggctctgtgggcaccagcgctagcttcagtctgagaattgggtcagaccatgttctcttctgcttcccttctctttatgtctctggggggtgaattctacagctacacggctttctgctatttggtgacaattatggggttggttataccatggagtttcacattagcattggtagatggatattctgttctggtcaaatgccccattcgtcaaccaggaatactgttgattattgttgtgggagattggggtattatcaaccctcacactagcagcagcttgctcaacagctagtgttgtggatctccttctcaacacccatgggtctttttgccctccaaagctttgtagcaggtacaggatatctgcaatcatggcctttttgtcatggtttctatctatggcatcctctctatttaacctttggctagtaccctctttgtgattctcatttaattcccctgtaaagttattagattaataattatttatttattttgtatttattccccttcaattatagcatgagaaataccaggggggcaggattttaaatgatgtatatttatagttacaaaactcatataacttgtatttggaaaagttcaaagtatagaagatctcaatgttgaactgtaaaa

SEQ ID NO: 9670 - DNA, 970 bp, Glycine max
  Clone ID: PAT_MRT3847_108743C.1
gtggcatacggttcctgctgtccccgtgtcgatgctaccatttgaatcagaggaagccagatcaaaactttcaataaagggtatggcgtatcggtcaagactcaagccaactctgatgcggggactctccaaggcattcccggcaccattgatcttttcacggaccgattgtttcctttcacattgattgtcacaaactttgaaaagcttagacacggggaggagccacacttgaccattgcatttcttggactcgcctatacaataatttatagaaacctgctgtcatatatgtttcccatgatgctgatgattttggcagttggcatgctgacaatcagggcccttaaagagcaaggccgccttggacgatcttttggtgaagtcacaatacgtgaccagccaccatccaatactatacaaaagattattgctgtaaaagatgccatgcgtgatgttgagaattttatgcagcaagtgaatgtcttcctcctcaaaatgcgttccattttactttctggccatccacagataactactgaggttgcactggtgctgatatcttctgcaaccattctcctcattatcccgttcaagtacattttttcctttcttctctttgatatgttcacaagggagcttgagtttcggagagaaatggttaaaaagttcagaagttttctaagggagaggtggcatacggttcctgctgtccccgtgtcaattttaccatttgaaaatgaagacagatcagaaatttacttaaaggaaattgaggaccaatcaaaaacacaaggaaatcagagcagtgtaaagtccagatagttagtgataccattttcagtgttacttacagatattgtaattatgtaaattttgtttcatttttttgtaaaggaaaatgggaagcttgtgtattagcaatccttttttccctttgatttgttatacggaatgcttgagttgggag

SEQ ID NO: 9671 - DNA, 857 bp, Glycine max
  Clone ID: PAT_MRT3847_108744C.1
taggcgccgccagctcctgcgttgttactagtgtcgttctttggtgcctgacccacttccgtgctgccaccttttctcgtagcttgtcggtgttgctctccactcgctcccatgtaaaaaacgcatttcttacttcatagtacctctaagacgcttctgcgaagaaagaaaaatcattgttttgagccagacccacttccaagcttcgacttttactcgaagctattggtagatggaatccacaagctccaaagtcaatgttccaaactctagacaattatctaagcagcttttgtttgaccgccgctatggatgggtaattgatgagtggaaagaccagcagaggaagcacttgatggaggccgaggaatgttttgcatattgccacttgccaaagctttggtgcataaggcctcacaatcgataaattgtgcagtaatctcagtcaaaaaagcttcagagaagcccgagttgttttcccatcagatgctgcagagtgctttagatgacggtgttaaaagttttatgacatctttaaaaaacgttgggagtaaaggtttcatcctcaacaagaattctcaatcacaagctttcaataacccttcccactcacttacaggaagcaatgaatgatgaagggaacaaagttaacttgtcataaaaagtttgtgttctatttaatgtaactatgctaaattttccttatcataattgtcatgatgtagaattgtagttgattcagaggaattttttatttacattttatgcatacaatgcaatttgtcatccatactcctatctattcactgataataataaaaaaatactcctaaaaaaaaaaaagaaaaaaaaaaaaa

SEQ ID NO: 9672 - DNA, 410 bp, Glycine max
  Clone ID: PAT_MRT3847_108745C.1
tgctctcttacgtaagctattaattctgactgaggctcataagactgtgaactatggaatcctgcttgctcaaatgcaatgactatgtcatttaatccaaacccatgttcagatgcatggaggaagcaattcatgaagcagcccggatgccatcagagatatcattagcctcactggatggactgccaccccaatgcaggatgttcaagttactattgatgcgcttatttcctctcaggaatgtgtgcccaggacctattgcgttataaatccacaaaaccctttcgcgctaagataagtgcatgggaaaactgactttccctcatggcacttcccgaagcgataagagagtgcctctatctatagggggaggagtctggagcaaagaatgctatatcttagtgaatatg

SEQ ID NO: 9673 - DNA, 121 bp, Glycine max
  Clone ID: PAT_MRT3847_108746C.1
ctcaaaggtgttggaatcacaatcaagtgtcttttggtgttcttgaaacttgaatccactgtgcgttggatctaccgttgagcaagttgaagatggaagttatcaaggacgggtatgtcca

SEQ ID NO: 9674 - DNA, 1150 bp, Glycine max
  Clone ID: PAT_MRT3847_108747C.1
gtcagatcccgctgtctagcggaaacaaacaaaggcagaaaaccatttcctccttaaatctgttcctattttcattttcatttcaacttaacgttttcatgggtattcgcttttcgtcctcccaggcggcgccgtcggaatcgtcgccggcgtcgagtttgggcgaattgcccgagagttgtgtcgctcagatcatgacctacatggatccgccccagatttgcaagctcgcaaccctcaatcgcgcttttcgcggcgcttcctccgccgatttcgtctgggagtccaagctgccgcccaattacgacgtccttctccgccgcatcttcgccgatttcccctcccatttgggcaagagagggatttacgccaggctttgcaggctcaattctctcgacgacggcaccaagaaagtttggctggatcgaggcatgggtaaactgtgtttgtgcgtttcggccaagggactctccataacagggattgatgataggagaaactggaaccatatccccactgacgaatctagattcagcagtgttgcatacctccagcaaatctggtggtttgaagtggatggggaagttgagttcccatttccagctgggaaatacagcgtattcttcagaatacatctggggcgagccggcacggtatgtggactacgagtctgcaacaccgagcatgttcatggttggcacttacagcctgtgcgattttgtcgtcgaacatggcaatgcatcaacaaaagttaaattctctatgactcagattgattgcacacatactaaaggtggtctctgtttagattctgtgctcgtatatccaagtgaattcagaaaggttaaagcatttttaaactactcttaacctttgctataaatacatatgaatgtatactagtatttatatgtatagagcgtaggccgcgtcaggaggaatagagaatcgagtttttaatatggttctttaaggtttagaattttgtagaagcaagaggtgatgtttatatgtataaatatttgtttaatttgtttggaagactggaacattctatcataaccttatctggtgaagaatattatatacttgtggcagatggaacaataaagaccatttgatgacaaggaaacgtggatcatatttgaag

SEQ ID NO: 9675 - DNA, 871 bp, Glycine max
  unsure (1)..(871): unsure at all n locations
  Clone ID: PAT_MRT3847_108748C.1
ggattaggcaaaatgcagggatacagtatttgcataagggaaattgtatgtgaagtaagggctgcttttgtaagtatagaaaggcaatatctcaagagtttgtaaaagggttggatatatactcagtgattcatttgctccattttccgattttccatgtcgttcgcgtcatcattctcgatgctccggcaccgcgcggcggattccgcggcgcctctcctcctcctccgccgcttccgctgcctccgaatcgccgccagacaccaacaacaaaaccctaacaaacaagccccccctagccgcaacctcctgaaggcgaaacagacactgaaggaattttcctctcttgcgcctgtcctctccctcgaagccagcccccctctggctcgagcttttatgaaagtgcataagttgattttgggcttttagctgcttacgagagaagctcaattcattttatcttgttatattcttctcttaataagtgcttaaggagaagtatatttattcaaacatgactggtagttagtctattgtgtttggtttatgtaaaactttgtggaacgtttagttgttgtgttttggcttgttgggttgatgttgtttttatttgcgatctagctgggaattattttctggtgtgaagtaattgattgcttttggcttttgtttcttgtgtagatcattagttcgtggaaggctaggttgcgcagctgggggtatgagccggttttttgcagtgttgaatctggacatggacttgatcttcttggtttcaagttgaggggatcaaacaacggtgattgtggngcctagtggagttgngaagtctagtttgatcaatgcccttagaagcaatccttccaatgct

SEQ ID NO: 9676 - DNA, 775 bp, Glycine max
  unsure (1)..(775): unsure at all n locations
  Clone ID: PAT_MRT3847_108749C.1
atagaaccaaaaaagagaggatgaaagttgaagtagaaatcatttctagagaagacattaggccttcttctcccacaccctctcacctgagagtcttcaatctttcccttttggatcacctcattccatcaccatatgctcccataatcctatactacacctcacccaacagtgacaaaacttacctctctgaagtccccaagaggttagaattgctgaaaaaatctttatcggagacactaacccaattctatcatcttggtggcaaaatcaaagaattagacttttccattgagtgcaatgatgaaggtgccaattttgtgcaagccaaagtgaagtgtcctcttgataaatttctagtccaacctcagttgaccttacttcacaagtttcttcccactgatcttgtttctgaaggatcaaattcaggaacctatgtgactaacattcaggtaaacatctttgaatgtggaggaattgccattggcttgtgcatttctcatagaatcctagatggggctgcactaagcacctttataaaagggtggtcagaaagagccaagggttttaattgtgaccaattaaccaaaccaaactttataggatctgctctcttccccacaaacaacaatccatggcttagagacttatcaatgcgcatgtggngttcttttttcaaacaaggcaagtgggtaacaaagaggtttctctttagaaactcagatatagccaaactcaaggctcaaacattagggacagcaaattccacacgttt

SEQ ID NO: 9677 - DNA, 147 bp, Glycine max
  unsure (1)..(147): unsure at all n locations
  Clone ID: PAT_MRT3847_10874C.1
ggcgggtgcgaaaagacaacacaangggatgaatttgcttaccaacaaaatctcactcaccttncactttgcgccattctagtatcgaagaatcaactctcatagcataatgtaaaccatggcaacagaagcttgaggagtgaagat

SEQ ID NO: 9678 - DNA, 335 bp, Glycine max
  Clone ID: PAT_MRT3847_108750C.1
aaaaaccaaattttccttctacgactttttattgaacccctttaagacccctttttcttgccaccctacccaaaatcttaaatataaaggtttttacagggaatgacccccccaacttaaacctatcaaaaatccttaaaaatctttcccggtcattaaggacaaagcttaattcttccttcattggccattttaaaaaacctgcctttttctcttccggcctttttggaattagaagaggccccaaaccctcccctttcattgttctaaaaagcaagggaactttttgtccccccttctgatgaacaaagacactttcccttctttgtacaagg

SEQ ID NO: 9679 - DNA, 542 bp, Glycine max
  Clone ID: PAT_MRT3847_108751C.1
cacatccacagggaaaagcctcattgccaaagatgttattccaagcaattgggctccaaaagccagttatacttctcgcttaaatttcctgtcttaacacagggtttgccaactgaacaatcaccaaggcccttcttcgcaaagggagtaattaataaagcacttattacaaagttgaagttgctcaagttccataatacagagagtcaaactacttggccttcgtgtcttagtgttttttaataagaaagaaaagtagccgttgagtgcacaaggctatccaatggtgtttccttttcttagttttattcttttgtttttgtatacctataaatttgtcatttttgtggtgtgcaactgtttgcaccagaagtcatggtattattggtagccctctccaaacaggagagagcctgtagtgtatctgatagggaagcatacacagcaacagaaaacagaaacaaagaagcagaaccagaggtgcaaatagtgaagcccaaaagaaagattaagaaaccagcatacctcagggatttggttta

SEQ ID NO: 9680 - DNA, 353 bp, Glycine max
  Clone ID: PAT_MRT3847_108752C.1
tttctctttcttcgcacttttccggcacgtcgcaatcgccggcaactcacttggcttcgccggagtgcaatcctaccggcgaacggccgttcgcaagagtttttttaatttttattttgtgcatgttgaaacgggggcgtttggttttggtggtgatgaatcgggggaaagtggggtatggatgtagattggttgatcgggggataaggggagaatggttttgggggtggcggtgacaagttccgtagcgacatacgcatgtgctgcggaggtggtggggctgatagtgacgagacggaagaactgtaacaaactggcgaatgtgatgacggaactgtaggaagggtgtggca

SEQ ID NO: 9681 - DNA, 453 bp, Glycine max
  Clone ID: PAT_MRT3847_108753C.1
catcatcctaagtcaaaaccctcatggtttggatcatttactcgtgtgtcccagtgatcaagaaccggtagcaattattaacaagacaaaaattaagatcgattttttttatgtcagtattaagttctcaaatcaaatgatgatatgtagattggtttagaaataaaattggataaaaatattcttatatcgttatttgattttagaacctgatagatagcagaacataataaggagtttgatccattttttttaagtgggggctacttagtagatatacttgagaaactccgtaaatagaatgtgggtgattcaacttgacacatttaacaccactatccgcaacagagattctttcataactgtctaaaaaaagattatctcataaagttaaaactactccgtcacttaaacattggttcactaaagttgtagcagattactatttttttt

SEQ ID NO: 9682 - DNA, 159 bp, Glycine max
  Clone ID: PAT_MRT3847_108754C.1
gggggggggaacaacattctttaaatttttaccttgggaaagattaaaaaagaccttgggaggaaatggtttttatcttgaggggggtcataaaacaactgggggtttctcaggccttggcttaaaatgggtgaggagggaatccaccggttttttttt

SEQ ID NO: 9683 - DNA, 217 bp, Glycine max
  Clone ID: PAT_MRT3847_108755C.1
agtgtacaaatctatctgcttaagtcaatgttgtttgtaattctgaaagatggatgccgtaatattgctcttcaatgtgatgcatgcattaatttaccaagccataatttcttcaatggatggtgtagtaatattgctcttcatgtgtctcggcttcttgatataagttatttgtttctgatcttaaatatgaatatgatggttgggtttcataaaa

SEQ ID NO: 9684 - DNA, 1411 bp, Glycine max
  Clone ID: PAT_MRT3847_108756C.1
gaagaagaagaaggagcatatggagttccaccgcagcgactcatcatcgtccccgtcttcatccacgcccacacccaacaacgccgatcccaataaaacctcttcttcagacccaatgcattcatggtgggaatccgtctctaaagcccgttcacgaatccacgccctcgccgccatcctcccctcctcctcctccgactccctctcctctctcgccgactccgaccgccctgctctctcactcttgtcctcccccgctgcctacgccgccgtctcctcttccctctccggctcccactccgaccccctctgccactggctctacgacaccttcctctcctccgacccccacctccgcctcgtcgtcctctccttcgtccccctcctctctggcctctacctctcccgaatccactcccctgaaccgccgtccctcgccgggttcgaagccgtcctcctcgccctctacgccgccgagaccaaatcccgaaacggcaaacccctcgtggtcacaatccccgacctctcccacccctccatctaccatgcgcccctccgcaaaccccaatcccaaaccctaaccctagcctcaacaccctcggttggactcatttcgccccctttagaaccccagctcggcgtcaaatccaccaagcgcgcctccatcgtcggcgttgcgctacactccttcttctcccagatctcccacatgcccgcctggtccaagctcgaattctgccaattcgccgcagcctgggccggctccgcccactgtccctgccgcaacgagctcgaccgcgatggcgaaatcgaggatttcgccaccgccattgagaacgttcgaattcgcgatggcgattatctggaagaagggaaaggggagaggattcccttgccgtgggagattctgcagccttcgctcagaatcctggggcactgtctattgggaccgttgaactctcaggatgtgaaggacgccgcttccttcgcggtgcggtgcttgtacgcccgcgcttcgcacgatttggtgccgcaggcgatactcgcgacgaggagtctcattcagcttgatgtgaggactcgagaggctgccaagacgaatgccgccactaactcgaacgccaacacccccaccaaggccaagaagccggagattcttctggtttccaagtgaggaggaggttgctgctgtgtactattactgtaggtcttcatactgtaaacacaatttctatttgtataatagaaacttcatagatgccattttttttttatatatttcttttgcttgttctaggttatagtatacatatatatttatttatttttcctacccagtgattaggtagctgtattgagtattgactttgtttcttcatggaattatgctgagcttcctttgtgttaaaaa

SEQ ID NO: 9685 - DNA, 659 bp, Glycine max
  Clone ID: PAT_MRT3847_108757C.1
ggtgtctatcatgaatcattatcaaatgaatttataaacaaactaaaataaaaaatacgttaaataatggtgtgtgtctcatcataagcatgcaaaagtaccaacctaaactccatgaacccacaacaagcctaaacatgattaaataatacaaaagactttaagatcgaagttcaattcctcaactagatttcaatactaacaaggtgtgtctcatcattatggattgctccatggaatcattctcatcaaaatgacacttcctctatatctatgaggaaacgggaactgcatatggaattaataaccatatgaaagccaccccggttcggaaaaaaattgtagacatgcacagggaagcctcaatacatcacatcacccatgccgctgacagccatcttctccaagtcttcctgggacaacaaagttttcctgccagtgccaccagttttatcatatggctgggccattttcctgaggaactgcattcaacagataacaaaaatgccattatgaaatctcatactatcagatattaaatcactatcatgccaacccggcaatttcacaaccatttttggacgactatacctggtgcagaagtggtttcatgtgcctgcatgctttgtggggttcttttgtggtagttggctgggggg

SEQ ID NO: 9686 - DNA, 186 bp, Glycine max
  Clone ID: PAT_MRT3847_108758C.1
cccaagcgtacgatctgacctatgttcttactaaaatagctgagttactcacaactgggagggtgacaaggcatcatcaattctttgatcgcacactacgctgagctcctaaagcgtccacgatgactatgatccgaaaactttaaatgaccaacatgctacgcatgtagaagcgaatcttatatg

SEQ ID NO: 9687 - DNA, 2406 bp, Glycine max
  Clone ID: PAT_MRT3847_108759C.1
aggctttttggagagtacggatcgaagcggcatttgcattggcaaattcagcatctgaggaaactgatttttctggtctactccatctgatgaaattttacaagagtcgaaggtttgatactgacattggactggccaaagccaaacgattttcatgactttgccgagtattttgttcttgaggctattccacatgctgttgttattgttagagctgctgacaagaaaagcccaagagaggctatcgagtttgttttacagctattgaagtacaatgacaacaatgggaacccttactcagatgtattctggcttgctgcattagtccagtcagttggtgagcttgagtttgggcaacagagtattctcttactgtcatcactcctcaaacgcattgaccggcttctacaatttgatagtctcatgccaagctacaatggaatcttgactatcagttgtatccggacattgacccagattgcattaaagctttcagggttcattcctcttgatcgagtttatggacttgtaaagccttttcgggacataaaggcattgtggcaagttcgaattgaagcaagtagagcactccttgatcttgaattccactgcaagggcatggattcagctttgcttttatttatcaaatacatagaggaggagcattccttaagagggcagttaaaactagccacccatgttatgaggctatgtcagatgagagatggattgaattcaaatgacgaaattacaagccaaactcttgtctctatgcttaatttactggaagggcgtatagcttttaataatgcctttctccggcattacttgttctgcatattacaaatacttgcaagaagacacccaactcttcatgggattcccagagaaaatagaatgctgcatatgagtcttacagaagctagtaactatcaaaagaacatgcttgctcttgattcaaaaagcaaacccaaaagatcagagtggctctactgatgatcttacacaaaatttgtcaagcaagaaagtggaacccgtagtggacgttgctagacaggttaaatctgttgaacccagtggatataattctaaagtagaaataaaaaagatagataccaaaccggagccatctgaaggcacatctggtgcaccaaaaattcgaattaaaattaaaaaccgaatgctcagcaagtcctagggaatataatgtcctttattttgtggatgctagaatgaaaatcacaactccttcatattttctagggccaccagtagggctgatactgataatcaggtggttgaacgttctttaggtggtcgtaatgaaatggatcatggagctagcagttcagtttctgtagatgcaccccagaggaattttgctgagactgttagcatcagtaatcacaatattgatgaagttaattcttggcatgatcgcggttcacgcatgactgccagcattggtagtgcaaagtttttgagtgatggtgatgaattggtcaaagaactccagtgcactgctgattcaagtatagtttattcacaacctcagccagaagatccatcatcatccagtattatccaggataacaatatagatgctgatgcacgacgatatgccagccttcaaactctttcagttgcaagatttgatcctgacggagaaccattaggtaaagaaatttctgctcgggggaaagaaaagcacaaaagcaaggaaaagaaacggaaacgggaaagtaataaaggacaccatgatgatccagagtatttggagcgcaaacgattaaagaaagagaaaaaacgtagggaaaaagaactggcaaaacttcagagtgatgaagcgaagagatcctccatagatatgtcaagcaagaaagaggagcctgtagtggacgttgttgctagacaggttacatctgttgaacccactggatatgattctaaattagaaataaaaaagatagataccaccaaaccggagccatctgaaggcacatctggtgcaccaaaaattcgaattaaaattaaaaaccgaatgctcagcaagccctagagaatataatgtcctatattttgtagatgttagaatgaaaattacaacgccttcatattttttaggttgtattttttttttcatatccggcttagtagaccacttaggtacatacaattgttgattcaatgagctttattcgttggtagttaactgattttaaagatatatatgattgcaatttcaatcatgcaatttaagattgctatcgatggataggatttggctttcttcagagcggcataatttgtaaatgaagctagcttattacgaggttgtttgggatattgttgtaaatttgtaactcttaagttgtaaatttataattatgttgtgttctttccaaa

SEQ ID NO: 9688 - DNA, 487 bp, Glycine max
  Clone ID: PAT_MRT3847_10875C.1
ttcccaatcacctgactagcaaagatgtttacacatagctagttctctttattgattcatggcgatgtactataccacacacacgtaccacaaccagctaataaacagagaaaggaacttaaacaagaacacactgcatgcatctgatctgattatagctaattaattaaacaccagaaagcatcacctcaaacttttaaccgcacatatatatatatatatatcctcttcatcacacaccctacttgtactcttcacagaacccagtgaatccgtggtgccggcgccgatatatcgaactcggcgtttgggagattcagcagtaggcggtgcacttggtcttgcagtcgatggtgcagccgccgccgccgcccccgccgccgtagcccttgccggagctgctgtaggacgagaagcacttcttggggcacgtcaccttcttcctgtagcacgggcccttgtcggagcacaccaccgtgggcaccac

SEQ ID NO: 9689 - DNA, 345 bp, Glycine max
  unsure (1)..(345): unsure at all n locations
  Clone ID: PAT_MRT3847_108760C.1
gagacccctgaaattatttcttataagtaaataaatgagttgatgttcaacctcaaaaagaaacaatatctaaagcacataaaaatgatcatatgaacaatcaaaaagagaatatgcagaaacaattcttcaattgaattgcatgatctttggagcaaatcttagcagtctatccaaagcatgaggtgtgaacttccttgcaaataaatgacaaatattggtggtacgtgcattatactcacacgaacttccatacctnaacttgttcaagaactcaatagtcacatcttttctaaaataccttgaaggatgaggtccaccccttgtccaatttaacgatagcaa

SEQ ID NO: 9690 - DNA, 750 bp, Glycine max
  unsure (1)..(750): unsure at all n locations
  Clone ID: PAT_MRT3847_108761C.1
gtttattgtgattgtatatctgaatatgataattgatttgtggatatataataattttaagtagtatagatggttctgattatgctaaaagatgtgtgacattgttcatgtttctgaatggaacttttgttaaaacttatttattattatctattgttgcattgttttttatttttataatgtgggtttgggcctaactcaaccctaaaagctggcttataggatgagggttgcccctacttatataatctatcttggcactatctctagccgatgtggaatttggattttttctaatacaccccttcacatccaacacttttgggctgggtgcatggataatatggtaggtgatctgtttaatggatcttggataaactctaatatcatcttaaaatgtgggtttgggcctaacacaatcccaaaagctagcttatagggtgagtattgccccccacttatatagtctatcttcacactatttctagctcatgtgggacttgggtttttcccaatagtttttagctgaagttacctatctatgggtgctgtagattttcttagttttcacctgtttgtaagtctgcctgccccagttttgctatgtatattttcaccccttggttctgattaagctaanagctgtctgacactgttcatgtttctgaatggaaattgtgtttaaacttatttattattatctatttgatgttgaatattattggcagtgttttactttctatcatctat

SEQ ID NO: 9691 - DNA, 545 bp, Glycine max
  Clone ID: PAT_MRT3847_108762C.1
gatacagacaaagagaaattaaaatcaagaaaatatcaatttgacaaaattgttaaaaagaaaataactattaggatacagtgggacttatatactagataaaatttaattaactacctaatttaccataaccatctaactactcatcccttttgattacaaatataatgtgcaagattttaaggcttctccgtttcgtctttcgccttccctctcccacacttgggtatacgtgtaacaatatagcgtcccttctcaaggtcatatactgtcttcaattgtggctttctccattgcagtacaaagaatgcagcaagcatgaataagaaaagaaatgcaaataatgaaaaatatgtgactgattcattgccaacaatcatccctgtatctaaatgttccaattcaaggggttctgccattgtttcagttatgaaagatccaagcgtccaatcaacatgactgttaattttctggtccccaaatccaacccttttctcttccatagcaatcccaagaacatcatgcataatgccagcatatacgca

SEQ ID NO: 9692 - DNA, 457 bp, Glycine max
  Clone ID: PAT_MRT3847_108763C.1
tttatgcgtacggaaattgtgctcaggcgggagcacaggttgacgggcctcaaaaccggtaacaactggattcgatgcttgatttaaagaattcctcattttctgcctacttctttgtgtgcgattgattaagggtatgtaaactactctctgagctggtgacagacttcgtgaatcattctctgttccactgttagacaatttgctgtacactctacgatttgatataagacttaaagtcatattgaaacttcttcagttttttgctcaattctatgttcaagctgaagaacaagctggtgaaatcttggattagtgcttccagtctagtatctggtataggacctcgtgggtagactttcctatttttacttcttttttcacactgttccgcatagtgatccacagtgccgttcaaagaggtccactttgaaaaacactcgggcgttggcgcaaa

SEQ ID NO: 9693 - DNA, 570 bp, Glycine max
  Clone ID: PAT_MRT3847_108764C.1
atggaatgtaagatcagccaaaacgtccttgatggtcatggtcatcgatgacttcttcttcccacttgacacacttataatactcacaaaaggcttcttcctcctctttctgtttctgaaccacaccacacccttcaaaacgcataatctccaagcagggactctgaagaagcaatttaactccatttccattcccataacaacttcccctgcccaaggacgttcttcttcatttagtgacacacatcgtgcagcaaagcttaacaagcgagtgacgctaccaaccatgtaattcggtggcagtggcattctcgtgtcacaaaattctttcaactcatcactcgtcttcacccgctccacaattgaagccggcgttttgcacacatcaatggcttttctaccacttatgatctccaacagcacaaccccaaagctgaaaatgtcgtttttggtgctaagtttatctggggtggtgtaacatgggtctatgtaccctattgtccctgcgggagcaggacccggttcactcaatcctcctttcaccgcgagtccaaaatctgccaacttagc

SEQ ID NO: 9694 - DNA, 358 bp, Glycine max
  Clone ID: PAT_MRT3847_108765C.1
ggggtaaaaaaaaggccccccccatttttttattcaacccttacacatggttttggcctttaaaaggggggccaacccacgggggttttttttattacattgggggaggcccgggcccattttttaattaactaaaaaagggccaccctggttatttcggaaggcacatgccccggggggcttactaaaaagggggcccggggacaaatgcttcaaccaggtttagctatgggggctaacttatggggggggcaggcctgccataaaacttatccccaccggcctccttaattttggccgggggggaccccgttaaattttttttcagcctccttagagatcaggaccccaaagcccc

SEQ ID NO: 9695 - DNA, 225 bp, Glycine max
  Clone ID: PAT_MRT3847_108766C.1
atgttctacggcaccagcctccctcaccgtcggatctacatcgacatcaagttcaatgaccatcgtgtcgaccatgcacatcgtcaacaaatacaccgcggatctagacaccggtggaatttggatcccgattatgagagcggcggatctggaagccagaggcatacaccttcggcaacggtgagcggtggcacatccaaaaacagaggtggttgccatttgtaa

SEQ ID NO: 9696 - DNA, 874 bp, Glycine max
  Clone ID: PAT_MRT3847_108767C.1
caacatctctggctgcaaccaccccctcctcaacatcctcaccttcgcatccccccgacccctcacccccccaaccctcctccccctgccaccccttttccgcggcaccctagccctcagccgcgcccacaccctgtccctcgcccattccctgatcaccgcgggaaccacaatcatccctcggtccctccacccccccccacggctgcgagaagacgacagaaggggatcactgatttgacacgtttgtgccgagaggggaaagttaaagaggcaattgaattgatggataaaggggtcaaagctgatgctggttgctttgcccttctgtttgactcgtgtggacaatctaagtcccttgaggatgctacgaaggcccatgaccactttctacaatccactttcaggagtgatctcacactgaacaacaaggtcattgtaatgtatgtgaattgacacgtttgtgcaaagaggggaaagttaaagaggcaattgaattgatggacaaaggggtcaaagctgatgctggttgctttgaccttctgtttgacttgtgtgggcaatctaagtcccttgaggatgctaagaaggcccatgaccactttctacaatccacttttaggagtgatctcactctgaacaacaaggtgattgaaatgtatgggaattgcaaaagcatgactgatgcacgcagggtgttcgatcatatgcccaacagggatatgggctcttggcatttgatgttgcggggctacgcttataacaccaatggggatgatgccttgcagttgtttgagcagatgaatgagcttggtttggagatcacttcagagactttgcttgcggtgttgtcggcttgtgccagtgcagagga

SEQ ID NO: 9697 - DNA, 484 bp, Glycine max
  Clone ID: PAT_MRT3847_108768C.1
aattcggctcgaggtttttgcccaccacttttgctttttctgctcaaattctgtgctcatcgccctcgtcgtgttcactttgtcactgctaatggcatttttgctggggaaacggcgctcttcgcaaaacgaattggcaaaacggcgcagagacaaatcgccagaaggcattgaattggaggagaatcccgaggtgttcaaaagttctttgctgaaggactccaaagaacacatcatcagtacgtactttcctgatgtgcgcacacttttcgatgctttccaacgcggtctcaaagctgccgaacattcggcctgccttggctttcgtccggcaaaaggttcgccttaccaatttctcacttacgctgaggtcgccgttcggtcgcagtcctttggccatgctttgatctccaaattgggccttcagcccggcaacgaaacatttgtggccatttatgcgcaaaactgtcccgaatggatgatc

SEQ ID NO: 9698 - DNA, 381 bp, Glycine max
  unsure (1)..(381): unsure at all n locations
  Clone ID: PAT_MRT3847_108769C.1
gtcccccctnngctntttntttttttcccttnnnntttccccntccccccgttgatttgccctgcctattgtgttcccccccgtttttggtggccttccctttgcctgtgttcctttattcggtctacggggtccgcccggaaaattcttggcttcttagagtccctgatatcaaatttgtgtgggaccnncctcagatgcggtttattttgtccttatgatagtgttctcccttccgatttggcggttcgcctcngtngttcccatnttaaaagtttactttnnngattgccncccgttccctaggtgaaattccacttctgatcggggaaaacccccctacggctctgcgtggaaattttgtccctttgctaattgctc

SEQ ID NO: 9699 - DNA, 494 bp, Glycine max
  unsure (1)..(494): unsure at all n locations
  Clone ID: PAT_MRT3847_10876C.1
tacggctgcgagaagacgacagaagggaccaagtgaaaaggaggagaaaaatgaatttactactaaacagaaagcagacgtgtaaacatcatttattttcagttcaccaatcaataacgtgtgattttgacccaaaccgtggactgtttaccaatctaattaacacgcatggcaatggtgcactcgtgtctataaatgaatgagaaatatgagaagtgagaacacatttcaaaacataaagtggcaaagtagcaataacagggaaagaacaaggtcaaaaaaccacatgaataaacccagttggcttggcttattcaatgctcccgcatgtaacaattaaaaggtcgttggggtagttgtatcgactatcctccccctcctcctctcaccctttaaaaccctgccatctttcattattttgcaacccattggatcttcttcttctncttttgtactctcattcacattcttataggctaattaacatacactct

SEQ ID NO: 9700 - DNA, 241 bp, Glycine max
  Clone ID: PAT_MRT3847_108770C.1
ccgacttcgggttacgggtggggcatggactgacacgtatcggcaggctccgtcgggtcagagtgctccgtgtttttcaggacctgggttgtggattccgccccgtccatcgaggactacgatgccgggggctgatccggcgcgccggagatatatgagcaagacgatgcaactgaatacgaagaatagagtgccacggcatgccacactgcatgctatacctgaagatgcagagatgatg

SEQ ID NO: 9701 - DNA, 276 bp, Glycine max
  Clone ID: PAT_MRT3847_108771C.1
acaggctgtggtattgacccaagtaaatgggaatctgtgtttgaaagctttgagcaagctgatccatcaactactagactgcatggaggcactggtcttggtctttgcatcgtccgaaccttggttaataagatgggtggagaaatcaaggttgtcaaaaaggagggctcaggaacactgatgagattatgcttgcgtctcagtgcacctgtggatgccacagaacaacattgtcaagtagattttgctaacaagggcttggtggtgcttcttgca

SEQ ID NO: 9702 - DNA, 406 bp, Glycine max
  Clone ID: PAT_MRT3847_108772C.1
tacggctgcgcagagacaacaaaggggggagagagaagggtcgatgcttcgtttgatagggggaacatcctgtaatcccatatagaggacgacatggatctcctggtatggtactgactggctgacgattctcctctcttgggctctttaatgcacagcgtctacaccaagattctcttccctagaggaggtaccttttgtgtatataccaaacactcaatcacctttgctctacagctcatatccgcagccacctcctaccgaactgtctaccacctcaaactctgcttttgctgacgcgaccatcctccactcaggactcatgtgagacaccgccgactgcggcctcgaacgacaactcctgccgggcactttaaactacattagcgatgattctgcttctgac

SEQ ID NO: 9703 - DNA, 445 bp, Glycine max
  Clone ID: PAT_MRT3847_108773C.1
ggtacccccaattctatttatcaaaagatcaaaattctcctccttacaagaaacctcagtgggtgaacaattctaagatagtcgggtttcttactgcatttattaatcacatgtctcctgatattgcatagattcgcacgtcttttaagcagtccaaatgtcttcaatataacattacttctattgaaattgcaacctcccttgcaatcattaatcaatatgaggctcttaacaagagagctataccctgattatatccccccattagcctcatctggaggtagttgatctttagtgatcatatgatatcaatgagtatgatgtttaagggggtgaggatcagcctaacttttacttggaatactgcatacattataatcttgacacatccaatctttggatggaaagattgacggtaactctgccagttcaacaaccctttttt

SEQ ID NO: 9704 - DNA, 172 bp, Glycine max
  Clone ID: PAT_MRT3847_108774C.1
aaaataaataaataggtttaattgaaattcaatgtggtttcggctctggcactcaatgcaccagggctagcgtccccatgcatggagcgactgattgtcctatcgaggcgccataaatcaactacctggactgacgtatacacctgacgtacgtgtgaaaacggctgactcg

SEQ ID NO: 9705 - DNA, 357 bp, Glycine max
  Clone ID: PAT_MRT3847_108775C.1
aatcattaactcaacgaaattcatagttaattaacatgatgatacatatgtggcggaaatggaaccatgcaaattagaaactatcttttgtataattaactactattgcaccgccaataaatttattaaatacaattttacatcaatacctccttttatccacacatttttaaattattaaaacagttcccactcactgtattaaggttaaataatggtaattatattttatttaaatttattttattatagtcaatgatttagggttctattttatgggttaaacaatggatcttctagtccttgtctttgtccatgtattacagtgaattttattattaataaatatcaattacg

SEQ ID NO: 9706 - DNA, 547 bp, Glycine max
  Clone ID: PAT_MRT3847_108776C.1
gtcaaagtcaaagggttgaatttgacttagtcaacacagacggattgctggggtgcatatatgaaggaggggatgtaaccatcaacatttattttatttcaggattcacaaaaacaatgggctaggcccaacatgaaaaaggtgcatgtgttaataaggtgtaaataaatgttttattttatttcagacttcataaaaaatgggctataaccaaaataagaaaagagtgcctatttgaaaaatagggcgtaaatagcaattttttctggttaggttgcaaccgggtcagggtgacccggcttaacccgtaattagacaacatggttggaaaatcctacatgtcctaaccttgaaacggtgcaacaaaagggggaaccaccacggagggtggtgtgccccctcagtggtgtacggcgctactacgcgaggccgacacgtgggggacagcggcaacagtggcatgcgatacttcacttgaaaatggaaaatgaaggaagaaatagaacattagaacataatgattatggaatgcataaaagatcatgaa

SEQ ID NO: 9707 - DNA, 500 bp, Glycine max
  Clone ID: PAT_MRT3847_108777C.1
ctcactaacgcattttttctctatctctctctattcttcacccgaaactctctattttctcatgggttcggatagagagagagaaagctgcaactctcgccacttcgcatggctcatgaagtcatgcttccccaacccaaacgacgccgtcgcgaaactcgcgtcaccgccgcaatcccaccgtaactcccctgtacccgcaaccaccatatcctccctccccgatgacatcgttttagactgcctctcccgcgtgcccacctcctccctccccgccctctccctcgtctgccgccgctggtcccgcctcctcagctcccccgacttctccgacctccgccgccaccgcctcctcctccgtcacaccgccgtcgccatcgccggcaccaatcttggcctgtcctccgccacgctcctcgacggcgcgtggcacccctccctcttcgtcccttgctacgacgcacactctctagataatttccactccttactcgcccacg

SEQ ID NO: 9708 - DNA, 413 bp, Glycine max
  Clone ID: PAT_MRT3847_108778C.1
ggggtattaattatcctagcataaaactgaattcataaaaatgttctgaactcaaaatcgaaaaaacaatggctaaaacatagggaaaacaaagagtcctaacttaggacatgtagaacaactattttaaccatgaaggattgggtttgcaaaaatcaagagttcctcttagatgatcccaatcttgttagctacatccaaggcatcatagtctggagtcaacctaacataggctttttttgttccatcaggcctgattaaaggattcacttttttcgcctgaatggcatacatttttttcacaggatttttaatcttttttttggcagcacgggggtcaacaataaaaaccaggggggtggtatcctcaattttttttattgccgactcagttgttagaggaaatttaagtt

SEQ ID NO: 9709 - DNA, 321 bp, Glycine max
  Clone ID: PAT_MRT3847_108779C.1
gggggaaaaacatcggccccaaaaagaagggagaaaccccaaaaaaacaggtttgaagggaaaagggaaggaagaattggggtgggtttttcagggcaaagaaccacacggagccaaaaaaacacattttttttcccccacccccggggtgaccaacagggcaagcccccccccaaggggacagccccttacgcagccaaaaatgggcccaaaaaaacccccatcctggcttgaagaacgaggagagcgccaccccggcttttggggggacaggccgaaccgggggggttgctaaaaacccccaccgccccggtaagggat

SEQ ID NO: 9710 - DNA, 401 bp, Glycine max
  unsure (1)..(401): unsure at all n locations
  Clone ID: PAT_MRT3847_10877C.1
gcggcggtaaagctaacttcaacacctttaattttctaaaagtaatttatcggctgaataccaacccnagaagatgggtcantatcagccagggggttcggaatgccaaaaccccatcaaatactgctacttttttttcgtctcccgcgaccttgcacagaaacccgtcgcaccggaagattcttccatgatgcaaatcgcttaaactctattgctctgacaaacccaaccctgctgagcatctttcttcattcaatcttccctcaccaggaatgaacaggcttgccttttctgtcaccgggactttacctacgttactctctaccttttcgtcacatttacataaactaatatcctttgaagacacattattacccaagctttttttggccatttttttt

SEQ ID NO: 9711 - DNA, 404 bp, Glycine max
  Clone ID: PAT_MRT3847_108780C.1
gggttggggttttttttttttttttttttttttttttttttgggaacaaaggcgagggttattagccccaacaggtaaaaaaccccgcccctatttatttttaaaacaaaaaaatttgggaatccaaaaacaaggtccactaaaggtttaaaagcatttcccccgacccaaaaatccccccaatggccgaaaacctgaaaaagaaccgggggagggggggggcaaaacccggggggggggggggggggggatttttttttcgcaaaaaaccgggggggaaaaatggttatatttgggggccaatttccctttaaaagaaagggtttcaaaaaagggagcccaaacataaactctgggtttaaactttttaagaagggggccctggaaacctcaaaagggcccgg

SEQ ID NO: 9712 - DNA, 379 bp, Glycine max
  Clone ID: PAT_MRT3847_108781C.1
catgcgtactctcgaagtactaacctacaaactcctaacccgaagacaaatgatcatcgatgttcttcatccacatcatgccaacgtttcatagaaagaactgaccgattagattgatcaggagatcaaggctaacgactcaaatgctgactgcgtcttacgtatgcgcactgctgtccgaggacaacaatcatctggttgagctctcatctatgattcatcggaggatgctctagattcagagccaaagtaccgattggtgcgacctggactgaatgccaaaaaagatggctcacatcagcaacgacgtgagttgaagaaccgtaaactcaaggttcgtggttccaacatggctaaggtcgctgccgatactaataac

SEQ ID NO: 9713 - DNA, 729 bp, Glycine max
  Clone ID: PAT_MRT3847_108782C.1
ctttggtctccttctttcaagaataatattatctatgaggatggttcagttcagaaaatcccagaaatacctgatgatctgaaaatcatatacaagactgtttgggagattaagcaaaagacattggttgatatggctgttgatagaggatgctacatagaccagagtcagagcttgaatattcacatggatcaacccaactttggaaagttaacttctttgcatttctatgcatggtcaaagggtttgaagactgggatgtattatctgcgatcacgtgccgcagccgatgctatcaagtttactgttgatacctctatgctccatgaaaaacctatggcagaggaagaggatgataataccaagatggcacagatggtgtgctctttaacaaaccgagaagagtgtttggcttgtggaagttgaaagcattccaagttgcattttcccggattgattttgggcctaaaaacccttaataagtgcaaacctcaaaaatttgttttaggccttaatgatataaggttcaactcatacatgataatcttaagcattctaaattatctttagagctttgtatagtacttatggtgttaatttcatttgtacctgtttatgtattgtatgttaaatagttgaaagatgtcattgttggtagcatgtcaactgtccagtgagattctttatttcctacatttaaatgttacaatttgcttatctattccttct

SEQ ID NO: 9714 - DNA, 166 bp, Glycine max
  Clone ID: PAT_MRT3847_108783C.1
cgtaagctcggaattcggctctagtactcctgcacgggctcggaggcgcttggcgaattctgtccaagagcaatttattgaaacaaatgcccctgcagggcgtgcataaccaacagaaaaaaaagaagggcggccgccgaccagtgagctcgacggcccggcaatc

SEQ ID NO: 9715 - DNA, 177 bp, Glycine max
  Clone ID: PAT_MRT3847_108784C.1
aggggtattaatggtgacaggcacggtgaagcgggtgacccatagtcaattgctaaagtgtgctatgaccgggatagtacaggaggaggtggaacgtagcaaaaaaggcgcacgtatgcttcgatgttcacaccaaaccatgacgtttcggccgaactggataaaatcaaatcttat

SEQ ID NO: 9716 - DNA, 853 bp, Glycine max
  Clone ID: PAT_MRT3847_108785C.1
ggcataacaaagattggaaaggattgatgaggggagaagctgaatcaccttccattcgaagctctgtggttgacaatgctcatttggagcttgaagccaatcaggggccaaggtccctatctcctaagcctccagttcagaagaaaaggggccgagctgatgaacaaccgaggatgaagagggatgttgtctcacaagtaaatattgctgctcccggaggctgcttcaatttgcagtgcgagatgcagtagcgacttcaaggacagccacaggcatgtcagtggagccttccctaaaacgtcttcgttctgtagtttctacatctgctggcgattcatctttcgttgaacgtccacagaggatgcagcttgcttccagggtggcaaatccaatggctacaatgattaaggctgtggcagaagctgccgaagatgtgataaagtccaagccatctggaagtgtatttgatagacttggtcgtggtattgatacattagatgacaacaggcaacttgaagatagttaccaacatcaggagcaacatcatttattccgttctcaaagaactgagtacaatggggggtatgctgcaaatatgactatggcgggacatgaaactggctatccttctgattctaattcagacaatgaagggtttgatgatattaatgtcatggatcatagggtgtctggagcttctcagatctgcccctctgctggatacaggggcaacgattcactgatggtgcagtatagtgtagcaaaaaatgttgatgatagtttgcgccaaaagcggaatcgagaaccaggagcacttgcagcatcacccaacacatctcataagatagtgaat

SEQ ID NO: 9717 - DNA, 405 bp, Glycine max
  Clone ID: PAT_MRT3847_108786C.1
ggcaccggaccggaacgcccgggacgacccacgcgcccggtgatgaacgacccgacaagagaaccaaaccaaggcagagaaagaaaacggaacccaccgagcacccaccaagcgggagccggaccgcccggccgagaaggaagccgaacacgaggccgaccccgacgacgccacaaagggggagcagaaggacccagagaaccacaaaccacagccaggcggagcagcccccgccaccaaagacggagaagacaccccaaaagaaccccgcgcaataacgaggcaccaggcagaaaaacacagaccccaaggggccgagacgccgggaaaaacaagagaagagaggggcccagcggcgcaaaggccagaagccgaagcacacaacaaccaagcacaagcccacaa

SEQ ID NO: 9718 - DNA, 1240 bp, Glycine max
  Clone ID: PAT_MRT3847_108787C.1
ggaattcggcacgaggcctcgtgccctgagactcgaggttcctctgtttcgtccccaggcttgaactgaaaacaggttgtgattgtaatttgtaaagaaacatgctgaagtccatagtgggttgctgcaaggtgtacatatcagagagcagaaacagaactgcattggaatcaatagaacgagcttccaagctcttccctttggctccaataatcaacaagttcgaggatgtgacctacaacagagttggttacacccttgtctctgaattgggtcattcagggccatgccacttgtcaaatgctgtgttggcaatggtgaaggctgcatttgactccattgactttgaggtgcacactggtactcatcctcggcttggtgttgtggaccacatttgttttcaccccctgcttgatgcttccttggatcatgcagctaatgctgctaggtgtttagccacagacatgggttctactctgcaagttcccacttatctatatggagcagcacatgaagaggggaggacacttgattcaatcagaagaatatttggttattttaaaccaaattctatcgaaaaccagtggattggggggatgaaatcagactctttgccgctgaatcctgatagtggtccatctcaagttactccagcaaaaggtgttgtggtcattggagcaaccaattgggttgataactacaatgtccctctattatcttctgatattagcgctgttcagagaattgcaaaacgggttagtggaagaggtggtggacttccttctgtgcaggccatggcacttgcacatggtgaaggtgtcattgaggtagcttgtaatttgttggatccaaataaagttggtggtgaaagagtacaacaagaggttgagaacctggcaagggaagaaggtatttctgtggagatgggatactacacagacttttcacaggatcaaatcatttcaagttacttggagttctttgaagagaaaatttgaggtcatactgtcatagtgccctggtttactgcatatagaattattctcagcggggaaatttactttctcatgcactatctgctagtgaattttccttctcaaggcaaagttaatttggcatttccttgaaattaagctggaaaaaaaatctaaggatgaatttttcctgtaaggggtcattcttaaatttttacattcgttttcaagagattaaactgaccctaatagatgtcattctagct

SEQ ID NO: 9719 - DNA, 818 bp, Glycine max
  Clone ID: PAT_MRT3847_108788C.1
caattccgggcccacaagagtcctatttcagctttatgctttgatcctagtgggaccatattgctgactgcttctgttcagggacacaacattaatgtttttaagataatccctggatatgagagagtgtcagcatctgatgctgacccttcttatgttcatctctacaggctgcaacgtggcttgacaaatgcagttattcaagatatcagttttagtgctgatagcaggtggattatgataagttcctcaaggggcactagccatctatttgctataaatcctcaaggaggacctgtaagtattctgtcatgtgacaatagtttaacagaaaaaaatggtggattggatatcattaataatcaagcagttcgttggcctcatagttcagccttagaaatttgtaaaccacagagcctctgtgctgctggtcctccaatcacactttctgtcgtaagcagaattaggaatggatctaatggctggagaagcacggtaactggtgctgctgcagctgcaacaaataggatgagttccctttctggggctattgcttcatctttccgtaactttgaaggcaacagtaccttgtatgttaatgggaactattccaaggaaaagcgtcatctgttggtattttcacccaccggttctatgatacaatatgctctgcagacaattaacagtcaagattcaggtgttgtttctggagtaacacctgcgtatgaatctgcccactgacgtaagagtagttgttgagctttttttgaattggaatttttagtaacatacatatttgtttagaggtattaagataa

SEQ ID NO: 9720 - DNA, 287 bp, Glycine max
  Clone ID: PAT_MRT3847_108789C.1
acttgaatgcaaaacagatctatactaagctataagaaggcactacaagtgcctttagcagactaaccagacaattgaacaggatgaatggacttggacacctccgaattggagccgcgccttggaacaattgtgaaaggaaggcttgaaagtggacagctgtatactcctgcctattgaggccgtgttggtgccatggctcacggtgctgagcaggcatcaccggtcccacgaatttgactgtggtatggagctcatatgcagcagttgctgcaagatattgatgg

SEQ ID NO: 9721 - DNA, 1150 bp, Glycine max
  Clone ID: PAT_MRT3847_10878C.1
cacgcgtccgaagacatagaccagacccctctctctcttcctgtaatttcgggctatccgcacgaaaccttgcagtaacaaaaaatgcggagtttcactttctttgaacgagtttctagagctttccgcgatcatgggtccaacttcaagcttgtactcctctgcaccaccgtaagtggtggagggattgtagcttacggagaggctgctgccgcatctgaagcagcggcggcggcgacggagaagaaaaaggtggtggtgctgggaactgggtgggctggcacgagtttcttgaggaacctggacaaccccaaatatgaggttcatgtggtctcccctcgcaattactttgcattcactcctttgctgcctagtgttacctgtggcaccgtggaagctcgcagcattgtcgaacccgtccgcaatattttcaggaagaaaaagatggacatgcaatttagtgaagcagaatgtctcaagattgacgcagcaaacaggaaggtttactgtcgatctaatataagtaataatttgaacgagaaagaagaatttgtggtggactatgactacctaatcatagccgtgggagcaaatgtcaacacatttaatactcccggagtgatggagaattgccatttcttgaaggaagttgaagatgcacaaaagattagaagaaccgttattgactgctttgagagagcaagtttgcctagtgtaagtgaacccacgagtccgagaattcttcattttgctattattggaggtggtccaactggagtggagtttgcagcctcactacatgactatgtcactgaggatttggtcaacatatatcctgggataaaagatctagttaaaattacccttctggaggctggagatcatattttgagcatgtttgataaaagaattactgcttttgctgaagagaagttcggaagagatggtattgatgtgaaaactggatccatggttgtgaaggtatccgagaaagaaatttctactaaagaaatgaaaaatggaggagcaattactacaattccatatggaatggctgtctggtcaactggtattggcactcgtccatttataagagattctatgtcacaaattggtcagactaacagacgtgccatagctactgatgaat

SEQ ID NO: 9722 - DNA, 724 bp, Glycine max
  Clone ID: PAT_MRT3847_108790C.1
ttcccgggtacgacccacgcgtccgtcaagtatcattcagtgctaaagagtgaggaaaatgggttgtcaactgaaaactcaattgtttcttcttttccttgtctggggatcatggacatttctatgttatggtctcccaagtgagtactccatactagcccttgaaattgacaagtttccttcggaggaaggggtgattgagctgttccaacgatggaaggaggaaaataagaagatttacaggagcccagatcaagaaaagttaaggttcgagaatttcaagaggaacttgaaatacattgcagagaagaactcgaagcgaatttctccttacgggcagagtctcggattgaacaggtttgctgacatgagcaatgaggagttcaagagtaagtttacttcaaaggtgaagaagccatttagcaaaaggaatggcttgtctggtaaggatcactcttgcgaagatgcaccttactctttggattggaggaagaagggtgttgtgactgctgtgaaggaccaaggctattgtggctgttgttgggcattctcttccactggtgccatagaaggaataaatgcaatagtctcaggggaccttataagcctttccgaaccggaacttgtggactgtgacagaactaatgatggatgtgatggaggccacatggactatgcttttgaatgggttatgcacaatggtgggatcgacacggaaactaat

SEQ ID NO: 9723 - DNA, 289 bp, Glycine max
  Clone ID: PAT_MRT3847_108791C.1
tttttaaccttgaattttaaactacgaaatgggggggctgaataatacaccaccttcattgttctctgatttgtgctacctgaggactcttcaggaatcgcgcatgatcatcattcttgaggttactagaaaagtctcgagattattggcacaccctgaatcgaggcactctctgactcatgcggaactttccaaatgcccagtagcttggaattctctggagcctccgcttatttttatatgcttaatggtggaaccctctactgacaccgattacccctaccgttta

SEQ ID NO: 9724 - DNA, 261 bp, Glycine max
  Clone ID: PAT_MRT3847_108792C.1
atgaaatccgacagagagaaggagaaagagaaagagaatgatcactgcatcagttctcatatgcagacccttcatcgccgtcttctccacgccttaaaccttggcaccagatctcaacttgcacccccatcccacccagtcacttccctccagacattttgatgagaagacaaatagatggaaaaatgtgctatgatcaattggtgcgctcttgattcattatcaggagatgcacatgcagcacgtcatgctattgttaag

SEQ ID NO: 9725 - DNA, 1682 bp, Glycine max
  Clone ID: PAT_MRT3847_108793C.1
cggtccggaatacccggtcgacccacgcgtccggttatttgagagaatttcttggatacttacacaacccattcataggtaccgtttaaagatccatcaagaacatttcttttcttcaacacaaactcaatttcttcttccactcaatttctctctctctctttttcttcaattctcacacaaaaggaagaaaccatgaaatccgaccgagggaaggagaaagagaaagagaacgatagctgcatcagttctcatatgcagacccttcatcgccgtcttctccacgccttaaaccttggcaccagatctcaacttgcacccccccatcccacccagtcacttccctccaggtccttattccgtgaaattttctttaaattttctatctattttacttccgacatagtgggcacccttctacccatcatttaattttctatctcgttggttcaaagtgattgaactgtgtttttcgtttcatggtttttcttttggtcctgggtctgagaccacggtgtcccctaacacattggtcagagaattatctgctcgcggtgtgtagtgtgtggctgctgctgtcacaagagaattttgcacatgacattttgatgagaagacaaatagatggaaaaatgtgctatgatcaattggtgcgctcttgattcattatcaggagatgcacgtgcagcacgtcatgctattgttaaggaacctgttgccgatattttgggagcgcattattatgggttcttcaatgcaaaagtgaggctttgttaagcatggcatcagatgtggcagtaaaggtaattagttttatacccaattcattatttgcaattccatcctgtgctattgctttgaatttggtaatctcaaatttgagtgctacaagtgagaaggcagttatggaaacattgaaagaaacagagacttccatgcgtattgttggaaatagaaaagattttgctgaaggtgcaaaaaaaattgaatattttgaagagacaacttttcttttgagcgcaatactgtggcgctggcctccttctaggttccctgttggtaatgatgttatacttatgaaagtcttagcaaacatccatacaaggacagataaagcaactcctttttccaagctctttcttcttcagttccattccattccttacaagagtctctgcattcttgatttcacaagaacataccctctctgcaagaacccgtttttcacttttccagcttcgtatattcggattctcgggagtgaaaaagttccatgcgctattctattccaagtgcaaatcacggttgaagttaacaagaaaaggagcgcggtgcggagatttctcaagaaagacatggccgaccttcttgggagttcccttgattacaattcatatggaaggagccccaaaagccttacgagattagtatgctataagttcagcctcgttctttcttctcttcaacacaaactcaatttcttcttacactcaatttctctctctcttcttctttaattctcacacaaaaccaagaaaccatgaaatccgacagagagaaggagagaaaccatgaaatccgacagagagaaggagaaagagaaagagaatgatcactgcatcagttctcatatgcagacccttcatcgccgtcttctgcacgccttaaaccttggcaccaga

SEQ ID NO: 9726 - DNA, 291 bp, Glycine max
  Clone ID: PAT_MRT3847_108794C.1
tttttataaattgtgataataactttataagcagtcacacatcctccaaccccaccaaactcattttcatatacagtctatacagccctaaggtaccaatatatactataacaacttaataaaatctaggtccaaaatgggcttccctggaaagtcctggccatgggtataaaatagtaggccacccttacatatatataaatccgtatcaaaatgtgggagggactccctaattaataagttaagataagtatggggacacactattgggcacccctctgcatgtaacgc

SEQ ID NO: 9727 - DNA, 268 bp, Glycine max
  Clone ID: PAT_MRT3847_108795C.1
tttatagcaggtcatgggtattataacgtggaaacattatcagctttcaataattcatcgaccacaatatgtaactaggcattgactacatcataacagttctgatcaaagaacgtcgcaataaggagcaccagagaaagatctggttgtcgaactctacacaaattatttgagtctgaggaaagagagacaagaaagcatcttgagggatggagagaacattgaatgaccccatgggaactatctgtaattcattacacggcaccct

SEQ ID NO: 9728 - DNA, 493 bp, Glycine max
  unsure (1)..(493): unsure at all n locations
  Clone ID: PAT_MRT3847_108796C.1
cggattcggctcgaactcgagccgaatcggctcgagtacggctgcgagaagacgacagaaggggtctagcataagggttagtatcagtagtatcatggaatgcgatgaattaagatttgaatctttgtcaaaagagacatatttatgttgtgtacctgattgtgccttgaataaaattgtctctaaagaagaatatccatgaaaaactaaaaagaaaaatcactttaaagaaaaaatatataaagaattgtaaatgtcagacaaatgagaataggaaaagataacaaaatgaatactactgtaaattaagtatttggtgataataagattatttataaaaaaaatcatggtaatgagaatggtgatagtgaaaaaaaaataatgaaaatgattgtaattatgacaatggtgataataaaaaggattataatgctantgatgatgataataaatataatagtaatattggcgtgtatatcaacatgaaaaattt

SEQ ID NO: 9729 - DNA, 722 bp, Glycine max
  Clone ID: PAT_MRT3847_108797C.1
agcatatgcatgtatttgtcgtgctcacaatttggcagatgatgccttaaaaaagtttcaaatgttggatggtgataataagattatgatgaaagagttggaggacttgtgcaatgagtgccgatctacagttgtatagagcatgcatcggggatcatggaggagaaaaagactcaagagaatctatctgaaagggtttccaatatatcattgaccggaactgagcggttggagaagttccttcttgagaaacttgatgtgtatgagtctgctgtgggtgattcaaatgtgaagtgtacaccacgcattgcaggcttccctccagctttccaggcaatttcccgtaatcctattgtgctggatctggcttataacatgattgaattcccacctattgaaaacaggatgaagaaggatagaaaagccaagggcggtcttatcagtaggatatttggatgagtatatttaattagggtttttggttgttcaaatcaaataatttttgacaaattatctggtggtttcttttgtggaatattattatgaattttgagatgtcatgtacaaatttgagaggtctagatatttggaaattttacagtggagcgattgtttgcggttactatttttattttgtcgtagaacttgaaataagttgggcaatctgttacttttaccaatgcatattccatagagcttagctgtataccaccatttttaag

SEQ ID NO: 9730 - DNA, 666 bp, Glycine max
  Clone ID: PAT_MRT3847_108798C.1
attcactgccaacatctgtccttgcaggtgctgttgctaagcaaagaggtagtagaaaggatacagctagcgtactgttcaaccccctatcattgcatctattcttgccatgacgataggggctttcccatctaaccagaaactgatctttacacctgatggaatacggtccaactttacagacagctgcatgagtcgtggggaggccatgattccttgcattctgttggcactgggaggcaaccttattgatggacctggaagttcaaagcttggttttcggacaactgctgctattatttttgcacggttacttttagtgcctctggttggacttgggattgtcacgttggctgacaagcttggttttcttccctctgatgacaagatgtttcgatttgtcctcctccttcagcattcaatgccaacatctgtccttgcaggtgctgttgctaatttaagaggttgtggaagggatgcagctgctgtactgttttgggttcatatttttgctatattctcaatggcaggatggattattctatatctaaacatactcttctgagactgtatatagcaatttgatccaattcattttgatgctagattagtggagaaacaccaatattttatacaaagagcctttatatgatgatcacgatcaaa

SEQ ID NO: 9731 - DNA, 2124 bp, Glycine max
  Clone ID: PAT_MRT3847_108799C.1
tcttcggctgcgagaagacgacagaagggggtgacagttccattcattttcggagcgcttttgttattgcgcacataaaaaattcgcagcggcaccactttgcttcaacctctaccctttcacgacactcgaagcccccgctggccaggactcgatgggaaaggagagccaaacgtccgctatggaaatcgacgctccaaaatcgatgaattccgatctgatcgttccaaaattctccatcaacgtgctgcagctcttaaaatctgcgcaaatgcagcatggcttgcgccatggagactacactcgctataggaggtattgcacagctcgtttgaggaggttatataaatcgttgaagtttacccatggtcgtggcaaatatgcaaaaagggccttaactgagtctactgtcactgaagtaaggtttcttcatgtaattctctatacagcagagagagcttggagtcatgccatggagaaaaggcagcttccaaatggcccaaatgcacgtcaacgcatatatttgattggtaggttgcggaaagcagtaaaatgggctactttgttttctattgttgcggacataaaaaattcgcagcggcaccactttgcttcaacctctaccctttcacgacactcgaagcccttgttgtttgagactcgatgggaatggaacgtggctttaaagaacatcaaaagtgctagggctgtataggaggaattggggaaatatgttgaaaaattctaccaagttttgtgtcgtgagcgagttgaggagctagaacagagtatccggtactgccttcacaaaattggccagtcagatttacaggcctctgaacttttgcaaatcagtgatgtggaaggtcccgcattagacctttttaaagctaaattagaggctgccatggctgaggcaagatctcaacaagctgcttccatgacagaattcctttggcttggccacagatttccaatatcaaatgccaaaacaagggtttccatcctgaaagctcaggagctggagaaagatatacatggtcccttggcagactcaattccagcagacaaaagacttgttatttttgacaaaatcttttctgcatatcatgaagccagaggctatattcgggctgatttggccactacaggaagtacagaaagcgtgaaagatgatttgaatggtcttgataaggctgtcagtgctgtcctaggagaaagaaccattgatcggaacctcttgttggttaaggttgcaaaaagcaaacttgcaaagcgtcatgatgataaaaatgaaaaactcaccaaacctgaagagcttgttcgcttatatgatctcttgctgcagaatacaggtgatctatctgatttagtcagttctggaagggataaaaagccagaagaagttatctttgctgaagtgtgttcatacaaaagtttggcttttcgagcccaaaggtgcttttatgctccaaagtcatacagtgtggctggaaagagggctgaagcatatgcattgtactgtcgtgctcgcaatttggcagatgatgccttaaaaaagttccaaatgttggatggtgataataagactatgatgaaagagttggaggatttgtgcaatgagtgccgatctaacagttgtatagagcatgcattggggatcatggaggagaaaaagactcaagaaaatctatctgaaagggtctccaatatatcattgactggaactgagcggttggagaagttccttcttgagaaactagatgtttatgaatctgctgtgggtgattcaaatgtgaagtgtacaccacgcattgcaggcttccccccggctttccaggcaatttcccgtaatcctattgtgctggatctggcttataacatgattgaattcccccctattgaaaacaggatgaagaaggatagaaaagccaagggcggctttatcagtagaatatttggatgagtatatttaattagggtttttgataaatattgacaactgatctggtgatttcttttgtggaatattgttatgaattttgagatgttatgtactatacaaatctttgagaggtctagatatttggaaattttacagtcgaaagattgtttgtggcttct

SEQ ID NO: 9732 - DNA, 1842 bp, Glycine max
  Clone ID: PAT_MRT3847_10879C.1
cttaaaatcatgtgattatagaacattggctattggtgatggtgggaatgatgtaaggatgatacaacaagctgatattggtgtgggcatcagcggcagggaaggattgcaggcagcaagagcagctgattatagtattggaaagtttagattcctgaagagattaattctggtccatggccgctactcttacaaccgtacagcatttctttctcaatattcattctataagtccctactgatatgcttcatccaaatccttttttcatttatttcaggtgtctctggaactagcctcttcaattctgttagcttgatggcttataatgttttctatactagtgttcctgttctagtcagtgtgcttgacaaagatcttagtgagaaaactgtgatgcagcatcctcaaattttattttattgccaagcaggaaggcttctaaatcctagtacatttgctggatggtttgggcgatctctcttccatgcaatagttgtatttgtgataagcatacatgcctacgcttatgataaaagtgaaatggaggaggtttcaatggttgcactttccgggtgtatatggatacaggcttttgtagtaacaatggagaccaattcctttactatattgcaatatatggctatatggggtaatttggctgccttttatgtcatcaactggatcttcagtgcgcttccttcatcggggatgtatacaattatgtttcggttgtgtcgacaaccgtcatattggatagcaatttttctcatggttgcggcggggatgggtccaattctagccatcaagtacttccgatatacatatagaccgagcaaaatcaatgcacttcaacaagctgaacgtctgggtgggcctattttgtctcttggcaccattgagcctcagctgagatctgtagagaaagatgtttctaccctgtcaataacacaacccaaaaccagaaatcctgtgtatgaacctctgttatcagattctccaaatgccaccagaagatcttttggagcaggaacaccatttgattttttccagtcacaatcaagattatcactgtctagctacactcgaaattgcaaggacaactgagattaaggagcaattggaagagctccagatgcagcatcttagttgtatatccttttttttttatcaaaactaacagtacaatgttagttccgtgtatactaatgttatataaagtgccataagataactggttatataaagccaaaagaaaatgaattttcacgattttatagattatttgattaacttgatattatttttgttttccaacttctggttggagacatttgattttttccccctttgcaacaccttcaccttataatgttctccagttagggttatattgcatttattgaagaataatacatcttatggccattcaagaagaaactgggcaggtgaaagaaagccaaattctttgtcagttttcttccatggaagcatctggaaaacgataattcgtgcagagatgtcaacatactaatttgcagatggcagaagcatacaaatttggtgaccattttaaagctgaacaaggggagaacttaatacgtaaggtatatgtcccccaccaaccgtggtcagatctctgctgcaaattgcatggcaaggtagcgatgataataaggagtaagtaattctgaaattgttctctgaaattacaattatgagttgttttagatttttagtccttgaaattatggattaaattgacaatgattgttaaatttaattgattaaattttttaatgttaaattaaattgaaaggtgttaattttggggaaaaaaaaaa

SEQ ID NO: 9733 - DNA, 267 bp, Glycine max
  Clone ID: PAT_MRT3847_1087C.1
tacggctgcgagaagacgacagaagggcaaatcttcaagcattctgctataggttatcttcggttaaaagtattaagtatgtctaacctcagaatccttctagagaggtattagagcgtgactttgggttaggacattctcgtggttcagagtgcaaacatcatgagggtagacacactaatttagtcccatcatcatttataagctctccttctaagcaagagtttgatagcatctgaaggttcttgtctctaatcagttcaatgg

SEQ ID NO: 9734 - DNA, 687 bp, Glycine max
  Clone ID: PAT_MRT3847_108800C.1
ttaaaggttataaaactgctttaatggaaagtccccctccccccaatacaccatctgggctggggtagatgtggccagggctggccccaggacaatactgagcctgtagtcgttaccaaaatatacatctgtcaccataaaaaatgctgcaccgcctcagccccacaggtataaaatcataaatatttacactcttccatgactttcacagaactgaggtgcagggaacccctcccatagaaacaggctaggatggaggtgggcgtccaggaaggacattaaggcctagaggtcagcccctcaactgggcatagtcagaggcgggcagagaacaaaactttggtccaaaatttgaaggtaggacacccacaagcctcagagcttcttctccagccctggcctgggcccacctgcaagttggtcactggaaggaaggagtgcaggggacagagaagcttagagtacacacatacaattgtaccactgctataaaaagttacttaaaaactctatctcttgcatataaatggaaaagactcgggtatttggtcaagtggaaagattgctaggcacaggtgtctgtgaccccacggaatagaatacaaaggtcacacaaggctcggcagctgaggacggcctgggccctctgggctggccagggacatgggagaatcatgtcacttgatt

SEQ ID NO: 9735 - DNA, 1074 bp, Glycine max
  Clone ID: PAT_MRT3847_108801C.1
acgcgtctcttctctcccccccctctctctgtctctctctctcttccttcttctcactctctctctctctcttcttcacaccaattcacaaatcaccaaaagcaccactgctattgagagagaggattcagaaagacaacatcaaaatcaatcacaccaagatgctgctcggaaagagacctcgtcctccaatgaagagaaccacaagcatgtccgaaatgaccttggatctgaacaccgccgccgccgccgatgcccccgacaaccaacagagatcaggtgttggtcccggtgctgcagcagatcagactacgaggatgttggcaacacccaaaatcctcagaagacattcttcggatttcggagacacgcctcccttccttcgcgcctgctccctctgcaaacgttgtctggtgcccggtcacgacatctacatgtacaggggtgataatgctttttgcagcctggagtgccatcaacagcagatgaaccaggacgagagaaaagagaagtttgtcatggcgtcttgtgaaacgtccgtcgctactccaccgtctgggtctcaaggccacctcgggttaaaccaccaagggtgaaactaccgtggtggcgttgtagatgtgaaacccaaaccaaacatgtcaaaaacatgtttatatagctctccctttgtctctctttttgtttttttttttttctggcgtcttttttttttttaattttttttaccgtggcgaccttttggataatgggagtgcgggttgttttccttgctttcatgggcaaactaggcaagtgttatttttggaacttggaagaaccttgtagcaatcccccttgggattttgaatccatagataattaaatttaaaattgtaattcaagccctgctgtttttctttcaggcttttttttttcgctgacaattttgttcaaaaccctgtaagacacgtagatttgaattttagttcgttaaggtgcagaaactagcctctttaatttgataataccaatctctattggttggttgtttttcttcctggctagtatatgtgaaaaatgattcatataaaa

SEQ ID NO: 9736 - DNA, 258 bp, Glycine max
  unsure (1)..(258): unsure at all n locations
  Clone ID: PAT_MRT3847_108802C.1
agcgtttttgggagtgtcttttaatcttaatttcgattgcatttgtctgcaatttcatacaaatatcaaggaatatgacaaaattgcaattataactgcaatttaaaanccttagatttgtcatagtaaatgttgatctcaggttatttggttatgcaaagtttaaacaattaagcatatatcatgatatccatgttagattcattaactccctagtccaacaattttgtacattattattattattatgagaaaata

SEQ ID NO: 9737 - DNA, 255 bp, Glycine max
  Clone ID: PAT_MRT3847_108803C.1
tttgtgtgtattcatctatcatatttgattaacgttattgctgggatgatgagtcaaattcatagtttatgccttaagtgatatcctctatttgatttggcagtctctgagccttatatatccaacaacgaataatttattggtaaactgaagaattattaattagctggtgcatctttgacggaataattgtttgctttattctaagcaatgacaagcttagtttatttggaattcttgatttttcatctcata

SEQ ID NO: 9738 - DNA, 344 bp, Glycine max
  Clone ID: PAT_MRT3847_108804C.1
ggggggaaaaaaaaaaaaaaccttttttttttggggggggccccccaaataaacaggggggggaaatttttccctatatggtagggggctgggcagaacaaaatggggaaccaaaaaccccccccttttttggggggtctatgaacctcctttagggcccgaggaaaagggccccctcaatgaaaggccccccgggacccctttgtttccccccttggggaaatttttaaaaagggggaaaccccggggcttttggtttgcccattgcaaggccccccccattttttgaaactatacaaagccccaaaaatttacttcctttattttaaaggttggaaaatttg

SEQ ID NO: 9739 - DNA, 332 bp, Glycine max
  Clone ID: PAT_MRT3847_108805C.1
ccacgcgtacggcctctgatacccagcaaagtcctctgtaacagctactatcatagtcacgaaggcttattttgccgcgtgcagatgacatagatcacaacacgataagcaaccgatgatgggatgtctggaactatcggaagtggcttttatgccagttattcatgtcctacttatcagtgcattgagagctttgatggcaactcactttttcgatcatattctttcaccagacattcagtaagcctcgaacaagattgagctcgtgatattcacaccttcacttagcgcatacagttttgccaaaagtgtctgactcgatgatatgacat

SEQ ID NO: 9740 - DNA, 145 bp, Glycine max
  unsure (1)..(145): unsure at all n locations
  Clone ID: PAT_MRT3847_108806C.1
ggggtttcggacctgactcgnaataaagacggcacaggggttcctagttaggtttaagcgtcgagcctctgagctgtacatttgcattgccatttttcacactctctctgctttcaccatgtggacactgcgtggagcttttttt

SEQ ID NO: 9741 - DNA, 319 bp, Glycine max
  Clone ID: PAT_MRT3847_108807C.1
gaggtcaatggaccagtaccctacaccaatcctgaagcataggctgatgctcaccgatagtcagcttcatgttctgtgtaataccgttaatggtgattccatccgctaacacttgacgcatcattggatatccatagaactcggattgcaatctaagcaccttttaatttcatttcataaccgtcgcactggcaggtataccaatcataccacatgtgactatcattcctccatgcttagtacatagatatcacagctaactaatagatccttctcaaggaaaaggagctgctcttagcataggtagcacagctcacat

SEQ ID NO: 9742 - DNA, 317 bp, Glycine max
  unsure (1)..(317): unsure at all n locations
  Clone ID: PAT_MRT3847_108808C.1
tcgcntgaatcgcangcacgcgtacgtaagctcggaattcggctcgagcaantnntanaantacttccttacaatcannnccancattaactatggntggttatcncangcnctacgatgatcngggtcgcgangttgncgngtatggnaacgtnnagagncaaaccgncgnntacngcnaccctgttcatgctgctagtgtcacctatgtagccaccagaactgctgctggnggttacagtgttgggattattaancagntgggaccncaatnccnagggcgtggacntngtaagccgggttcaaanggtgccccc

SEQ ID NO: 9743 - DNA, 210 bp, Glycine max
  Clone ID: PAT_MRT3847_108809C.1
acttggagatcgagacgatcactccctcttgctgtctgtgctcctcttcctctcggaacgactttggaagttctttgagatcacccctgagaaaaacccacagcttcggacttggatatcttcctcagttctgtggatatcaacgaaggagctcttcttctaccacacttcaattcaaaggccatagtgatactagtgattaatgaagga

SEQ ID NO: 9744 - DNA, 394 bp, Glycine max
  Clone ID: PAT_MRT3847_10880C.1
ctctgatcggactcaccccacaaatcagcctattggtgataaaaaccatattgcagcatatcccaaccatgttgcgatgggctatgttaagcctgtggcgggatggtcctctaccactgagaatgacgatgctttttatactgccaccctcgggagactagctgttgcatacgaggcacaagccaggatcaatgtggcccacttacttccattgaatgctgccgacaagaggacagctctgactaacatagattttcatggaaagtggcactgatctatctcaggagctaccgggctgagagagaccctctcccactcctaacctgatgagaggaacacagggcattgtatagatgagaatgtctgggtcgcgatgtcatacgtcttatagatg

SEQ ID NO: 9745 - DNA, 895 bp, Glycine max
  Clone ID: PAT_MRT3847_108810C.1
ttttaaaattttacaatattgttgcaaatcctccaaataaatacatagtcattgtgtagggtacttcagatgaagttgtagattgctcccatggcaagcaactctgggaactgtgtaaagagaagtacgaaccactgtggctcaaaggaggaaaccattgtgatttggagctctttcctgagtacatcaggcatctgaagaagttcataacaacagttgagaagtctccatcgcaacgatacagtttccggcggagcacagaccagtttgagcagcctcgaaagagtacagatatttttgaagtaagtagaaagagcactgatcgtagagaaaagccaaggaagagcacagacaagccagaaaagctgaaaaacttgtctaataattctgatatgttagagaaattgagaatgacttttgatcacaaggaaaggtctaggagaagtgtggattgtcatgagaagtcccggaaaagcattgaccatcaattagaaaaagcaaggaagagtgttgacaggctggacagaataaggagtggataataattcttcttatagtgaaattatattcatgcatgggttggttttatggggttctttttcttttttatattggtcatcatgttgtgtagtatggcttatatcagatatgaatactatttagcattgaagaaaagggtttggtgtcatagtgagattcacttttcattcatatggtatggcctatttacctctgttgcactctcccactttatgtgacaaatgctactagcatgttagcacattaatcttttgaaaaatttgtcaaaaatattttatcaaaagatacaaagaaattcttatatttgtattttcatttcttattttagttttagctaaggatcaatgttgtgatc

SEQ ID NO: 9746 - DNA, 264 bp, Glycine max
  Clone ID: PAT_MRT3847_108811C.1
tcgttcacgcgttcgcccacgcgtccgcccacgcgtccgacttctcacacctacttccttgcaaagccaccattctcccttcatgcattgtgggcatggctcttctcactgcccaattctctgtttcccaatatatctggagcctcagtattcaaggtctgaggctgtgcttccatgtttggccttcatggggtgctgatatgacgccgaagatggcatcatgggttattccctcaaaatggattcttttgagatgatgagttg

SEQ ID NO: 9747 - DNA, 904 bp, Glycine max
  Clone ID: PAT_MRT3847_108812C.1
catgatcgagaaatggtggaaggctaataatgttgagatttcaccaaattgtcctaggtgtggttctaccaataccaagttctgctactacaataactacagttcaactcaaccacggtacttttgcaagggctgcagaagatactggaccaaaggaggatccctccgcaacgtgccggttggtggtggctgccgcaaaagtagaagcgctaagtataataagaccttcagacaagccaataactcagttggctattctgatgatttaatggcctcacctaattcagtggtgtcagatgctccaagtattgatctagcacaagtttatgcgagttttctcaaccagaagccagatcaagccgtccaaacagttcgctatcctaacgaaccagattattattcatgcctattgaacactactgattttggccatagtgctctctctgaagaagaacttggtctcactgattgtttgcattttcatgaacaatccacagaatcacatttcggtgagagtttccaaatgtatcttttcgggttcaactctatccataatcatcaagaatattacagtagcagttatgataccacaaataatacaaattttgagttgccacagttgcctggtgaagagacagaaatctcacacggtgatatgttgtggtccaaatccaattctgagatgatgctcgatcatgctttgcaagcctcccaaccgcccctttttggacctcaatctcatgatgcagacttcattatgggaaattgttggagccacttcgatttgccaagggatgcttctttttccacgctttgataatatgtatgattcttcaatactattgcctcaatttgttttgcttcttatatgtaatttatagtttatgtataggttcggtcaaat

SEQ ID NO: 9748 - DNA, 318 bp, Glycine max
  Clone ID: PAT_MRT3847_108813C.1
gagaacgaaccagagaatgatttcagtgagtgatcggtgttcacttgatctcatcataatcgtcaacgtcaattgaagaagatgccgatgataaacatccacgtcggcaggcctgaaaaggcgactcaccccgacacgttgaacgcggctttggccgaattcatcccaaccttcatcttcgtattcgccggctcatgctccggcatcgcctaaaagaagctcaccgaaaaccgcgctgccaaccttgcctgcctcatcacaggctccatcggacatgcattcgccatcttcgtcgacgtcgacgtctgagccaagatc

SEQ ID NO: 9749 - DNA, 277 bp, Glycine max
  unsure (1)..(277): unsure at all n locations
  Clone ID: PAT_MRT3847_108814C.1
gnaaaccttctcttacccttctctcaagtttcaaganatttcatcatggctccanaganggacaagngctccaccaccttcctccaagcncgcnanatctngcggtggcaagcagaagangaagaagtggagcnaggganagcnaaaggngaaggtgaacaatatggtgctgtttgatcagggcacctatnanaagctccttnntgangctcccaaatacaagntcatnantcctttccattctntctgatngtttgangnttaatggancacttgc

SEQ ID NO: 9750 - DNA, 327 bp, Glycine max
  Clone ID: PAT_MRT3847_108815C.1
tcttgccaagatgttcaatgatgtaagtgattagggcccaaatgagagagaagaaaagtgctgtagcgactgcatgttgctgagtgtccttcattggacagagccttcttgtgtttctttaaatatgcagctaagagactgcatattaacctgagtccttgacactacgaccctaatgagtgtgcaataattattccccaagcctttcatcgacttatgcaacacgcttgcaaaatactgttcctggatctaacagtacaggggttcatcgtcaaaggtgcatgtcccaaggttctagatggctaccttgactgtaccacctgtttc

SEQ ID NO: 9751 - DNA, 1933 bp, Glycine max
  Clone ID: PAT_MRT3847_108816C.1
ataatgtgacccgaagtacagatgagaagcagttgcttgattggcatcttgcaaatttggaatatgcaaatgctgggtgcctttcaaatctttcggctgcctattgccgctcagatgatccttatgaaatgagcggtgatcactgctttcttgctggaggaaatatggggttgataaaagctttatgtgaaggagttcctgttttttatggaaagaccgtcaatactatcagatatggaaatgagggtgttgaggttattgctggggaacatgtctttcaagcagatatcgccttatgcactgtgcctcttggagttcttaaaaagaaggccatcagttttgaacctgaattgcctgcaaggaaattggaagcaattgagaggatggggtttgggctgctgaacaaggttgctatggtttttcctcatgtgttttggggggaagatcgagacacatttggatgtctcaatgaacatagtcatcaacgtggggaatttttcctattttactgttaccatacagtttctggaggtccagcacttattgcgctggtggctggtgaagctgcacaagcctttgaatccacagatgcttccattttgctgcatcgggttttgaccgtgttaaaaggaatatttcatcccaaaggcatcattgtgcctgatccaatacagcccacgcgtccgagatggggcagtgatcccctttcttatggttcctactctcatgttagcgttaattcatctggtgccgattatgatatactcgctgaaaacgtggggaatagattgttctttgctggtgaggccacgagtaggcaatacccagctactatgcatggtgctttcttgagtggcttaagggaagcatcacacatttaccgatcagctcggattcaaaacaatcctaggaagtgcatgcctaagaatatcgtaagcaatgacatcctgggtgatttattcaagtggcctgatttggaatttgggaagtttgctttcattttttatccgtctccagaaaatctgcagtcaacggggcttctgcaagtcactattggtgatgctgaagaaatttatgaggagctgtttagcagctacccaaatgcagcaaaatggcccttgcagctgtacactataatatcccgtgaacaagcccagcagctacaaaaagttgagggagggaatgaaagcctgttatccttttttacggctgcgagaagactacagctgggggggccaaatgctttgcttactgcaggcaacacattgatagctagcatagctcattcacggaaaggccggtggaggaaccgtgtaattacttgttaacaccatatcttaaagagacacagttggtgtatcttgtcttgttgaattgaaaactgtgctatagacacccttaaaaaaggaattgcttgaaatgagcatgacttttttcttttctgcttctggggtgaaaagtctgtatataatatagactttcatagacaattgatttgcggccacagatagaggatttttggaggcttgactggagagatgattcaatttctgaaggaaatcttcagtctcattttgagatgtttctgttagctgatcatagtgtcatagaacccaggaaaattagttgaattttgaagacagagatattgatactccaagaggggtggagaattagtatacagaggggttcaatgcccccaattgtttgtaccatgaagtacttaccgttaatccaccccatggagaacattagtgtttttcttttcttttcttttttctggagggcctgtggcctgtgtgcctcacttgtaacttgtattgtatcacgttttcttaattccttgattggttctatatagaaggcttgcatgttgtagaacagcttcatacctcctgtttgctgccttagattctcattgtttttttcttcc

SEQ ID NO: 9752 - DNA, 429 bp, Glycine max
  Clone ID: PAT_MRT3847_108817C.1
gctagagatccaaagccaacactccttacgctttccatttcactgtatccgctctgtgcagaacacaccaacatgggcgaacgtgaccacacagaccgtaccactttcgaccccttctatctcagacccctacacacttgaaacgagaaaccacagcggatcatggcaggaacactcctggactatcaggagacccggatgcaattgacaaaaacagggctcctgatgaaatacatgaaaaatcggaccctctagcagatctacctacacatcactcccaatcaagcgagcaccaaatcatttagacaccctcttgaagcccacactgaaggacaaagctataaacatcatacccttacagaatcagacccactccgttcagaaaacacacttcaaggactcacaaatgatcctggacaacaacggcca

SEQ ID NO: 9753 - DNA, 930 bp, Glycine max
  unsure (1)..(930): unsure at all n locations
  Clone ID: PAT_MRT3847_108818C.1
ggaagaaaccctagccactcttccgtcgtgacgatgcagatcttcgtgaaaaccctaacgggtaaaacgatcacgttggaggtggagtctttggacaccatcgacaacgtgaaggccaagatccaggacaaggaaggcatccctccggaccagcagcgcctcatcttcgccgggaagcagctggaggacggccgtaccctctgcgactacaacatacagaaggagtgcacgcttcacctcgtcctccgcctccgtggcggcgccaagaagcgcaagaagaagacctacaccaagcccaagaagatcaagcacaagcacaagaaggtcaagctcggcattcttcagttctacaaggtcgacgattctggaagaaaaaagctaacaatgcttcagcagagctgaaatattgcagtgatatcagttacttttgtcctttttgatggggttcgaaagtcacaacaagggaaagacaaaaacggtggaagggcacatttttaccctttttttatttggtgctttagggtaaaataagcaaagcaatttggaaggggctggatcatatttgctgggattacggctccttccaatggttgaatcacatggaatcattttgggggaatacttgtcagtagtaaacatctgattccaaccttgtccacccgcatcacactttactataataaataataatgcatggaattttcactaaaaaaaaaaaaaaaaaaaaaaaaaaaaaaaaaaaaaaaaaaaaaaaaaaaaaaaaaaaaaaacaaaaaaacaaaaaaaggggcggccgtgccttaatgtacttagcttacccacacagccctgcaaaaagtaaaaatattctttaggagcacctgggtgcactagtggggcccatntttccgagctctctacatggcaaacccccttcnnagcctacctcaa

SEQ ID NO: 9754 - DNA, 279 bp, Glycine max
  Clone ID: PAT_MRT3847_108819C.1
aaaaaaacacaatgtgttacttgcaatatgtgatataaaaaagtgatccggggcgaacacacaaaacaaactcaacaacctggggatgggtggggaaaaaaaaattaacctaacccgcaagaagaacaacaccaccgggttccttggtcttcttctccgggagcttaggaataaggtggggctttacaacaatgggcgtggggttcgggcgacacaccttttccgagaaccttgaaatacccgtgctgaggggcgtcaattacaggggcaccgtgcttc

SEQ ID NO: 9755 - DNA, 651 bp, Glycine max
  Clone ID: PAT_MRT3847_10881C.1
atccaaatcctcgtacccgattttttcgccaaatagaacaacgccgattcatcgttcatcgtcactgccacttcttcttctctgtttggaggtcgaaaaataaaaggctgaaacgaagaaagcaagcaagaaaaaaaaaagaagaagaaagtgaaagactgaaatatccaccgttgtatataagcttttacattataaggagtaagtaaaaaagaaaaatgtttacgtgcatagcgtgtacgaagacggatgataaggatgaagaaggaggatctcgtgagagtggcacgccgagtacaaaagaagccgtcaaaagcctgaccacgcagataaaggatatggcactgaagttttcaggtgcatacaagcaatgcaaaccatgcacagggtccagtagctacaaaaaaggacataggccatatccagattttgataccatctcagaaggggttccatacccttatattggaggtgcaagctcaagttcaacccctgcatgggacttcacaacctctcactaccctggtggaagatctgaccctagatttgctggggcatatggcggtgaccgcaccccgagaggacgtgactcatcatcagtttgtgatgtagtcttagaggatgaggatgagcctaaggagtggatggcac

SEQ ID NO: 9756 - DNA, 1102 bp, Glycine max
  Clone ID: PAT_MRT3847_108820C.1
ggcctgcaaccctcgaaacgtgaatagccgtggcggccacctatttctctgtttaacgtcttcactcattctcattttcgcctcaaactacttcttccaccgatcactgttcagcagagaagtgttgccttggactcttgaggtgcaatgagattggagaagtgttggttctgttcttctaccatataccctggacatggaatccagtttgttcgtaatgatgcaaagatttttcggttttgtagatctaaatgccacaaaaactttaaaatgaagaggaaccctcggaaagtaaaatggacaaaggcatatagacgagtgcatggaaaggatatgacacaggactcgacctttgagtttgagagaaagcgaaacagacctgagagatatgacaggaatcttgctgagaatgtcctcaaggccatcccaaagattgataaaatcagagtcaccagggggctgaaacaccataagaataggatgaaaggcaagaagcagaagctgcaaatggaggcagctagggagttggagcagggcataagtctggtcaaagctccatctgtgcttcaaaaggacccttctctcactttacccaagatcaaagttggggtttctcaacaacaatcagaggacaatcatcccatggaagagtgatgtcatgtcaatgctgcactttcaaccccagttttgtgattttgtgcttcataggtggattcgttgtccaaattacaagttggttcattgctgatccgacatgtgaatgatgcgattttgaaacaaaagttttggccgttgaaaatatgttagtgatattgtttttggacacaataatagtcctgtgcgacagtgaactattatataaaccaaagcagaaagacgttgcccaacaagaagtcgccttggacttattcgagtattcaatctgttaatctcaagtcaaatgttaaatttgtaggtaagtaaaagttctttatactaggtacttcactcaagaactaatttgactgatgaatgcctatttagaacatagaagatgttattttgacatcttagtcatatttttgatggatttgataatgtcatcattctcaagatctttttt

SEQ ID NO: 9757 - DNA, 528 bp, Glycine max
  Clone ID: PAT_MRT3847_108821C.1
gagtttcatttttctcacgttctttctttctatcttttttttttttcaatgctcttactctataacctctgcttcgtttgttcattgtggtagctgcgagaagacgacagaaggggggtgcacttacattgcctccgcgcaaactgctatcctgcgctgtgctgggaagacaacctctttcatggctcgaaagaaggtcttgtctaattagatctttgagcaacctcgatcctgcagagcatctctaaactagaaatggatggtggtggctacaacttaacaacaacctctttgagcagttcaatggagcaagtgatgagacccaaatcaccattgccgggcttagttgattttcatgggaagcggaagcaaatggttaagattcaggttttggagagagagattggtttgcttcaggaattaaaatcacttgaaggccttaaccctgcttctagatgctgcaaagagcttgatgcctttgtagactctgtttcagatcccttcacacccacaagaaaacagacagtc

SEQ ID NO: 9758 - DNA, 357 bp, Glycine max
  Clone ID: PAT_MRT3847_108822C.1
aacgccctctcgaggggaattccatattgatcacactgtttcaaatgctacttcttattataaatggcaggggccagaacagagtgcaataaagaattgtcttgtgggcctgacgaacccctcactagatttgccttccaactggcgatggggctcaaagatgaaagagcaaatccctggttctggatgtatagtgctgaaccaaatgacgccatggctgggctcttttcattagagagacatgtcctttgcacaaactacgaatttaacatgtttgagtcgagggaccccgaaaattgcctttcgaacaagttctgcatatggactatttttctcacagcttaaccaacttgaact

SEQ ID NO: 9759 - DNA, 192 bp, Glycine max
  Clone ID: PAT_MRT3847_108823C.1
catcaccgatctcgtcgcgctcccagcagaccccaccaaaatgtcagactcaactaaatatacttccaggcttctgaaccggcgagtgctcgtgatcggcgggtcttcaggcagcggtctctgcgtcgcacaagcatccttggagcatcgcgcaatagtcacaatatcctcttcctacgaggaccgcatcaa

SEQ ID NO: 9760 - DNA, 260 bp, Glycine max
  Clone ID: PAT_MRT3847_108824C.1
ccgggccggtaataattgccgggacgagctgattattcggcggccgccctccttttttttttttttaggccgaactgacaatgtttattctaattctcgaattataccccagccgaggacgcctatggccgattacggagtaagcaaccaactggggaaggaacattatggcggacatgaacccaaaccaaaatgaacgagttccagaacatgacagttgaagatagtgactttacaatccataggagaaggaacatttt

SEQ ID NO: 9761 - DNA, 1401 bp, Glycine max
  Clone ID: PAT_MRT3847_108825C.1
tcccacgcgtccgcccacgcgtcaaaagcaaacagaagtgtctaatcgaagagagcataagcaaatagaagagcaaagagagtgagaaaagaaggaagaagaagaagaagagatggcaaatgaactacccgtcaaagcttttggttgggctgcttcagacacttctggcacccttgccccttttcatttctccagaagggaaaatggcgtcgatgacgtcactctcaagattctcttctgcggggtttgccactctgatctccacactctcaaaaacgactggggtttcaccacctaccctgtcgttcctgggcatgaaattgttggtgttgtgacagaagttggaaacaatgtgaaaaacttcaaagtgggtgataaagttggagttggtgtgatagtggagtcttgcaaggaatgtgaaaattgccaacaggatctggagaattactgtccccgccctgtgtttacctataactctccttattatgatgggacacgaacccaaggtggttattctaacattgtggtcgtgcaccagcgttatgtgctccggtttcctgagaacttgccccttgatgctggtgctcctctgctgtgtgctgggataactgtgtatagcccaatgaaatattatgggatgacagagccaggcaaacatttgggagtggcagggcttggtgggttaggccatgttgcaatcaaacttgctaaggcttttgggctcaaagttactgtcattagtagttctccaaacaagcaagctgaggccattgaccgactcggggctgattttttccttgtttcatcagaccctgcaaaaatgaaggctgctttgggaaccatggactatatcatagacacaatttctgctgttcattccttgattccactgcttggtctgctgaagctgaatgggaagctagttactgtagggttgcctaacaaaccccttgagcttcctatctttcctttagttgcaggacgaaagcttataggggggagcaactttggagggctgaaagaaactcaggaaatgcttgatttctgcggaaagcacaacataactgcagatattgagctgattaagatggatcagatcaacacagccatggaaaggcttagcagagctgatgtgaaatatcgctttgtgattgatgtggcgagctctttctcaagtttttagaatccactgtgattctccaactctttgcatcatgtgtcagtatttttgaagtagttaagattggtggtattaactagtctataagatgttgaactttaaagatgagagcatccgctcttcaattaataatactttgggttttgaatttacattaaaaaaaaaaaaaaaaaaaaaaaaaaaaaaaaactcgagactagcaaaaaaaaaaaaaatctcgg

SEQ ID NO: 9762 - DNA, 1363 bp, Glycine max
  Clone ID: PAT_MRT3847_108826C.1
ccacgcgcctcagcagcaaagggaaaagcaaacagagtgtctaatcgaagatagaagaagagatggctaaatctccagaaactgaacttcccgtcgaagctttcggttgggctgcttcagacacttctggcacccttgcaccttttcatttctccagaagagaaaatggcgttgatgacgtcactctcaagattctcttctgcggggtttgccactcggatctccacactctcaaaaacgactggggtttcaccacttaccctgtcgttcctgggcatgaaattgttggtgttgtgacaaaagttggcaacaatgtgaaaaacttcaaagtgggtgataaagttggagttggtgtgatagtggagtcttgcaaggaatgtgaaagttgccaacaagatctggagagttactgtccccgccctgtttttacctataactctccttattatgatgggacacgaaccaaaggtggttattctaacatcatggttgtgcaccagcgttatgtgctccgatttcctgagaacttgcctcttgatgctggtgctcctctgctgtgtgctgggataactgtgtatagcccgatgaaatattatgggatgacagagccaggcaaacatttgggagtggcagggcttggtgggttaggtcatgttgcaatcaaacttgctaaggcgtttgggctgaaagttactgtcatcagtagctctcctaacaagcaagctgaggccattgaccgactcggggctgattctttccttgtttcatcagaccctgcaaaaatgaaggtggctttgggaaccatggactatatcatagacacaatttctgctgttcattccctgattccactgcttggtctgctgaagctgaatgggaagctagttactgtagggttgcctaacaagccccttgagcttcctatctttccattagttgcaggacggaaacttataggggggagcaactttggagggatcaaagaaactcaggaaatgcttgatttctgcgcaaagcacaacataactgcagatattgagctgattaagatggatcagatcaacacagccatggaaaggcttagcaaagctgatgtgaaatatcgctttgtgattgatgtggcgaactctttcgcaagtttgtagaagccaccatgattctccaactctttgcatgtgtggcctttagatgtctcagtattttgaaagtagattggtggtataagtagtctataagatgttgaactttaaagatgagaacatctgctaattaataatactttgggttttgaatttatattatgttcctttatgttgatgaagtcgttgaccaagcgtttcgatttttgggactcgtgcgacgt

SEQ ID NO: 9763 - DNA, 490 bp, Glycine max
  Clone ID: PAT_MRT3847_108827C.1
ggctcgcgtgcttgtgttgttcttccgattgggttcaatcaaatcaatgatgttatggtggcaggggcgtgagcactatatctattccataatcaacggttcccactatctgaattgccggcgagcccattgggacctctatagaataaacgattctgcaattccctttaatttaatattaccgactctcttttagatataagacaaacatatcgaacttaagtagaccgaaagacactcatctctcaaagatagccaatgaataagcgaatctaatattatttactagagctataaagtcttatttctttctcgagaaaagtcttgaaccattgcgctgaaagctatcggtatgtatctaaaccatcttggtaagccacgaagatcattccataacgtgatgaataacctgaagaccattcagaattgtcgaacaatgaccatacataaaataccctgacatttgcgccttcctacataaggtaaaaat

SEQ ID NO: 9764 - DNA, 319 bp, Glycine max
  Clone ID: PAT_MRT3847_108828C.1
agcaataatgtataatatatccaattatgtgtggtacagtcttacctaaactaccgtgcacctctcacgctggtcgtcaacctaaacagcctcaaggactgtctcctacaattaaaaaccgtcagcgccataagaaccacgcaacatatgtcgcagagtctgctgttcaacggtaaaagcaagtcatggcgagtcgcgctactgcacaacgaacaatagctgctccgagctgtccagcgtcggcttggcacataaaatctcatactatacactagacccaactaccgagccagtgactccggcctacctgctaagcaac

SEQ ID NO: 9765 - DNA, 413 bp, Glycine max
  Clone ID: PAT_MRT3847_108829C.1
ggctcgagcacctctgctgttcatcatgcagcattctgaggtgatactgctatgtagcagctcaatgaggtggtccgcgagaccggtggcgcctgtaacggtccaaccaacatgcaccgtcccgtcaatagtgctactcatagcacttgacctgctcctgctcgcaccaagtacctgagtccattctcagagcagattccgtcattcgtgaccggagaattcgctggtgactacagatgggacactgctggactatacagctgacccggaaaccttagacaggaaccaggcgctggaggtgagccacagcacattgtccatgctcggtgcacttggctgtaccttgccagagatgcttgcgaataatggcctgaaatctcgaaagagccgtgtggatcatggctgttgtcaca

SEQ ID NO: 9766 - DNA, 262 bp, Glycine max
  Clone ID: PAT_MRT3847_10882C.1
gctggtggttgctgatgactgctctctgatcgctagcgaacactacagatttcagccaacgaaggaacaggttttctgaacatactctgacaaccagcctggcgtgttgatataggtctttgaaggtggcagaggaaggactaacgataaccattggttgggccgatttgaactttctggccttcgtcctgcccccatgggtgttcctcagattactgtgtgcttggacattggtgccagtggtattgtgaacgtctctgcc

SEQ ID NO: 9767 - DNA, 350 bp, Glycine max
  Clone ID: PAT_MRT3847_108830C.1
ctttcattccgtgtcgtaatattccccaatcaagctctctttagtctctacccatttcccttccattaaagtaactcgaaacggtttccctttcccatatggctgacgccaaagattcctccatagtagactccaaatcttccccaacctcaaccttaacatcctcagcctcacaacaacaacataggattatacgaactttcttgatggctcaggacatcctcagaatcctaccaactctcctctccgcagcatcaatcgccgtcatggtcaccaacaaccaaaccgttctcatcttcgctatccgcttccaagcccacttttattactcaccctccttcaagtttttt

SEQ ID NO: 9768 - DNA, 660 bp, Glycine max
  unsure (1)..(660): unsure at all n locations
  Clone ID: PAT_MRT3847_108831C.1
atgttccttaaactttgccctacgtcgatcccgtgatagacactgttatctattcttctttcatttcctatatatgcagctctttctttcttttggttaactcatcacggttggctattactatatatattattatgcagattcattaatcatggaaaataagaagagaaagggaaaagactatgaggtggaagacgaagagatgaagatggacaagttttacgcgctgttgcggaggtaccgaacggcgcggagaagacgacagaaaggagcttcaggaattagacaagagtgagaaggagaagaggatgaaggcgggaacagagcaacaccgtgtttgggtgccatcattcgaatgggaggatttcacagaccaggttcaattcagaggacaacaatatatgcaattcccaacttcatctacatctccttcgccgcttgccggtggcacagacaacaaacaacgtaagcacgacgaccaacactctcactctctggatctcaacctcactctgtagctagctactcgtctttgaatccttcttatctctctcttttcagaatttggtccttcatttttctatctataggatcatgaaaattgtatccaagtactagtaatatcctttcaatcaagtatttctttttccataatcnana

SEQ ID NO: 9769 - DNA, 150 bp, Glycine max
  Clone ID: PAT_MRT3847_108832C.1
ctgactacgaggggtatgccgggttctagcaaatatattatttcaacttcttttctcagcagccagttcattttccttcttcataacatctctctcactgtcacatgctctctatttatcccatccactccaatagctaaggaagacttt

SEQ ID NO: 9770 - DNA, 202 bp, Glycine max
  Clone ID: PAT_MRT3847_108833C.1
gtgttctttactatttttgcactctatgtgacacatggattccgattccgaaaaggatgactttccttcataagaatgagattaaaaaaaaaaaaaaaaaaaaaaaaaaaaaaaaaaaaaaaaaaaaaaaaaaagcaaaagacctcaatgggctccgagatacaaaagataaccataaaaaagaaaaacaaacggggaaagc

SEQ ID NO: 9771 - DNA, 212 bp, Glycine max
  Clone ID: PAT_MRT3847_108834C.1
gcgtacgtaagctcggaattcggctcgagctgggatatgttgctgcatccaaggacccggtgattggtaggcagcttacttttaacatacacaactggctatgtttctcctttactcttggctgcttcttttgctggagcactacagagcttgctctcattccgcaagttctcggcatggatcaatcctataagctgagcaatgctgttagg

SEQ ID NO: 9772 - DNA, 421 bp, Glycine max
  Clone ID: PAT_MRT3847_108835C.1
caagaactcgaaatggctccaagagaatctgacggatatggattccaaggtgaagcaaatgatcaagctgatcgaggaagatgcagattcatttgccaggagggctgaaatgtattataagaaacgcccagagcttatgaaattagttgaagagttttatcgcgcataccgggcattggctgagagatatgatcacgcaactggagtgatacgtcaggcccatcatactatggctgaagcattttctaatcaagtccctcctctggcacccgcagatgattcacctggagtaacttccatggagactgaaccacatacaccagagacaatccacttttcccgtgcctttcttgactcagatgacctgcaaaaggatgctttaactcatttccatgcaatcagtcgaaatggatcttatact

SEQ ID NO: 9773 - DNA, 179 bp, Glycine max
  Clone ID: PAT_MRT3847_108836C.1
ccgaaattcccggatcgacccacgcgtccgaagggtttaacttttttgctaaaacccgaggacatgacgacgagggcagaagcggcagcgccgcgcgctattcgaggaatatactcgacacaacaacgcctctgcttctttgcccttcgatgctacaccggctacaggcaccaccccca

SEQ ID NO: 9774 - DNA, 489 bp, Glycine max
  Clone ID: PAT_MRT3847_108837C.1
ggctcgaggtgtaacgtcatgtgttttcttgtgccaacggataccttgaagaaggagaacgtttaaattttttgggcgagttgtagccgggagtcgtattgatgatgactgtacctgttggtactgaccggttcatgccaactgacactaacgcctccgctattacgccgggaactggaccaggaactgcactagtacggtcatttttatggaaactgttctttgagaagcgtgatgattactgggtgagtggacaggcatgactatcatcgggcgtgctcacaagctggtcactgctgcatgcggaggaatttgaaccgatgagagtgaacggaccgggcaacgagaggctggactgtgctgtgtgcagggagctatcaagcctgataggggagatactgcacagtgaaacgcgcatggctcaatatgcataccagctacaggacctgctgaagaaggacatcactagtgagtatgtgtgtagactga

SEQ ID NO: 9775 - DNA, 308 bp, Glycine max
  Clone ID: PAT_MRT3847_108838C.1
atcttgggtgggggccctcatataaactattcacttctattacacagaggcgtgtggcccacttggcatatgtaccaaccaatcaacactggtctatatatcatcatgatcataacacagatgatgcatattgcattgttgcctcttgcaccagagactacttctgtgtagcgtattcatatctgatgaccttttaccaagactgtgaaataaccatgaggcgatgagcgctccataaactatgagactggagaccttctcacactgtgacttgacagagcacactggctctgcctatcgctccaaaa

SEQ ID NO: 9776 - DNA, 275 bp, Glycine max
  Clone ID: PAT_MRT3847_108839C.1
gtattataattgggggacaggcaacaaaattagaacgaagaggggcttagaattaaacaggattccccaaaaacgacaagtaaaaaaagaaaaaatacccaaaaaagatggagagcaacaaaaaaaaaaaaaaaatgaaaaaagaaagcaaaagagaaccattactcaaggaaatgagaaccacaacagcaatcggatagcggacaaaactgaaataaccccaatgattgtggaaaaaggtagaatgaggccacaggtaacaaaaccctaaaaga

SEQ ID NO: 9777 - DNA, 214 bp, Glycine max
  Clone ID: PAT_MRT3847_10883C.1
taaggttccagatgtctataaggttttccaattcaaagtacattactaaaaacttatatatacaagcttatctttatcaaagcacattcctattcaaccctttagacacaagcaatataaaaaatttataccagcgacctatccctataataaagcatgattttcaatgataaaagactgcttcatcttcactacacttcatctatacagcaaa

SEQ ID NO: 9778 - DNA, 426 bp, Glycine max
  Clone ID: PAT_MRT3847_108840C.1
aaaggaaacaacctaagtcctagacctgaatttgaattgtaaacattcgtagaagcaactcaaaatttgaagcctggaaagacatgcacttaggtggaaagaaatatatttattacaattgtataatagattttcttattatatagaaatgaacttatgagtgactggtgtgatctatttatcaaatctaacctacttcacaagaaagttttagtgtttatttataattagaagcctatagcaaagtcttttgtgattgttgaatatattgatgatacatggaataacaaccctatcttgtcttctgatctttaccaaagagccttggttcgtttctgtgtcaaatttatagatgttaaggttttttggtgcttcatggatattttttttttacagttttttatatatagcttgtgaagtatgttt

SEQ ID NO: 9779 - DNA, 347 bp, Glycine max
  unsure (1)..(347): unsure at all n locations
  Clone ID: PAT_MRT3847_108841C.1
cccacgcgtccgcccacacgncctttttattttaatgncngaaacaacacaaactacacgtgatttcaggtgattgcgggctgggaaaataaccctaataaatagggctttaattgcccatcataaatggcaagttaagccaaatttaatttactttacctcacgtcatcaatcaatttgcttgcaattccttctcttctgttatagtgagcaacccaaattgctttaatgccacaagcattgatggttgtttttctattacaataaaatgcaccttcctaatcttcataattactcaagttaacatactgttttttttaatcctacctttttgaaaaataacaatt

SEQ ID NO: 9780 - DNA, 221 bp, Glycine max
  Clone ID: PAT_MRT3847_108842C.1
gagatagccagaagagtttctttttagggtgtgaagggggcaaaaatagccctcaaattatctttagggcaagaaaaaataaaaccaacttttgggaaaaaaaaacttgaaaaactactttggccattcacccaaagatggaataacaagttatttgacaaattcccctgaaagaagtcccacatcctcccttccatggaaactcgaaccctatgacccct

SEQ ID NO: 9781 - DNA, 277 bp, Glycine max
  Clone ID: PAT_MRT3847_108843C.1
ggaaagactctgaaccagtgcaatctccagtatgactccacgcttcatggacttcttaggcctcgcagtttcatgaaatagccctgtggcatagacatggctagtaatcacagagtgggtaaaataatttgccgcaaatgtgctccacgtcaggatcttatagcctttcatcgccgcctggcttggtcaggtcttacacagtaatggaggcctcaagacatgattcagtaacttctgtgtgatggtgttggtcacagtcttcgtgttggtcaatgtt

SEQ ID NO: 9782 - DNA, 403 bp, Glycine max
  Clone ID: PAT_MRT3847_108844C.1
aaacgtcaaacactaaatatggtattatctccgggggaatggtgtttaccgacttatgtcgtcctctaccacataatcttcaaatgaccaaaccggatagcaatgaaatattttcacttcaatggattctacaccacacttgtattctattataaacaaatggcgccttattttaaccaggagatgtatccatccctatatacatttttatatatatacatacatatatgtttctaaccggacatgccaaaattttaattcccatacagaaatgtgaaccggccctcatggtttcatttgagcgactgatgaacccctttttgaattgattacaataaagctaccaacctgcctcactgataggagtgatattgtttcactcactatctccatcacccgttct

SEQ ID NO: 9783 - DNA, 3140 bp, Glycine max
  Clone ID: PAT_MRT3847_108845C.1
gatgatgagaatcaaaagaaagggaaaaagactagaaaataatttgtatcttgttttattggtctcaaccttcccctaaaatttcagttgaaccaattttttggtgcatgcgcatggctttaactagcaaaagttcttgtttctcaactaaagtagtctgctgctttgcttacaattagtccaatcaatgccatcccagagaaaacaaaagcacatgcaagtagttttgcaaggtggctatttggcacaaggtctccatatccaacagtggtcattgtcacaattgtgaagtataaagcatcaagaattccatctgttttctgccccttaatctggtttctgacaaggtagaagattaaagcacctacacctaaatagactgcaaggtagatagccattcttttaaaacttggatgcaaattctgaaatatggatgcagtacgaggaattgattcattgcaatttgtctctgtaggaacaagctctgcgtgaggagcacttctagaacggaggagccttctcttgtttaataactgctgtttagtcttttgagtcgcatcaagtgatcctgacagcaagggatcctttgcaccattgttggccatgcagaggaatttagaaacaaggatcagcaatataggacctttgaagtggtttgttgtggttgctgaaggagatgagatatgaatatgtcaaaggcagctggcggacagtcaataagagtgaaaactctggccagttaaagttggagtggtcgaaaaccccggcaccccctttaagtgcaatagaatatatccttgatgtggttgatttggtcttaattatgtccgtaaaccctggctttggtggccacactgtcacacttttgtgaaggcctaggattgctgagtcaaacttgaattgaaggtgaagaaggagatggcagcaacttcttccttgtgttcatcgaccctccaatcccaaatcaatggattctgccttcacaaaacctctctttcccatcctcgttccctcactttctccaggaagaaaatttcaaccacagtgaaggctacatctcgtgttgacaagttttcaaaaagcgatatcattgtttctccatccattctttctgcaaactttgcaaaattgggagatcaggtgaaagcagtggagttggctggtggctgttggattcaccttgatgtaatgggcggctctttttgttccaaatattacaattggtccaattgtgggttgttgcattgtgcctcgtgtgaaagttatacttttggatatacacccgatgattatattcccgaaaaagagggtaccagattatcatcaggtaagagctgatatagacagtgttcaatgtgaacaatcttccgccatccatttgcatcgtactggtaatcaagtgaaaagtctgggagctaaagctggagttgtcttaaaccctgctacccccttaagtgcatcataatatgtcctacacacacttttttcaaggcataggattggtgaggtaaacttgaattgaagtgaagaaggagatggctgcaacctcttccttgtgctcatcgaccctccaatcccagatcaatggattcttccttcacaaaacctctctttcccatactccttccctcactttctccaggaggaaaatttcaaccacagtgaaggctacatctcgagtcgacaagttttcaaaaagcgatatcattgtctctccgtccattctttctgcaaacttttcaaaattgggagagcaggtgaaagcagtggaattggctggttgtgattggattcacgttgatgtaatggatggtcgctttgttccaaatattacaattggacctcttgtggttgatgcattgcgccctgtgacagatcttcctttggatgtacacctgatgattgtagagcctgaacaaagggtaccagattttattaaggcaggagctgatatagtcagtgttcattgtgaacaatcttccaccatccatttgcatcgtacagttaatcaagtgaaaagtctgggagctaaagctggagttgtcttaaaccctgctacccccttaagtgcaatagaatatatccttgatgtggtggatttggtcttaattatgtccgtaaaccctggctttggtggccagagttttattgagagtcaagtaaagaaaatttctgacttgagaagagtgtgcgcggaaaagggagtgaatccatggattgaagtagatggtggagttggtccagcaaatgcttacaaggtgattgaggctggagccaatgcactggttgctggctctgctgtttttggagctaaagattatgccgaagctataagaggaatcaaaaccagcaaaagacctgaagcagttgctgtgtgaaatgcccatgtggttcaatattcaccgtatgctccaacgtaagctgtattttttgccccatagaggtttctccattaaattttggcatatcgttttactgattgggtggttgaatataagcaaaattgactgccagtatgagaaacaatcaagtaaaataatggcagacattgcttatgcgccagtttcaaagtcaactatattatataattaagttatgcttgtggctcaatcatcacatgtatctgactgataattactcaatactagtagaaattttacatttggttgtgttaaaaatgctccattggaattacaaaatgtagaaggtattgtcctggctctgagcatgatctcaatctaattctactgggttttacacagtactcatgaattagtggcctatcgagcaccattatgttgcctggcctgctgtcaccactggcaatttgcttttctctggaaataactataagaaatcagtccaagtaaggctgctgctgtgatgcgtagtttgtgtataatcttttggagtatcaggacaagtttaattcaagataaagccctttactctgtatcaccttgtagcctgtcaattatattcccccatattgtaaagcagttgagctttctatcaatacaagttttgaagaaaaccagctaaatacattatatgctttttttttttttcaaagttgataccattttgtttcgttctaacaaaaaaaaaaaaaaaaaactcgagactagttctcctcgtgc

SEQ ID NO: 9784 - DNA, 372 bp, Glycine max
  Clone ID: PAT_MRT3847_108846C.1
ggataagaaaaccctattttcattcattctctataattatcacgtaagggtattggtagtatttagaacatgaactttcatatcattctgatttattagaacgacaattctccctcatcattgaaggatgaaatagccaagatctgcattgaatgccttatcagaaacagctggagtgtaattttagcgaggaccaagtttggggcacccctgggcaagaggcaggtccatgttgtccacagttctgaaagttctaggtagcatcttatcaacatacagagttccatccaagtgatcacactcgtgttgtaaaatccgagcctgccagccagaagcgattattttgattggtgcaccataacgatccaaacc

SEQ ID NO: 9785 - DNA, 206 bp, Glycine max
  Clone ID: PAT_MRT3847_108847C.1
gttggctacttcagccgcgagcgcctcaaccttgaaccgcaaccaacttcttcaacaacttcctcttcggctgcggcaaaaaaaaccagggcctcttcggcggttcccccggcctaattggccccggccgcaacccattctccttcttcaaaaaaactgccgccaaataccttaaaacctcccctaacggcttcccctcaacttca

SEQ ID NO: 9786 - DNA, 1629 bp, Glycine max
  Clone ID: PAT_MRT3847_108848C.1
cggaggcggtggtttgtggtgaaaatttgcataataatcttttgcagaaagcaagcaagaaagaaaaagggccatggaggccctgcacttgcaccgcgtgcttctcatgcctgtttcccaaaaaacctcaatctttttgcgcgccagtggcaccccattatccacacttgcaaggccaccattgcgttggagctctcaaacttgcagtgccagagcagggtggtttttgggtcttggagcagacagcaagaagaccaatttacctgataccgtcaaagccggtgaccccgttctgcacgagccagcccaggatgttgatcctaacgaaataaagtcggagagagtgcagaagattattgatgacatgatccaggtcatgagaaaggctcctggtgttggtcttgctgctccccagattggaattcctttgaggataattgttttggaagatacaaaagagtacattagttatgtctcaaaggaagaggctaaaactcaagatagaagaccttttgatcttttggtgatcctgaatcccaagctagagaagaagggcaagaggactgctctgttttttgaagggtgcttgagtgttgatgggttcagagcagtggtggagcgacaccttgacgttgaagttacaggtttggatcgttatggtgcaccaatcaaaataatcgcttctggctggcaggctcggattttacaacacgagtgtgatcacttggatggaactctgtatgttgataagatgctacctagaactttcagaactgtggacaacatggacctgcctcttgcccaggggtgccccaaacttggtcctcgctaaaattacactccagctgtttctgataaggcattcaatgcaggtatctaatgcattttagtgaacaattgacatttgtagatcctaaaatggaggccagattctttacattctagaaatagtctcaacttaagaaaaattaaatctccctcaattttcaatgccatcattttgccaagaattgccattgcactactcctgattaattcacttcatttaagtttcaatgttgtagcttatactcgaaaaaaaaaatcagagttgtggactatggagtctggatattgacagtgcctagcttttctgcccattgacaaaaaattgggtttgctgtcttcttgttatttggagcattgaggtggctacttaggcattagaaattcatgtaacttttgtcagctctaatgcaaacttataccaattgtgtgcagatcttggctatttcatccttcaatgatgagggagaattgtcgttctaataaatcagaatgatatgaaagttcatgttctaaatactaccaatacccattctaaatcaaaaaaaaaaaaaaaaaaaaaaaaaaaaaaaaaaaaaaaaaattaaaaaaaaaaaaaaaaaaaaaaaaaaaaataccaaaaaaaaaaaaaaaaaaaaaaaaaaaaaaaaaaaaaaaaaaaaaaaaaaaaaaagtgtaaaaaaagaaaaaaaaaaaaaaaaaaaaaaaaaaaaaaaaaaaaaagggggggggctctttttggggacccaatttcccttacgcggggttggaagaaacgtgtttttttttgggggcccccaaatt

SEQ ID NO: 9787 - DNA, 676 bp, Glycine max
  Clone ID: PAT_MRT3847_108849C.1
tacggctgcgagaagacgacagaaggggggcctcaggttgacaagaagcaatttgaaaagattctttcctatatcgagcatggaaagaaagaaggtgcaacccttttgacaaggggcaaaagagtgggcaacaagggttactacattgagcccacaattttctccaatgttaaggaggacatgcttatagtacaagatgaaatatttggccctgtgatggctttgatgaagtttaagactattgaagatgcaattaagattgccaataatacaaggtatggcctagcatcaggcattgtgacaaagagtttggacacagccaacactgtgtcaaggtccattcgtgcaggcattgtttggatcaactgttattttgcctttggggatgacattccttatggggggtacaagatgagtggatttggaagagattttggaatggaagccctacacaagtatcttcaagttaaatctgttgtaactcccatttacaattctccctggctttgattttttttatttttttttgtgttgtgtggatataaacaatggtgaactatagaagagcttccttaaacgtatacttcatcaaattaataagtgtttaaatacatttttagtcattgtaatttaatatttttttatttttcatctttataaaattattttttatttt

SEQ ID NO: 9788 - DNA, 637 bp, Glycine max
  Clone ID: PAT_MRT3847_10884C.1
gccggaattcccggctcgacccacgcgtccgcacagtttacactcacgagagtacccattttctcttctcaatttctcaaggtacctatttatcttctcattactcaccctttctgcttttcttcatccacatcgcatttctgcgtcaatttctcttctcttaaacccattcataccttcatcatacatctttttagggttttcaatctgatttcctcttttaaagtagcacacgccctcgatctgaatgtatgtgttaattttcatactcgtgtttatgattgttgatatttctatgcgtcgctctctgtttctgatgtttccaatgttattttccggtttggagttcatttctttctggatcggttatcattgggtcttaccgcagaatcggttcggcgtatttctacttgttattagtaccaccactgtttccagcaattctgttttttatcaatggaaaaatgtttaatgaggtgttttagaaaattatcaccgataagcccactgaggcatatatgttgtgtctgtgttctgaaagcattattttatttggaagcttaatctcgtgttttttggactagttttctatctaaacgatcgtgttttgagaggttaaaaatgttttctttttctg

SEQ ID NO: 9789 - DNA, 649 bp, Glycine max
  Clone ID: PAT_MRT3847_108850C.1
atacatgcatgagcatggccaaggactcccatttgaccttcatctagccaagcgttactatgatgaagctctagaccatgatcctgcagcaaagttgccggtcacactggctctttcaagcttgtgggttcgtaagaactatgctgacagtttcgtggtacaggtgattgattcattgccagagctgtatcctaaattagaagcttgggtggagaatgtgcttttggaggaggggaatgctacaattctgaccctctttgtatgcctcctaactgtgctgtatctccgtgagaggcaacgaaggcaagctgctgttgcagctggagaggtggctcagccaaatcaccccaatgagcttggtgtacccgccgctcccatctagttataggccaaatttgtaccttaggggaacaacacttgtatagcggtggaaataagtgcatttgtagataggtaggaacactcctttcgcaccagttcatttaacctccaaaatgagagccgagttgtaaggttttgtcttttatttgaactttacagagaaatttcactaaccagcacagattttattttagttcaaaagtactttcgattggctctgatttcaatcccgaaaataaataaatggattgtttaacgattgacactg

SEQ ID NO: 9790 - DNA, 305 bp, Glycine max
  Clone ID: PAT_MRT3847_108851C.1
gatgttcaataatatggaataattttcttcctagttcatatgtctgtggagcaacctttaacattcgcctatttcttcttcttcttttgatatagctccaacgattaatatactatataacatcgctgtggtgataacataaacaattgaatcatgtcgcggagaccggcgaatccgtctcggcgattcggggacagtggaggtggattgttttcatcttcgaaatcaaaggcgtcaccggttttgtcggttgggctcataattgtgggatgtctgtttctcattgcgtatgtgtacaagggctc

SEQ ID NO: 9791 - DNA, 1058 bp, Glycine max
  Clone ID: PAT_MRT3847_108852C.1
cgcgggctacggccgagttcatcttgggtggatagagaaaggcatcagcgggcacattctctgtggtggcaagcttctgagcagggtaatggacatgctgctttactcattggagatgcatattactatggtcggggtactgccagggattatgagcgagctgctgaggcttatatgcatgctaaatcacaattgaacgcgcaagccatgttcaatcttggatacatgcatgagcatggccaaggacttccatatgaccttcatctggccaagcgttactatgatgaagctctagagcatgattctgcagccaagttgccggtcacgctggctctttcaagcctgtgggttcgtaagaactatgctgacagtttcatggtacaggtaattgattcattgcctgaactgtatcctaaattagaagcttgggtggagaatgtgcttttggaggagggaaatgctacaattctgaccctctttgtatgcctcttaactgtgctgtatctacgtgagaggcaacgaaggcaagctgccgttgcagctggagaggtggctcagccaaatcgcccaaatgagcttggtgcacccatgtagctataggccaaattgtaccataggaacttatagctaacagtggaaataagtgcatttgtagatattcatttgtaaggtaggaacacgactttcaaaccagttcattgaacctccaaaatgagagcaagttgtaagattttgtcttttgttcgaaatttatgaagaaatttcactatgcacccgccgctcccatctagttataggccaaatttgtaccttaggggaacaacacttgtatagcggtggaaataagtgcatttgtagataggtaggaacactcctttcgcaccagttcatttaacctccaaaataagagccgagttgtaaggttttgtcttttatttgaactttgcagagaaatttcactaaccagcccagattttattttagttcaaaagtactttcgattggctctgatttcaatcccgaaaataaataaatggattgtttaacgattgccactg

SEQ ID NO: 9792 - DNA, 430 bp, Glycine max
  Clone ID: PAT_MRT3847_108853C.1
acgagggtatggtgaatataaagatgggcctacctaccaaattcacaagaaaggagctgctcgggtggacattattggagttggttgctattcatctaaggatttgtggacctggaaacacgaggggattgtattggcagcagaggaaacagatgaaacccatgacctgcacacgtctaatgtgcttgagcggccgaaagtgatttacaatgagaggtctggaaagtttgtgatgtggatgcatattgatgatgccaactataccaaagcagctgttggagtggcaatcagtgacacgcctgatgggccatttgattatcttggtagccaaagaccccatggatatgaaagcagggatatgacagttttcaaagacgatgatggtgtggcatatataatctactcctctgaagacaatagtgaactgcaa

SEQ ID NO: 9793 - DNA, 186 bp, Glycine max
  Clone ID: PAT_MRT3847_108854C.1
ggaaagaaaaaggacacttttgtgctaaaaaaggacagatggcagggctgggaggacagttttcagcaccgagtggacttgtccgccgacgagattagcactcagcagccccgttttaaaagtttttttgtttttttttataaaaagtacacgggctgttatggtatatcaaaacccatttttaca

SEQ ID NO: 9794 - DNA, 165 bp, Glycine max
  Clone ID: PAT_MRT3847_108855C.1
ggatctaccggacctcccctacacaccttaggttctggaggtgaccctttaacttgccaaaccaaactcttactgtacattgcataatctttcttggtttgctgatcagctcactgacactgtttagataatctgctgcgggggaaacaccgtgttaaggtctac

SEQ ID NO: 9795 - DNA, 252 bp, Glycine max
  Clone ID: PAT_MRT3847_108856C.1
ggctcgagaggatgtgtttgacggtggttttgtcggcagtggcctaaagaagggcaagggagcattgcaaacactactacggttccatggctgagccacaaccgttcactgagtgccagacagaaacacactaaccccgactgtgactatcttacagagtataggagggcgaattcgcttgggcttcaaggacggagggcgacatcgatcactttgttctcgagcggtacaaaatatagtgcgatggtctct

SEQ ID NO: 9796 - DNA, 379 bp, Glycine max
  Clone ID: PAT_MRT3847_108857C.1
tcggcggccgcccttttttttttttttttatggaaaagttttaagattttattaaaccaaaaaaaaaccaggggcaagggggaacattaaaaccaaaaacacccaaaaaccccaaaaccccaccacaaccaaccagggggaaaagacagaatgaccgtccccaagagcacagccttagaaaagacaaaaaaaagacgctacaaccaacaacccacaccaaggccaaacacgagcaaaacccccggagagaaaaaacagccacaacatatcgaggccacacacagcaacgaaacacacctggggccgaagcaaacaaaccaagactcccagttgctcaagaacggagacgaggtcgcgaccaaaaaaacccagattccac

SEQ ID NO: 9797 - DNA, 519 bp, Glycine max
  Clone ID: PAT_MRT3847_108858C.1
acctcgttatttccatatttcaatctgcagaatgctagctccatcactaccctatgaggaacttaacaacaggcttgtttttgctagcatagctgccttaggagtcagacaagaaagagccatcgggaagctaattgcttgaaacacacgaaattgagtgggggaccacatggaactgccaaagctacagagttctccaatcaccacatctcatgggaaaaggaatagacaagctttatgtaatctcagcaccgggaaacacaacgcgttaccatgtccccaggactttgtcttcccttcaattcacatggtgccgaatcgtcataaaagcgggaacggcgccgatgggatctgcgatctccactgcctccccttggggagccacctacactaacaaagtcgtcatcaatctcttccgtcctagactgtgcatactccctagacactacagaacctttatcagagtttgaagtatcataacttatacggcgattatcccttcctggccgactgactctt

SEQ ID NO: 9798 - DNA, 496 bp, Glycine max
  Clone ID: PAT_MRT3847_108859C.1
ggggcgcccaacaaaacgacacacacacatatatagcataaggagtgcgaattacaaaagagcaaaatagaatgctgcagtgtatcacatcacacgaagaactagaatcttgaactatacatccatacacatgcataatataagatacaagctccaggtgatgtaacaatacactaccatgataccaaaacactggttcacaaatcacatatctacacccgcagtgcataatctgcccgccaaaatcgtaaattcatgttcctacaaagcctcctgattataaatccagcaccaccatcaatcatggatcccgtgataattatcattcagcagggatcaatggttctcccaaatgtacaaatcagtatatgcatgtttttgtttcagccaaaatgttccaaaggaaaattcataacattctccaaataaaaacactctgcattgaacgcttagtcatttcatatttctttggattgtatatgtcagagaaacaaaa

SEQ ID NO: 9799 - DNA, 501 bp, Glycine max
  Clone ID: PAT_MRT3847_10885C.1
ggcgaaagagaatgttaacactaatcaaggactggtcacatctatatctttacaagaacctttagcttctttacattataatgaatgaaaaaatagctaatgcatcttcggacccaagaaagaaagaaaaaatcacatacaaaacaaaatgaagaacaaaactaaaatgcaattcattagatgattttagtattgttctccaatccaaattagaatttcacctcaataatctatattaacatttaatgcaaatactttattaggcaaattatcgagatgaaactctaactctgattcaaaaacactaaaagcacctaaaaaacttcatccaaattttgtcccaaaatgaatttacttttaacaagaatacgtgacatccccagttagctagtagtagtgttagatgagattttaaccatgactgaaagtggaatggtgaccacatgaccttgattcccaaacagcccaattctcccaaagctggccacagagctgctaagg

SEQ ID NO: 9800 - DNA, 710 bp, Glycine max
  unsure (1)..(710): unsure at all n locations
  Clone ID: PAT_MRT3847_108860C.1
cccctccgacgcgcgcgatacggactagcagtgactaccattcttgctctctatgatccgctctctctcctacatcggaggactatgccgtcaccatccgaaccagaacctccatgaccaacacgcttctctccagaaagccattcatcgtagatgcccttcatccacagaggcctaatgtttccaaggatgaactgacacgatacattgcgtagaatgcatgacgtgaaagacactaactctgaatttgtcttcaagcttcgaactcattttgggggtggcaagtccactggaattgattggatctatcatatcgaatcgagatagtgactgaagaaccaaccctagctccggttgatcatgaatgtcctggctactatgatatagagatcaaagcttgcaagtgaaatgagagaattaccagagctaaaaagattccccggagttatcaacaaccaaggctgaccgatgctgccatgagctgtaaaacttcatttgagccttcgatcatcctgtcattgattgtcaagcatgtccagctatagagattttcgataggtcaacttactgtctattaactccctataatgagatatactgctggaatggctacattactggtagttcattactgatataacttgagatcaataactgactcgatctattaactcaatccatttgaatgctttgnttgaaattgattgcca

SEQ ID NO: 9801 - DNA, 453 bp, Glycine max
  Clone ID: PAT_MRT3847_108861C.1
ctcttttctttttttaatccccactctcacccctcggggcagggggtgtatttttttattcttttccccatattttccctcccggttccggccttaaatttttaggtaccaaatccagaatcggaaaaaaattttgcgtgaaccatttttctaaataacaaattcttaccaaaaaatgccaggaggcctaaaccttaaacaaaagggctttaaacctctctttaaaaaaaaattagcgtaccaaaccttatgtcaattacaactgcgcaggaaaaaactaccccaaccgaaaactaaaacccccgcccaataaagggtctctttgggccacaaacccctttggttggctgtgaagaacctctttaaaaaggttcttggtttaccaaaaccccaccttttatccaacttaccctgggcttatttttgttttgaagaggaggtataaccccccac

SEQ ID NO: 9802 - DNA, 1318 bp, Glycine max
  Clone ID: PAT_MRT3847_108862C.1
ggctcgagcttgttctcttcttcttcaacacaactagtcataatccagctcatctctctctccctctctctttgttctctctttctctttctccaaaatggctctaaactacccttttttaacctacttcatactactgctagtaaccataacccgtttgatattcactgtgggaaaaactgagcaatggaaagctccgattctaccagagcttgacattgataacatatcccacaaactccatgatgaccctgaaaccattcaaatggcttcaagggactatggccatttaacgcatgaattcccattagctgtgtttcgtccatcttctatagatgacatagtcaccttgataaaatcttcgtacaatagctttgccccttttgacatagctgcgaggggccaaggccactccactcatggacaagccatggctcgtgatgggattgtggtggacatggccagcctaagaaaacaaagaaatggggttgcgattagtgtctctaaggaccctttgatgggtcactatgctgatgttggaggggaacaactctggatgatgtgctacatgccacacttaaatatggacttgcaccagtttcttggactgattatttgtacttgaccgtgggagggacactttccaatgctggaatcagtggccagagcttccgttatggacctcaaatcagcaacgttcatgaaatggatgtcatcactggaaaaggagagttcgtaacttgctcttcacagaagaacttggagttattccacgcggttcttggaggcttagggcaatttggagttatagcaagggcgagaatagcacttgagccagcccccaaaagggttaagtgggtcagactactttatagtgacttttttgcttttaccaaagatcaggaacgattaatctcaatcaatggaaggaaacaaaagaacgcattggattttctggaagggatgctgctaatgaaccaaggccccataaataattggagatcctctttcttccctctatctgaccatcccagaatatcttctttaataactgaacatagcatcctctactgtcttgaagtggctaaatattatgacgaacaaaccgagttaaatgtggacaaggaaattcaagttttgctccaaggactagcctatatccctgggttttattatgagaaaaacgtctcgtacgttgagttcttgaatagggtccgaagtggagagttgaagcttcagtcacaaggactgtgggatgttcctcacccatggcttaatttgtttataccaaaatctcaaatcttggattttaattcaa

SEQ ID NO: 9803 - DNA, 632 bp, Glycine max
  Clone ID: PAT_MRT3847_108863C.1
gctagaggacaaaattgttactttttttttcatttatagagctgttggacaacattcttgtcatcaaataagaacaaactttgggcaaattatgaatggaaagaactagaaggaatagctctaactgtttctcagctacgaataatttacatcatgtagcataataaaatcttgaaacaaacaattttactgtcttttatattgagttattttttcatgaaccactgccttgctaatgtataaatcttcatagtgcccaccggcatagtggggaaaacctcaacaccaattagctatcttgaaaactgtgaggctactcagacttcttggtccttttgccagaaatgcagggaagtttcccggttccttattcactgattaatttttataactggtgtgttaaactcatcaccaccggtccaccattgattcttccacaaaaccccttcgaaaactagagtagaaaattgagcacccaaagcacaggcatcctcttgtttaagagctgaaccctacaattttccaaaaatgcacgcttatgcaggaactataacttattatgaatttacattgcattcgcttaagagctgatcttctttgttcagaaacttcttccatagcttttatactga

SEQ ID NO: 9804 - DNA, 245 bp, Glycine max
  Clone ID: PAT_MRT3847_108864C.1
cgtgctaccacgccagcagcatctgctttttttgttattccttttggttctggggtggaatctacgtataaaagttgaaatctttgtttcgtttcttggtggaggaaaattgttttggagataacttggtgttgggttggtcctgatttttaatgcctttttgtttgttttctagttttttttttttttaaattgcataactctctctctctctctctctgggaaatgggggcctctatttggtt

SEQ ID NO: 9805 - DNA, 299 bp, Glycine max
  Clone ID: PAT_MRT3847_108865C.1
tctaagtccgacaagaacccatcccctcctgatgggattgacaaaactagcgctacttactcttctaccaagctgggaagtagacatccctcacattcaccacagcagcacacacatacgaagacagccttgcttgtctccactcaaaacctttcaagctggcgctcgaaaaccaagacagccctgttcgagaaatgcagcacacttatcggggcaacatgggagctggaggcccagattatgatgtccacaacacgtaggcagcgtggctgaagcctatgctaaaagaaagtttcttt

SEQ ID NO: 9806 - DNA, 250 bp, Glycine max
  Clone ID: PAT_MRT3847_108866C.1
ccaaattcctccaaaccccgccgttccgaattatcgcggtggcctttgagccgcaacaggtctgccccagcgggagtagttcccagcgtctcgtcaaggaactcgccgaacgcaagaacggaacttccccaaagaaaggtccctcaaggaggttcatttcaaggacaccaataggcgataactcatttgcagaaaggtttctcaacagcgcacaactttctctcaagtcgttccctatattaagttcgtg

SEQ ID NO: 9807 - DNA, 464 bp, Glycine max
  Clone ID: PAT_MRT3847_108867C.1
gtcctttttttttttttttttttttttttttttttttttttttttttttttttttttttttttttttttttttaaccgaactcaattttattatttaaaaaaacaggaaaaatacctgacaagcgacaagaaaaaaaggggaaaaacccggaatttttgaaaaagggaaagggggcccttttcatttttcaaactataaggccgggggtaaaaaccgcaggcaattgaaaagccaaactgggttttaaggcaggggaaacagcttgttccccaaacatgggctccaaaacccccgttgatacagccttggtctttataactggggcctccttttttgggattggggcctttttagagaaactaagccccaagattccctcaggggattgtctgtaaaaaacagaggcccccggggcaaaattcacatttttgaaggctttaacaaacttttcaaaggctggggg

SEQ ID NO: 9808 - DNA, 353 bp, Glycine max
  Clone ID: PAT_MRT3847_108868C.1
gcgtacgtacaggcgtacgtgacgacacaagggaacgactgactttggtagatgagcttctaccctagggggtgggctcaacattcggcagttctggaacaataataatggcgtcctgcaataaggttggaaaccgttcgaggcatggtgctgctcggaaacacatgcgcctgtgcagacatgctatatacatcgatgcacgattggagcacgctttcattggaggcctcacatatggagtcgatgaccattctcatcaagatgcattttctggcttctgagatgtggcttatgcgaaagttataactcgactgaaacagtggcagatcaatgggatttggatttgtcaactt

SEQ ID NO: 9809 - DNA, 621 bp, Glycine max
  Clone ID: PAT_MRT3847_108869C.1
gctgtcttgagtttggaatacagctctgacattacatacgttggatgatgtttgtcttattttggtacttacgaaaagcggttatttgcacgtgttaataattaataagtaataagtaagaatatggaaggagtcagcaaagctgaagggaaatattaaaaacttccggttccttgaatgctcttgttaataattaataagtaataagtaagaattccgtgctactttctcctactgcctatcttgtaaagcatctgtattcgccaagttaaacatttccaattagtttcactttctttctgttatttgcacgtgtcatcgtatttgatcggtgggattcagggagttcaaagaaagttctacctaggtttttgtgggttcagatcaattttcctttttagcagagtaagttactagtggcaacctgcgctgcttttgtggtgatgtggggcagaggatcctatgaccactttaatgctgctggtttttgtttattgattctcacagatcacaactgaggtagcggtctttcacagaaaaaaatcacaccctataggaattgcacaaccaatggaacaggggataaaatgccttggttttttttcttttaccccctttttt

SEQ ID NO: 9810 - DNA, 434 bp, Glycine max
  Clone ID: PAT_MRT3847_10886C.1
ggggttgggggaatcggtgaaattcccttcctcccatccaccggaaaatccgattttgtaattttccggttcgccccctaaacaactattcaaaatgttccattggaaaaatggaaagagggtttggccctttaacacggtttcgaggttgcaaagtaaacaaatttccttttttccgtttttccaaactttccttctttgattaatggaaaaaataaagttcttatgaggtaatctgggaaacccgctcaaacccccattacccttttaaacttgaaaatgcgttctggctggccggaaactctcaaactgtgattcggtcctccagaccatcgaaaccttggacctcctaacatccaactagttacctggttactccaacccgccaccccccgtagatctacttttctacctccgtaactccaaaagttcca

SEQ ID NO: 9811 - DNA, 461 bp, Glycine max
  Clone ID: PAT_MRT3847_108870C.1
agggggggccagaacatggaaaaaaattttttttggggggcccccaaggaaaaaaaaaaaaaattttcatcaattttacagggttcatgaaaaaaaaaaaaaaggctaattttatttaaaaaaagggggggcattttttacataaaacaaccaacaagggaaaaaaggctaaaaagtttatgcaaaaatttttcaggggttaaggggggaaaactaaaaaaagcccctaatttttgattcaccaggaggaacttccaagggccccacccacattaacatgcatgaaacggggtgcaggaaacagaagggggttttaaagaggatggacaatctggagggggttaattataaaccaccccgggggaaaataaacacccacgggtggggggggggcttgacaataatttactcccaaaaaaattgaaaactgaaacttggcaaggaaatccaaaccttttttt

SEQ ID NO: 9812 - DNA, 227 bp, Glycine max
  Clone ID: PAT_MRT3847_108871C.1
acacagggagccccataaaaaatagccacaaaaaagacccccactgggaaacccgggtcaaaccagagacaaacggggttaaacaaattactctgacggaaacgggcgaacacctacccataacaaaatgtgccccgccaggggaacacccccgggggaccattcttagtcggccagggttatatgggaacaaaaagaatgggctccgctccaaaacaaaaggcccc

SEQ ID NO: 9813 - DNA, 657 bp, Glycine max
  unsure (1)..(657): unsure at all n locations
  Clone ID: PAT_MRT3847_108872C.1
cacgcgtccggttttcttaaaatttaatgattaaatttattaatataataggatcttaaccaagtttaattgaaaatataaagactaaaaagtatatttattttaaaaacaaattgagttcttggcattaatgtaactagacagttcatattatgataactatgaatagtcacatactcgcatgtgttaattaatatacatagttatgtcaactatataactaataaaacggttgtacttagccaataaattgtgtatattattgaattatgttcttacttagtgcttgtgttgtattagtaacttggatacattgatgaagaaaataatttagatatttgtncgatgttttcacacctataaaaattaagagggtaaaaaaataatttcttgcttagatcaagtttgaatgcaactatggaaatccaactttaatttgcaccataaatgttaatatattagatgtagaaaaaggccgaaagttgagaaggaatgaagacagctgattttttcttttgtcaatttagcacttctatattgataatttagcacttctctataaatgaagtattgtgcacgtaaatctaattgctttgtctgctataacctcccatcatgtcacttcatttgcacataaaacggtgcatgctagtataa

SEQ ID NO: 9814 - DNA, 375 bp, Glycine max
  Clone ID: PAT_MRT3847_108873C.1
ttctgtgtggggatgcccttattatacctgcaggaaccacgtactatgtggctaaccctgacaaccacaagaatctcaaattgataacactcgccatacccgttaacaaaaacgggagacttgatagtttctttctatctaaccctcaagcggatcagaaatacttgcaagggtttaccttgaatatgcgagaggcctaatccgacaccgaacactaagacataaacgtggttttgtgtggaggagaggacggtattccacaaggggaggagaggctgcgggagattgtgaatgtggaaatcttatggaaacaaattcgggagctgatcctgcatgactaagctagtggaaggaaaaccaatggtgctgaaaata

SEQ ID NO: 9815 - DNA, 440 bp, Glycine max
  Clone ID: PAT_MRT3847_108874C.1
gtgcgaatgagaaaaacatgaagaattctctgtttctcctggacaatgcaaacacaatccacttcaatcgtcattcccagattacccttccttccattcccctcacaacaattacaactaccaaacccttccctcacaaccgtcacttcccacgcatcgaaatcgacatggtgaagaacagccaaggaatctacgcccccaaagcctccaaggtggtcgtcctctgggacctcgacaacaaacccccccgcggcccaccctacgacgtcgccatctccctcaaaaccctcgccgcccgcttcggcgaccttgtcgacttctccgcctacgccaaccgccacgccttcgtccacctcccccagtgggtcctccagcaacgccgcgaccgcaaaaacctcgacatcctcgaacgaaagggaatcatcaccccaccggagccc

SEQ ID NO: 9816 - DNA, 742 bp, Glycine max
  unsure (1)..(742): unsure at all n locations
  Clone ID: PAT_MRT3847_108875C.1
cctccacaatgcaaacacaatccacttcaatcttcattcccagattacccttccttccattcccctcacaacaattacaactaccaaacccttccctcacaaccgtcacttcccacgcatccaatgctgcagcaacaacaacaacaacaacagcatcgaaatcgacatggtgaagaacagccaaggaatctacgcccccaaagcctccaaggtggtcgtcctctgggacctcgacaacaaacccccccgcggcccaccctacgacgtcgccatctccctcaaaaccctcgccgcccgcttcggcgaccttgtcgacttctccgcctacgccaaccgccacgccttcgtccacctcccccagtgggtcctccagcaacgccgcgaccgcaaaaacctcgacatcctcgaacgaaagggaatcatcaccccaccggagccctacacgtgcggcgtgtgcgggcgcaagtgcaagacccacctcgacctaaaaaacacttcaagcagctccaccagcgtgagcgccagaagaagctcaaccgtctcaagtccttgaaaggaaaaaaacggcaccgtttcaaagaacgttttttgcgcgggaaccataagtatgacgatgcggcgaggacgcttgtagtgcccaaggtcgggtacgggctggcggcggagctgaggcgagcggnggtgtttgtgaagactgtgcaggataagcctcnagcggcggattgggccttgaaagagcaaa

SEQ ID NO: 9817 - DNA, 1878 bp, Glycine max
  Clone ID: PAT_MRT3847_108876C.1
cggcccaaaattccgggggagccccacgcgcccccgcctgttggaagacgacagaaggggagtgcagaaatggtatcatgatgaaggctatgcctgcgctcaggtcgttaatttcgggaacctcaacaccaaggaggttgtttgtgaggttgttgaaggggatatcacacaattggatattcagttccaggataagcttggtaatgttgttgaagggaacacccaagtccctgtcattcaaagagagcttccccggcagctgcgctcaggttacactttcaatattgaagcagggaagcaagctttaagaaatgtgaactcccttgctttgttttcaaatattgaggtcaatccgcgccctgatgagactaatgaattaggtacaattgttgaaattaagctaaaggagttagaacaaaagtcagctgaagtcagtaccgagtggagtattgtccctggacgtggagggcatcccactctggcttcccttcagccaggtggcactgttagttttgaacatcggaatctgcaagggctgaatagatctattaacggttctataacaacaagcaacttcttgaatcctcaggatgatcttgcatttaagctagagtatgtgcatccatatctggatggtgtatactattcacgcaaccgtactctccgtgtaagctgcttcaatagccgtaagctgagtccagtattcactggggggccaggtgtggatgaagtgccaccaatatgggttgatcgtactggtgttaaagctaatattacagagaatttcacacgtcagagtaaattcacatatggacttgtaatggaagagataacaacacgtgatgaaagtagtcatatctgtgcaaatggtcaaagagtattacctagtggaggaattagtgccgatggacctccaaccactctcagtggtactggcattgatcacatggcatttttacaggcaaatatcacacgtgataacacacgttttgtgaatggaactgttgttggagacagaaatatgttccaggtagaccaaggccttggcattggcagccagttccccttctttaaccgtcaccaactaactctgacacgatttatccagttgatggcagtggaggaaggggctggtaaaccacctccaccagtgcttgtcctccatggccactatggtggttgtgtaggtgatctccccagctatgatgcttttactcttggggggccctattctgtaaggggctacaacatgggtgagataggagctgccagaaacatccttgagcttgcagctgagttaaggatacctgttaaaggtacgcatgtgtatgcatttactgaacatggcaatgatctagggagttcaaagggtgtcaaaggtaatcctacagaagtctacagacgaatgggtcatggttcatcctacggtcttggtgtcaagcttggtttagtgagagcagaatatgctgttgatcacaactcaggaactggtgcattgtttttccgtttcggagagaggttttgaagttcaaattactgacgtcagtatattgttcactggggtttcttttcgttagcggaagaattcttgagcggggaagggagattatagatacttgaaaattacattgtactagactagcagactcggtgtttttgtttgtttcccgtaaaattggtatagggttctttggaaatattaagatgggagataatcttgatgtctgttatgaaatggatttagtttatctttgcggctagtgatcactgcacagttcatgagaacaaatggatccttataatcttttaaatgtttttttttgttaaatatgattgtcaaattattagaggttaaaatgtcgaaaatttgtttgtgtt

SEQ ID NO: 9818 - DNA, 595 bp, Glycine max
  Clone ID: PAT_MRT3847_108877C.1
tatggtggttgtgtaggtgatctccccagctatgatgcttttactcttgggggtccctattctgtaaggggctacaacatgggtgagataggagcagccagaaatatccttgagcttgcagctgagttaaggatacctgttaaaggtacgcatgtgtatgcatttgctgaacatggcaatgatctagggagttcaaagggtgtcaaaggtaatcctacagaagtctacagacgcatgggtcatggttcatcctacggtcttggtgtcaagctcggtttagtgagagcagaatacgctgttgatcacaactcaggaactggtgcattgtttttccgtttcggagagaggttttgaagtgcaaattagtgacattagtatattgttcactggggtttcttcttttggttgggggaggggattatagatgcttaaaaattacatgtgctagactagcagacttggtggtgtttttgtttgtttcccgtaaaattggtagagggttctttggaaatattaagatggtagataatcttgatttctgttatgaaatggatttagttccaaaaaaaaaaaaaaaaaaaatgcccagttcatg

SEQ ID NO: 9819 - DNA, 470 bp, Glycine max
  Clone ID: PAT_MRT3847_108878C.1
cggctccagcggctcgactgctacaagacgacaacagagggcgacagcttttatatcaatatactatataatactacacctacatgatgataatcttcgtagtagatgacaaccactactacccgaaagaagcttgaggacaacattgatctgaactacaacgccaactactgctggccaaccatgaagaatactactgtaatatttaataacgccttacaacatgactacaacatcattgtgttgaggaggatgatgggaagtctgctggtattatccacatcataaatgatggaggaggatcactagtggagaaatcattctataagaataatgatgctgatgatgaagaaaaggaagtggcgtacaccactatcgatgatggagaactcctgcagtactacacatcaattgaaggcgacatagcggcgactactatcgacgaatgatacgagaagaagagtactgct

SEQ ID NO: 9820 - DNA, 717 bp, Glycine max
  unsure (1)..(717): unsure at all n locations
  Clone ID: PAT_MRT3847_108879C.1
gatcatcaatctggatacattcagtggacaaattttgtatctatcaagattcttaaacaagggaacaaaagctacaagctaatctcattaaacaaggaagttgctctggcatttgtctttcagcttggggcaatttactatagatggatctcaagatgtggaaaaagctccttgcagcattttacatttcatttcctctatatccaagaacatcaaggtttccaagtatgcaaatgaaatagtagtagaacagctactcacttactcccttgaaactcagaatcaataatcagtttcccatcaagcccagctactgacagattcttgaaagatggaaagagtccaagggaggcaacatgacacaatttttaaattttctcaactttaaggactctccacattggataatgaatcatctccgaacttgaaaccaatatggaaatcctgtaccaccacaactcctgatgacaactctttcaatctttaagaaaagggccaaacctcaaatgccagtgttaaatctatcatgcccaatgtttcctcgcctttttttgtggccaaacttttgtttttaatcctgnacaatgcagaagaaaactttaaagtccaataaatttgaagttggctatcatttttagtcatatcaattagatgggacgaaacgtgtccacaaaaaacaaattcaagggattatatatattactgtaatatatacta

SEQ ID NO: 9821 - DNA, 377 bp, Glycine max
  Clone ID: PAT_MRT3847_10887C.1
aaaagttgtattgaaatttttcctgaatctctccaaactgcaccagcttgttggggaacatcctgaaacgggtggggtgcctatctaatgcccatatttttaacctcaagggcaatactctctagtggccacattaccatgggatgctgagaaatttgaagagaatctcaccaacccaaaacttttacatattggatcaatcctactgttaaaaccgctctttacctgagcacccttcctcaatacacaacacatctaacccccagaaatcataacccatcattaataacaccatttaattttgatcctagcaatcagagctatagtcaatactctattaatctttcttggtggatgaactttatagcacaaaactt

SEQ ID NO: 9822 - DNA, 315 bp, Glycine max
  Clone ID: PAT_MRT3847_108880C.1
atctgtgaacttcgagaaccagaaacaacccccggcgcacgatagcgcgatcgctttggttacgcggatggttaccgattctctttgatcaccggtagtatttccattcacaaaagcaacagcctttctgcgattattgttgacttttgtctatcggaacaaaacggaggatccgacatagaattggacaaatattggctaatgagggagggacattcatctatgtgcaagctcactccttcgagagataattcaaacagtggagacatggaggacaactcatatcttttagacatggacctggacaagggaaca

SEQ ID NO: 9823 - DNA, 499 bp, Glycine max
  Clone ID: PAT_MRT3847_108881C.1
ataaaggctttggtttttctatgggagcagcgattttagtccgctatcaggtatgctttctagatgcactagctggtgaaagaaaacatcatttggaagtaacatctagaatggtgtccgagcagctgacaaaagaaaatatagatgcttgcgggccggtcgcacggtcagactaactggacagagggggtaagagagtgttctgctagggggctcacagtctcaaggcgaccttgctagatcaacaatctgaatagttggctatcacacggaaacaaatactatctagaacaaacatgaaaccggtaagaaaaaaggggacaaaaagccaataaagagcgcatatggcacgaaagggaaatccaatgacggatatactcgatctgaatggttgttcagatacaagatagtttagtgagggcgacctgtaaagtacctaatgggtcaaactttaccttgacggagcgctatatatgttgaataaaaaatcttgcgagga

SEQ ID NO: 9824 - DNA, 433 bp, Glycine max
  Clone ID: PAT_MRT3847_108882C.1
cggattcgcttgctcgttacaagtcttatagtaaatgcagaccggtaccatccatgaagaaaaaaaattggctgccgtgccgacgctgtttatggactgctgttgcggctcgacctgccgaagtcatctttcatcccatgcactgaacgcctaatgctcgtcgtaatccgtcgcttaaaagaccatctggtgtggcctgtttgagctgcggaggctgaagctggcaccgaggtagtcggcaaggggggcctccttcttgatgggggctaaaagtgccttgtcgacagacttttggtcctcaatacggccctttgcggtctccttcttctcgggctttttgccctgcttgaagaacgagtccttaccgggcttgcgggcggccttgtccttggtgaagtaaccattctctgtgaccttgtccaagaccttggag

SEQ ID NO: 9825 - DNA, 129 bp, Glycine max
  Clone ID: PAT_MRT3847_108883C.1
accttatgagatatgatgccttgtatggttcagtatagttcttgtattgctggtttaaattaattcttgtatggcagttgcactaaactgaatggcagttgcactttgagacaaatcctccaccaaaaa

SEQ ID NO: 9826 - DNA, 499 bp, Glycine max
  Clone ID: PAT_MRT3847_108884C.1
gtccggaattcccggctcgacccacgcgtccgaggaactattacactactatttaacctacggacttgcgtaaaccagtatcttatacatgctactagatcaatttcatagaatagagctgtctatctgacaacaaccatactgatcgtgctctcctattgaaaaaaaccaccatctttgctcttctatgaagaagcattcttgataattattaactccttgcatatttctcaatgacactttcatgttcacaagcacttacaaatgataattgaagagcaagatacacacttgcttaacatcatataccaacaacccactttaggtgataccttgacaacctcgtaaaccctacctttgttccattataagcagaatcatcctcataccataggcttctggatctagagatgcccttgcaagctctgtgcctacacttaataaacagacaatctactagggttccaaagaaggcttcactgcttctcacgttagacag

SEQ ID NO: 9827 - DNA, 1508 bp, Glycine max
  Clone ID: PAT_MRT3847_108885C.1
cggccgctcgagccggcgggcgggtcctggttagctcacgcaccccttctccatcgcgtgtgcttcaattccatggctaaaccgaaggctccaagacgaaccctagagtcatactcagtcaaacacataagcaaaaccattagagctggcgattgcatcctcatgcggccctccgatctgtcgaaaccgtcgtacgtagcgaggatcgagcggatcgaagccgacgcgcgcggcgccaacgtgaagattcacgtgcgctggtactaccggccggaggaatcaatcggcggtcgacgccagtttcacggctccaaggaggttttcctctccgatcacttcgatgttcagagtgccgacacaatcgaagccaagtgtacggtccacagcttcaagagctacacgaagctcgatgctgtcggaaacgacgatttcttctgtcgttttgagtacaattcctccaccggcgccttcaatcctgatagagttgccgtgtattgtaaatgtgagatgccttacaaccctgatgacctaatggtgcaatgcgagggctgcactgactggttccatcctgcttgtatagacatgactgtggaagaagccaaaagacttgaccacttcttttgtgaaagttgctctgctgaaggtcaaaaaaagttgcaaaactctcattctgcttctagacactcagatacaaaggtggatactaaacgccgtcgtaggtaaaatagtgtgatagtatataaagcataaaatgagttagatctataatggatgtactgaagatcttgcttttctaatcctgggtaggggccagacaaacacagagacaaagttatctagtagtaagctgtagtctttctactttcatggaaagagactagtttggaaatgtttgtcatgtctatttggtttgagtactcatcctgtttcctttggaagtggaggacgtgtttatgtaattatttagtgtagattctgtgtcacttctctctggtccttgttctcgggcgttttgtaaagtattttgacttatttataagcagtagacactttattctttctttttactaaaagaggtaggcaatgatctagagtttctatacaccgataatggcgccgtgttgttggcgtgaaaagaattgaggataaaaaaatatacgatattgggttgtaatttaattcagcctttcgttggcaaagacctctgaaagaacttgctagagacattgcatgccgatagtttctcacctctgtatcatctggcgtgatgacgatggagattggaaaatacgttatttttttggaccatagaaaaacaaatctatattggagtactgcctatggtttgaaccaatcaaagacgcaatacactccactaacggtgcttgtgaatggactagagtggaatgtcgcggagtgaaatagaacagaacgacattgaatgtagtaaaaatattgttcgaatattttatgatggggtagaataaaaacatcatgttattgcgaat

SEQ ID NO: 9828 - DNA, 301 bp, Glycine max
  Clone ID: PAT_MRT3847_108886C.1
tagcacaatatgaagtttcgttttgtattgtaaccaaccatcttccaacacggatttgtgacattacaacacgggctaagggagaacaaccttctatggcgaaaaaaaaacaagacactcgtactattataacacgaagcatagatactgaagggacaaccattgcaattacagtatgcaaaatttacaaagcacccaacaatttacttatagtacaaataatatataatccaaatccaatggacctgacagaaaaacacacaaccaaagatataacacacagagtgaaatgaacaactac

SEQ ID NO: 9829 - DNA, 723 bp, Glycine max
  unsure (1)..(723): unsure at all n locations
  Clone ID: PAT_MRT3847_108887C.1
gaggggagaccaaggggccaacacatcgagaaattaaggagaaggagaaaatgggagattgggggccagtttttgtttctgtggtgcttttcattctcctcagtccagggctcttggtccagatacctggaagaggcaggttcatagagtttggtaactttcagaccagtggattatcaatactgatccatgctatcctctactttgctctcgtgtgcatcttcatgttagcaattgggatccacatgtacatggggtaaatcatcccaaaatatgtgtaggctcaaggggagattgggggccagtttttgtgtctgtggtgcttttcattctcctcactgcagggctcttggtccaaatacctggaagaggcaggttcatagagtttggtaattttcagaccagtggattatcaatattgatccatgctatcctctactttgctctcgtgtgcatcttcatgttagcaattgggatccacatgtacatggggtaaatcatccctaaatatatgtaccctcaatcctcatgtatacactttttagagttttgttcctttggtttggtttgtgttcagggatgtgacttgttttccttgtaatgtctcgtttttttcctctttcaataaatttcttggaatcaagcttgtgaattaatgacaaatatttctgtttctactgcgtccaannaaacccaaagagtacatggcctgctaaagctctg

SEQ ID NO: 9830 - DNA, 274 bp, Glycine max
  Clone ID: PAT_MRT3847_108888C.1
gggtttttccttggagagaagccatgtaaccttcgcaatgccatttaattagatgtgccaacaaagagtaggaagaattggttcaccagaaaaaggagaaatgggcagtttattgattcccttctctttgaatgtttggccaattcaatgtaatatagcgggggatatgcatatagggtactgagttgtgtattatgtataaaaaatattctcttaatggaaagaagcaaagaaaatttaaccgagtccaaaattaaaataattaaattatatg

SEQ ID NO: 9831 - DNA, 160 bp, Glycine max
  Clone ID: PAT_MRT3847_108889C.1
ttccaagctacttatctgtgagtgagtggagttcgccatgatgatatacctagacggtgatattcaagtgtatgacaatattgaccactggtgtgacttgcctgatgactgctgatatgcggcgagggactgtatttgtgaagccactagcggccactcg

SEQ ID NO: 9832 - DNA, 1800 bp, Glycine max
  unsure (1)..(1800): unsure at all n locations
  Clone ID: PAT_MRT3847_10888C.1
cacgcgtccgctcccctctgtctctgatgcggtggggagtggggacagggagggtttgatggatttctagcattcaacccttccttttctccttgcctctgtcctgacccgttcttttcttctccatgcattcccagaaagttgtagagatggaagacaagacagaaagtcatatgagttcagctgcggcctttgttgaaggggggattcaagaatcctgtgatgatgcttgcagcatatgccttgaggagtttggtgcaagtgatccttcgacggtcactacctgcaagcatgagtttcatctgcagtgcattctcgaatggtgtcagagaagctcccagtgtcctatgtgttggcaacctattagcttgaaggatcctactagtcaggaattgtttgaggtagtagagcaggagagaagcttgagggctaccccatcaagaaatgctgctatttttcatcaccctgcctttggagattttgagttgcagcatttacgcatgagtctaaatgatgctgattttgaagagagaattattcaacatttagctgctgctgcagcaatgaggagagctaaccaacttggttggagggaagggcagcgagctcgttcatcagctcatggtcatccacaattcttagtgttctctaatcagcctattgcaccttcatcagttgctggaggagaaaatgacccaactgcaattcctaatagaagtccatctaccccaataacatccgttggaaatgaagcatcgcagcagatcctgcaccttcaaactcaaagttcttcttcagcttctggatctcctgtcatggctacaaatcctcgaggaatttactctaatgaaagaggctctactgcttgttcttcaccagcaaaccaagatagagcagagccatcagagttgcagtcattttctgattctctgcgatccagacttaatgcagtgtccatgagatacaaagagtcaatctcaaaaggcacaaggggatggaaggagaggctgttctctcgtagttcttccatgtcaaaacttggttcagaataaaggaggagagagataaattctggaattgctagtgtatcccgattgatggaatcccttgaaactagtgaaaataatagagttgtgggtacttctttgtcaaatcatacggagggttgttccataggaggggtgagcaaccagaacaatgttgaagctagaggggagaactcttcacatgatgacaatactccagctgcttgttctgctaactcacatttaaattgagctcttttttggtttccgttaatgcatctctcctcagcatctcatatttggaggtaactttctcacgacatgacatggtgaggagcagatgctttggaaatagtcgtgtggcatttacgtcgtggtttgcaataaagattaagatctgaaaaacagctgtgcttatagctaaaaagttaatgtttctatgtatataaattatgcctggaacagtgaagagttgtgcgtgtctgggtgaacggatttttaaactggcatgtactctggacatcaatctatccatgggagaaaaatgctatgaaattcaacagaacttatgccacagttgtgcttatagctaaaaagttaacgtttctatgtatatatattatgtgcatggaacagtgaagagttgtacgtatctaaagtgtctgggtgaacggatttataaactggcatgtactctggacatcaatctatccgtgggggaaaaatgctatcaattgcgaaggatcttgtgtccgtgacccnnnnnnnncccccc

SEQ ID NO: 9833 - DNA, 257 bp, Glycine max
  Clone ID: PAT_MRT3847_108890C.1
gggtcaaaaagaatccaaagaaaaggaggcaaaaagagccaaagccggaaaggaacaaaaaaaaagcacacagccacagcactaattaaactccaagcgaatgccccaagatggttgggaatgcataagactctcccacagcatccgctgcagccgctcccacggggacgtctaccggcgaaaggacgccgacaacgacccggggctaatcggggaaacgaaagccttagggctggacgagtggccaaggagggggc

SEQ ID NO: 9834 - DNA, 295 bp, Glycine max
  Clone ID: PAT_MRT3847_108891C.1
atcacacgtcccagaagacacctccaggtttggacgaatgcgtacagattttgagccgctgcaactaccttgtctctgacgatatgtacgacaatgccatgtgctgcatgtcttaggaagttgcttgtggctgtactgagatcctcatgcgataccaggagttggacattgagattgatttacgtaattaatttctatatatgcttaatctactcgctaatgacttttgatgttgcatgttatctatacatttggatatgatcatgtgatatatggagatggaacgaccctgctt

SEQ ID NO: 9835 - DNA, 423 bp, Glycine max
  Clone ID: PAT_MRT3847_108892C.1
tcaaatctaaaaatggggagcttaacagccttctgtgcctgcttcctcgagtgtaggatcttaggtacagacgtgctcggaatcgtcgtactccaatctccacctgaacagctttttgctcgctctcaaatcctgctgccacggatccgacgcagagcgcatgctcctcggcggtgtacgacaacaccgagtttctgatgcacttagggacccaccggcgtcattcagcatgaatgagctccataagcatacattgcgctgagaaggaatactgtccgttgatcccgacgaggcgcctgctactacaattgccgccctggcgatccggacaacccctacagcctgggatgcattgctatcaccccatgctggcgataaacaggctatacttaacttatacgtccagcagttcatacacatata

SEQ ID NO: 9836 - DNA, 964 bp, Glycine max
  Clone ID: PAT_MRT3847_108893C.1
aaaagggaattgcctcagcaatttttgggcgcgttaaccaaaagagagaatttaagaaatgttttttttcagtgtatgaaaaggaggagtctgtggatgaagaactgcgcgaggtactagttgttttgttcttaatctccttgagttaaacaacatttacttaagagtttgcattttgattccatatgtagatcattagggaaccagctaatgctccaggggccttagatgcatttgtttccattgtaacgggcccgccggggcccaatccggtgttgttgatgccaaaaatctccttgcctgttttacttttatggggagataatgatccctttactccaattgatggacctgttggcaagtacttttcttcattgccttctcaaaaagaaaatgttaaacttttcttgcttgaaggggttggacattgtccccatgatgacaggcctgacttagtacatgaaaaattgcttccctggttggccagtatttcaaattcagagtaaagtctcaagtactcactagctgcaacagttgttgaaacctttcatccattaatcggtgactctatcagccccttatataccatctgtattgattattatgttcataattttatttgtatttatatttacactacaaatagtcttcgaagatagattatgttcaaaatacatggttataacattgtcttcaccttgataagtttcttcattttgttcattgatcttagactcggcccagatccgtaacgccgggggtctgcagggttgacctccccccccttatgcgctcgaccttattaagtgctaccacaacaatacaaatcggaaggtaatgttatataacctatattcaaacaaaaattaggaatataaacaaagtttggcgcaattaataaatatttgagtaccttaagcatgctcacaataattttttttgttttggagtgttgacaagaatt

SEQ ID NO: 9837 - DNA, 386 bp, Glycine max
  Clone ID: PAT_MRT3847_108894C.1
gataatcctacgtatttgtgaatagtgctgtactggctcgaagtcaggaggaggtgacccggattgtagctactggaaggccatttgagtgcatggatcatattgcccttaagggaaagggaggtcaatacagatatgcataataatatcctgacgtacaactagcacctgctcttcaaatgctacccatttcacaagaaggatacacagtttattcacaatgagaagcccataaagaactttgttttaatgggtcaatacaatgatatatcatgtaatatcaaccccattttgaattgtgatacttaccccataggctaaaattttttctgggccaaattcattgttcataaggaatttggtgctccatttaaattcgtttttac

SEQ ID NO: 9838 - DNA, 232 bp, Glycine max
  Clone ID: PAT_MRT3847_108895C.1
tgaagagctatcattgatcaatggaactgatgaagggatgccaatccttctaggaattctcggatccgcgttagatgtaaccaaaggagaatatcattatggctctagagggtgatacggtcatgatgctggacgggatgctgatcgtgccattgtctcttgaacttgcacaggagatggcctgactgactcagtgcgcggtatatcaagcgatgcggtgagtagtgttgtt

SEQ ID NO: 9839 - DNA, 365 bp, Glycine max
  Clone ID: PAT_MRT3847_108896C.1
tgcgcacttattgatttaaaggaatgatagaaatgggggccacagatggggttacagagaatacaggtattggattggcctgagctatgaatagtcttttttagggggcgtgccagatctgatattgacacgatatgctctcaagagtgtgaatcatggaatccgtgaatgcaacaaaagcaatgactatgtgatataatgcaaacccgtgttctgatgcatggagactggaatttctgaagcagaccggattgcattgtgatatcatttgtgttactggatggactgccactgcaatgcaggatgatcagggtacaaacgattggattatttcctggtaagaatgtgttgacaggaccaattgt

SEQ ID NO: 9840 - DNA, 118 bp, Glycine max
  unsure (1)..(118): unsure at all n locations
  Clone ID: PAT_MRT3847_108897C.1
cttacttgctatgaataaggactcctttgttacanacgaaaactaaagggtgcgtgatccttatcaagcgggtgcgaattcacaaacggaaagattaactatgaccactacaattccc

SEQ ID NO: 9841 - DNA, 1191 bp, Glycine max
  Clone ID: PAT_MRT3847_108898C.1
aattaacacaaagcaaacacctccaactacaaacaaacacacttcacaactttgctttttctctctttcaatgtcctcttcttccttctcccccgccactctcaccaccgagcaggagctttccgtcatcgttgccgcccttaccaacgtcgtcgccggctccacctccgcctccagctccttctccctccccgaattccgccttccacagacctctgatcctctcgccgccgcctgcctaatgccgccgccgccgccgccgagcatggacacttgtcgcgagtgcaacatcgcaggatgcctgggatgcaactttttcccggaggagaaaaagaagcagaagagggccaagaagaagtacagaggcgtgaggcagaggccctggggaaagtgggccgcggagattcgtgaccctcgtcgtgctgcccgggtctggctcggcacgttcggaaccgccgaggatgccgcccgggcctacgacaaggccgcgattgagttccgcggcccacgggccaagctcaatttccccttggtggacgagtcgctcactttgcagcagagcgagccagagagggttcaaacagaagaagagcaaataaagacagagaatctcaatcaaggtatggaaatggattcattcgggaacaaggataccgaattctgggacaggattaacgaagctgattttcatcagctcatgatgatgatggattttgctggagattcttccgactctgccactgggaacgctcttagttcttgaaatattcaatgaagcaaaataattagtttttgatagtgtgtgtgtttaaaaattgtacaactcgaccaaacgtatttgttaaattagcatttagctagctccactacactgcatttctgtaatatctttcttccgctaggttttttcgggaggaagctgctgcatagtacaaatcaagagttttaatgtttcatttcaccaccccaagagtaagctctgtataaagattggcgtattattattattatttttttatagcaataatagctagttttaagagcaagttatcactagtcaaaaactttcaatttgtacatttttagtatgatttaggatattaagctttgaattggtcaaattttaatttaaaaaagaacaaaattgtcttttgtttaataaaattgctctaaaagagattctaataaaaa

SEQ ID NO: 9842 - DNA, 745 bp, Glycine max
  Clone ID: PAT_MRT3847_108899C.1
tttaaaaggggcccccccttttttttttttttttttttttttttttttttttttttttttttttttttttttttttttttttttttttttttttttttttttttttttttttttttttttttttttttttttttttcaaaatttgcaagatataactatcatatttcaaatttcaaactaaacgttacattttacattgacaattagtccttgaacaagatttcacatttacatgatcaaatacagacctaccatttaaaattataacaacagattgaagaaccatgagaccaattttgcacgacgcattgcattctataactcattttgttaatctgatgagtttgggtttgaggatacgctggaggaccccgcaatcttctggtatgcactcttttcatgaataaggggttcagggacccaagagccattaggagtaactccaaaacttttctgtctttctttgtaagatgcccaagtaactatatataggccggcaacgattaaagatccccctaggatgcttcccaagtaaattggggtgccaaggaaaatttgggacaggaaggcaaaaaatgcaggttgaagtggattgtaaagggcaaccaaagctggccccaagatcttattgctccatgtaacgattccatagttaagggcagatgcaatagttccagcatatacaacggctagtatttctgattgtggcaaaatccagtcaggtggctcattaaccatgaataat

SEQ ID NO: 9843 - DNA, 464 bp, Glycine max
  Clone ID: PAT_MRT3847_10889C.1
attgttaaattttttggtttttttcataactaaaaagaataagggatcccctatggtaaggggtatggaataaaccaaaacattcatgcgaatttataaaaaaaaaaaaaacttttttcaaatgggggggaaaccgaactccgaatttacagattacaccctcccgcatgagaggtcttagatggtgtatcctaaatccaaaataccggccgcgggcctacgacgtaaaaactggggaaagggaaaacccccccgcctcccacggttaaccccttaaaccccatccccctgccggcattttagggaatagggacaaaccccccccccttcccccccccaaaaaagggcgcagcgcaaaagggaaacggcccgccccctgtaaatgagcaaaaagggcggggggggtggtggcaacacgcacggtaaccgtaacagtgcgggaagccccgccccccgcgcttttt

SEQ ID NO: 9844 - DNA, 479 bp, Glycine max
  unsure (1)..(479): unsure at all n locations
  Clone ID: PAT_MRT3847_1088C.1
ggtccggnaatnntcccgggtnncgacccaaacgcgtccggtgaaatacaagacacacatgcaaagggcactcgtgtgtctctatcgctgtatataaacctacaatcaaaaatgatgttcgccgagtaaaccattataaggtgaggcctgcactcgttgagcaggatgctccaattcggctgaggccacttttaagcggttgaaggattaaactttattgatgtgcaagcgcaacatggacaggatgaccaaatctcacaaacaaatggatgtcccaaaacatgtggactcctattagccgaccatcttgatgcgaattaagatcattctccaacaccaagctctactaatggagaaaagctaaatgacctaaagctggcacaaactgaactggcctgacagcgagagggagactctctgactagaataactgtagcaggaacgaaaggctgatgataaagaaaggagatactgttgtg

SEQ ID NO: 9845 - DNA, 334 bp, Glycine max
  Clone ID: PAT_MRT3847_108900C.1
ggatggtaggattaagttgctgagtagttgtgtaatcaagattttatgtaacatttgtaaagggaaaattagcacttttgtggttcttaagggaaaagaaacagaccttgtggagattataatttccttggtttctgttaccactgttagagggagttgcatcatttaacatatagtaggatagtttaagtgtagggaggacaattattgtctgaagctaaaatgggttatttataggactgatggaaatgatttcatctctgccatctctaaagcacttttcattgaacatgttagcctatgatacgtacagtaaattaacaatgatagcagc

SEQ ID NO: 9846 - DNA, 307 bp, Glycine max
  Clone ID: PAT_MRT3847_108901C.1
agcgtcgtcgccggcggcgcatctaatgggctgcctcttccgataccgagctggagtgttaaagagaaacggattgaagagatcctgtgggcaaccagggactcatgcgagaacctgggcagttttgtcaggagtacatagcttggttaggggcatcgtgaaaaggctgagaggataagatgacgtcattaatgcgggctgtgctggatagagcactggtcttgctctaagtcttccaggtgcaccactagctctagtgctgagctgtctcacgttggaggcattgtcgttgatgatggaaggtctt

SEQ ID NO: 9847 - DNA, 415 bp, Glycine max
  unsure (1)..(415): unsure at all n locations
  Clone ID: PAT_MRT3847_108902C.1
ccacgcgaacggccacgcaaccactcaaaaaaaaaattctttctaaaatntacnaaacataattatctgttctttttnttatataattagacccccataaacnaacaatcaaatccttctaatcatttctataataaacaacattaacatttactcatatcacattatcactttacttataatttacncatatcaactcaataccacattattcaattaatattaccaaaatcaaanccttatcctacaatattctatcaactacattactcataacatcattccacaactttacaaaccaaattttatcaaaccttaaaaaactacacttctccttacaaaaatatcccatatcacacaataactcttaaatactatacaataccatattcttaatcaaccaaatatacaattt

SEQ ID NO: 9848 - DNA, 393 bp, Glycine max
  Clone ID: PAT_MRT3847_108903C.1
cagaatggtaggatacaggatatgtcatatcatcatgatcaatactacaacgggacaactgggttttataccatggcaatggaggaaggtgcaagagctcggccatatgcagtgcctttgtcaaagacacctgcagtgacgttatcgtggcctcccaattcatggtcaacatctaatggacaacgcctatctgtgcagaacatgggtcctgctataccacctacaaatcggatcactagcgtaccgggtaccaatggaatctatgctgggcattaagaaactgcattggcgggaacttatgataagcagaacatgaaagtggaccaagcgataacatcgtcaacatcaagatatgccagattactggaatcaatgacgactgttgctgatgac

SEQ ID NO: 9849 - DNA, 1943 bp, Glycine max
  Clone ID: PAT_MRT3847_108904C.1
ccacgcgtccgcggacgcgtgggatcttccagtatcataggtgttggcgcatatgtatctcctgctatggctgctggtgctcattgtgttgttgaacctccatctgatgggcttgaatacacttggtctagccggggaccaacagctgatggagaccttggtgtttgtgtgagtgctcctggtggtgctgttgctcctgtccccacatggactcttcaacgacgtatgctcatgaatgggacatcaatggcatcaccatcagcttgtggaggaactgcgttgctcataagtgcaatgaaggctgagggaatcactgtgagtccatacagtgtgaggaaggcgcttgaaaataccgcaattcccataggtgatttacctgaggataaattatccactggacaagggcttatgcaagttgacaaggcttttgaatatatacagaagtgccaaaatgttccatgtgtttggtatcaaataaaaatgcagcaatgcggagaaacaagtgcttcatgaaggcaatttagagatgaatatacgtgtgtgctgtgtttgttactacttatggcctgcctttttacgcatctgtttttaattaggatcactttttcttggaaaaaagtttgcttgtttgttggtctcactaaaacgtagagtaatgattgtaaccttcactcttttcttccattggctacgtgccaatttaatttgctgcgactaaaatgtcttttaatgattatgttgcttaattctctatgaatgtttttgatatactgggattgcatttaataatggttcataccacaaattttaaatcattagatctgcatgtttacaggacaacacagtgatcgcgcacacactttcaaagagcttccaccttccactggcatctcattaaaacgccaccgtattgctcacaagccaatgccttgctcttccctcacttccactggcgataacagcagcagcagcagcagcagcaacaagaagaaggatggttcttctctccgcgagttcaagctgaacgaatcaaccttcttagcttcgctcatgcctaagaaagagattggcgtcgatcgcttcttcgacgctcatcccgaatacgacggtcgcggcgctctcatcgctatcttcgattctggtgtagaccccgctgcggatggattacagattacctcagatgggaaaccaaaagttctcgatgtcattgattgcacagggagtggtgatattgatacctcaaaggtggtgaaggccgattctgatggtcgtatttgtggtgcatcaggggcatcactggttatcaatacttcgtggaaaaatccttctggtgaatggcgtgttggttataaattagtttatgagctattcaccgaagtgtgatatctcgtttgaagaaagaaagaaaaaaaaagtgggatgagaaaaaccaggaggaaattgctagggctgtaaaacaacttgctgactttgatcagcaacggctcgaggtagaagacgtaaaacttaaaatgtcccgggaagatctccagaatagacttgatattctgagaaggcaatctgagagctatgatgataaagggcctgtcatagatgctgttgtctggcatgatggagaggtttggagggtagcccttgacacacagagtctggaggatgatccaaattgtgggaagcttgctagttttatgcctttaactaattataggattgagagaaagtatggcgtcttcagcaaattagatgcttgtacatttgttgttaatgtctatagtgatgggaatgtcttaagtattgtaacagactgttcggcacatgccacccatgttgccggtatagctactgctttccacccaaaggagcccttgttgaatggagttgcacctggtgcacaaataatatcttgtaaaattggggattctcgcttaggttcaatggaaaca

SEQ ID NO: 9850 - DNA, 962 bp, Glycine max
  Clone ID: PAT_MRT3847_108905C.1
agtgatgaagatacgtgtgtgctgtgtttgttactagttatggcctgcatttttacgcatctgtttttaatttggatcactttttcttgtagaaaagtttgcttgtttgttgttctcactagaacgtagagtaatgattgtaaccttcactcttttcttccattggctacgtgccaatttaatttgctgcgactaaaatgtcttttaatgattatgttgcttgtattcttatgtatgtttttgttatactgggattgcatttaataatggttcatacgacaaatttgttaaatcattagatctgcatgtttacagattctggtgtagacccagcagctgatggattacaggttacctcagatgggaaaccaaaagttctcgatgtcattgattggtaaataaattgaaagtacttcattttggatatttagtttagctgatatttcttttgagcgtgtactggtttcccaattaatatatagtactttttctttcctcagcacagggagtggtgatattgatacctcaaaggtggtgaaggccgattctgatggtcgtatttgtggggcatcaggttagtgctagactgctaggaatgttaaatttgaactgtgatacgtgttgtaagaagggtgcctgcagaaaaagggaaataacagtaaaaggaagaagagaaaaggtttccagagagctatagccctccctagtgagagaaatttctctgcactcccatattcattagtgatctccacaatgtggttacaatccccacccttataacaaaattctccctctccactattctctaactaactcagcaatgtccattctacccccttctagaataactaacccttctgtaataacaaagcagccgctcattaacttggtcttgggcctatgactatacaccttaaagggcttctcccatttgaggtgcgtcccttctgtcgtcttatcga

SEQ ID NO: 9851 - DNA, 818 bp, Glycine max
  unsure (1)..(818): unsure at all n locations
  Clone ID: PAT_MRT3847_108906C.1
aatgtgatacgtattgtatcaagggtgccagcagaaaaagggaaataacagtaaaaggaagaagagaagaggtttccagagagctatagccctccctagtgagagaaatatctctgcactcccattttcactagtgatctcgaggatgatcctcaatggttacaatccccacccttataacagaattctccctctccactattctctaaccaactcagcaatgcccattctacccccttctagaataactaagtaaatgataataacaaagcatcagctcattaacttggtcttgggcctacgactatacaccttaaagggcttgtcccattttgaggcacatttcctaacacattgactcttcagctcagtgatactggcagtatcaatattacttaatgcgttctcacccagaccttgtatatggttatgctgaattatttatcagaagtacccttctgtcgtcttctgtcaaaatttcatccttcagacaatattgattggaaaaagaagtcctgctgtaaaagtaaaaaagtatgaacagataattgagcagcccacttgcagaattagatttaccagttaccacaggaacatgaaatatatacatcagtttatcccaacattgaactacactaaaataaaactagattgttcacttcatcccaaggaccgtataaatcaaccagggaaagtgtcaaatttgcactacntacaagtacaccccagcttcttgagcatcatagtcgcatttaaaaaaaaacaccaaaatgaagccataaaaatattgacaaaaatgaaagactatctgaagcaag

SEQ ID NO: 9852 - DNA, 3539 bp, Glycine max
  unsure (1)..(3539): unsure at all n locations
  Clone ID: PAT_MRT3847_108907C.1
acaggtgcaagttcctcagatgccagtagagttgcagcatcaatcttgactggtgcgtcgctactcatcaagtagaacctcttcttgattgacctttatcccgtaaaacacaacttcacaatcggcacacgcggtctcatgactccgtatgccgcttgaccaaaactgagtaatgtctagttccaatgtctgggcgcttgctaccctaaaggcaaagcttttggcagcagaagaaggagattttacagaactccgccatttcgggctcacatctcacatctcacatcctcttagtctgaaaatggatcttgccccagaagagcttcaattccttaccatccccgacatcctacgagaatcaatctcaatcccaaagcgttctccgaaaacattttacctcattaccctcagcctcatcttccccctctccttcgcgattctagctcattccctcttcacgcacccccttatttcccagctgcagtcccctttcaacgacccttcccaaacctcccacgagtggaccctccttcttctaatccagttcctctacctcctcttcctcttcgccttctccctcctctccaccgccgccgccgtcttcaccgtcgcctccctctacacctccaaggccgtctccttctcctccaccctctccgccatcccccgcgtcttcaagcgcctcttcctcaccttcctatgggtcaccctcctcatgatcctctacaactccctcatcctcctctccttggtcctcatgatcctcgccatcgacaccgacaactccctcctcctcttcctcgctatcctcatcgtcctcactctctttttagtcgcccacgtctacatcaccgccctctggcacctcgcctccgtcgtctccgtcctcgagcccgtctacggcctcgccgccatgaagaagtcctaccacctcctcaagggcaggctccggttcgccgctgtcctcgtctccgcctatttggtcgcctgcggggttatctccggtgttttcagcgtggttgtggtgcacggtggggaggactatggggttttcaccagaatcgtggtgggagggttccttgtggggcttttggtgattgtgaacttggtggggttgttggtgcagagtgtgttttactatgtttgcaagagttatcatcatcagggtattgataagagcgcgttgcatgatcatcttggtgggtaccttggagaatacgtgcctcttaagagcagcattcagatggagaatttggatgtatgacacgacacgcacgccacgggaattactgtttgtaagtttggtttctctgttgttgttgtgttgttgttgtggtcgtgtaatggaaaattcatggaatagtgtacaatgttgggagactaattaatcaatgacactattagattgtgtgctgagtacttagagtttttgtgtttgtgtagtagtaatagtagtgatgtctccatttgttgctttaaataagcaatttgtgaagttgaaccaatcctattatccttgtttgacactagctcagctcggttcggttcggttcagtagtgttttgctcattcctctgcatgtttatggtatggtcgcattgacatattgttggcgcataaacacaagttcttcaattattgttgaattgaaagcaaaataggtgtttgccttcgttactcgggcncaagatgcaccatgcggcacttgtatgtatctcctttctatatggcctggctggaacaacatcttgaaaatgaaatttgtgcaggctggttagttatggccttgggctttgttatggtgattggaattctgaacagaggaccacgccatggagctttgcagtcaacaccatagacctcaaaataatgaagaccatcagaaagattggaaggatccaccactacattgaaggtgcgaccattataagtgagcagtagatagtcaggggccttgacaactgtttcttctgtagaatgtaattcaatgcactcctcaaatggaaccaaatccttgaagttgtcagcatcttcatgaaaatttggattaagttgcactgtccactccgtagattgttggcaagcactagcttccctaaggtagatgccccttgatgaaggacttgtttttccgcattgctggatttttatttgataccaaacacatggaacattttggcacttctgtatatattcaaaagccttgtcaacttgcataagcccttgtccagtggataatttatcctcaggtaaatcacctatgggaattgcagtattttcaagtgccttcctcacactgtatggactcacagggattccctcggccttcattgcacttatgagcaacgcagttcctccacaggctgatggtgatgccattgatgtcccattcatgagcatacgccgttgaagagtccatgtggggacaggagcaacagcaccaccgggagcactcacacaaacaccaaggtctccatcagctgttggtcctcggctagaccaagtgtattcaagcccatcagatggaggttcaacaacacaatgagcaccggcagccatagcaggagacacatatgcgccaacacctatgatacttgaagatgtaccaccaggtgcaccaacagtgctcaatcctggcccgctattaccagcactgctaacaaatatcagacgatgcttgttcaccacctcattcacaagatcaacaaagcgtccatagtctggcagtaatgttgcttcaccataactcatattgataaggtcacacttatgctccacagctgctatcagtgcccgaatcaaaccagttcctgtttccattgaacctaagcgagaatccccaattttacaagatattatttgtgcaccaggtgcaactccattcaacaagggctcctttgggtggaaagcagtagctataccagcaacatgggtggcatgtgcggaacagtctgttacaatacttaagacattcccatcactatagacattaacaacaaatgtacaagcatctaatttgctgaagagatgcaagtcgacggtggaagctctttgtttaattgttttgcgtgtgtgagacccttgggttgggagtggaaaaaacaaaaacaatctcgagcgatgtcaacttgcataagcccttgtccagtggatattttatcctcaggtaaatcacctatgggaattgcggtattttcaagcgccttcctcacactgtatggactcacagtgattccctcagccttcattgcacttatgagcaacgcagttcctccacaagctgatggtgatgccattgatgtcccattcatgagcatacgccgttgaagagtccatgtggggacaggagcaacagcaccaccaggagcactcacacaaacaccaaggtctccatcagctgttggtccccggctagaccaagtgtattcaagcccatcagatggaggttcaacaacacaatgagcaccagcagccatagcaggagatncgtatgagccaacgcctatgataaaggaagatgtcccaccaggtgcaccaac

SEQ ID NO: 9853 - DNA, 222 bp, Glycine max
  Clone ID: PAT_MRT3847_108908C.1
gttatactccccggaaaagttttgggacgatttaagattggattacatggcaatttaacaacgctatgtggatatacactacctctttgtaaaaacattgtggaaaaaacacaaaaaaaaaaccctacttttaagaggagcctttgtttgtcaaccccttttctgccaaagggggggtattctaccatcccattatcatttggggagcctttttaccatgtc

SEQ ID NO: 9854 - DNA, 635 bp, Glycine max
  unsure (1)..(635): unsure at all n locations
  Clone ID: PAT_MRT3847_108909C.1
gtcgtgtacctatacaagaggccaaaacccaatcgaatatatgggtcatgctaaagtgactttgcttttgtcctcttgctaaaggcacatatattgattatcactgatcaccactcagaattttatactttttgaattgatttgcaaactccactttttcttttctagctgcatattctcttttgatagagattaattcatgcatcagaaagacggcactttggcaaaatatatatatgtgtataagaaaattaatcctaaattcaaatggaaggctgaaatgcccaataatgtattattatcacttttgtagggttgctgcgctaccgtagttgtcgtcgnnggttgtaaccacagaagagtgtttttaacatgagtgagaatagtgaattttaaccctaaaataaaagttaaattatttcacagattgctcgatatttttataattagnttcttgatttttttaattaaatccttgaatttatatacatattttttatttggtcatgttatctaactnnnaatatgaaaaattaactgttcaaaattgntnnnggnnnnnatttgaacaggcntnnaaaagaatatttannnnaagtgaacatgcaaaaacgaaaatactggatgaagnatat

SEQ ID NO: 9855 - DNA, 257 bp, Glycine max
  Clone ID: PAT_MRT3847_10890C.1
cgatcatgacgctccatcatacagaaaagatactgcatggcttttgcaccaaccttaccgtctagacggatgcggacggcgtgcgcaccatccgcctggaaggccgcggcaagctcaccggccaagtcatctacgtgccgtgcgacccgtcctcgacggccttcccgcttgttgcggccctgcttgttccgggctcctacgtcaccattcttaacttgcttattaaccctacccgcaccggcctttatccttactct

SEQ ID NO: 9856 - DNA, 329 bp, Glycine max
  unsure (1)..(329): unsure at all n locations
  Clone ID: PAT_MRT3847_108910C.1
tgcatgttnngtnantangatattgnggttgnngntntnggtgngtntnntggannnngngagttngngngtaatngangtnnatgcgtgtttnaagtntggnggatntnncnagagcngagnnngngntagctgnnngtggtcatttgnaagnggtccanctggaggntncaggtgcgtnaggttcgggntnananacaanatcagtgtggagtttggaaggaaagatttgntancnagcgntgantnaanttcaganacacntgnatacgggatgggagtctaggtgtnntcatgannttnnnatnganntgntttaangatagaan

SEQ ID NO: 9857 - DNA, 369 bp, Glycine max
  Clone ID: PAT_MRT3847_108911C.1
aaatgaaaccaaaaaaattttgggaaaaaaagccaaagttgggaacgtccaaaattaaatttccccgcccttgccctaatcaagttttatcctcataccccaattttttttggaaggatgggtacttttccatagcattttctttaaacacttccacctttttctttaagggggtaatttttgttaagaggacctttgtttttttggggaaaaaaaagccttttggattgacataggtcccaggatttggtaaaagggggttcctgagaaattccttatggcccttgggtttcacacaaacataaacatttcttccacttcctagggcattaaatatcccagcccatattgtcttaacaaccttgagcc

SEQ ID NO: 9858 - DNA, 316 bp, Glycine max
  Clone ID: PAT_MRT3847_108912C.1
aattaccttcttgttttaatttgtttttcatatgtaagtaggaagctctaaatagctcaaactttgatcacgcatgagctagatttcataattattcattatttccaattagtgcttatacatggcaatacatatgaattggtttttttaagtttgatacagagaaaaatgttaaagttggaattgtatattatgtgccttcattgatagattctcatggaatcaaatttatggttggataatgcattgatcaagctgtttgttttaaattcttcgcttctattttccaggtctatgttgctgcaattcgcaacag

SEQ ID NO: 9859 - DNA, 368 bp, Glycine max
  Clone ID: PAT_MRT3847_108913C.1
accaaacatttttttaaaatttttataaaaaaaaaatataaaaaaaaatcttaaaaaaggaaataaataaaaaatataaacacataaaataacataaaaaaaatgttaaaggggcggcctttttaaaaaacccacctttacctccccatgctttcccgttaatattttttttttagtgtcacctaattttattttactgcccctctttttacaacttttatacttggaaaaacccttgcttcccccaattaactatcttttaagcaaatcccattttcgccagatgacgtattttgaaaaaaggcccttacacaatatctcttccaaaaatttgcccaaaccttattggctatttgaacccccccttt

SEQ ID NO: 9860 - DNA, 416 bp, Glycine max
  unsure (1)..(416): unsure at all n locations
  Clone ID: PAT_MRT3847_108914C.1
ccacgcgtccgtgggtctctaggtagaacgaaaagcggacggattccaaattatgatccgtgactccaacctaacgtgctcccatgacgtgtggtntcatacgatattctgttgagatgactgccattagctatgcatatagccaaaatactgatcctgaagagtgactcgctccctctgccggacctgagctagcgggtcaatccttctgactaccatggaggccaagtttcatggctggagcactatctatttcaacgaccttcggtaacgattatgtggatgcgctgggactatacaaagtggatgatctgcctcagtcctgatatatatactgccggggacatgcttgtaacagctctaggcatggacgcactatggtcagatgtttgatcgtgactcagcaagcgggatgt

SEQ ID NO: 9861 - DNA, 362 bp, Glycine max
  Clone ID: PAT_MRT3847_108915C.1
atattttttggttgcaacttggtgttgttttaaaatatggtatacgcaggaacaacgcaggagggcttggcttgagacaaaacagtcaatctggttgttaagttgcccgttgcttaccttgtgaaccataaggtttgctttagatgccaccaccgctgaggaacactcaagcataagatctataactcttttgaaggagatatttactgcatgccgcactatgaccaactggaaaaaagaactcatttttttgacaaatgcttcgaagggacacctattattgctccaccagagaaaacctgggaagttaatcctgtaccagccaaagtctcaagtgtgtttggtggaactagatataaatg

SEQ ID NO: 9862 - DNA, 414 bp, Glycine max
  Clone ID: PAT_MRT3847_108916C.1
tttttgcccatatgctgacccaaactgttccaggctgcctgagggaaattaggcctcatgaatgcatgctgtggcaatcgttgctgaagccgcaattgttgtggatctaaattgttcatttccatttccatgtcacttttattgcagtttatttctgcaccatctaatttttccatttcaaactgttcttccttggcaaccaacctcatgccctgctgactagaagcaaagggaattgcccctgtctcttgatttgcccccccttcaaaaacctgctgaggaaacttctgaatgccaccacttgcatactgaatacctctggccattggttgttggtgcaatgaattctggcaattcatatctgatccttgaaaagcttcaacgtgtgagcccatttgctgatgcagcatttca

SEQ ID NO: 9863 - DNA, 414 bp, Glycine max
  Clone ID: PAT_MRT3847_108917C.1
ctgctatcttgattcttgaaaagtcttttgcttctaccctgaaaaaaattgtttctgctttaaatttagatcgtgtcaagacatgaacactgtgattgtctgcatgcaatctttgcaccacccttctaccaataaaacctgttgctccagttacagatatgatcattttatttccctgcaaaatcactcaagtgataacaatctagaagaaacctaaactaaatgaccacttagaaaagccaaaactaagaaacagttaaataatatcttaatttgaaaattaccaatataatcttaacagaaatcatgcttcccagacacatagaaaccaaggtatatgaagttgcatagctcacccctctacaatttttggctcataatctgttgtgaagttgagaggtggaaatattaaag

SEQ ID NO: 9864 - DNA, 395 bp, Glycine max
  Clone ID: PAT_MRT3847_108918C.1
aaatgatactaccattatgcaattaaaaaaatctaagtatactcgtagtatacttttgtacagaatcatcgtatgacaacaaaaaaggtttggtacttttcattagagtctcagtttagtttccagaaaacaaagacactccgataaagagagagaaaagaaaaacaaaaaagttaaaagtcttcgcttcattcgaagtgaatggttgacggcggaaaaggagagggaggaggagagcaagcatcgccaccctcgacggcggcgcgtcacggaaccactctccggccacgcgcctccgtggagagtgttttcagcggcgggtatagccccggtcccatggctctgctttccaatttctacggcgacggcgatgagtgcaagtcgttctcggagct

SEQ ID NO: 9865 - DNA, 299 bp, Glycine max
  unsure (1)..(299): unsure at all n locations
  Clone ID: PAT_MRT3847_108919C.1
ttcaatcatcactgatctatgatatgtttacatcccataaatcaaaagttttgtgaagctttacaaaggatggtgaaaagccaaangaataacatgagaagggaggatttcttgatacattgaaagatttcattcaagacatttttgataagatttacggagcacatagatttggtaagccaactccagatttcactgggatacacatttcatcaattaatcttgagaacgcatatctagttgttgatgatcttataaagaaccctattccggtgccaatttccctaattgacataaac

SEQ ID NO: 9866 - DNA, 1341 bp, Glycine max
  Clone ID: PAT_MRT3847_10891C.1
ctggtggaaaagggggtcttgactctaccgtgtcagagtggtgcatgaagctgcaaaaatggctagtaacacaaacaccaacaacagcaacaagaaggagaaagaccttgagtttttctttgaggaagatatcaacgaattgggtgcacaacaaatggatgctgaaactgccaagttagagagtgagagtagcagcagcgatgacgagggaaatgatacaacacgccgtcactctttcacttctcagcaatggcctcaaagttacaaagagaccacagattcttacacacttgccgcaactccaaattttgaatcaattctacgagttccaagtattatatattccagttttgaaagtcgttcaaagaataacttggacatagttcgaaagactccttttctctctggtcacgaaggcattactcaatcaacatcgtggaaggaaggtttagtgcaaaaacatttatctggtgaattacccattggtcgtgagtgcagctttcttcaaacagttttcaatgcaactaatgtgatggctggagtaggcattctgtctacaccttatacattgaaagaagctgggtggatgagcatggtgttgatgattctttttgcagtcatttgttgctatacggccaccctaatgagatattgctttgaaagcagagaaggaatcactagctatccagatatcggagaagctgcatttggaaaatatggtcgtattattgtctcaatcatattgtacactgaattatattcatgttgtgtggaattcatcaccttggaaggagacaacctcactgggctattcccaggaacatccttagatttgggtagttttcggttagactctgtgcacttgtttggaattttggcggcacttatcattatccccactgtttggttgaaggatcttcgtataatctctattttgtcagctggaggagtttttgcaacactgttgattgttgtatgtgtgttttgtgttgggacaataaatggtgttggattccatcacactggtcaattggtcaattggagtggcattccattagctattggtatccatgggttttgctttgcaggacattcagtttttccaaatatttatcaatctatggcagacaaaagacaatttactaaagcactaataatatgttttgtattgtctatcacaatatatggaggtgttgcaatcatgggatttctcatgtttggtggtgagactttgtctcaaataacattaaatatgccacgagatgcatttgctttcaaagttgcattgtggaccacggtaattaacccattcactaaatatgctttgttgatgaacccatt

SEQ ID NO: 9867 - DNA, 670 bp, Glycine max
  unsure (1)..(670): unsure at all n locations
  Clone ID: PAT_MRT3847_108920C.1
attacctttttttttttttttttttttttttttttttttttttttttttttttttttttttttgggttttaaattcaaggttagtttaacttaaatacactttttaaggggaaaacaggtttacataaacattcaaaaaaaatttatcttaacataaaaataaaaaaaagattttttttttttgaaaaaacgaacaaaacttataggaaatggggggggggggggttaacccccccccccgttataaaataaaataaaaaaaaaaaatttggttgatttggttgaaaaaaaaaaaaaagatttgnatttatttttaatggaggaattggatttgggcttcttttgggaaagctttgggatgaaaacaaggttgggatgcaccactggaaaaacttgactgaaatctctctaatggatgaacgaacctgggtaaagctcaggggcctttcactacgacaggcagagttagcctttgagagataaggagggcaatgggcagatttaggcataataacatcttgtatagggggcttgacttctttgtggccatgaacaacaccttggaaatctttgacactttcgggaaaaagctctaacaatttctttttcttttttgggggtgtttcagccctagagccatgaattttatttctagaagggggtccaaaag

SEQ ID NO: 9868 - DNA, 456 bp, Glycine max
  Clone ID: PAT_MRT3847_108921C.1
aaagtaaatctgttgcctatggggccagacatgggcacattgcctttgtatacgaaaaactttccaagttttctcgtttaatgagactggccccccatttttcggagccttggggagtttaccgtggacaccacctgggaattctggggttaaaagggtatgaaacaaacattggccgtttcacttccggggacttttggacctaagaaaaagggtgtggtatgcgggacccaaaagttgctcacggatctaggcccttgttcgacgcacaacccccaatgtgtccttggacacccgaaaattaaattaccttgccccaaaagttgtctccgtggctggaaaatggagaattagacccccttctggggaaaaaggtatgccccccttgttgctggagccgaacatatgggttaacaacgggtgcaagggaacttttgagagttttatcctgacccc

SEQ ID NO: 9869 - DNA, 439 bp, Glycine max
  Clone ID: PAT_MRT3847_108922C.1
ctcattcaatcaggttggcctccaggatattttaaaagacgaatacaaagcagaaattggtaattcatacctagcaacaacatttctgtcctggacaagttttaaagcaatatgtcaacagaataattcataactgataagtagcttctaacttttcacaggttaaagaaagagaataaactcgtttaaaaaatccccaattatctccacacttgagcatatgccatcagggatcatcaggtaatctctacaaatacccaatatttgttagtagtgtttagtttcatacaagagaactgaaactcttcggtgatgattctttagtagcactgatggttttcatttcttttctctattcttgacaagcttgagatgttgaacaatttgaaccatttgtccctctgaagatgtgaaccagtaaggttagtttagttccatc

SEQ ID NO: 9870 - DNA, 444 bp, Glycine max
  Clone ID: PAT_MRT3847_108923C.1
cacatctatttcacaagtatgacagattcttgtaaataactacactggtttacgagatacaaagtgacctcatcaatgtcatcaaggtgacaaatttgcaagactaattacatgatcaccaatcctgcagatatacatgattgacttttatttcagacctacgtaccttgttaatcagggaatttgctcctcctggagaataatggcaaaaatacaaattacaaggtttttttagggagatcacaaagtgtccctaataagatatgtatatatatatatatatatatatggacggtgctgattccgataatgactaactagctggcagccaaatgggatcctcatcagactcagaagatttaaaaaacgggaacgagagaaaacttattggatatttgaaaaatcaagacagggaaaggatgaaccatttttcattaactcctc

SEQ ID NO: 9871 - DNA, 348 bp, Glycine max
  Clone ID: PAT_MRT3847_108924C.1
gttaaggcaaacattttcttttataaataaaaatacctctgggtgggggactcttattactactgcgaggtaattcacctgctgtgagtacacatcacaaatttattattttactaatacaagataggggtagtacatcaacattgattaactaaataacccatcaacatttgagtaactacatgtgaacaatggcaccttctgttaattttcttatctacatttccggctaattcctatgctacctgtggtaagggcattcgagatcattatcagtgaccttaaaatgctgtggacggtgtccagagcaatgcagattccacattataaaatattgatctcttaaga

SEQ ID NO: 9872 - DNA, 248 bp, Glycine max
  Clone ID: PAT_MRT3847_108925C.1
gaatctactgaaagaagataacgccttcggctatatgtgtggtctgtacggattggaagagaggctaagaggcctactgtcttcattggctgcatggatggagatatcacttaatctttagggacactttagatgaattccctgttacaaacactgatattggaagcacctaatacgccaccggtagaatggaattttgcgctattaacttatgggctgcaacttggtgaaaattgccacctgtaaga

SEQ ID NO: 9873 - DNA, 474 bp, Glycine max
  Clone ID: PAT_MRT3847_108926C.1
aattcggctcgagcagacgtgtagtgacacacgcttaaagctcctgtctagtcttgggtgtgagagggggatgttaaggtgtcccatgttggctatgaatatggctataatactcttaataagacttgggctgtcctccccccttgagttagtatttggggttgaattaaaacctagttcttttttaataaatataatgaggtgccacacttttttgttaagatgttttattgggaaatgaatttgattttagggcactgctgaatttaattgctggcagtaatgataatctataaaaaaaaattgtttctttttatttttctcctttcccatttttgatgaatagaaagtttaggagaagtggaggttgcccaattttaaaggttaggacatgccacaagctttgttatggcagcttaaggaaacactagcccttaacactttcattgtcgaatttgtttcctcaggttactg

SEQ ID NO: 9874 - DNA, 308 bp, Glycine max
  Clone ID: PAT_MRT3847_108927C.1
ccacgcatctctttgtgaaggcacacgaactgcctgttaggggttgtccttattgaatggctccagccgaaaccacattgtgcaaatcatctatagcattttggatgggtagacatgcctccttcagaatctaatttgtccatcgacaggcctcgaaaggcgccatcaagaacgaatgcgatcctgcagtagacatggccattgagatatggagtccaagctgcaccattctagacatgctgacagggaaacctccccggagcgatgccccaggcgtgagcacccactatgtgttttgactccttatg

SEQ ID NO: 9875 - DNA, 318 bp, Glycine max
  Clone ID: PAT_MRT3847_108928C.1
attttaaccatcagtttacacctcagagggaacaggaaacgggttgcacgaattataccagccatgctcatgcaacaacaccttacgaaagtccaagccaaagtgccgtacaaagttatgggaaaataggggactgtgcttgagagctggtcactgctttactattgaaaatgggcagactttttataatctcctaactatagcccagataaacagcttaggtgttgtgaagtatatgatacactcaaaaaacaaaactagaatcgctggggactgggcgtagcaactgtagttacaagggtgttacatttgtctctt

SEQ ID NO: 9876 - DNA, 572 bp, Glycine max
  Clone ID: PAT_MRT3847_108929C.1
ccacggttccagtgcagcaattccagtgcttcacagaatcaaattggagaaatataacaaggccatgcattccccctcacagttcacttcttctacgttcacgcaacaagattcaaatttctctgatttcatgctcttcatcacagaccccagaagctgatacacaaactgctgaatcttgcgtcaatttgggtcttgagctcttctccaaaggacgggttaaagatgctttaaccctgtttgaaacagcactttccttgaaccctaatccagtggaggcccaagctgcgtactacaacaaagcttgctgccatgcatacaggggagaaggaaagaaagcagctgattgtctccgcactgctttgagggaatacgatctaaaatttggtacaattctcaatgatcctgacttggcctccttcagagttttgcctgaattcaaagaactacaagaagaggctaggctgggtggggaagatatcggctacagttttcggcgagatctaaaacttattagtgaagtccaagcaccatttcgtggggttaggagattcttttatgtagcatttact

SEQ ID NO: 9877 - DNA, 448 bp, Glycine max
  Clone ID: PAT_MRT3847_10892C.1
cttgtcgtcctttttttttttttttttttttttttgtttattatttttttttttttgtgtttttggttgaactatttcttgttctcttttttttgggggaaaccccccctttatttcagaaaacaaaacccaaaagggaccaagagggaaagaagggacgcaaatttttttttccccaataataaggagcccgttttagaagaaaaagaaacttgccatgagagccggagccccttttagcccctctggaaccggggcccccttgagagggggaaacacttcggatgaaaagcaaggggggtctccgccaaagtgtgcaacgggaggggtctcaaagaacgggggggtttcacccctggggagctcatggttgagggcaatgatggcagggcggaaataaaaaaggccccttactatgctgaggattccccagaaaggggacttaggg

SEQ ID NO: 9878 - DNA, 327 bp, Glycine max
  Clone ID: PAT_MRT3847_108930C.1
gtataccaaccagaaatttctaaattaccttccgtggctccattaattcaaacccagacatcaaggaaccaatcatgaccccaaaatacaaaggtgcaacagggacgctacccccccgcctacattatcactccattaactcacacctcagaaaggccgaacggtccactatgtgaagactcgccttggagaagtgaatcatgcatcatacccaaccaaggcctgccttagagacctccgcagttccacgcaaagtcccggctacccgacccatatacctccgtgctgaccaggggccagtacactttagtctgcccaattgatgtg

SEQ ID NO: 9879 - DNA, 231 bp, Glycine max
  Clone ID: PAT_MRT3847_108931C.1
gttttgcgaccgcccacgcgcccgaccgaggcgggagcaacagaagggaccacagcggacgaggaagaaggaatggagaaagacagagggaacaccgcgacgcaaaatgacacaaacccggagaagaggatggacgaaaccgagaatgcgagagcggcgatcacagaccagaagacaccagcagagaaagacactacaccacgggcggagaaaaccaccaaggcgagagcc

SEQ ID NO: 9880 - DNA, 469 bp, Glycine max
  Clone ID: PAT_MRT3847_108932C.1
ccttccgttaacctggattcctttaaaccaggccgctttttttttttttttttttttttttttttaaaaaaaaaattttccttttttggaaaatttggatggaagttcctgagggattttaattttggggtctattggccaggtggattaaaaggattgactaattccttaaaaatggctttctattgccctggaaacaaatctagttgacggttgtggggaaaaaaagcaagaggaaaagttggattacgtgttctgcaaatcaggacttggttaaggaaacacctccttggaaattccctttccgttagaacaaaaccttgaaggaaatgactcggaactggtaaaaaaagtcacgttggaaaaacagttgggagggaaaggcgattcaccttttcctgaaaaattcccagcattagcattttttgcaccattcactttctaaaaagtaactttaccaacttccgga

SEQ ID NO: 9881 - DNA, 464 bp, Glycine max
  Clone ID: PAT_MRT3847_108933C.1
cttgggggggggggggggggggggggggggggggggggggggggggggggggggggggggggggggggggggggggggggggggggggggggttttcaaaaggcctttccccaaaaggataagaaaaaccccataaacctggaaggctttttaacaccgtaccaaagggggattttagggatttgggaaagggtcccttgggaaaaaaaaagcccaattcccccccaaatttaaggggggattccccaaaacgtttggggcaaccttctttgggggtagccttttaaagccaatcccccccaaaatattctttgggggggggggcccaaaaattttcccggaaacccctaaaaggggggggtttaaaaccgggttaaacgggtttccaaatgtagggttaaccccccaaatggggggtttaaacttgggggcctttgggtcccccaaaatcccctgccccccaa

SEQ ID NO: 9882 - DNA, 274 bp, Glycine max
  Clone ID: PAT_MRT3847_108934C.1
aggccacagtatgaccaacctctgcactcttaacgatggcccgagtgtccacctcaccagcacgcgaaaatcgagtccttggagtccagacgggctggatcagagcacttgcacgaccatagttgttcacccgagctgtcgacaccgttagcgggtacagagcatgctgtgtaccaaacgtgagtatatgttcattgccataagagctatgtgaaagctccgcaccatcagccgcattagtcagcgggttgacgatgtggtaatatgatgcagt

SEQ ID NO: 9883 - DNA, 320 bp, Glycine max
  unsure (1)..(320): unsure at all n locations
  Clone ID: PAT_MRT3847_108935C.1
gccttcncacccttttgatattaacccnnggggaccacaaaaancaacgggggcaatggaaacggcggacggcaacccacaagcggggcacaacagggccggagacccaaaacaccaaacggaacgacgaaaacaccggacagaaggaacaggggacacgggacacccgcaggagcaaaaaccaaaaggagcgaaccacgaagggaacggcgcaggaaacggagaacaaaaaccaaaaagcaccgcaacaaccaggacggagaacaaaacacggccactaagagatagggcaaaaacaactcacgaagaggggaccaacc

SEQ ID NO: 9884 - DNA, 252 bp, Glycine max
  Clone ID: PAT_MRT3847_108936C.1
cccatttctcatgaacgcagctctgttctctcatctcaaacccacacaacaccgtgacaccgtcgctcctgcaaggttgccgcgccgcaccgtcatctgacggtggaacctgtctcaatctggcatccttaccgtcgccgtcacggaggctgctggaacagcgaccaacggcctccctttctgaacggcgaggtaatctactgtctgtttgaggtgttaaatagcatgtgggtgtctattgatcattttcct

SEQ ID NO: 9885 - DNA, 132 bp, Glycine max
  Clone ID: PAT_MRT3847_108937C.1
aaaaagacacaaaaaattgctactcttataggaaggtttacacaaattacattgggtcattttatatgaaaagaacaccatttattcttttaggtcaaagcccccttggttattccaactacgtacactttt

SEQ ID NO: 9886 - DNA, 369 bp, Glycine max
  Clone ID: PAT_MRT3847_108938C.1
gggaacccttgggtatttgaacgcgcagttatttccaatatcagagttattgaaattctcaatagatatcgctattacaaattactgcgccaggctaaagctccaagtatgtgcttacaatccttcaaaaaatgcccgactttgtgtgggtacggccatcgataacttaattagcgttcatcagtgtggcaagccttactttagggtgactaagttgcaaagtttgctggctagtcataacatcaccattactgatggtgttgacaaaacttgttcaactttgcagtttagaagagtagcagactgggattaactgaagataaactttcaactgatgtctaatgttttgtgattagctcctgatgacaa

SEQ ID NO: 9887 - DNA, 376 bp, Glycine max
  Clone ID: PAT_MRT3847_108939C.1
tgggaagggccttattcccaaaaaaattaaccaaggccttcttaaccggggactttgccttcgttgcccattcattgaaaaatgtccttccttcctaccttattaaaccattcttcccttccaccttccacgtgaggatgtaagagatgcatttatattcttgagtgcagcttcactgcctgatctaccctaagaaagtatggttgtactgcttaactcaaacaaaggtacaaatccttgcaattcccattttttaatggtgaagaaaattttcctggccatggtccaaccagggttaaaaaacttaatgaaggccttggtccaacctaccttatggccttaacttgaactcaacacgttaatattgacggaaaat

SEQ ID NO: 9888 - DNA, 484 bp, Glycine max
  Clone ID: PAT_MRT3847_10893C.1
taaaatttgcatgaagtattttccaaactttaatccaaatatagcctttgtcttttggcctctgcgttaatcttgaaaggtatatttgacggaatagggtgtggttgataatgtgatggacatggacagagttcgatttataaaatagctggagcaataccaagtttgatttatattatagcttagataaattaaatcatcacatgtctagattgatgatgtggttatatctgctatggtttctttatgccataagaaatatgatttgtgcgtgaaattaaggcaggtatgaagcaaaccgagtagtacccacaagattgattatatgtttaatttactgtttaaatataggattatgtggcttctttttgtaaaggtattaattaatactatgatatgagttttcttcagattagttattgcctttgtgtgtgtgccaattgtatggttagcaatatcaattagcaaattttagcaaggaata

SEQ ID NO: 9889 - DNA, 594 bp, Glycine max
  unsure (1)..(594): unsure at all n locations
  Clone ID: PAT_MRT3847_108940C.1
acgacccacgcgtccgtaaaatctgggagttcataactactgttggggaagtttcctagaagctcaatcacttcacaattatattcgatgttttctgttggttaataaattagtttatcgcactcacatcccctttcccttattaccaacaaaagggaaaaaaaatccccttccactttgaacttttcaatactgtgtcgctttcgctttagccaatttcaacgtttgagtttttcaggcattaattcattagtttcataattagggcattcaacaagtcaatttggatttggatcaattaattgcgttgcgctggatttgttgactttgattttgggattacgaataatagcgccatcgcattcattgcacgtagttggaagcgtattttgcgggtagctgcagaaagtttatggaactagctcagcatacagttatggagaatggggtaggcgaggagatggatggtgaaactcagcacgggttcccctcatggagcgccgagtctaccctgcccatccttcangcttggtgaggaagagagnctatatatttgattgcatggggaacttttatcataaagattgggatcta

SEQ ID NO: 9890 - DNA, 480 bp, Glycine max
  Clone ID: PAT_MRT3847_108941C.1
ggtagagcgacacaatggctcagccaaagaagcaagtccccttgccgttcacgtacactttctcctttggcgccatcgccggtgtcacagagctgctgctgctgtacccccttgatgtggtcaagacgaggcagcaattggaggctggtaagggcggtatgggcatgatggcgacgttcaaaaacattatctcgacccaggggacgtcaagattgtacaagggtataataccgcctttactcatggaggcccccaagcgtgctatcaaattcagcgcgaatgggtggtggtctggtctgatcaccaacaacggtcaaagagaaaccacgcaggccatcgctattctcactgggtgcgcagcgggcgggaccgagagctttgtcgtgacgccgttcgaactggtcaagatcaggttgcaggacaaggcgacggcgttcaaggggcctatcgatgtcttgcaacatgccatcaagaatgacg

SEQ ID NO: 9891 - DNA, 631 bp, Glycine max
  Clone ID: PAT_MRT3847_108942C.1
ttcccgggtcgacccagcgtccttttcataactactgttggggaagtttcctagaagctcaatcacttcacaattatattcgatgttttctgttggttaataaattagtttatcgcactcacatcccctttcccttattaccaacaaaagggaaaaaaaatccccttccactttgaacttttcaatactgtgtcgctttcgctttagccaatttcaacgtttgagtttttcaggcattaattcattagtttcataattagggcattcaacaagttggaagcgtattttgcgggtagctgcagaaagtttatggaactagctcagcatacagttatggagaatggggtaggcgaggagatggatggtgaaacttcagcacgggttcccctcagggagcgccgagtctaccctgcccatccttcaggcttggtgaggaagagagcttatatatttgattgcatggggaacttttatcataaagattgggatctagcagacctttttctaaaagaagagaaggaatctggtgtaggagaaggtcgagggaacgagttttcttggtaccatgttgaactaccgaaaggaaatcaaaagttgtcacaatctgcacaggacctgattggtgttttct

SEQ ID NO: 9892 - DNA, 709 bp, Glycine max
  unsure (1)..(709): unsure at all n locations
  Clone ID: PAT_MRT3847_108943C.1
gaaaagggctccagctttcccttattaccaacaaaagggaaaaaaaatccccttccactttgaacttttgaaactgtgtcgctttcgctttagccaatttcaacgtttgagtttttcaggcattaattcattagtttcataattagggcattcaacaggggtttgatctttagtgtgcgtatggtggtgtttgctagaagatttttatgaacctacctattcggttgtttgaatataattctaggtgttccttactttcagtcaatttggatttggatcaattaattgcgttgcgctggatttgttgactttgattttgggattacgaataatagcgccatcgcattcattgcacgtaggttggttgttttaaaggacgagagattttaagtgtcaagtttataagataggaaaattgagtctcagttgaggttttttggatcaagttgtttaataccatatatcattttgtttattagttggaagcgtattttgcgggtagctgcagaaagtttatggaactagctcagcatacagttatggagaatggggtaggcgaggagatggatggtgaaacttcagcacgggttcccctcagggagcgccgagtctaccctgcccatccttcangcttggtgaggaagagagcttatatatttgattgcatggggaacttttatcataaagattgggatctagcagacctttt

SEQ ID NO: 9893 - DNA, 238 bp, Glycine max
  unsure (1)..(238): unsure at all n locations
  Clone ID: PAT_MRT3847_108944C.1
gatctgatgtntgaatctatagaatctggtcaaaccaaattgcaagctagatcgatggatcgatcgatatctctggaacggtgcaacgtggtacatgcggcggacacggcaccggtggatatatgatccgccagcccatcaagcagggctacggcctccgacattgctgcttgcacaacatccacgagcagctgctcatgctccgtggaaacacgcgtagcacaaccgtcttgatgct

SEQ ID NO: 9894 - DNA, 394 bp, Glycine max
  Clone ID: PAT_MRT3847_108945C.1
cacgttgtatgtttgtaccctatgctcagttgagacaatacctgcagaggggattgcaatacacgatggtgctctcacctctgcattattcacatcctagggatgaacattttctgtgatcacagtgccaaaaaaataaggatccctcggatggtaagagatcattacgttgaattaccagaggaacagacgaatgaactctgatgaaaatctgcattttgagagtgatcaacgttgtacatctgatgggaaagaaaacattttaatcaacagacactctcttacattatcacaggggctttatacgtttaatcttgaattacacgtgaagacacatatgagatgcaaaccaattgcagctcagctataacatctctgtcttgggaggtgtgaa

SEQ ID NO: 9895 - DNA, 351 bp, Glycine max
  unsure (1)..(351): unsure at all n locations
  Clone ID: PAT_MRT3847_108946C.1
actcttattctattttttaccattttngggtgggtttttttttcttccttctatctttgtgaataatctatcaccgtgtttctccggactgtgtggaaaatttctcaatcccccatttgattcatttttttgtgtttcctcattcaccgggggggtgattttctgaatttcaatctttttgcgatttttatttgggatcaggggtgttggggttcaaggggacctatctttttacaagggtangtgtgagtgggagctatttcaatcantgtggggggggagggaaaaggagttnaaaccactttttattaatgccatatccatttctattataatttacaaacattatgg

SEQ ID NO: 9896 - DNA, 350 bp, Glycine max
  Clone ID: PAT_MRT3847_108947C.1
gatgttacacccaacactctcctctcactctctcacaagctgtgtccaacgttattgctatgaacacacagttcacggcttaacgctctttcgttgttgattgatggaaagctgcatacttcgctaccatcacccaacactcctcactctgacatcaatttcgcacaaaccccacttgagattcttcacagggcctgatctcggtggtggcagtgtctctacttcttcttcatgagcgacatattataggcgaagaccctctatcagagcaagtgctggaacaagctcatgtgagttcagtagcctgaactctagcatggagccacgttccatggtgacgaagttactca

SEQ ID NO: 9897 - DNA, 1121 bp, Glycine max
  Clone ID: PAT_MRT3847_108948C.1
gaattcggcacgaggaagaaaaaaaactcaaattcgaattgtttgtatggtaaaaccttttgttgagagagttaatttcgtatgtgtgtttctttctcaaacataataggttatagtggaggatatgtgtgaatgtgatttagataaaagaaaatatgtccatcattattttaattataaaccatattaaatctcgtaagaaatttattaattcgaatgagtatatgataattatttatattttaagatataaattgcatgtgagaaatagtaaatattttgattaagctataaaatttgtgtcatgctgtaatagactgtctttgaactgttatcaatatatgtggatttatttattacttcaataaagggtaatttacaggagaagagattgtctcctatgaaagtccacgtccaatagtagggattcatcgaatagtttttgtgttatttcgtcagctgcgtagactaactctgcaacctccaggctggcgccagaatttcaacactagagactttgctgagatttataatcttggattaccagtagcggccatgtacttcaactgtaaacgagaaaatgatcaaagcagtggaagaagaagataatagaaagaaaactattattaatatatatcccgagtttttatcagctcaacatgaaataataaataacttctttttatatttaagtatttattaaatataaatatatattatataaaaaaatcaacacgaatttcaattaaaaaataatattagtatgaaagagctaatggcccctaaagaaaaaggtgcctagggcatcagcaataagcttagtatgaaggtcatttggacatacctgccaaactgaagatcttcagacgagccattaatttcccagcaaggtaatctgcaatctgattagcttctctgaatgtgtgttggaacaccagattccactcaagctgcatgaaggttctgatcttggtaatcaaaggagacacattcacaaataattatgtacgtatgaggaaataatcgattaatctacttgttcttcaaactcatatttatgaagagcaaagtaattgattaattctgttgattttataaataacatctttgtgcaagcttat

SEQ ID NO: 9898 - DNA, 529 bp, Glycine max
  Clone ID: PAT_MRT3847_108949C.1
tcgcccacgcgtccgcccacgcgtccgattcaacaaaaccaaagctgcctctgtttttgccttttcttgtttacccaattttttcttcctcagatacacacagcatcaccatgctcgatcatcattaacaacacaccctcatagattctcacccaaaaacctaagtgtagagatagatatagtaattcgttatggcgacggcggaggcagcttctactgggcttggtcccagatatgcacctgatgaccctacccttcctcaaccgtggaaggggttgattgatggcagcactggtcttttatactattggaatcctgaaaccaatgttacacaatacgaaaaaccgacgccacctgtgcctgcgcctgtggcttctgcgccgagcttggcgcctataccagcggctcatacaatgcagcctggcgggatgatgcagcagcacgggcagcagatgctgcatgtacaatcctcgcacagcatcttgcccacagcatggccaatcgatgctgccacagcagcagcagcagc

SEQ ID NO: 9899 - DNA, 1304 bp, Glycine max
  Clone ID: PAT_MRT3847_10894C.1
gaaactaataacctcttcgaatccgttgatacgcattcaagccctagatttcaatctagggtttctttgcacgctaattccatcttcaaattctgccttcattcgattcaggggggaattaaattgtttctattttttttcgaatttaccacaaattagaaatcgataaagaaaaatggtgagggtgttgagaagctgcattcaatcgattttgaagctggtgaactcggtgattgggatggcggggctagccatgattctgtactccgcatggatgattagggtttggcagaggaagatgggcgaacttccctttggtcacgattctgattacccacctccgtggttcatttacatgtttcttggccttggagttgctttctgtgtaatcacttgtttaggtcatgttgctgctgaaactgctaatggctgttgcctatatttgtatatggtatttgtggttttgcttatcatgctggaagctgcagtaactgttgatgtatttgtaaaccaggactgggagaaggacttcccaaaagacccctccgggagttttgatcagttcaagaattttatcaggtcaaattatgagatgtgcaaatgggtaggcctgtcacttgtttctgtacagggactctctttattattggcaatgatactcaaagcactagggccacatcaatattatgacagtgatgatgaatatgctcctgacagggtgccactcttgagaaatgctccacctcattatgttgttgttgatccaggatatgtgcatggaaatgatgcatggaggagacaagacaaataggtaagcccattttgctttgaattgaaccttgatgcttggagccatggaaggtgggcgtggcaatcattttttatgccagttgacttagaaggggacctgtatgcttgagatggattagctattggattaatggctatgggagaaacaagttcttatcgtgacccttgcatctgttacaccaatttcatacagttatgagcaaacgtatacgttgtatcatatatttttatatttcttttttgggtgaatggacgaacgtatgtatcatattgattcatgtctgtatatcataaataaaatgcagaatctcttgatgaatgatccccctgtatcttctgttaaatgtatcacagaagttggatcaatagatagataagaacaaattttcctttgtttatcctgattactgatcattcatccagttgatacaaaatggaattttggtgcccggtgcatttacacaaaaacatgactgtcctttgtttttttcaaa

SEQ ID NO: 9900 - DNA, 864 bp, Glycine max
  Clone ID: PAT_MRT3847_108950C.1
aaactatctggtggtgtagctgttttcaaagttgggggggctagtgaggccgaagttggggaaaggaaagatagagtaacagatgctttaaatgccactagagctgctgtggaagagggaattgttccaggtggtggagttgctctcctatatgctacagtagtcttggataacctgctaactcaaaatgatgttgagaagagagggacaacaattattccagctgtggtggataattcaaatgacaagatagcttcaactactggggttgaagatatggtggatttggatctctaaccggcttcaccaaatcataatttcaattttgtgtaccaatattggatttttgctcctaccttttaaggatgtagttgaggcagagttataaacttgggtggcaaattggtagatgctgccagtgtgtcattgatttatgaaaccttctatttacaagtgttggataatccacatgacaaaaataaacctcctagtcgggtgccagatatggatgatttggatctctaacctgcttcaccaaatggtgaaaacatttttttgtaccaatgtcgaattttgctcttccttttaaggatgtagctgaggctgaggtatataaacttgggtggcaaaatctgtgttttactgagtgaggttaaaattatgcaaccttctatttacagtgttttaggaaaaactgataggaaaagatgaaaacttgcctcattctataggtgttcatccaatttatgttacaagtgcaaatcaaagaactattgaaagtcaagtttttgctccattttccccccttattgtaatgcaatttgctttagtcatcaaatttcaatttgggttctgttcttgttt

SEQ ID NO: 9901 - DNA, 265 bp, Glycine max
  Clone ID: PAT_MRT3847_108951C.1
tttttaacaaaatcgtttctttttccttgcaaagacaatgtataatgtcggaaaaactcattaggggcagtctttcaaacaaaaaattctaatactacccctacacctaaggtaacaatggtttatatcaacatatttaatatcaacgcctgtctatgtgacaataggcgtatatcccaccagttagcagttcagtttgtagaaaactgtctaccaccctttgttgtcaccttcagaacaggaatgcacaaccgctagaattcaa

SEQ ID NO: 9902 - DNA, 336 bp, Glycine max
  Clone ID: PAT_MRT3847_108952C.1
caaagttactgtgttaacacttagatgaaggagcatatattataatcaatcaccagcgctaccagggtgttcacttgcactcttctatttaatttattagaatgatgaacaagctgatggtagaagttgaggaggcgagcgtcctcatgcccaaagatggggaagggtcagttagcccctttgttgaggtcatagttgatgtgcagaagcacatcactgaaacgaggcacaaatacctgaaatccttttgaaatgaaaagcttgtgttcaacatcaataactccaaagatcttgtccacaagacaattgagggggttggatacattaacaaccaca

SEQ ID NO: 9903 - DNA, 2190 bp, Glycine max
  unsure (1)..(2190): unsure at all n locations
  Clone ID: PAT_MRT3847_108953C.1
gagctctacctccacaaatcaatctccaggctatctatcaagtaagaaagctgttaagaggaggagaatggctgatgatggaagcaggagggaattgatattcaggtcgaagcttccggatatctacatccccaaacatatgcccctccactcttactgcttcgagaatttgagagagtgtggttcacgcccctgcctgatcaatgcccccacgggagacgtctacagctaccacgaggtggacagcaccgccagaaaggtggcgagggggctgaagaaagagggcgtggaacagggccaggtcatcatgatcctcctccccaattgccccgaattcgtcttctcgtttcttggcgcatcccaccgcggtgccatggccactgccgccaaccctttcttcacccccgccgagattgcaaagcaagcccatgcctccaatgccaagctcctcatcacccaggcctcttactacgacaaagtcaaggacctccgcgacatcaagctcgtattcgtcgactcttgtcccccccatacagaggagaagcagcatctccatttctcacatctgtgtgaggataacggtgacgctgatgttgatgttgatgttgatatcaagcccgatgacgtggttgcattgccttattcttcgggaacaactggtcttcccaagggagtgatgctgagccacaaggggctggtgaccagcattgctcagcaggttgacggtgataatcccaacctctattaccactgccacgacaccatcctctgcgtgcttcccctctttcacatttactctctcaactccgttcttctctgtggcttgcgtgccaaggctaccattctcctcatgcccaagttcgatattaactccttgcttgctctcattcacaagcacaaagtcactattgcccctgtcgtccctcccattgttctcgccatttccaaatcacccgatctccacaagtacgacctgtcttccatcagagtcttgaagtccgggggagcccctctgggtaaggaactcgaagacactctcagagctaaattccccaacgccaaacttggccagggatacggaatgactgaggcagggcctgtgctaacaatgtctttagcttttgctaaagaaccgatagacgtgaaaccaggtgcatgtggaaccgttgtaagaaatgcagagatgaagattgtcgatcctgaaaccggtcattctttacccagaaaccaatccggtgaaatttgcataagaggcgaccagattatgaaaggttatctaaatgatggagaggctacagagagaaccatagacaaagatggttggttgcacacaggtgacatcggttacatcgacgatgacgatgagttattcatcgttgacaggctcaaggaattgatcaaatacaaaggatttcaagtggctccagctgaacttgaagcccttcttctcactcatcctaagatctctgatgctgctgttgttccaatgaaggatgaagccgcgggagaggtacctgttgcatttgtggtcatatcaaatggttataccgacacaaccgaggatgaaattaagcagtttatctccaaacaggtggtgttttacaaaagaataaaccgagtattcttcattgatgcaattcccaagtcaccgtcaggcaaaatcttgcgcaaggatctaagagcaaagatagcggcaagtgttccaaaatgaaattaaaccaaacccatcatgttatggtgttattatacgatgcccgcataagcaagcttcaacacaaaaggaagaggcgctgttgcttgatcccgctagcttttacgtattttctcttacgtaacaaccgtgtataagttaccagtgtgattttcttacagaactatcttctgtaaagatttcaatctgtcaaggactttcaccttctataatatcaaattatattttttttttatataaaattataaaaaaaaaaaaaaaaaaaaaaaaaaaaaaaaaaaaaaaaaaaaaaaaaaaaaaaaaaaaaaaaaaaaaaaaaaaaaaaaaaaaaaaaaaaaaaaaaaaaaaaaaaaaaaaaaaaaaaaaaaaaaaaaaaaaaaaaaaaaggaaaaaaaaaaaaaaaanngggggggggcctttttaaagaaaccaaattttttcccgggggggtgggaaagaaatattttttttttttgggg

SEQ ID NO: 9904 - DNA, 623 bp, Glycine max
  Clone ID: PAT_MRT3847_108954C.1
agacggctgcgagaagacgacagaagggggttaccgttatcatgcaagctgataatggggcctctgaagttcttgttccgttattataaaactgagtccttcactctctctcgaaccagctcacagaaacaatgatctcctacgccgacatgctcaagggatcacatggatgtcaacaacttcaactatcctccattgtcagagatgtaaactacagctgtggctcgtgtggttatgagctgaacttgaactccagcaaccgcaacacttgttctctcattgactcaaagtccataaagagaggcatcatctccttcttctccgtggatgagagcaggttcactcagatccagcaacttcactggccttcttggatgccctttttcaactccaagcgccaaagaaccaagcttttttgccgcagctgtgggaaccaccttggctatgcttacactttgccctctcaatctcaatcccgggatggcatctctgatgattccagaatctatgatatcaaactaaccgctttgttaccttctttctgcgaggaaccaagtcaaaagttagaggatatgggcaagtttgagactgcatcttcctccactctggtgttctaattctga

SEQ ID NO: 9905 - DNA, 1071 bp, Glycine max
  Clone ID: PAT_MRT3847_108955C.1
tacggctgcgagaagacgacagaaggggatggtgattatgtctgccttgttcagcttcatattcccaccaccatcttctctggtggtttcggggatgtcagtgataagccttgtgtcactggctaatgctggcttctcagagattagagggaagcatttgaactattcaaagttttggaatgctaatccctctgcagaaaagcaggtcaagttgtctagcaaagctggcatgcttttgctgtacactcctgcttttcttgctggccttgcatccttctggatctttcctcatcaaggcctcagatccaccctccttcagtctgcagttaccctgcatttcttcaagagggtctttgaggttgtgtttattcacaaatatagtggtgccatgcttcttgattctgcaatccccatcactctgagttatttcctatcaactgcaactatgatctatgctcaacacttaacacaagggcttccagaaccaccaatcgatctgttgtatcctggcattgttttgtttgtggtgggcatcattggcaacttctaccaccactaccttctatccaacttaaggggaaagggtgaaaaggagtacaagattccaaagggtggcatgtttgagcttgtcatatgtccccactacctgtttgagattattgagttttatgggttctccttcatttcgcagacgctatatgcattctctttcaccgtaggcactactttatacttgctaggtaggagttattcaactaggaaatggtatctttctaagtttgaagatttccctgagcatgttaaggctatcatcccatttgtcttctagaaatgttggaaggaataactaattttactttcatttctcagacgctatatgcattatctttcactgtaggcgctactttgtacttgctatgtaggagtgattcgactaggaaatggtatctttctaggtttgaagatttccctaaggatgtaaaggctatcatcccatttgtcttctaaatgttagaatggaacaactaattcttcttgagttatacatgtgctagattgtgttttttggcc

SEQ ID NO: 9906 - DNA, 754 bp, Glycine max
  unsure (1)..(754): unsure at all n locations
  Clone ID: PAT_MRT3847_108956C.1
acgagaaaaaacggtccacgaccgtgatttgaacatcaaggttttttaaccatctgcgacagtaagatcacaattggaccgcatcggccacatttgtctgccatttgtctgcgatatcaacaaacaaacgcgaccaagaccgatatttgaaaccttgatcagttgcaacataacctgagagatcaccagacacagctgaacccacactattacatatatatatatatatatatatatatatatatatatatgataatcaccatgcagtacattgtacatcagaaaacaccaaaacgtgagttttgccatcaagaagaagaaacgaatcggaacttcaaatgacacattgaaagggacggatcaagatcgatccgcatgtttcgtccacgccacgcacgtgacgtgacgacaaaaccagcgtaaatgatcaatgaaacaaagcaaaggaaaagaaaaaacgtatcatagaaagaagaagaaaaagaggaaggaggagattaccgttagagaagcttctgtgaaacacggagatcctgaggtaggaagcagctcttgaagcccacaactgtctgcaagccatctctctgcactcactctgcttcttctcaatagacctttctatttgccaatcattttcgtagggctgatagggttaaatttgacttttaccacctccaagtactatttttttttttctaaattagattcaaagtagggcgtttccggannnattttggttaacttgagcatctaa

SEQ ID NO: 9907 - DNA, 367 bp, Glycine max
  Clone ID: PAT_MRT3847_108957C.1
gcgctttgtggggtttgggggttttttttttttactgagaataacattttattggcgttagggctcattacattaaaccacacgagcgggggatatgagttcaatacataatgagacaactattttcagcccataactcataggcctataaatttggggccaaaaaggagtggtgtgtaaaatgggggaagagaaaaaaaagacaaagtgaaagaaatactcagattggaggggaatcctacttatgggcggagtgggggaaaaacaactactggattgggtgcaccgaagccaagggaggggagtataccaacattaacttgaggggggttcttaacgggagggacaggggcaattgggacactag

SEQ ID NO: 9908 - DNA, 313 bp, Glycine max
  Clone ID: PAT_MRT3847_108958C.1
ctcgcgtaaaaaagtgttgtgggaaatggcaagcgctggtgcacgaggagggtttggggacgcgaaccagaggatagactacgtgttccaggcggtgctgatacgggactcagcggtggggaagtcccagatactaactcagtttgcgaggaacgagatcagcttggactccaagttcaccatccgtgttgcatttcagacgaggactctggttatcgatcacaagaccgctaaggctcctatcttggacactgccggccaaaaacgatacaaagcagctacgagtgcctattacaggggtgctgggggggca

SEQ ID NO: 9909 - DNA, 771 bp, Glycine max
  Clone ID: PAT_MRT3847_108959C.1
accacgcgtccgcaactttctctctcctcaagtctccttctcttttcgcttactccctcttcctccttcgcgatccatcactgccaaatctccccaagatttcgattccacaccgtttcggcgatcgattttctccataaccctcgatccacataggtcctttgtaaaaaatccaaaaccctagttttttatttttcttaatttcatggcggagctttagattaggcacaaacccttcaatgattatggtccctttcgttttccctcggagctaaatttcatgggtgttcccgaaagttttttaattgaatctcttatccctgtgattttgcgttctgattttgaggcgatgaagtgtatatatctatctcgcaaatttcattgaggagagtgtttttcgtctttttaggtgatggttttgcgaatttttcacaaaggaggaagcttgggagggttttggatagtgggtctcgttgattgagtttggatcagtgagtggaattttgcctgtgtatattggttctaggttatttgttttcttggctttgaagatttccacatcatagattgtagaagtgggtgatggaaaaacaggaattgacctcgtgcttgcactagaataaaaatatttgagggtttttattttaaccgtgtttggtgtttggagcagaagagtatttggttatggttctcatcagggtgagattgtgttatgaattgtggaagtgatgataactattgactagtgctctttggggttgatactttgca

SEQ ID NO: 9910 - DNA, 316 bp, Glycine max
  Clone ID: PAT_MRT3847_10895C.1
atacattgccttcgtctgcgaggaggcctgtctgtcccggggcggaatgcaatgcacagctcttcatcaggatgaaatgggtgatctttagactagtggcaaatctgtaacccatcttactcacaaactgaaagaccatcttcgctgcaaggaaagggatttatgaactgaaatcgacgcagaacccatgcaaacggtatgagccccagagccactattgcttcgaatagtgaaatattaggctgttgcttcttccatgaaattctatgacggagggccggccacatactgaaacctcttatgtccacgccattat

SEQ ID NO: 9911 - DNA, 284 bp, Glycine max
  unsure (1)..(284): unsure at all n locations
  Clone ID: PAT_MRT3847_108960C.1
attgtcagttttttcactttgttattccagctttgcactgtcttttgggagggttttttttacaanaggacgggatttttatcctacaattcttcattnttattcaaagtatcaatcaactgtccccttntttgttgttcgccatatcaaattttcatagaactacatactctactctcataatcatttttgtaaaaaggttggaggttgcgcttttgttgataagatatctttcttaatgctttaataaaagtggtacactctcatatatccttttaatttta

SEQ ID NO: 9912 - DNA, 245 bp, Glycine max
  Clone ID: PAT_MRT3847_108961C.1
gaagaacctctgaaaatcctttctttctttcatcgatcactctctctctctagatctgttcaaatctccgagcatttccgctccaattttcatttccctgaacaaaaccaaaccctaaccctttcttgtcggtatgatagctgattccccctcagaggcgatatttttgtgtcgagttggagattctttcggaagtttaggttagaattgttgtgaggtttgtgggggtttgaatcggtgagatg

SEQ ID NO: 9913 - DNA, 647 bp, Glycine max
  Clone ID: PAT_MRT3847_108962C.1
attccttcacttgactgatatgtcgctactatcctgatgcatcaccatgatacccactatccaaaaaagcacatccacgtcaccacgctctcccatgagctattctcactctctctcgttattccacctacgaatctacctactctctctgctctcctccccacaccagatctctagactattaatacaccggcctctgagactgcttctccaaatgagataactatggaatgacttactcgctgccgtgggactctcctgacccacgtgatcaacttggtgacaaggtatccacatcttgaagaagctaatggcaatctgtgtaagatgatgatgctgtgtcatctgccctcgagtgtgactatagtcttgattctaccacccccttatcgagactccagactgtactaccgagattcgattgataaaatcgccttgagtctttgcctactgcaagtcctgcatgctctgctaagaatatcgagagcttcggcaccgagaatatgacatgattatagcttgctctcgatatgtcaatcaatctctactgatgagtcaccaatatctgaccctacatttccttcaagctatctctgatggacgcgtatatatatatgattcctgtgcctaagacaatgagtctacgg

SEQ ID NO: 9914 - DNA, 668 bp, Glycine max
  unsure (1)..(668): unsure at all n locations
  Clone ID: PAT_MRT3847_108963C.1
atgaatagctttaggaccatcatcaattacaaggggaaaaaaagacgtaatatatttatctccataatacaaagagctcaaatcatggtgaaaacgtaggcaatatcctaaagattccgatctgtgggtccctgtactaccagcatacatttggattagcttgagtacgattccactcacgaatgatgatgttgatggcaaggtccccatgtctcttaacataaagtaacttgcttggttgtccttcctcttcaaatcaatcggcatctcaattccccaagtacagaaattctgtttaattagagactatttgtatccaacattttcaaaagaaaaccagatattcccacgtaattatacacgtttctcttcatgtttacataattattatttatggacaaaatatatttttatcctttaacttatttgtttgattttttatttttaaaaattttatttcgatcttttattttattttttttcaatttaatctttcgnnccatctaaaattaatgtcattaattatttaaaaataaacatcttttgttagaaatgaaatgaaagggaagaagattaaanaaaaannnnnnttaattttaaatgattaacaatattaatattaattacactgaatnnnnnnattgaaaaaaaaatnnatnannnnnnta

SEQ ID NO: 9915 - DNA, 674 bp, Glycine max
  Clone ID: PAT_MRT3847_108964C.1
gaggagaaaagtatttttgagtatgtaagcatgtttatataaacaataagaagtatttttttggattcttagtaaaaaaaaagtacaaataaatagaatgagatatataggacaagaaaattattgggcacaaaaatcagcacactgattttgtcagggcgagaaacataatcctccagatctacgtcatcactcaagttcatcttggctgtgaaacctgatcaaaccatcaagaggttagctagcaaatgaaaataaactacaaattttatatgcagctggcactatcaaacattacctggcacttattttgagcatgaagtaacactttcagagttctgcactgttttgaaagaaattcgtccaattgcatagaaaaatatccaacatgctgtttttaataagatatttcacaagctggtgacgtgatcagtcatcacatgacttgagaagaaacaggaaaccgactcaaataaagctaaagaattaatattcttaaggatttttcattttttactacgtgactctaataaatcaattttgggcttaattaactaaaaggcagtctattttaacatgctaaacgaaaggagttgcagttaactcataaatggttttgggagaaaacgttttcaaaaaactttataaactagttatttataatcgattttact

SEQ ID NO: 9916 - DNA, 896 bp, Glycine max
  Clone ID: PAT_MRT3847_108965C.1
ccacgcgtccggccggcaaatagaacatattggtgggagtgggtatatatagagtagtagtatttgtgaagcaagaagaataaaaattgttagtggtagtgggcgggggaatatggatggggaactacacataatgttatttccgttcccaggtcaggggcacttgataccaatgagtgatatggcgagagcatttaatggaagaggggtgaggacaaccatagtgaccactccactcaacgtagccactattcgtggaacaataggaaaagagacagagacagatatagaaatcctgacggtgaaattccctagtgcagaggctggtttacctgagggatgcgaaaatacagagtcaatcccctcccctgacttggtactgactttcttaaaggcaatcaggatgttggaagcccccttggaacacctactccttcaacaccgtcctcattgccttatagccagtgctttcttcccttgggcatctcattccgccactaaactcaaaatccccaggcttgtctttcatggcaccggtgtcttcgccttatgtgcctctgaatgcgtccgactctaccagcctcacaagaatgtttcttctgacaccgacccctttatcattcctcatcttccgggagacatccagatgacaaggctgttgttgcccgattacgctaaaaccgatggagatggagaaactggcctcacaagagtcttgcaggaaataaaggaatcagagctcgcaagctacgggatgattgttaatagcttttacgaactggagcaggtgtacgcagattattatgacaagcagctgctacaggtacagggaaggagggcgtggtacataggtcctctatccctgtgcaaccaagacaaaggcaagcgaggaaagc

SEQ ID NO: 9917 - DNA, 402 bp, Glycine max
  Clone ID: PAT_MRT3847_108966C.1
ccaccggcggcagtatggcttcaaatagaatcgaaatcatggggagctggggtgactgtccctgaaggacgatgtgtagtcaatctggacgacagtgccctgcggatgctcgagccagcgcaacatcgcaagaatccagctcagagcacgtttcatagtttcaaggacccactttaagcccgaatcgattgatattcggaaaccgggcaaggttcagacgcctaatccaccaaaggcagccggagatggtggagcgtcactggatgtagagctgttgggacccaacagcgaggataaacatcttttcacggctgttgaacaggcgacgaaagacttggatgtatttatgatatttgaccccgtaaccaggacttttactatgtacgaagccgatagcagcgt

SEQ ID NO: 9918 - DNA, 371 bp, Glycine max
  Clone ID: PAT_MRT3847_108967C.1
caaaatccttgatgaaggggtaacgccgccacatcaccccatatttttaatgttgaatgtccgacaacaattgggggggaaatgacactcttgggtggtttaaaaaatccactgaaattttctatgctgacgctataatggattgaagagaagacgatgctatcattcatatcaccagataaaatggacgcggtgagtccgggcaatcaggctcatagttgccattactgaacccaaactcatgcctttcaagctttccatgcatatacggaccaacttagtctgctgaccaagtctgctccacaattggcatcactcttggattggactgacccctgttctcactaaacattcgagctgcttcagaattt

SEQ ID NO: 9919 - DNA, 469 bp, Glycine max
  Clone ID: PAT_MRT3847_108968C.1
ggctcgagctcgagccgtgctatttggctcctccataattcaaatgagcttcgacaatggtggttggggtgctattctagctaacttgtacgctaggaaggatgcttatgtgcaaccatcattggtaattgtgtattttggtggcaatgattctattgatcctcacccatctggccttggtcctcatgtaccccttgaagaatatgttgaaaacatgaggaaaattgctaatcatcttaagagcctctcggaccatattcgcattatatttctcacttctcctccgatcaatgaagaactaatccgcaaaaagctcagtgcaacgcaatcaggaagaaccaatgaatcctgtggagagtatgcagatgggttaatggagctttgtgaggagatgaatatcaaggccattaatctgtggtctgcaattcaaacaagagaggattggttagacgttagcttcacggatgga

SEQ ID NO: 9920 - DNA, 981 bp, Glycine max
  Clone ID: PAT_MRT3847_108969C.1
tttacgcgtgggcggacgcgtgggcggacgcgtgggcggacgcgtgggttgtgctatttggctcctccataattcaaatgagcttcgacaatggtggttggggtgctattctagctaacttgtacgctaggaaggcggacatcatcttaagaggatactctggttggaattcaaggcgggctttggaggttttggatgaaattttccccaaggatgcttatgtgcaaccatcattggtaattgtgtattttggtggcaatgattctattgatcctcacccatctggccttggtcctcatgtaccccttgaagaatatgttgaaaacatgaggaaaattgctaatcatcttaagagcctctcggaccatattcgcattatattgctcacaagtcctcctatcaatgaagaactgattttttaaatgagtagtgctaagtaaagggggaattaataaaaaattataaagtttttaaggataaaacatgagggaccacaaactccctgaattggaaataactcaaaatctctgcatttccttcatcctgataatggattttggtaatttcttagggatggagttcatctatcagcagagggaagcaaggtagtggtgaaggaaatattaaaggttctaagagaagtagattggaaacctagtctgcattggatgtcaatgccaactgaatatgcagaagattcaccatattatcctccaagtcctgatggaacaacaaccataaatgtgtctcatattatctcccgaaggtgtttgcagtgggatatatagtactttatgtatttatattgcgtaccatataagaggctcaattatgttgtgtggagtggagctcttggaaaagtgatattttccctaccccatacgttttgggggcgctttaattattctattctagttttcatttgttacatgtacttaaatttgtgttaataaattaaaattccactcaatttaccctttt

SEQ ID NO: 9921 - DNA, 550 bp, Glycine max
  Clone ID: PAT_MRT3847_10896C.1
atccacgtcatcatttcttgactaggctccgcgtcaccgtatgggtatcttatcccctcctcccagatcccaatatcacccctctctcattcccatccattcttaattacaattaagaccaaaaattcgttgcccctttggctctgcacagacattggttttagtgatcgacggtttggcttctgggctggttaaaaatttaatcttttttcatccgtaaggttttgggtatctgatttcgaattttgatcgtggttcttaaggtttcttggggttggaagaaaaacaaggacttataggactattctgttgcatagtcgcttttatttattttccttttttgatttggttaaacttgtggattatatgagttttggagttaaacacagggcacaaacaagttttaaatttattattttgtgagattctggcggtaattggtttctttggactcttttctttaaccttgccttttcacattgtgttccctttgatattaacattgaagatacaactcttactatactgactttattatatactatttaat

SEQ ID NO: 9922 - DNA, 177 bp, Glycine max
  Clone ID: PAT_MRT3847_108970C.1
gttctacgacggttatatagggaaccgacttagaaagtggtacggtgacatttctgtaattattgtaataaaagatgcattttatgacgcacattttaagacggttattgaaacctccttggaatgttatatgtaataaaatttatgacgagttttagtaacaaatcatcctaattc

SEQ ID NO: 9923 - DNA, 1443 bp, Glycine max
  Clone ID: PAT_MRT3847_108971C.1
gaggggagagatgagtttacgtgtttgagagaaaggttgagctatagcctaaagggagagacacataaatagtttctactttctattcatagatagatggctggcccaattatgagacctcagattgtgctatttggctcctccataattcaaatgagcttcgacaatggtggttgagtgagtctacgtgtttgagagaaaggttgagctatagcctaaagggagagacacataaatagtttctactttctattcatagatagatggctggcccaattatgagacctcagattgtgctatttggctcctccataattcaaatgagcttcgacaatggtggttggggtgctattctagctaacttgtacgctaggaaggcggacatcatcttaagaggatactctggttggaattcaaggcgggctttggaggttttggatgaaattttccccaaggatgcttatgtgcaaccatcattggtaattgtgtattttggtggcaatgattctattgatcctcacccatctggccttggtcctcatgtaccccttgaagaatatgttgaaaacatgaggaaaattgctaatcatcttaagagcctctcggaccatattcgcattatatttctcacttctcctccgatcaatgaagaactaatccgcaaaaagctcagtgcaacgcaatcaggaagaaccaatgaatcctgtggagagtatgcagatgggttaatggagctttgtgaggagatgaatatcaaggccattaatctgtggtctgcaattcagacaagagaggattggttagacgttagcttcacggatggagttcatctatcagcagagggaagcaaggtagtggtgaaggaaatattaaaggttctaagagaagtagattggaaacctagtctgcattggatgtcaatgccaactgaatatgcagaagattcaccatattatcctccaagtcctgatggaacaacaaccataaatgtgtctcatattatctcccgaaggtgtttgcagtgggatatatagtactttatgtatttatattgcgtaccatataagaggctcaattatgttgtgtggagtggagctcttggaaaagtgatattttccctaccccatacgttttgggggcgctttaattattctattctagttttcatttgttacatgtacttaaatttgtgttaataaattaaaattccactcaatttacactttaaaatatcacactaggctcaattatgttgtgtggagtggagctcttggaatagaataattaaagcgccccgcccacgtatggggtagggaaaatatctctttgcccagtgatgtccgccctaccctatgcgttttgggggcgctttaattattctattctagttttcatttgttacatgtacttaaatttgtgttaataaattaaaattccactcaa

SEQ ID NO: 9924 - DNA, 1024 bp, Glycine max
  Clone ID: PAT_MRT3847_108972C.1
ccagcgtccgccctctccctcgctgtccacagctgtagtactagctactagaatccctttattacggctgcgagaagacgacagaagggacacaaaaaataagaatggcgtttaagctttatggtctaccaatgtccacaaacactacccgtgccatgatctgtctccatgagaaagaggtggattttgaacttgttccagtcaatgtgttcgctgcggagcataagcagcctccttttctctccaagaatccctttggtttgattccattactggaagatggtgatctcactctttttgagtccagagccattaccgcatatgtggctgaaaaattcaaggaaacaggagccgatctgataaggcataaggacgcaaaagaagcagcactggtaaaggtgtggacagaggtagagtctcattactacgagccagcagtgtcacccattatctacgagtacttcgtggcccctttccaaggcaaagaacccgacaagtcagtgattgacaccaacgttgagaagctgaagacggtgcttgatgtgtacgaggccaagctgagcagcaccaagtaccttgctggggacttttatagccttgctgatcttagccatgtttctgaaactcactacttgatgcagaccccttgtgcttccatgatcaatgagcttcctcatgtaaaggcttggtgggaggatatctcttctaggcctgctttcaataaggttgtgggaggaatgagttttggtcagaatcattgaggaatgagtgtgttttgtgaggttcaattactacctaatttgttgcagtatctagtcaagcaaatgtggtgttgggtgttcttgaaacttgtttcatttcttataactagaattaattaggaaaacgaatcaatttttagaggggtctttaagaaaaaggactttaatagttccttttgtcttatttgattaatttaaaattttatgttgtagtgttttgatgatatgttttaatatcctatttcaaaaaaaaaaaaaaaaaa

SEQ ID NO: 9925 - DNA, 328 bp, Glycine max
  Clone ID: PAT_MRT3847_108973C.1
ttcaaagtggtcttgtttgttttattctagggcgttgctgcaaatgtccgattcgaaaattgtctttggggacaactggctcactgaggaaacacattttacttgtagagagtggaacatcttggatggttattaaacactagcaacttagtttagaaaatttctaccgcattccattacgtggcgtctgtataccttgttgatctacatttttccatcttttcttactggtgcaattaattataagcccgattttgagtaaaatgcattagaatcggctggtttcacgaccgaccgatactagattttggactttacacgagaaaaa

SEQ ID NO: 9926 - DNA, 267 bp, Glycine max
  Clone ID: PAT_MRT3847_108974C.1
acagaaggggaatcacgctgactgaaattcctgaattcaatccaacggcgccgcaaccttcaatcctatctgcaccggccgctgtggtagaaactgcaactcctgttacaggatcaatgtctcaccctggcgctgatatcgtcgtctctcttgcgttatctccgaatcggcatcgcctttcatacgttcgtccatgggatatcggtcactaatgtatctcagtgaccagctattcattcatcatgcgtcgccgtttacatctcacca

SEQ ID NO: 9927 - DNA, 407 bp, Glycine max
  Clone ID: PAT_MRT3847_108975C.1
tgagattacactgagcatcgtctagctatctcgatcgaactgtccaaggtcgctgtcacgtaatagcgtttacgggagttgccaagaacgtaacacgagtggcataaccaccgcaccatacaggcgcaaccgacaaacgaacaagggcaggtctaagtaaccatgggcgaaaaccatgccacacgtgaacaccatacacgaaagccgagtggaaccatttacgacgagtgcgtattggagaccaaaaaccgtaaccgaccagcactgaaccgtataacgtcaccgtacgacagcaaccgtttagccgcatgcaacggcatagataatagaggcgtgttgttgccatgccgaggttgcccacaaacgtgtaatgcagcaagtgcagtcgtggtgtacagccaacacat

SEQ ID NO: 9928 - DNA, 249 bp, Glycine max
  Clone ID: PAT_MRT3847_108976C.1
ttagcacggaaaagctctgattcttcaagggccaaatcggaaagagctttacagtctacactaccagggcagaaaaagaaaaaaaaatgagtcactaagctcaatggatgacgagcttcattcactcatatgggactgacaaatcatgctgggccacgactctactatggactatttttatcatcgtctttttcacaacagtggaatggaaaaaatagtccaataggcataacaaaaatttttcttttt

SEQ ID NO: 9929 - DNA, 404 bp, Glycine max
  Clone ID: PAT_MRT3847_108977C.1
agtgttatattgtgattgaatgacagagacaaattagggcacattgcaataactcctgttgcagagctcaaacacgtatacattctaccgacttagcaccagcaataaatgatgatcctaaatgtcagcactccaagcaatatacccaatgagaagttcgcatgagcactcaagagccgccctcatgacatcatgtacatgggcaccctatggtagtggaaattaaaataggatattgaagctgatactaaatcagctgtatgggtaccatacgagtactcatgagctaaggcagtggacattgggctccagggatacagtgacgagccaagttacatgactcggtctctggcgcactctggagagacttgaggccagcgaccgcggtcggagctttagttgga

SEQ ID NO: 9930 - DNA, 1002 bp, Glycine max
  unsure (1)..(1002): unsure at all n locations
  Clone ID: PAT_MRT3847_108978C.1
ggcagctgaaacacagcccattgacccagatcacgtaacaataggagcattgttgaaagcatgcacaaaagctggtcaggttgaacgagctcaagaagtgtacaagatggtacaaaaatataacataaagggttgtccagaagtttacaccattgccattaattcttgcagccaaactggagattgggaatatgctcgtactgtatacaatgacatgacccagaaagggatcctcccagatgagatatttctgagtgcactaatagatgttgctggtcatgctaaaaagctggatgctgcctttgatgtcctgcaagaagcccataaaggaggaatacagattggaataatgtcatatagctcattgatgggtgcctgtagcaatgcaagaaattggcagaaagcattggagttatatgaatatcttaaatctcttaaattgacgataacagtttcaacagttaatgctttgctcactgcactttgtgatggagatcaatttcagaaggctttggaggttttatttgaaatgaaaggattaggattgagcccaaacagtatcacattctcaatacttatagtggcaagtgagaaaaaggatgatatggaggcagctcagatgatcctttctctagctaaaaaagatggtgtagcccctaatctcatcatgtgtcgatgcataattggaatgtgccagcggagatatgagaaggcttgctttgttggtgagcctgttttatcttttgattcaggacggccactagttgataataaatggacatcactggccttaatggtgtatcgtgaaacaattgaagccggtggaaaacctacaagtgaaatattaccacaaattctgggatgcctgcaactcccttatgatacatctgtgaaaaatagacttgttgagaacctaggagtacgtgcagaaactnaagaagctcaaacctctgttcataatggatggattggtgaatagatcctcgtgcttttcaatactga

SEQ ID NO: 9931 - DNA, 427 bp, Glycine max
  Clone ID: PAT_MRT3847_108979C.1
gaattcgaagttaatttgcaagatgggttatgaaaaggctcagatcaacattgtggtggttggtcatgtggaccctgaggaggcaaccaccattaacgagctgaagaagcctgttgtggagaaagaagctccagggcatgccatatgagggcatgcacgcacggcctcggaggggaaccagaaaattatgttaacaaaataatctggaaccctaatgtatcagtgtcatcatcagtgtgttagttaagctagcctttgctatgggttaccgttcttttaagatgaagagtcttgatgaaacagtggccatttttgatgttattgcttttcccttgaaaagttaattgcattgctttctttatctttcttgtcttaaaaaaaaaaaacaaaaaaaataaaaaaaaaaaaaaaaactcgaggggggggc

SEQ ID NO: 9932 - DNA, 239 bp, Glycine max
  Clone ID: PAT_MRT3847_10897C.1
tctgttattggattggtctccgtatagctctacacatggttttattaattgcatgacagccaacagtggccaatcatgtataaggcgtcacttgtctctagttaaaaactcgactacttccctcattattaatgttactttcatcccacattttcaaaaaaaaaaaaaaaaaaaaaaaaaaaaaaaaaaaaaaaggcaaaacaaaaaacaaaaaaaaaaaggagacagagagaacacag

SEQ ID NO: 9933 - DNA, 606 bp, Glycine max
  unsure (1)..(606): unsure at all n locations
  Clone ID: PAT_MRT3847_108980C.1
gaccccgcagtggcggaccgggcccatgggcccgaagactnnctgcaacgcttgtggcgtgaggtacaagtcgggccggctggtgcccgagtacaggcccgcggcaagcccaacatttgttctgactaagcactccaactcgcaccgcaaggtgnnngagctgcgaaggcagaaggaaatggtgcggtcccagcaacaccaccaccagcatcaacaacagtttctacaacaccacccacnnnnaccatcaccactatcaacatcaccagaacatgatgtttgatgtatccaacggtgacgattacttgantccaccaacccgtgggccccgatttcaggcagcttatctagtaggtgctagtgtaggacagctgcggtggagcctcgggtaattttaatttgtagcggagttattatataccttcattagagagttctccttgttcattatttgtttctttctttcttttccattcctgtttggggagggtttgtcgccccgtctcatggggtctctggttatgtcgtctggccgtttttgtctaggccatattttggtagactcgatcgagaggttaattaattactcaaaaattcaaaatttcc

SEQ ID NO: 9934 - DNA, 424 bp, Glycine max
  unsure (1)..(424): unsure at all n locations
  Clone ID: PAT_MRT3847_108981C.1
gctcctgagtttccacactgcataccttaggtcttccgaattcgaagttaatttgcaagatggctaaggaaaaggctcagatcaacattgtggtggttggtcatgtggaccctgaggaggcaaccaccattaacgagctgaaaaancctgttgtggagaaagaagcgtccanagcatgccatatgaaggcatgcacgtacagcctcagaagggaaccagaaaattatgttaacaaaataatctaaaaccctaatgtatcagtatcatcatcagtatatagtttaagctagctttactataattacattctttaagataagagtcttaataaacagtaccattctaatatattactttccttaaaagttaatacatacttcttatcttctatctaaaaaaaaaaaaaaaaaaaaaattcctagca

SEQ ID NO: 9935 - DNA, 449 bp, Glycine max
  Clone ID: PAT_MRT3847_108982C.1
ccgggacagctattcctcttaagcttgctactgagtttccacactgcataccttaggtcttccgaattcgaagttaatttgcaagatggctaaggaaaaggctcagatcaacattgtggtggttggtcatgtggaccctgaggaggcaaccaccattaacgagctgaagaagcctgttgtggagaaagaagctccagggcatgccatatgagggcatgcacgtacggcctcggagggggaaccagaaaattatgttaacaaaataatctgggaaccctaatgtattcagtgtcatcatcagtggtggtagtttaaggctagcctttggctatgggtttacgttcctttgaagatggagagttctttgattgaaccaagtaccatttctgatggtatttgcttttccttggaaaggtttaatggccatgctttctttatctttcttgtct

SEQ ID NO: 9936 - DNA, 1530 bp, Glycine max
  Clone ID: PAT_MRT3847_108983C.1
ggcatgatttgtttactgcagcgccacaaagagatggattgccagaaacagaggaaggcgaaatggtgttgaaaaaaccaccagccggcagctcaccctgaaggttgttgtgagataaattgaaggtaagaagattggcaaggttggccaattgcttaggaaggtttccagtgagactgttaaacgatacatccacagttcgcaggttagtaagttttgcaactgctgcaggtattggaccactcagcttgttctgggacagaatcaaagttgttagcaaagagcagttctcaattgacgatggaattttcccatttaggaagttcttttccaataccagttctttcaaggacacagctattcctcttaagcttgctactgagtttccacactgcataccttaggtcttccgaattcgaagttaatttgcaagatggctaaggaaaaggctcagatcaacattgtggtggttggtcatgtggaccctgaggaggcaaccaccattaacgagctgaagaagcctgttgtggagaaagaagctccagggcatgccatatgagggcatgcacgtacggcctcggaggggaaccagaaaattatgttaacaaaataatctggaaccctaatgtatcagtgtcatcatcagtgtgtagtttaagctagctttgctatggttacgttctttgagatgagagtcttgatgaacagtaccattctgatgtattgctttccttgaaagttaatgcatgcttcttatcttctgtctaaaaaaaaaaaaaaagggcggccgcacgcgtcctacggctgcgagaagacgacagaaggggattccagcaaagcgcaaagcattctccactacgattcgctcttccagaagcttccagaaaactccagatggcgcgtacaaagcaaacagcccgtaagtcgaccggcggcaaggctccccggaagcagctggcgactaaggccgcccgcaagtctgctccggcgaccggcggagtgaagaagccacacaggttcaggccaggaaccgtggccctgagggagatcaggaagtaccagaagagcacggagcttctgatccgaaagcttccgtttcagcgtttggttcgtgaaatcgctcaggacttcaaaacggatctgaggttccagagcagcgccgtttcggcgctccaggaagccgctgaggcttacttggttggtctctttgaagacactaacctttgtgctattcacgctaagagggttaccattatgcccaaggatattcaactcgccagaagaatcaggggcgagagggcttagttaaataattcactttggtttggggtttaagtgtctttgttttaacgccttgtgtgtgaatctagatcgttgagcagttgctgattagatttcttgtaatgatggtcttatatatgtaatcaagtatttgtctcttaggtaaaaaaaaaaaaacctgttaactgctatggttgtttgcctgttagttgtatcacttgatcaattaaatcaggtgaagtggttcat

SEQ ID NO: 9937 - DNA, 272 bp, Glycine max
  unsure (1)..(272): unsure at all n locations
  Clone ID: PAT_MRT3847_108984C.1
ttaccttcagaagctgtctttttaaatgttacatgtggtagtggacggcgtggtttgaagttgacgttacaatttatagctttattnactatcacgaatgtattctcaaaacctatcgtgttctaaatccacaaaatccgtttgtgttaaataggtggatgggaaaactgactttcccttagggctcttccactcgtgttaagagaatgcctcaatctatttggggaggagctggtgcatagaatgctattttcatgcatataccaaaagct

SEQ ID NO: 9938 - DNA, 460 bp, Glycine max
  Clone ID: PAT_MRT3847_108985C.1
ggccgattctccaccgagaaggaatgcaaggtccccttccccatggagggctgaatgaaggtctaggtcaaggtctacatgtacgcctaggtctaggtcccggataagatcttttgagagacacaggccaagatcccggtctgcaattggaggaagatcacgatcatcaaatacccagaggtctgaagctaatgatgctggacctacactttatgttactggcctgtgatcaagggtcactgatagagacctataggagcatttctctatcgatggataggtagcaccatgctacattgggggaagaccccgacacgattctgttgggttactgtcatatgaaatgtatactgctgaggatgcgaaccgctgtatcacatatctcaatccatcaggttgcgagggcctggttattactgcagtgctgtcacaacagaagctgtcatgatctcccacccct

SEQ ID NO: 9939 - DNA, 390 bp, Glycine max
  Clone ID: PAT_MRT3847_108986C.1
cactcgttcttccgctcgtcgcggggttgttgttgctatagcatgcacatctctaggtgcggtggaggctgagggtgcagaggcccactgatgtgcggttacccgatgcagatgttgcaatgtgtccccagactgcagctcctgcgtgtgaggccccatctctacctagcacatgggattggcacctgtgaatgcttgcatcgccagtgctggaatgggagacactgatgctaacatttggttggaatgagggcgtaactgcatctgtaacggacgttcttgcaagtgtggggctagagagctcaagcttcaagcagagacggctgttagagatactggcatgagtatgatcctgacaagaacttcatgattgtcaacagtgaattatgt

SEQ ID NO: 9940 - DNA, 710 bp, Glycine max
  Clone ID: PAT_MRT3847_108987C.1
aaaatcagtaatttgtctataccatagatatttatggggaggggaagaggacatcaatccaattacaaccttaagctgtggaaagaaacatccacgtcaatttaattacattccatttaactaatgtagtaaatagaaggatatgatatgtatccatcttcaatattattaccttgaagcgtttcttgcactgcgtgtactcctcttgattgactcaattctctgaagccttatttgctctctaaacttagcaatgaactcatcagccttcttatccacatctggtccttcatcaccatctgtttttgaactttctccaccaataacaggtggactctttccactgtcattgttcttagcaacggttcttcctccttcaacgtcttggtcctcgatttctgtgtcatcgtcgtcatcatcatcgtcagattccacaagaaggctttctttctcagctggctgtgacacaagaggcacgcttgcatgccctatgaacttgttacttctaaacaatgtgggttgcatggatttattttcttcatcacttttctttcccactggctgtggttctctcacttgtgaagcttctcttcaactcattattgaagcttctctccacgtcctatgagccaccgaaccttggcttgatggaacctccatactgaggcttcatggacaggcgtttgtgaaacatcattggtggcggtggc

SEQ ID NO: 9941 - DNA, 444 bp, Glycine max
  unsure (1)..(444): unsure at all n locations
  Clone ID: PAT_MRT3847_108988C.1
tcgagcctcgagctcgcataaaattgtatanaaactatattattttatcgttattacttataactaatggattgagacgctttattgtagtttattgagttattactctactgtgaatggttacagggtgatatattnccgaattaaattgtgtagaaattaaattatgattagttatcttttactgataaccgattaagtgttattattgattttaaaataacaaattaacttttacattttatcgtgtaagaaatattaagatatcttttctaaaatatattattttattaaaagtttaaaccatttaaagtaattaaagaaaaacttaattcccccgtttaaatagatttctggacatccctgattacacattaatttaaatcttaaaatttgcaccaaaatcaaattcaaaaaccattcttcggaacctttttactgata

SEQ ID NO: 9942 - DNA, 317 bp, Glycine max
  Clone ID: PAT_MRT3847_108989C.1
ccacgcgtcactacacctccgagaggacaacataagtttctggtgtaagggaaaaaaaaaaaggagaggggataatggctgtgttatctcttttcataaccattatatcacccactcctttatctttttttattttcactacctctaaaccatcttcactcttttttgaaccttacccgtacttactttaacactcggtttacgttcattcattgttccttcctctcttctccttcccatctttctttccattcctccgtttcagtcttgttacttggattggatttgacatataatttttggaccataatatgaaa

SEQ ID NO: 9943 - DNA, 385 bp, Glycine max
  Clone ID: PAT_MRT3847_10898C.1
aaaagcaatacacacacacactaactcttttatataaccacaacacccgatggcaacgggcgggagtttcatccccataatagatctaaacccccttttggctaaagcagatgatccaaaaatgactaaggatcctggagtgctcgaggctgataaacaatagcataaggctagtacacaggcagagttcttctacgtaaaacggcatagaaatcctgagactctccttaaagaacttacgagatgtaactcgcagatactatgaactctcatatgaagacaaggctaacatcaaaatgactccagccgcagggttcaaaaggtatcacaggctcggagaaaatataactaatagtgtacctgacatgcatgaatctatacattg

SEQ ID NO: 9944 - DNA, 239 bp, Glycine max
  Clone ID: PAT_MRT3847_108990C.1
ggagaatttgcaagacaattactcttgcaaacagtggaaacggttacttatcagtaggttttaccgtgtttctcaactttatgctattgtttgcactttattgcccaacattcactagtgacccactactattagagcgttgttggtatgattgttgctgaataggatattctgcaagttcgataagcactttgctatcataaattattattattaaagcttttttctatttcgttgta

SEQ ID NO: 9945 - DNA, 401 bp, Glycine max
  Clone ID: PAT_MRT3847_108991C.1
attaaaaataattcccaaaggggaaactttttttccataagtgaaagaacgaaaccggggaccccgcttttgggccagatcttttttaatgtacttcccacgaggcacactttttttccgtaaatgaaaaaacaaaacggggaaacccggggctattgatatttgggggggccccctttattaatgggggggtcttatggggcttacaaaaaggaaaaacccgggatttctggggttgggaattgggggggagggcgggggaaaacaacttggggggggggccaacccttgggtccttttgggggtataagaacacgggcccaaaaaattggggaaaaaatttgggaacggggggactgggaaaaacgggcctaaattttccagggggcgggctgtaaaaa

SEQ ID NO: 9946 - DNA, 277 bp, Glycine max
  Clone ID: PAT_MRT3847_108992C.1
cgcgctcttttactatatctaaccttggggattaattgataatattattggatgatttggcaacgacttctgaggaaggaaagattacatcaactcctaagacatgtggcgtagaccttgatgtacctagagaggttaaacgatgagcacaatgcagggagtggtgataccgcatgcagaatctaccgcgagtgttcagttcaaagatggcgaaagggaaaacaccatgacttgctatacttatggctatgaaaccaccacatcatgatagactggg

SEQ ID NO: 9947 - DNA, 547 bp, Glycine max
  Clone ID: PAT_MRT3847_108993C.1
gtgccacctgcttggggggggggggggggggggcaaagatgcaagatgcggcggactgataagagatggtaaataaatcgacgcagaaataaatcggcgagcgaggagatacgggccttgccggcttgctgagagaggggcaaaactggaaaccacagaagtgaaagtaaaagagtataaaaggtggtgaaagtggtataacgggcatttagtagggcacagatgtatctggcatctggcgagtggcgagggtgcaaaggagtgagggcaatggcatacaatggtaaataagttatactaatgtaattaccaccgtggggctattaaagggccacttaagctgatagcacctgcaggggtacaataggggctacgtggataagttggaagagcggtgggattaggccgaaagggacgcaaaccatgactacatccgcaacggaataggggatgagtataggttgggcctggaactgttgttatatggcataggcgtataggagtaggcccgaagcaagagatcggagtcgtagggagtggtaggctc

SEQ ID NO: 9948 - DNA, 395 bp, Glycine max
  Clone ID: PAT_MRT3847_108994C.1
cggatacagcattgaagacgtttgaccaaacggcggaatcaagaaattgagagctggtggttactctaactgttctcgcaaaccattctgatacacatacggatggatagatcgttgcatgcaaccatagtgatattaggatcttgtgttctttgttaccaattagggattattgttgctctccttcaaactgcatctttccaaatcctctatttgcgaatgagttttgatcagctttctactgagatagacactctactgctacatggacatggcggaatacgagatcggttgtgtgcgtttacagaaacggatggtaatatgctttttccagccaggactctatgctgaccctgaatgaaggggtcttatggctgttacgcaatcccagttgg

SEQ ID NO: 9949 - DNA, 303 bp, Glycine max
  Clone ID: PAT_MRT3847_108995C.1
gttgagcaggcgttcatcatagacataaacattaaaccttagcaagactcaacaatgctagacattggaggctactgagtactcttcgtactatggaacatatcaaccattttggggaaagacatggagaatgatcatcaaattgtgaaaatagctacgagacctgcaacatcaacaccctggctaatacacgcgccatatcttcgtttactgcactacccagcagagttatagctatcactgtgctcttgaccccttttccacgtgatgatggagtcgaaacacgtggtggtggcgtcgttg

SEQ ID NO: 9950 - DNA, 657 bp, Glycine max
  unsure (1)..(657): unsure at all n locations
  Clone ID: PAT_MRT3847_108996C.1
tcctctagngcggccgcttttttttttttttttttttttttttttttttttttttttcccttttttcccttaggttttttttttttttttttttttgcctttatttgtcttttgtttttaatgggggccccaaaaaaaaaaggggcccaaagacacaaaacttaaaccctttaaacccttttacgttcagaaccaaaaatcctccccccccgggttgaaaaggctgttttttcctccccaaacccattttggacaatggggacccgttcttccaactgatgggggtgattaggtcccccccccgggcctaacggggggggggggagcgtaaagcattttacccacttcaccaggtttatcaagttgtcccctttttttccaaacctcgcacgcgggggaaaactcgggaaaccccgaacattaggtcccgcccctccaggttttcctacatcccctataatgagagggttgccccaaataatggtcatcccggcccccggggggaacccgtttttcttttaaagggcctcccaaaacacccgccggacaaatcgagagcatattctgtggggcctgaggggccccctgactcaccttacccccattaatcgcgctgccctctttgcacnctttccaggggggaaaaccaggggggcc

SEQ ID NO: 9951 - DNA, 1344 bp, Glycine max
  Clone ID: PAT_MRT3847_108997C.1
taggaatgcggccgcccctcttctccctgaagaaaaaaaccaagtcctctgttcgtgttcctcgtttcacatggcttccccaaacccaaaagagatcgttgcagagattcctacctatatcagagtcttcagcgacggcaccgtggaaaggccaagagaaacaccctttgtgccaccctcaattgatgaccctcaaaccggagtctcatccaaagacatcgtcatctcacaaaaccccttagtctctgctcgaatttaccttccaaaacttaccacaataaatcaagttcccatcttggtcttctttcacggtggtggcttctttttcgaatccgctttctcccaactctaccaccaccacttcaacaccttcgtttcccaaacaaattgcatagtagtctccgtggagtacaggctcgccccggagcaccctctccccgcatgttacctcgattgttgggaagctctcaaatgggtcgcatcccattccagcgaaaatagccccatcaacgcagaacagtggttaattagccacggcaatttccaaagagttttcattggaggtgacagtgcaggtggcaacatcgttcacaacattgccatgcgtgctggcactgagcctttaccttgtggtgttaagttactaggagctattttcgcccacccttacttctgcagctcatacccaattgggtcagaacctgttacagggcatgaacagagtttaccctatgtggtttgggattttgtttacccttctgtacccggtggcattgataaccctatggtcaacccagtggctcctggggcgcctagtttggctgaattggggtgttccaagattattgtgtgtgtggctagcgaggataaactaagggatagaggggtttggtactatgaagctgtgaagaagagtgggtggaaaggggatctggagttgtttgaggagaatggtgaggatcatgtttatcatatcttccatccggaatctgagaatgccacgaagttgatcaaacgcttgggtttgtttctgaatgagtagaataaatgtctttgcttgatttctcctgttgtgttgtgtgagaatatgaataacaacaaccatggaatggttcctctgtgatctgaaattctgaatattgtgattttgtgttccttgttctcttcctctgttccagtttttgttactgtttgggttttactttcctatatgatgtaaaatttacacatggaataacgtggaaaaagtaggtggtgcggtgatgcgaagcaataaaaatcatgaacaaaagcggtctattaaaggatgatactgatttgtttacagtaggggtgtaagaggga

SEQ ID NO: 9952 - DNA, 206 bp, Glycine max
  Clone ID: PAT_MRT3847_108998C.1
atcaatacgggcaatgtaaagtacgttccacgaccatatactactagactgccaattttccttcgataagacacctcttacaccgtagtgtctgaacttaactgagatgatcgctccaacgttttaaacgaaaatgctaccaataaagcgatatactgatgcccctggctgcggaaccggagaccgttaaaatgttcaaggaattc

SEQ ID NO: 9953 - DNA, 116 bp, Glycine max
  Clone ID: PAT_MRT3847_108999C.1
tatagttgtaaaagcttattccatataataacaatacatcggcatataggactctctttgtatgaaattccctctatttaggggcacaatcaatgagggaatttcatagaaagaga

SEQ ID NO: 9954 - DNA, 388 bp, Glycine max
  Clone ID: PAT_MRT3847_10899C.1
actagctccagatcgcgagcggccggcctatggtctcattcctgggggaacaggaactaggctattgggcaccattcctcattccatttcacagcaaactgtttgtaatcaaatggcaacagtgagaacaccattgaattttgattctagcaagcagagctattgtcaatttactatagaccttgtctgtggaagaatcttagtggacaaaactggagattggatcacacttattcaaaatttctccaatctagtaactttattgaaaagttgctgtttgtataaaaaggctgtttaatggtcaattattgttattgcctggggattgcattcattcaaaaatgtatggatttgggccttatttggttccaagttgttttttaacaaa

SEQ ID NO: 9955 - DNA, 611 bp, Glycine max
  Clone ID: PAT_MRT3847_1089C.1
aaaatcaaatgactaaaaattaattattaattatacaataaaaatctctgcacaactgccaaacccattgactagttttatgaggggagaaaaaaagaagaaactgtctaagctgaagaactaatgtattttcttaactatgatttgttcctataaagcccccttattccccaaagagttgaccagatgcaactaactcgacactatactgatgaacccacaaaaacgcagggtccacaaacaagctaaatttgcagtcaaggcaagtatgatatcctttgagaattcattcctgcatgatacaaattgaggtggattattgccctggagaccaattcctttatatgcggaggaagaactgttctgtctgcaccctctagaactgtcaacacccttgcttgttccaaggactcactgttgccggcatgcagtgcaaggtagcaaagaagtgttagcccacgatgcatttgggcaacttcattactccttagcagtctcatcagtgccgggattccattgaattcaactatcgtcttggaatgctcgatatgtaggtaattatccggagaagcaaacttggtaagtgcagccactgcctcatctgctacttc

SEQ ID NO: 9956 - DNA, 474 bp, Glycine max
  Clone ID: PAT_MRT3847_108C.1
tggaacctttgggctgattgcttttgctttatgtgcttgcatggtcgtgagaagatgatagaaggggacattacgaagaagtataaagagaagtaccagtatcaggagtaataataatcagctctagtcgaaacggttctcctagcgacggtactcgcggtttctaaattcgttttccctatcgccgagaagcttctagcgagaggttcctttctctctctaaggaatctcctcctacctagagccgcggttagcggtaagaagactaagatcgataaattccacggaaccaacggcggtacggtcccgagggacggaatcgacgtactcggtaggaaaggaaagggaaagggcgcccattagcccgcagataaacatggcgtcaacgctgacggccatagcttcactcatgatattaaagatcggctcttaattggcgacgctcatgtcggtggcatgatcggtccggtcact

SEQ ID NO: 9957 - DNA, 624 bp, Glycine max
  Clone ID: PAT_MRT3847_109000C.1
ggagttcttggagttaaagacattacagcttttaacaaagctcttttaatcaaatggaaatggatgatgtttcactatccagatcaattgtggaacagaattttaacttccaaatatgggggatggagaggtttagaagaggggcccacaaggaacaattttcttgctggtggtctgatttaaggtctacaattaatcacagcagtatggcagatgtgtccagccaattcatttggaagctgggtaggggcgatcaaattctcttttgggaggactcttgggtggaaagagggattaggttaaaagataagttcccggaattataccatctctcatctcagaaatttcacacagtggcaactatgggaaccttctgtgaatctgggtgggaatggagcttttcttggaggcgaaatctgtttgatagtgaaatgggaagagcctctgagtttattgatcaaactgctgcaattaggccttctacagctttgaaagattcttggttatggggagctgactcaaaaggaattttctccactaattctgcctacctttatattaaagatgatcatcttaatgaagatcaatgtcttggtttccagcacttatggaacatcaaaatcc

SEQ ID NO: 9958 - DNA, 277 bp, Glycine max
  unsure (1)..(277): unsure at all n locations
  Clone ID: PAT_MRT3847_109001C.1
aagatggtagaatctggcgagctccgcagtcgaattgcagagattcagaagctttgcaatgctaatgacgacgaattggacaatgactctgctcttcttcattttaagaccgcactgcagcagattgattccgacttctcttctatggnaattcaagatgcttacctacaccatttgaaagaggagcttaacaacctccaccttgaaaccgcccaagtaacaaatcagattcaccttctttccaaaactcacaacgatgattgtattctcttggagg

SEQ ID NO: 9959 - DNA, 337 bp, Glycine max
  Clone ID: PAT_MRT3847_109002C.1
gatgggaccaatcgaggaagcagatccaattccaacaactgaacccatttttgttcaagttccaagggctgagcaccaagaagaaatagagcatcaacccgaggaaatgaatcctaaccgggatgggctttcggctgtagataatccgaacggctacctcccgatcccgattatgagccagagcagcttttgtcatttcccctatccctgtgtggagacattgaagatagaaaaaggcataagtggaccctaaaagtagtacaataacgtgggtgaacaaaagaaccttatccatgagcgtgtttagcattaattccattatctattttttcggggg

SEQ ID NO: 9960 - DNA, 403 bp, Glycine max
  unsure (1)..(403): unsure at all n locations
  Clone ID: PAT_MRT3847_109003C.1
gcggacaaagcaaacagcccgnaagccgaccggcggcaaggcnccccggaagcagcaggcgacnaaggccgcacgaaagncagcnccggcgaccggaggagagaagaaggcacacaggggcaggccaggaaccgcgggccagagggagaccaggaagcaccagaagaggattttttttctgaaccaaaagcaaccgattaagcggatggatcgtgataaagcccaagagtccaaaacggatctgaggttccagagcaaagccgaaccggcagcccaggaagccgctgaaggttacccggaaggaatcctaagaagacaaaacattggtggtattcacgccagaagggtaccaattatgcccaaggataatcaaatcgccagaagaaccaagggcgagagggct

SEQ ID NO: 9961 - DNA, 406 bp, Glycine max
  Clone ID: PAT_MRT3847_109004C.1
aaattatgctattgttgaaagttaacttccaaaaaaaaaaaaaaaaaaaaaaaaaaaaaaaaaaaaaaaaaaaaaaaaaaatgtaaagaaaaaaaaaaaaaaaagggggggcgtttagggggggccaggttggggtgacctaactaggggggggggggaacgcccccaaaggggcacccgaaaaaaaaacccccggacgggggggggcgggggggcaacaatttaaaaccctgggggggcacaccggaattgccctagcggacatacccgtttgaacagccggggtaataacgatgagggccgcccggaagggcccttccgaaaaggggggcaccctctatggggaaagggaaagggccctgggggggggcattaaccgcggggggatatgggggaatcctaaggg

SEQ ID NO: 9962 - DNA, 290 bp, Glycine max
  Clone ID: PAT_MRT3847_109005C.1
tgggacttcaattgcaatcaaattagttcagtctcgttgcgcagttccctagggctggtttcaagatgcagatcttcgtcaagaccctcaccggaaagaccatcacccttgaggtggaaagctctgacaccatcgacaacgtcaaggccaagatccaggacaaggaatgaattcccccggatcagcaacgtcttatcttcaccggaaaacatctctatgacagccgtactctctccgactacaacatccagaatgagtcaacccttcaccttgtccttcgtctccgttgt

SEQ ID NO: 9963 - DNA, 586 bp, Glycine max
  Clone ID: PAT_MRT3847_109006C.1
cactctacacgcacctctcccattttcaattcacattttccttcttctttgttctttccatcatcttcatatttctcaccgcctcctcatcatagattttttcattcacaccttcatcatcatgtatgaaacgaaaccttgttaaattagtagcatgtaacacttgcaaccttcactacttattatcgcatatatattacaagtgtaacgtttcaacttatcttttgaaacatgtcttcttctttttcaccttcttggttaacttctccttcatgttccgctttggacatagattcatcttcccctactgcgttactcatagttcagtggttgaggtttattcttctatctccatgtccacaaagagttcttctttctgctgttgattcaatcttcttgctctctctcttagcctttgcagcagttaaactctattcccgattcacttctaacaccacctccaacaacaccatcaccaaaccccttctgcaagacaaagactctgactacaaagtcaccttctggttcaaactacccctcttggtaactacccttttggccatagcttacactgttctaagcatct

SEQ ID NO: 9964 - DNA, 213 bp, Glycine max
  Clone ID: PAT_MRT3847_109007C.1
ctttgacaggcccacatcgaccggcgcacacttcaacctgatctgaaagtcacccaccagtagttgcttacacatcatcaacctgtgtatcgcaaccggttggctcacttccattaccacgaggcatacgtaatattcctcaacgaataccccacaagcgtctcaactggtcacaacgaggaagtcctaccaattgactttgagacactacag

SEQ ID NO: 9965 - DNA, 116 bp, Glycine max
  unsure (1)..(116): unsure at all n locations
  Clone ID: PAT_MRT3847_109008C.1
gcacggaanacgcatggagcaagaaccagggagttcgagtgtagcttattatcaatgttatctgatcaataacactatgcttggatttgtggggacaaataaagagagagaagggg

SEQ ID NO: 9966 - DNA, 449 bp, Glycine max
  Clone ID: PAT_MRT3847_109009C.1
aattcggctcgaggttccatctcaaacctatcaagtggagtggctaacatggagaacctagtaaagggtctgttgtgtgaggatgaaaagagtgagagctttgtcatttctatgaagtggtttttgaattatgcagagagaaaggtacgggacttgcaaggagatgaagggagagtcatggctcgtgtcaaagaaataactgagtattttcatggggatgtgagtaaagaagagtcgaatccacttcgaatctttgtgatcgtgagggactttctggagatggtagataacgtttgcaatgagcttaaaaggtctacgaaatcacctcgcaccattcggatagagtagagaatctcgttgtgtgtttaaatgttttcgaatcatggttacaatttgatcatttgaatgtaaacatcatgtttaggaatgtgcgtgtatatatgaaaaat

SEQ ID NO: 9967 - DNA, 223 bp, Glycine max
  Clone ID: PAT_MRT3847_10900C.1
atcactcttacgtccgactctgtacaagcagcactcacaatacgataacccatccggggcaacacgattcctttccatagtcaatggcacaacactcacattccattcctcgtcccaaacgccgattccgctgtggcgatttgtatgacaacgagagcgcgagtgacacatcagatccgtagagttaaaattccggttctgagtagatccaagtctcttcatg

SEQ ID NO: 9968 - DNA, 171 bp, Glycine max
  Clone ID: PAT_MRT3847_109010C.1
atgggtgataaggtccgtgttcgaaagggaaacagcccagaccaccagctaagcatgatcgcaaggacatgtggagcgcttagaagtgagaatgccggtgtgagtagcgaaagacgggttgatattcctgtaccacctagtatcggtataatccatggggggacgcagtag

SEQ ID NO: 9969 - DNA, 256 bp, Glycine max
  Clone ID: PAT_MRT3847_109011C.1
gaagggacagagattttttggtaggggagacatttttcagttttcattttatttatggtgaggagacagggaaaagtgtaagagaaaagccactgtctcccattggaaggatcatattccacagtctaagagtaagtagagaagattaacatacatgtcagactgaataaagagcagtaggtcaccatgacttcaccttccaggagaagcgccctgttggctctgaagcttgctagaaaaaagaaaggaaggaaca

SEQ ID NO: 9970 - DNA, 106 bp, Glycine max
  unsure (1)..(106): unsure at all n locations
  Clone ID: PAT_MRT3847_109012C.1
tttcctatgattctgtttctgggtctttagattacattaaattagatcagaattgaatcgnagtgtttggggtggtgcagaattcagagcagcattttgtgtccaa

SEQ ID NO: 9971 - DNA, 340 bp, Glycine max
  Clone ID: PAT_MRT3847_109013C.1
ggcttcctcaaagatctctttcccagttgttaccactgacaaccgtgccggtgccggcatggtcgctccattcactggccttatattcatggctggcttccccaccataaagaccaacattgacattacctccattgctagcaatggtggaagagtgcaatgatttcaggtgtggcccccagctggtaataagaagtttgagactcttaccttcctgactgaccttgataatgcgcaactgtcaaatgaagtaaaataccttcttaagaagggatggataccttgctaggaattcgagttggaactctgtttatagtatcttgagcacatcatgtcatca

SEQ ID NO: 9972 - DNA, 498 bp, Glycine max
  Clone ID: PAT_MRT3847_109014C.1
gccatgcgtactttctaccaagatcacatggtcttgattgccacgagagatttgctaaccgaaacacagtgtctttcgatctcaacttgaaaggactagctggaactcaaggaccccgatatgttgatactgtaactgggtccagcaagcatgccttgtgtggatatgaaccccccatgtgtgaaacaaggcccatgctgacaagtgaccgatgcccatgatagtgtccctgcctatgtgcaggtgctgggaaccacacctgacctaggagaatacgtaaatggcgctatagtgtgtgctgaaacactttaccagtgaacaacatgatggagagcagactatgtgatagactgtgcaagcaccacgttggacctggcataaatggagacaaggctctgaggcctctacgatcgacagacattgtacctatgtgccagaggaatatggaatgccatctaggcatgccccatactacattgattgcgccttgatggccaa

SEQ ID NO: 9973 - DNA, 202 bp, Glycine max
  Clone ID: PAT_MRT3847_109015C.1
tggggggtccatgtttaagtacccatgcttgctacgtcttaaatcaaaaataaagccccctaaatgcaaaacactggccgaatttaaacaacgtcgttacataaaaaaccgcgggggaaaacaacttaattgcctaacttaacatccttgtaaaaaaagctgttttaatagggtggaggaatacacaaaaggcccgtaccaa

SEQ ID NO: 9974 - DNA, 393 bp, Glycine max
  Clone ID: PAT_MRT3847_109016C.1
agtccaggcgtcagacggctgcaagaggagtacagaaggggattcacaccttcactccctctattgctttctcaaattccattttccaattcagaagcctatctccgtgcgaagcagcacatcgggatggcaccaaaggcagataggaagccagtatagaagaagcctgtggaggagaataaatcgactgtgggatacaaagctccggcagatatcaagtcagcggccggagagaagcttccgaaagagggaggagccggcggagaatgtatgaagaataagagaaataagaatagcgtggagacatactagatctagatcggaaacgttcagaagcacgttcacactgacattggtatctcaaccaaagcaatgggaatcataagcagattc

SEQ ID NO: 9975 - DNA, 109 bp, Glycine max
  Clone ID: PAT_MRT3847_109017C.1
ctatgctataactcaactgttcacggaacttacacaagttgttagaatacacaggaaattcaaacacgtcgaaacgaatacggcaccaggatgacaaacagcacataca

SEQ ID NO: 9976 - DNA, 306 bp, Glycine max
  Clone ID: PAT_MRT3847_109018C.1
tagtctcaacgacctgtaagagcaaacttaaatggtcgccaaccgcattattatgtacatatcatgttgccaagtcttcgtaaagatgcattccacccttaaaatacgtgacactctgcctaaaatgaaaaaatttggggggctcgcatttctattgagctgcatgacaaaaaattttttttttaaaaaaaaatatccgcccaagaggggccctttccgattccgcggttttctcgcgtgctttgcgaaaaagacaaaaacaggggggataaaaaaaaaacggggcggccaacaaaggctgaaggt

SEQ ID NO: 9977 - DNA, 241 bp, Glycine max
  Clone ID: PAT_MRT3847_109019C.1
ggagagaccgctagatgcctgcacgccgacttagggatcctccgggggagccaatccacatttcaagacacagtgggcaaaaagcccagatatgaatgggcattattcgacacctattaaagctatactgcatccacaggaaattatattggcatgcctcggcggattccaactccacattttctagaaatgaagccgcaaatctgttcatatatacagtgggagtttttcttggctaatc

SEQ ID NO: 9978 - DNA, 439 bp, Glycine max
  Clone ID: PAT_MRT3847_10901C.1
gccatggctgtcgctcccaaggtctgggttcccggtccgtagtactcgatgactcggcctttgccccccgacaccgtcttcagacctgcatgtctgcagatgatgtctttggtagaactccagccttgtagctggcctgtcaagcggacccccaccactttaggagcgacaagctcccaaggcattccggacatagcatcaacagcatctgcgccaccgaccccaattccgagcatgcccaggccgccagcattcggcgtgtgtgagtctgtaccgatgatgaggccaccgggtctgatcatggaaatagtgagtgattaggttaattggtactcacgaggagggataggcttacgttgcgtagttctcgaaaatgacagtgtgtataatacccgatcctggcttccagaacccgatgccatacttcctagatgcaact

SEQ ID NO: 9979 - DNA, 967 bp, Glycine max
  Clone ID: PAT_MRT3847_109020C.1
ggagaatcgacatacacctggattaaaacactggagtcttgctgtgaaggatggaaaagctttagaaaatgagtggaggagtgagatacccattccccgtggaggacctcacagggcttgtgttgtggttgatgatcgtctttatgttcttggtggtcaagaaggagattttatggccaaacctgggtcacctattttcaagtgctcacgcagacaagaggtggtttatactgatgtttacatgttggatgatgatatgaagtggaaaacgctgcctccaatgccaaaagcaaactcacatattgaatttgcttgggcgcttgtaaataactccattgtcattgttggaggcacaacagagaagcaccctataaccaagaagatggttttaaacggagaagtagtccagtttaacttgaatactttgaagtggtcagtgattggaaaattaccataccgggtgaaaaccactctagttggattttggaatggatggttgtatttcacttcaggacagagagacaagggacctgatgatccatcaccaaaaaaggtcattggggagatgtggagaacaaaattaaaattgaatgagtgagcaattgctgtagaagcgtctttctcctgaagcagaggtgaagaggccaaaatattgcacattctttgtcagtacaatattcattgttgtaattcactgagaatgactgtaatttaattcgacattaacagttgtcaccgactcttgtatttttttaccaatcggcttttgtatttctttccccgcatatttttagcttttaggtatccatctattcaagtaaatattgacagatgaacttcgtttatgtcaattgtaattcttataggcttattattaaagagaagaatatgacatatgttcattctacttggatcatcaaaaaaaaaaaaaaaaaaaaaaaaaaaaaaaaaaaaaaaaaaaaaaaaa

SEQ ID NO: 9980 - DNA, 1178 bp, Glycine max
  Clone ID: PAT_MRT3847_109021C.1
gacttggtggattgtttgccaagttaaatagtggagacatatcaaaaaatgcttctgataagctccttcagctttgtcaggcattagacaatggtgattttggtactgccctacaaattcaggttcttcttactactaccgagtgggacgaatgccagtcctggttaggttcactcaagcggatgatcaagacaagacagagcgtgagactaagttaaaaaagttacagatatctttttgctgattttggaaatttttcatgtgattagcatcttgcagtagtgattgctgatcctcctatcaatgtacacagactgttgccatctctagatttcaggtgcagggttttgatatgtgcttctacaatttcttgctgtgtctgcagctttcacatcgattgttattaaaagctgttactgaaggtagttttcaggaaatgattagaaatttttgcagattgtttttcgaccaatatttgtaatatggagaaaagtgttgtctgtctgtttgtcctaaaaatttcagatgggttttttcctcacacccctgtcgtaccatggtgacgctccaagctattctagtgttagttatagattgatgtttcttttctttttaaagagtattttgtataacactagccatataagtattgatttgatcgtcaaacaggtgaataatgtagcatcatgtttttttaatcatccatcatttaatttctccaagctgtacatgtttgtgatttagacgcactagtttcaacgggctgtccatggcgcttggggcctagcgtgatcatgtagtatttgtgggttgacatttctcaggacatgaaatatgattaaaaaacttacgtatcagtgccaaaaagctcatcgcaatgcgacatgaaatacgatgcaaaagattggattgtgaactatgaattttaattatgtctcatcctaactgactgagatctaactattggtttggagttgtcatattggggatgtgtctcttacatccttttttttatgcatgtgccttgggtgtgcagttcacgatgatttagtttattaaataaattaaaatatttaaattcctttgaaaagtattaatgttttcaatgtttttgaggtgagcattttttatgcttatatatatatatacatatatatttttttgaaagatgtttaaaa

SEQ ID NO: 9981 - DNA, 3351 bp, Glycine max
  unsure (1)..(3351): unsure at all n locations
  Clone ID: PAT_MRT3847_109022C.1
aatttcaccaataaaggagtttgtgggacacactagaggtgttattgcaatgtcgtggtgtcccaatgatagctcttatttgcttacctgtggcaaagatagccggactatatgctgggacatgatttctggagagattgcctatgaattgccagctgggaccaattggaattttgatgtgcattggtatcccaggatacctggagtaatatcagcatcttcctttgatggaaaaattggcatatataatattaagggttgccgtcaaaatggtatcggggaaaatgattttggtgcagtaccactgagagcaccaaaaatggtataaacgtcctactggtgtgtcttttggctttggaggcaaacttgtgtcatttcatcccagggcatctgctgcaggttctccagctggcgcttcagaggtttatgtgcataacttggtcactgaaaatggtctagttagtcgttcatccgagtttgaagctgcaatacagaatggggaaaggtctttattgagggttttatgtgaaaaaaaaactgaggaatcagaatctgaggaccacgcgtccgggaaagaaaacatggggctttttgaaggttatgtttgaagatgatgggactgcacgcacaaaacttctctcacatcttggtttcaatgtacctagtgaagcaaaagacacagttaatgatgatctttcccaagaagtaaatgcacttggacttgaggacacaactgttgataatactggacatgtgtctactaatgaaacccctattttctctactgataatggggaagatttctttaataatcttcccagtcctaaagctgatacccctgtatctacttctgctggcaactttgttgttgcggaaaatgccaatggttcaaagaaaatccaagatgatgtggaagtggaggagagcagtgacccttcatttgacgacagtgttcagcatgctttagttgttggggactacaatggggcagtaatgcaatgcatttctgcaaataaatgggctgatgcattagttattgctcatgttgggaatgcttccttgtgggaaagtacacgggatcaataccttaaaatggtccgatcaccatacttgaagattgtatcagcaatggtgagcaatgatctcttgagcttagtgaacaccaggaccactgaagttttggaaagaaacccttgcgcttctttgtagttttgctcagagaaatgaatggattaagctttgacggctgcgagaagacgacagaaggggggctggcaatacattagctgcaactctgtgttatatatgtgctggaaatattgataaaactgttgaaatttggtcaaggagcctgtcaaatgagaccgagggaaaatcttatgttgaccttcttcaggatttaatggaaaagactattgttcttgccttggcaactgggcagaagcggtttagtgcttctctgtgcaagcttgttgagaaatatgctgaaattttagcaagtcaagggctgttgactacagcgatggagtatttaaaacttttgggttctgaagaactgtcgcctgaacttacaatcttaaaggatcgaattgcactttctacagaacctgagaaagacttcaaaactactgcttttgaaagttctcaatcacatagtgggtcctattatggtgccgataattccaattataatagtaattattatcaggagccagtaaccactcaagtgcagcatggtgtttctggaattcaatatcctgatagctatcaacagccatttgatcctagatatggaagaggctatggtgctcctactccaccccagcaacctctacagcctaatttgtttgttgctccacagactactcaggttgtgcaaactccccagccgactttctcaaatactgctgttgcaccaccacctttgagaacttttgatcctcaaactcctcccatgcttagaaatgtggagcaatatcagcagcctacattgggatctcaattgtataatacaaccaatccaccttaccagcctacaccccctgttccatcacaagtggccttgagtcatggccagaacttgtcacaagttgtggcacctaccccaaatccaatgggatacatgccagtctctggttctggtggtgtccaaagacctggggtgggatcaatacaacctcccagtccccctcaagtgcaacctgtgcaaccacctgcagctcctcctcctactttgcagactgctgatacttcaaaagtacctgggcatcaaatgcctattgtcacaactttgacaaggcttttcaatgagacatcagacgcccttggaggttcacgtgcaaacccagctaagaggcgggagatagaagacaactcgaagagacttggtgggttgtttgccaagttaaatagtggagacatatcgaaaaatgcttctgacaagctccttcagctttgtcaggcattagacaatggtgattttggtactgccctacaaattcaggttcttcttactactactgagtgggacgaatgccaatcctggttaggttcactcaagcggatgatcaagacaaggcagagcgcgagactaggttaaaaaagctacagatttctttttgctgattttggaaaattttcgtgtgattagcatcttgcagtagtgattgctggtcctcgtatcaatgtacacagactactgccatctctagatttcaggtgcagggtttttgattctatgtgcttctacaattttcttgctgtgtctgcagctttcacatcgactgttattaaaagctgttaatgaaggtagttttcaggaaaagatcagaaattttagcagattgtttttcaaccaatatctgtaatatgaagaacggtgttttgtctgtctgtttgccctaaatttccagatggtttttcttcacaccccctggctccatggtgacgccccaaggtgttctaatgtcagttatagattaatgtttccttttcttttatttttatttttaaagagtattttgtatcacactagccgtataagtattgatttgatcgtcaaacaggtgaataatgtagcatcatgtttatttaatcatccatcatttaatttctctcagctgttacgactgaggcataatagagaatcccctgccctagcaagaagactggttctgatagatgactggaatggcggaaattatgagtctcactacacatgagctggtcttaaaatcctgtgcttgaaggcaggtgtgcttgcagcattggcaccattcatatgaacgtgggctaaatttccatttataggtgccattgcanaattttcaatgcactaaaacacacccagat

SEQ ID NO: 9982 - DNA, 896 bp, Glycine max
  unsure (1)..(896): unsure at all n locations
  Clone ID: PAT_MRT3847_109023C.1
acgcnntacgaagcncgcaggtgggctcgagaccgcgttcccctcacgccttaagcgctgcttttgcttttgcttcctccaacttgaaccctctctcctctcctcatacccatttcttcattctctggcaccctatttttggccttgttccgcatctcctacccctctcctctgctgcatgcaaccatgaagattttcaacccctccaaatgctttctccagaacgtggtgtgtcctttcgacaccctcttcatcattaaaaggtttaagcccttcgatctgggtctctcccacctccaccaattccaattcctatcctactattgaaaccaaatccctcgttcatctcacccacatcgctatcttcattcaccacaccccagcctccaaatggaccggcgatcccatcccacgggcaccgtcagcacccggaacatcctcttcaacaagtacgagattggaaaattgctgggacagggcaacttcgccaaggtgtaccacggcagaaacctcagcacaaacgagagcgtggccatcaaagtcataaaaaaggaaaggctccagaaagagaggctcgtgaagcagatcaaacgcgaggtctccgtcatgcgcctggtgcgtcacccccacatcgtcgaattaaaagaggtcatggccaacaaagccaaaatcttcatggttgtcgaatacgtcaagggaggggaactcttcgccaaggtagcaaaagggaagatgaaggaagatgtcgccagaaagtactttcagcaactcatcagcgccgtcgatttctgccacagccgcggcgtcacccgccgcgatctcaagcccggagaatctgctcctcgacgagaacgaagaccttaaagtctccgacttttggcctgtcgcgctaccgg

SEQ ID NO: 9983 - DNA, 2553 bp, Glycine max
  Clone ID: PAT_MRT3847_109024C.1
attcggctcgagctcatgttcttgagagagatctcaaaccccaagaaatctattattgaataattatattaagtttttgtttgttaatttatacatgtggtgtataaaagaaaataatagttgtagatattataattagatatagattggtttaggaggaaaagttagttctactagaacaaaaaagcaattaatttagaagaaagcaacgaataaagagggggtgttggggccttgagccgattaatcttaatttaggttatccagatatttgctggtgttgtttcttatcccatgcgtaattgagcagctgcagcccacagcgttcccctctgattgaaaactcagtctcctctgcctgcttcatccttccttcctttcttcattcactggcacccttccgagtcaagcataagatcaaagggagaccctttcttttccttgtctccccctgcatgcaaccatgaagattttcaatccccttcaccgcgctgttttcagcatttgcatggtctcttcttggatttcttcgtggacactattcccttattttgcatttctgcaggaaaaaaatggttcatcttggcttcttccttctggggtgtctctccatgatctcatatgctaatggttatgtcagcaatgggggtttgaccaacgcccatgctacagtctatggtcaaagtgaagcttctgtggacaatgggtggtgcttgctggttatggaaacttgtattagtcaaggattatgggtctaacacagcagcacttatgactgccttgttcaacaatagcttgagttgcgacttttgctaccaaatcaaatatgacaaatcacccacatggttacctctgtcttaccattgtagtcactcccactaatttctgcccccctggtggatggggtgaccctcccaatcaccattttgatctttctcaacctgtttttcagcaaattgcccaatacagagccggtatcgtgcctgtagtttatagaacggaacgtggcatgacaagaggtggactcaggttcaccatcaatggtcattcatacttcaatttagtccttgtgactaatgttggaggtgctggtgatgtgcattctgtggccataaaaggttcaagaaccagatggcaacccatgtcaaggaattggggccaaaactggcagagcaactcctaccttaatggacagagtctttcctttttggtcaccactagtgatggtcgcagtgtgctctcatacaatgctgcaccaccaagttggtcctttggacagacctacactggaaggcaattccgctactaatttatcaacccttttcatggagggtgcattttctctcaggtacagaaactttctagtaggagaaagaaacacaaagaaaattgtattttttttctctctctctctcctactgaacgacagtttcagtaaccagagacaaggcagaggagccaattcctttcatggaacatcaatttcataatgttggttacccacatgataatatggttgcattataaaaaagaactaaagccgtaatttaatagtgtacatgatgtgtcaatattgggccacaaaataggtggcttagtttagtccctttaatatattttggtttgtgttgcaagtttttttgcagatgaattgctggtaccttagtttatgctaagctatagtctcaagggtacttctgtttgtttgcctgctgaaagaaaagtaggttagaggtgggattttgtgagccttattgcactttggcaaatgggattcttgccttgttcagaaagatcaacttaaataataattgagtatattcttgttgtgctttaaaaaacaggtcacaccatcccatcactcctccaaatgctttcttaccaacgtcgtatttcctttcaacaccctcctcatcattaaaaggtttaagcccttcgatctgggtctctcccacctccaccaattccaattcctatcctacgctcgagaaagaatacaacaatccctcgatcatcttagcacccacaccgctttcttcattaccacaccccagccccgacatggaccggcgcacgggcagcacccgtaacatcctcttcaacaagtacgagatagggaaattgctgggacagggcaacttcgccaaggtgtaccacggcagaaacctcagcacaaatgagagcgtggccatcaaagtcataaaaaaagagaggcttcagcagaaagagaggctcgtcaaacagatcaaacgcgaggtctccgtcatgagcctggtgcgtcacccccacatcgtcgaattaaaagaggtgatggccaacaaggccaaaatcttcctggttgtcgaatacgtcaaaggaggtgaactcttcgccaaggttgcaaaggggaagatgaaggaagacgtcgccagaaagtactttcaagcaactcatcagcgccgtcgaattctgccacagccgcggcgtcacccaccgcgatttgaagccggagaaactgctcctcgaccagaacgaagaccttaaagtctccgactttggcctgtccgcgctgcc

SEQ ID NO: 9984 - DNA, 710 bp, Glycine max
  Clone ID: PAT_MRT3847_109025C.1
aaagaatcatagaagatggtactgcaaatcaaaatctaggaaacaaagaatcatttccagagagatacgatgttgatgtacaatgtttatctccaaaaaagcaatgtactgtgtataaatatgacgcatttgtccctgtgcttggcaagccagtcgattcatcttggaatacattaacacagaaagataaagatgctctttctaaaggtgcagattgttttcctagcaagacttgtgatgggtatagcaatcactttgtacggctgcgagaaacgacagaagggggaattgtaacagtgatccgcttgacaaggaacatgccaaggaaaatcactgaagcaatagtgtatggcagcagctcagggtattatgatggcactatgatgaaagcacccaccatttcatgcaatgattacatggcagtgatgaagcgcatggctgaacttgaagagaaagtcactgtcctcagcatgagacctgtcattccacacgaaaaagaggaagtgctgaatagtgctctgtgcagagtcaccactctcgaacaagacttggttgcaaccaaaaaggcacttgatgatgcacttgctcgacaagtagaactccaagctcaaattgacaagaagaagaacagcaacaagaagttgttccgcttccgctgtttcgctacgtgatttcaaatgttttactgcatcaagaagagttgtaaaact

SEQ ID NO: 9985 - DNA, 698 bp, Glycine max
  Clone ID: PAT_MRT3847_109026C.1
atattttaggattttgagatgtgatgaaatttgagtgttaaaaaatagttgttttgaaatttgattgtatgagattaatttgaagtgagattggcacatggtgagaatagagagaggggaaaggaatccatcgaggtgaagatggtgtggaacagcatggtggtgttgagagtggcacgtgcctcagcggaagcgtggcaatgcattgcggagcctctgaacagtgagcagatattggatctggtttgctgtttccctctccatcaactcgctctctgtctctattccttcttctgcactcctcaatccaatttttaccatttcccttctcactccgactctgaccatgacgattcttccgattaccaatcctcttcagactgaaaccaaaccaaactcaataggtactttctaacttcacttggctatttaattataaattacatcctcaaattaccaatatcctaaacataggtatctttctttctcttttagaaaaagacaaaaatgtttacttgtagtttttttgtatgactttcccattattctttaatcacaattgaacttttattttgataatccccatgcatagttaggttatggtggtcgaacactaattttgattagaaaggcttaaggagttgcatcttaagttttttgttgaaaagaaaggaagaaggtccgtctatgagaaaaag

SEQ ID NO: 9986 - DNA, 491 bp, Glycine max
  Clone ID: PAT_MRT3847_109027C.1
ggaatcattaattctttccgttccagtagtagcagtttagtttatttcctcaactcaaactaaaatgccgaaaatgggactcaaaaacctgttcttcttcaaaacatcaccttcgccaccttcctcttctcccacaagaaccttctccgattcactaatggacgaaaacatcgaaaccgctcgcgccatcatttccaaatgggaacttatttccccttctgaccaaaccgcccctctattcagcaacacacgccaagaagccaaacagtaccttaacgctgtcatgagcctgcagtccactatgcagcacctcgtcgcactggattcctcctccgacaccctcatccaagcccacttccttatgcaactcgccatgaagagactccagaccgagttctatcggatattaacccaaaacagagacaatctcgatcctgaatctgtcgcctccaccgatcaccggagcagcagcgtctccgacgacggcaccg

SEQ ID NO: 9987 - DNA, 1659 bp, Glycine max
  Clone ID: PAT_MRT3847_109028C.1
cttgtctgtaccctattaaactactattaaacttccaccaaaccacatttttttttttttctgcctctccatttgcgggaaaagaaggaaaaaaaaagttgaaaacactatgatgatgaccttctctgaaaagttttgttctggcaactggttggagaaaaaatattgtagaaagtgaaaatctgggtcctatgggcgttgattgttgttgaattcctttttgtaaccatctcacttgttataaacaccaaccaatttctctccttctcatctacttttctcactgctttcgtgtttttttctctctcttcgttacacaacaacaaagtagttgttaatagcctctgttttcttcttgccaccaaaatctcacaccttccattgcatcatcattcataaatggctcaccccacctcatcaggtcaatcccatgatctcaaaaaagaagattgcaaggaaacaagatcactggttgtttgctttggggaaatgttaatagactttgttccaacggtgggaggagtgtcactggctgaagcacccgctttcaagaaagctcctggtggtgctcctgccaatgtggctgttggtatctctagactgggaggttcatctgctttcataggcaaggttggagcagatgaatttgggtacatgttgggtaacattttaaagcagaacaatgttgagacgtctggcatgcggtttgactctaatgcaagaactgcattagcttttgttacacttagagcggatggagaacgtgagttcttgtttttccgcaatccaagcgctgatatgctccttcaagagtcagaacttgataaagatctcctaaagcaggctagaatattccattatggctccatcagcttgattgatgagccatgcaagtcagctcaccttgctgctatgagcattgccaaaaactctggttgcattctatcatatgatccaaatttgagattggctctatggccttctgcagacgccgctcggaaaggcataatggatatatgggatcaagctgatgttataaagataagtgaggatgagattacatttttgactgggggtgatgatccttatgatgataatgttgttttgaagaaactttttcacccaaatctcaagcttttaattgttactgaaggttcacagggttgcagatattacacgaaggcatttaagggcagggttgcaggtgttaaagttaaacctgtagacacaactggagctggcgatgcatttgttagtgggattttatactgcatagcttctgaccaaactatttttcaggatgagaaacgtcttcgaaaggctttatattttgccaatgtatgtggtgccctcactgtaactgagagaggtgcaattcctgcactacctacaaaggaagctatcttgcaattcttactagaagcagctgtaatataaacagtattgacagatttttgttataattggttgttaagctatagcttaggtgatgctgaattctttttcctttttaattaaaatttttgtctatgaaattttcttatattaattctagttttcttttgctctcaaaatttgggattgcgtaacagctgagttcacgaatttcctaggtttaatatttgtaatcaaataaaaggtattcagttttaattaagc

SEQ ID NO: 9988 - DNA, 435 bp, Glycine max
  Clone ID: PAT_MRT3847_109029C.1
ggaaattcgttacgatctgttgtcctttgtaaattaagtatttgctcttttgtgaaaggagaaatcctttgcgaagttaaaaccttgtggatatcgttgaatgagagttctctctcctttgttctgttctcttttgtctcaatcaaacaagaaatacaatatctctttccttttctccatttctgttccaggttcctaacagtctcattggtgaatggtgaggtatctgaatatggtggttgataactgttgccatgcagttccagttccagcagattgaactttaggatacagtgatacacactatgctttgcataaattacctgataaatttccatgcttaggtctatggtttatcctgaattctctaaagaagatacttttactttttatttttgtatttgttcaagccatatttcattgttgattcatttc

SEQ ID NO: 9989 - DNA, 966 bp, Glycine max
  Clone ID: PAT_MRT3847_10902C.1
acaagaataattattttttaaaaaaaataacaaattatcgtgaaaaatattactttttcacgataatttgttattttttttaaaaaataattattctttgaaaacaaatcaaaacaaacaagacttaggagtgtattggtcatttcgagtataagatcccagaggagcacccaatccgaaatctcgaaatcttattagctgccccaaacgccagatttttgtaacctttgcagtctttggcaatttttacttttctagcatagttaaacgtattttgacaaaataatatttataaaatccttaaaatataagtcccttgaaattgatccagctccctcccctccctccccggctccttggcggagatataccgcaaaagaagtgcaagacctaataaatccacttgcaccagatccatggcaacacaaaagcggatgtcctcattcttcatgcgcctttgaagtgcaacccccctcctttcagctgctgcaacctcaaccgttttcgagggtgttttcagaacatggattcgaggaagggcaaagcttctgtttctgcatcttcactgagtgctgcacctttgagtgtttcaaataaggtggatcagatggtgtcgccccctagggatgtgagagctgttgagactgatgtggatatagaccttagggaaatttactttttaatcatgcactttttgtctgtcgggccatgccataggacttttctaaatttcaaggaggaacttttagagcatcagcttctacctagaagatatcatgcttggttttcaagaagtggtgaacccagtggggatgatgcggatgaagatgatgatggcatctctttacctttagattacagcaatctagtgggcaggtatcctcacataactaaggatcatttggtgaagcttctgaagcaattgatgctgagtacggtcaatcctttgcatggaaaacttgaagg

SEQ ID NO: 9990 - DNA, 441 bp, Glycine max
  Clone ID: PAT_MRT3847_109030C.1
catatgagactgcactgagcatcgtctagctatctcgatcgaactgtccaaggtcctgtcaccgggaggattaagcggggttaaaccgccaggtgtcgttaaccgttaacccagggaaggctactggggcctattcagcattatgttacaggctggcagaggggaacaaccccactggacgctgccaaacacaccaagtagcggagtcacgtaggtaccagagccattagccactatacatggataagttcacatgactcgttagatatgagagacagcaatcttgagctccaaagttagggcggcggcagttatatagtattgttacaactacgtggccacggaaggtaacaatggacaagtatggttgagaaatcgcgttggcacaagatacgtgatgcgtgttgcagcatctacgcttgcaatggggaccaaactgca

SEQ ID NO: 9991 - DNA, 410 bp, Glycine max
  Clone ID: PAT_MRT3847_109031C.1
cctccacctgttgcggcgaagaatgcattttttccaaaccagggtgtttctcagacaaggcctagtttccatgctaaagggatttttgaagagaacaagttatttgaaaagccaaaagcaaaaacacataccccaatcactcagttgtggcatgcgaatggtagatgccctaaggacacaatccctatgcctaggccaaggaagaggatgttctaagagcaagttcagtcaaaaggtatggtaggaagaagcacagaacaatccctaagcctaggtcaattgagcctgatttaattaaccaaagtggtcatcagcatgcaatagcatatgttgaaggagacaagtattatggagcaaaaaccattatatcactttgggaacccaagattcagcaacctaatgagttcaac

SEQ ID NO: 9992 - DNA, 543 bp, Glycine max
  Clone ID: PAT_MRT3847_109032C.1
agtcctctgcctttatctttcataggactcaaagtcctctgtcatttatgctttaccgagactattaaagtgtcctttgccttccagagacaatcaagtctgttggcatgcaaagataatcatggtcatctgcctcttttcaaagacttcaatgtctttcgaccgagactattaaaatctcctttgccttccagagacaatcaagtttgttgcatgtagagacaatcatggtcatctgccacttttgaaagacttcaatgtctttcgatcaagactattaaagtcttttttgccttccagagacaatcaagtccgtcggcatgcaaagacaaattatggtcatctgcctctttttgaagacttcaatttctttcgatcgagactattaaagtctcattttccctccagagacaatcaagttcattggcatgcagagacaaattatggtcatcttcccctttttgaagacttcaatgtcatcagaccgagactattacagtctcatttacaatccagagacaatcaagtctgatggcatgcaga

SEQ ID NO: 9993 - DNA, 453 bp, Glycine max
  Clone ID: PAT_MRT3847_109033C.1
cacgagattcaacgggaatttggtttgtgggtgctaggttccgatactatgttcttttgcgacctatttttttattgaaactttgggtttttttgtattaaaagaaaatgaattttgatttacgcattgttgatatgatattatgccagttattatttatttgttgttatgcatataataaataagtcaatttttttaattgaaagaagaaaacttctgagtttctctttggtgatcggatattatgtcaggtattatctatctgttattactttattgtgatgctgcctaagctatgatgctaccttgaatgtatcacctcctctccaccttttggctgagaaatctttgtccgttgatgttctttaatgaagccctttttagcacatgatagaaataaagaaattgatgcttataaatgctagactccattgtgttggtgtaaattgattt

SEQ ID NO: 9994 - DNA, 289 bp, Glycine max
  unsure (1)..(289): unsure at all n locations
  Clone ID: PAT_MRT3847_109034C.1
nagttgcgngcacgcgtacgtnagntcgganttcggntcgaggacgaagcnanggaagtnnnnaggggncgntacagngnccgcganattnggagngntgagnngnagaagnaggngnngnagangcgangagnngggnaggagntgngnggcnggtagggcngngnnnggnnagggnnngnnanannanngggnaggggnnnggngngggnggagggggngggngnnnagagnaggggnggngggnggnnagggnnnaggnnnaaggnaggggnangnngngnngagc

SEQ ID NO: 9995 - DNA, 112 bp, Glycine max
  Clone ID: PAT_MRT3847_109035C.1
gggctacgggcctgaactatacaagctcacatcacgatgaccgagccctggtcatggcaggactttggtcactacactagactgataccgagatggcgtacgtgtcaaaaga

SEQ ID NO: 9996 - DNA, 211 bp, Glycine max
  Clone ID: PAT_MRT3847_109036C.1
acgagcagaaccacagccaggaaaactctaatctaatttgacgctaactttcatccaattggaatattattaaatctctttttaagatttcacatttgattcttctcaatttttatctgcgattctcgctttgtacctttgttttgttttcttttgttttcaatatattttaatgttaattttccaggaaaaaaaattattttagtttatt

SEQ ID NO: 9997 - DNA, 353 bp, Glycine max
  Clone ID: PAT_MRT3847_109037C.1
aaaaaaaaggaagagctttatttttcctttctttaaaattaacccaaataaccctcaaaaattttttggaaaaaaaaaaatccctgccaaaagggttttgttaaacaataaacaaaagggcaccctgtttttgaggttcttggtacattggggaaaacaacaaaataaaaatccccaggataggggggaaacaagcctagcccccccctacttttttttaaaaggccttttttaagtccaccccccggtttacccctttttttgggaaaagggggcttttttgggggggggggccccccaaccggggatttgttttccccgttggaaaacctgaaaaatttgaccccgccccc

SEQ ID NO: 9998 - DNA, 230 bp, Glycine max
  Clone ID: PAT_MRT3847_109038C.1
tattatatagagcatcttggatataatgatatgatatctggagatatccatattgtatagatcatggatgcagtaaaaaaaaagaattaattttgctctatagaggatgcgatcaaacaccctgtacgaagactcacgatcaacaccatatgcttccggcagttaaaaacacaaattatgccacagatatgtaacatgaaccaccatttataatatattgcctggccatt

SEQ ID NO: 9999 - DNA, 804 bp, Glycine max
  Clone ID: PAT_MRT3847_109039C.1
ccacgcgtccggatggagccactcaaactctacttcattcattacccaacagcaggtcacatgatccctctctgcgacatagccacgctcttcgcctctcgcggccaccacgccactatcatcaccacccccgtcaacgcccaaatcattcgcaaatccatcccctccctccgcctccacaccgttcccttcccctcccaagaactgggcctccccgacggcatcgaaagcctctcctccctcattgacgacatccgccacttccccaaggtctaccatgccatctccatgctccaaccccccatcgagcaattcgtggagcagcacccacctgattgcatcgtcgccgacttcctcttcccctgggtccatgacttggccaacaagcttaacattcccagcgttgccttcaacggcttctccctcttcgcaatctgcgccatacgcgccgtcaaccttgaatcttccgattcttttcacattcccagtatccctcaccccatctccctcaacgcaacaccgcccaaggagttaacccaatacctgaaactgatgctggagtcacagctcaagagccacgctatcatcatcaacaacttcgccgagcttgacggacaagactacatccgccactacgagaaaaccactggccacaagacttggcatcttggcccggcctctcttatagctgcaggaccgctcaagagaaagcagagaggggcatgaagagcgcggtgagtatgcaggactgtgtgagttggcttgactcgaagcgagtcaactcggtgctgtacatatgctttg

SEQ ID NO: 10000 - DNA, 477 bp, Glycine max
  Clone ID: PAT_MRT3847_10903C.1
agaagacgacagaagggcagcatggaggaaatgccttgcattggttccagtattggaagtaaaaggcaaagcggaagagttggtctgttttcaaggcagcgctgattaagtgctacggcgataccggaaggggagatgtttacgaatgtttgatagcgttgcgccaaatgggggactttgactgaattcattcaggaattcgaggtgccgatggctcaagtcttgggtacaaaggaagcgcaattgagaggatattttttggtgggactttgcaatgagatccgggcaaaaattcatccccacaaaccgaaggatctatcacgtgccatggagttgacggctgattttgaggaagctgaaaaagaaggaaatccagaggttgatttgcgtagtcatgggtttcgttttcaacccaagggaggaacatggatacacagtgttggatgatccgcaatgaacacctttcacaacacccaa

SEQ ID NO: 10001 - DNA, 143 bp, Glycine max
  Clone ID: PAT_MRT3847_109040C.1
acgagatgcaatgttgcagatactgaccatatgcaccccccttctgttgatatattatatcataatcagattgtagtaaattgtcaaaaaaatattttataagaatgatccttcctctgtgtcaaaaccggcattatgcaact

SEQ ID NO: 10002 - DNA, 482 bp, Glycine max
  Clone ID: PAT_MRT3847_109041C.1
aattcccgggtcgacccaagcgtccagaagacgacagaagggggggagtgaggggtagtgatagaaggataaggtgaggtgacgataaaccgtggaaagtggaaacggtggtgtagtctgtgagtgtcattgtgaagttggagacaatgttagcttcttctctctccttcctccattcttgttcatcttcctctttcttattgtcaatttcacttcctaatcccaaaccctctcattccctacctttcgtgctcgaagccaaagacaggacccgtagggaagacaggtccgcgcgccacactcgcatcagaaagaaggtcgaagggacacccgagaggccgaggctgtccgtgttccggtcgaacaagcatctctctgtgcaggtgatagatgacaccaagatgcacacgctcgcttcgatttcgacaatgcagaaaacggttgctgaagagaagtaacaaagaggatgggtgagatcattg

SEQ ID NO: 10003 - DNA, 559 bp, Glycine max
  Clone ID: PAT_MRT3847_109042C.1
cggttggtacactgatgggctttccgcacacccacaaaccttggccaagaaccgtgaactcgaagtgatccactccacgtgggccatgctcagagccttgggctgcgtcttccctgagttgctgtccctcaacggggtgaagttcggagaatccgtgtggttcacggtcgggtcccacatctttagcgagggtgggcttcactactctggcaacccatgcctgatccacgcctatagcatcctcgccatctgggccacacatgttatcctgatgtgtgccgctgtaggttaccgtattgctggtggccctctcggtgaggtcactgacctaatgtacccacttggccacttcaacccattgcgccttgctgatgacccaaaggctgtctctgagcttagcgtgaaggatctgttgaacggtcgattggctctgttctctatgtttggcttctctgttcatgccattgtcaacagcatgggtccattggagaacctcgacgatcaccttgctgacgctgtcgacttcaacacctgagcctatgccactaacttcatgccg

SEQ ID NO: 10004 - DNA, 1055 bp, Glycine max
  Clone ID: PAT_MRT3847_109043C.1
gattatcctaagacttccaactacttagtttgtgttattgaattcttttcatttccatttcgtcaacttattgctggctgcctccttacagttatagtgttatagcatttatttttatttcattaacactcatcatatgatggctaaccataccatgaagatggccaacttgttgcttctcgtgactttggctcagctcttagccaccgcaatctcatcagatcctgaccttcttcaagacctctgtgtcgccgaccttgcctcaggtgtgaaagtgaatggattcacttgcaaagaagcatccaaggtaaatgcctcagatttcttctcaaacatactagccaaaccaggagccaccaacaacacatttggctccttggtgactggagccaacgttcagaaagtcccaggactcaacacacttggtgtctctctgtcaagaattgactatgccccaggtggcatcaacccccctcacacccacccacgtgccacagagcttgtgtttgtccttgaaggccaactatatgtgggattcataaccacatctaatgtgctcatatcaaagtccattaacaagggtgacatatttgtgttcccaaaaggcttgcttcacttccaaaagaacaatgctaaggtttctgcttctgtgatttcagccttcaatagccaacttccagggacacagtccattgctacaaccttgtttgctgccactccatctgttccagaccatgtcctgacccagaccttccaggttggaaccaaggaggttcagaaaatcaagtctaggcttgcaccaaaaaagtaaaaaacacctaggtggttggttaatttggcttgtcttgtatcttgtagaggataaattattacatgatacaagatcacatgatcctcatcatttttcacgtgacattttattaatttttttataaattaaaaaatataattacatgtcacatgaaaaaataatcagatcaaatagtctgaaactatgaaataatttatgttttctgtgaagtattcttttaccctctctgttaatattttgtcac

SEQ ID NO: 10005 - DNA, 567 bp, Glycine max
  Clone ID: PAT_MRT3847_109044C.1
gctcccaccacattctccaccacgacttcgcctacacctatggccacccccctgttctcgccacctacacccctccctcccattgccacttcaacaccttctccaaaatcgtgctccagtggaacgccacgtgcaaaggaagacaatttgaccgcatttttggtgtgtggcttggtggggttgagcttctcagaagctgcactgcagagccaagagccactggcattgtttggagtgttgaaaaggacatcacaaggtaccgttctttgttgttaagtccacaaaatcaaagctttgctgtttttcttgggaacgttgtggataaaacctacactggggtttaccatgttgatgtcactatgcacttttaccctttgggatattttgatggggagagctcaaagattggagttttagcatttgggggtggtgttcatgctgatttggtcctacccatttctagaaaccttccattgaatgatgggttgtggtttgctattcagaattccagtgatgagggtttgaaggagtttagggtgcctcagaatacctatagggctgttttgg

SEQ ID NO: 10006 - DNA, 496 bp, Glycine max
  Clone ID: PAT_MRT3847_109045C.1
aatgaaagaggcaattttttaacccaacatcctttgttctaaagctttttgtgggaagctgccacctgtccggaaatcctgtccaaatctttttgcccctgaggggttagcttgcggcccccattttggtccttttccaccattttaagcccctccagggcttggaggacccggggggccacacttttaaagcctctgctgaagtggctgggcctgacaccgtttttctgccgtcccccatagatcttggtcatggaaccaaccccagcgccaccccggaggtacaggtgccgcgctgtggaagcagctcgcgtgtagaaccagttctcatcgtagggggcaagctctttgtgcttggccagcttgacggtatccacccattcggggactttcagcttcccagactttttgaggaaggctgccagagctctgacgaactcctgctggttcacgtcttttacagtaactccaggcatcgtgcggcctccgcgctgct

SEQ ID NO: 10007 - DNA, 267 bp, Glycine max
  Clone ID: PAT_MRT3847_109046C.1
ccacgcgtccgctcacgcgtccgcggacgcgtgggcggacgcgtgggcggtttctggactcatagcggatggaactccactctggagagcgtctgcgaaggtgtcccgatgatgtgccgaccccagttcgccgaccagatgataaatacgaggtacgtgcaagaagtgtggagggtagggtttgagctagatggcgaccagctggagaggcgcaagatcgcggtggctgttacaaagctgctttgcacggtggaaggaatgcgtatg

SEQ ID NO: 10008 - DNA, 169 bp, Glycine max
  Clone ID: PAT_MRT3847_109047C.1
agaagagtcgtgcaaacgaaaatgtgtaaaaacattactagaatagcacgcgtgcatgaaaaggatacatggagatgaatatggacagaaacacagaaatggacaatattttgattattggtcttgtatagacaaatgtgtggcaccgaagctatacaccaaactgaaa

SEQ ID NO: 10009 - DNA, 440 bp, Glycine max
  Clone ID: PAT_MRT3847_109048C.1
gaattccgggtcgaccacgcgtccgatctctgtttagccacccaattcatgcagagggatgaagaacaataggccagtgaaccgccgactacaacaatggcgatacccgatctttgcaatagagaactcggccaccttcccccaaggaactttctctctcagtctaggagcctccgatgtaccacgcttatcctaaccctattttttcattgaggcgggcccggcattcttattatcacatcaccttgacttctctatccggacaatcatctaggatcctgaccttcgactggaaatactgatgaatctgcaagaacacataggttgggggaacactgtaaacttgaatgcaaatggtgacactgtaaggtgcgggtgcgacgatgtggagaagattgctgtgggaccggggaacggggggggggggggcggtggttggg

SEQ ID NO: 10010 - DNA, 584 bp, Glycine max
  Clone ID: PAT_MRT3847_109049C.1
gatttcgcccgaagcttgcttcaacacttgattcattagagccagttgatcctaacacaatgaatctcctacaagggattttggttttgcgtcatcacactcctgataccaatgaaaagaagagttttctctccaggttgaagagactaaaaaccaaggagactccaagcttcaattcctatgcattgtatgcatatgatactgtttgtttggtagcccgtgctcttgatgcttttctcaaaaaaggtagtgtggtatctttctcctctgaccctaagttgcaggacacaaatggaagcatgttgcatttacaatcgcttcgtgtttttaacgatggccctacgtttctcgagacaattttgagcaccaacttcactggtctgactggaacagttcagtttgatattgaaagaaatagaattcatccagcatatgatatcttgaatattggtggatctggcatgcgcagagttggctattggtctaattactcaggtctctcagttgtgactccagaaattttgtataagaaaccacctaacactttcacaagcagccagcaactgtatggtgttatatggcca

SEQ ID NO: 10011 - DNA, 313 bp, Glycine max
  Clone ID: PAT_MRT3847_10904C.1
gaagatgcattttattttaccatgaatagatagagtcttccagtctttcttatcttcatcgcaaaaacggtttggcccaatactaggcgagtgggacgcacatttcaccaatattttcaacgctgccacttacaaccaaaacttcataaagaaggttactataaaaccatggctgcagacaccccctcgaccaaattcagctattccgtcttttttattcactttattcaatgaaaattataaaaccgttcctttcacttaccgacacttcaacttgctgcaccctaacggatttagggtttacgacttcgat

SEQ ID NO: 10012 - DNA, 303 bp, Glycine max
  Clone ID: PAT_MRT3847_109050C.1
taatatatttgttttatcttattttgtgttggtgctttttgtgatgggaaaaatatttttctttttaataatgaatgagaggcatattacctacacttgtacaaacactatgtagaaaattttaaacaaaccccttagatgtctccggctccaaaaaaaaaacaaatatccgccagaaccaacgattctcaaaaagaagaaaaatctccaaaatggaaactcccttggatcccgacaaaaagaaaaaaacaaaaaaccttattaagaaaataaacgaagccaccagcaagacaatcccaaatt

SEQ ID NO: 10013 - DNA, 176 bp, Glycine max
  unsure (1)..(176): unsure at all n locations
  Clone ID: PAT_MRT3847_109051C.1
ccggagttcttctggccggccggcnacatccggctcgagggcttctttgagccgaacttcacccaggcaccggacacaaaaagggggcaggggcccgctcccctacaagggctgaacaaccaatgggctacaggccgaccggggcctaggggcagcgctaccccagaacacataaa

SEQ ID NO: 10014 - DNA, 295 bp, Glycine max
  Clone ID: PAT_MRT3847_109052C.1
tttggaatttttgtgtgcaaactcaataaagccgactatgactaaatcataaggcataaagagatgcaccaaatcttctcttcttactctaaaaacttggaggcacatcctgaccatgaattctggaacattgatacacttacctattgtcttacaatggaggctaatctccacaagaaatacatttggaacagatcctacaatctactaatgcatgtgcgcaaagttgtatatgctatcaatacaactactaagcaattaattgggccactgaaatagcgctcgatttctgcat

SEQ ID NO: 10015 - DNA, 346 bp, Glycine max
  Clone ID: PAT_MRT3847_109053C.1
ctctccatcacaatgttctcacttaccaaaaccgctacgctcaaaaaattcaaaattggtctgcgccaattctccttcgagcgctactccttacaaatcatacctatccgataacctgtgattcatacactggctccctgctaaaaccttcactcggaacaaatgctcctaaacagatagcaatgtaagtcctgcactgatgacagtaactcatgatcttcatgagatacaacgctcgatccactgtctgacaatcactacatacctgattcacaccttattaatctatagcacgaggtgactgaggacttactatctaccctgtgatttaacacaatgctatctc

SEQ ID NO: 10016 - DNA, 342 bp, Glycine max
  Clone ID: PAT_MRT3847_109054C.1
aaggggcagacttctgtgcaactcagagccagaaaacataattcaaatcacacgcccctcggggaagattatgctagtgcccaaagatgacccaaaggctacccatatattggttgacacacgctctggtgttgctccatgtacaggctatttacgcctaatgttcacaggaataagtacctggatacacattatgcaggattagcaaggattttatctcggagctgccaacactgacagctgtctttatgatgatgaacacacctaataccttaaggattattcgggcaatttatcgtacaatcgatcgctcagaaaataactgaagaacaagaggggggg

SEQ ID NO: 10017 - DNA, 697 bp, Glycine max
  unsure (1)..(697): unsure at all n locations
  Clone ID: PAT_MRT3847_109055C.1
aaataaaccacatctctttcaattccaattgattaattcaatgcctagactacaaaaagtgcctaagaacaaatttcttttgcagatagtcaaagtctgatgcttcaaactctcactgagaacatgccacatacatcacatttgcatttgagcagataacatgagacagtgttgagaggaagcaccgtgtgagaactgaataaacgagctgtatgttgggcttcatttcatgtttttgtttggaccaattacttgttctaagtctttcttgtgaagcagtgcttaccacaatgcaatgtcgtcttgcatttactgggctagtcactgtcccatgcctcatctgtctcttttggtgttctcctcttagtcttagggatatcacttttgatcacattattactattttgatttgtagggtagtccccagtctcctcagcatctgaaggccacagccagttttctgaactgctgaattcatctatggattcagaatcaattttgttaactgcatgcatccctctcacactgtttggtgcatcaaaactatcgtgatattgagcagaaccaccaaccttactctcatgatccctcacaccactcttcttgntactcattggttgatgtgcatactcatcatcactgctactactcctgtagttaccactgaactttctcaaatgtcctgagtcattattct

SEQ ID NO: 10018 - DNA, 163 bp, Glycine max
  Clone ID: PAT_MRT3847_109056C.1
cccctatgaatcccttgtattttttgtccagcatctttacatgtacactaattggtgttatgataagtggtgttggtatccaataagcctccactgaagtctgttgaacagccagatagggccaatgttgtggccacaattgatcccctgggagagttggtta

SEQ ID NO: 10019 - DNA, 204 bp, Glycine max
  unsure (1)..(204): unsure at all n locations
  Clone ID: PAT_MRT3847_109057C.1
cccagcgnccgannnaacanaagagnaacatagcgggnncacaggccaccgacgaggagggncnccaccnncagggcaccgncgcnggcgncaagaaaaccgcacnagcgcgccggcggcaccancgacgncacnggccggangcagggcaagacngangccaacgccancaaacgccnncgcccnncccgncgaaggcaccaa

SEQ ID NO: 10020 - DNA, 247 bp, Glycine max
  Clone ID: PAT_MRT3847_109058C.1
cacgcgtcccaaagctgtagaatacgacacaatgggaaagtgcaacagtttgttttgaactataaactagattatcgtgaggagaatatgaagttgtttggtttccctgttgctccactaggtgttgtaccaccagcatgccatagcgcacgctactaaaggttccccctcccaaagcaaactggctatagggaacgttcttctcaggggaaatgcgcacattttaagcgtgctgtgggagcacaca

SEQ ID NO: 10021 - DNA, 395 bp, Glycine max
  unsure (1)..(395): unsure at all n locations
  Clone ID: PAT_MRT3847_109059C.1
ttgttttttttaatttgttttatttgttnttattgtatttttttttttnttataaaaggggtgaaggaacaattgagaaacatatctttttctttaccctattaataattcaatgaatcaattatnaccctggaagggaacaatttgttaatccccttgggggggtttacttttgatatattcctaacccccatagccccctcgcacaatccattaaggggatggtttctttaaaaaatcaaaatggataaactttttggggtataagcaaccccaggaatgtaaaaatttaataagatttacaacggctaacaacccccttcttaaaaaactgactgggctgaaaattttacaattttgggtcattcctaaaagggtcaacatggggggaggag

SEQ ID NO: 10022 - DNA, 292 bp, Glycine max
  Clone ID: PAT_MRT3847_10905C.1
tccacgcgtccggtcaatatgttaagaaaatggttagttatttattttctttcaaaaacgaaaacccatacaaacgctatctgatcctacaccctactattattaccctacgcaacctatccgacaaacccaactccctacaaattacggggtgtctgttttagagcctccaacattccctccccgtgcttgcgacgtcttagtcgttttatcgcgggaccaaattacaattcactgcccctaattttacaacactcacgcttggaaaaaccctgaactctcccaacttaat

SEQ ID NO: 10023 - DNA, 256 bp, Glycine max
  Clone ID: PAT_MRT3847_109060C.1
ggctcgagctcacccacactttatatcttttttttcacaactcagacatccacccgcgctttaatatgacctcgccttaaaaactttctttcaaaagtttctataacgtatccattacacatcctcacgacaacgaggttatccaatccaattccaatcaaaatgctcaacactcgatgtttccacaatcataaacaatatcttgctctacttcaacttctcttcatcattaaacacccaatttttcataaacttt

SEQ ID NO: 10024 - DNA, 1027 bp, Glycine max
  Clone ID: PAT_MRT3847_109061C.1
tggctcgagctctgctctctctctctcgcttccacccacatgtagatgtgccttccttttccaaagggagcagcaacaacttgtgtactcttcttgttgttttccacttctcagaaagagatgcctcaccacaactatttcccttgcttgttgaagcctagtatcattattgtctagttcttgctgtgcttttttgtgttctctctctctctctctctcttttatggatcttggggtagtgggtttggagggggtggtgggttcagaaagtggttgcgtgtttggttcctctcttgcttcagatcctgagacaaagcacaagtggtacggatctggtgtgctcaagcaagagagatctgccatagcaagtgaagatgatgagtggggaacttataaagtggccaaaattgatcatgacatgtcttctgcccctaaagcaatgatctttcagcaaagaaacaactctttgttgagatctaataatgctactcttttttctgacggccatcaccaatctcaaatgttgagtttctcttctccaaagtcagagactttgttggtagatacagcttactcaaatgccacattgcctttttcttaccatcaattgtctacctacagcaaaaatacaggttacagttacggaagcataagcatgcatgaggcattggctggtgtgagacggcccttcactctatcacacccattggagcttgactagattgtttgggcctctgaatccatcacagtggacatccctgggccaaccgcactggtgatgcggatggtttccatctgggattctcgtgccacctccaccttcccccccgcacgcctaagagcccactcggtgggatggggcggtttccatctgggattctcgaacagcacggaccctgacccagggaggtgcaggagaacagatggaaagaaatggcgatgctcaagagatgccgatgtacatcagaagtattgtgagcggcacatgaacagaggacgccattggttcatgaaaagccctgtggaa

SEQ ID NO: 10025 - DNA, 465 bp, Glycine max
  Clone ID: PAT_MRT3847_109062C.1
tacggctgcgagaaaacgacagaagggaggtatgttttcattagtcatgtttttttttttttttatgtattattcattagtcacgtcatgtgttctcgggtggtcaaataaagaaggagctttttggttactgttacgtaaactatatagataggagtaatgtttactggtttttacatataggggtaacagaattggattttgtcaaaagctgctgataagatgggatttgtggatctggtatagatagtgtaattatcctctgtattcattgagtacagagtgcttaattaattaatttggcaaattggcatagttggggtagaggatctatgaaaagttgggttggttatgtaatggctcaaattgtgagggttgagtacctcttctaccctttttcctttatcttaatgcattaattttgctgattaatttggtttactgtttgacaaaataagattgact

SEQ ID NO: 10026 - DNA, 333 bp, Glycine max
  Clone ID: PAT_MRT3847_109063C.1
ggctcgaggtaaaaattacgctcatcattctaagggcgaagatcggcatttgctcacgctaagaggaatcacaccgtctacttatggttcttcacttggcagatcgatggtccccacacctcgctgcttgaggctgattgctttcaccaagctttactttccttagccgggcaagcaggctagaagtgccgtcaggattaaacagaccatggagaccaatgtagcgttctagttgcagacggacgcacccaagagcatgtatgtgcgacctcctgaacgaagattaacgcctggcgagcgtttcattgcaactgtgttcaagtatatagggcg

SEQ ID NO: 10027 - DNA, 320 bp, Glycine max
  Clone ID: PAT_MRT3847_109064C.1
ttttattttcttttttgaaactgaaaaggtaagttggacatttttaattttaagcattataatccaagtcaatataatttacacacgggacaacgctctgagtgcttttccaactgggggagttacacgaaagtgcaaatccagcattaaaaaaaagggtctatgagtaaatctgagcatacaaaatgccttggatcttaacaaccttaggagctttagaccccaaatcatgatcataaggctgaacactctcgaagaccccaataaccttaccagtctttaggcttggctttggtgactctcaatgtgattttgccctt

SEQ ID NO: 10028 - DNA, 606 bp, Glycine max
  Clone ID: PAT_MRT3847_109065C.1
atcactgcttgctttagcttacgttctgtatccattttcctctctctctctctctcaaactcgggtttgtgctgagagaaccaagggtttcttcccttgcagagaagaaaatttggttcagatcgaaagttatacatgcatggttttatatattgttctttcatctttctcagatatggttcgaaatgagagattggggttgatgggaatgttgtttggctcgaggtaactatgcatggtcctaattttgttcatctttgaagctttaatttatgggtttcgatctctttgatcccttgaaacaaagaaagctttaaaggttggattttgaggctttctcggaccaggcttcattcccgtaaaccttatctctctctctctctctagagatcttctcccatggatggcttatggtggtaattaattaaggtgatgccaaaacaagactcttgtgatagtgcctacttgtcaatgatgaagttaacattcctcttgtttgtgtttgtaaattcagacattgcatgggacaaaacttgaaacatttgtcaaaaactctgttgaacaagatgcctttgaccttgtagttggtgctttgtttgtcatctt

SEQ ID NO: 10029 - DNA, 2148 bp, Glycine max
  Clone ID: PAT_MRT3847_109066C.1
gagcaggaccgtgagaaacctcacagacatctttttcgctttcctcatatgggaatgtggactaaactcagaccaggaatctggaacttcttggagaaggctagtaagctctatgagttgcatctttacactatgggaaacaagctatatgcgacagaaatggcaaaggtgcttgatccaaagggagttttgtttgctggaagagttatctctagaggtgatgatactgattcagttgatggtgaggagagggttcccaaaagcaaagatttggaaggcgttttgggtatggaatcatctgttgtaattatagatgattctgtgagggtctggcctcataacaaactgaacttgatagtggtggaaaggtatacatacttcccctgtagtaattgtcagtttggactgcctggcccttcccttcttgagattgatcatgatgagagacctgaagctggaactctggcatcctctttggcagttattgagaaaatacaccaaatcttttttgcctctcaatccttagaagaagtggatgtcagaaatatacttgcatcagaacagagaaaaatcttagctggttgtcgcatagtatttagcagggtatttcctgttggtgaagcaaatcctcaccttcatccattgtggcagacagctgaacaatttggtgctgtttgcaccaaccagattgatgaacaggttactcacgtagttgcaaattcccctgggactgataaggtgaattgggctcttaacaacggaagatttgttgtccatcctggctgggtggaagcatcagcattgctgtataggagggcgaatgagcaagattttgccattaaaccttaaaaaaaactgacctaattctttttcaaaaactaaaacatgtgaaaacataaatcaagaatcacattgattttgggggcgtgaaaccattcgatcagaactggtcagcagagatagttttagttcatgatgactgtgtccattggagatgggtgattggggagtgtatgtaattttaccaagatgactgaccagttgttgaggagttaaatggaggacagtgagtgctgcagggcgtgacagggcttgacagaattggttgactgcttttaggggctaggtgagtgatatcgtgggggtgacttttgttagtagctcccagtaaattttgcttgggattgtattgggagtggaatttatttctgttgctgacaaaggacagttaaagacctcagcattagagaagagttaaaatgtggaggaacccggcctgagggaggtattgactgaaacgaacctaatttgttagagcttgagtctaaggagaagtgggtgccagaacagtcgagtcagtttggaaatgggttcatggccccggcaaaatgaatttctgatagacgaatttctatgtcaatgcgtcactgaaaagcatttgggggtttaaattaatcaccattcactctactaccttccccaaaacaataaagcttggcagggagggggacaggatagaaaatgaaaggaagcatgtctaaccatgttttatagtctaaacctcttggttgcttttaccatcaattcatgcggattgcgttgctttacaattacaacaacccaattggaaaatcttgagaatttgtaaaaacggcaaactaattcatgatgccagttttggatataaagcctttgtaaccaaaatagaaaaagaagaaaaaagtatgtgctctatcatatacccaagaataatggtaatgagattcttgtgcactaccggaaaaggaccacacccaattataccctcgagttgtagtcatgttgtcttgcctgttcaatttgggcaacattaatgaatcctagattgctgtctgggtctcgtagttgacatctgtgtcatgctcttgcagtgattagaatcctattggtcgacgtttttttagagaaaatccgtcattatttcccaataaattaagtatctctatcaacttcattttaatgaccaaaaggtgtatttttattctgcaaagctgtttattttacattttttactctttttaaaaaaaaaaaaactgaaaaacatatcccaggtgtttgaagagtgtggaagattttttacgcaggtaacgttggggggggggggtaagg

SEQ ID NO: 10030 - DNA, 629 bp, Glycine max
  unsure (1)..(629): unsure at all n locations
  Clone ID: PAT_MRT3847_109067C.1
cttccttctacaagacctgtttattaagcttgtccatattttaagaaaaatgaatttagaattttaactagagctggaaatgaatttacagaattctgactatatgtcctaattctttgcaacacccaaagataagttaaaattttgaattataattcccattctgtcatccaaattgaatcttagggatttatgccttacttgtttaaccttgttaagaaacaaaatttctcttcatttctaaaacacaattatctttgtgttgtaaattcactttttccctttcagagcttttttcaagcctgagttttaagtatttcatcaagaactaatttggcatcatgctctcataatatggtcaaagaatgatgtactatatattttgtttgtcaaatttagctgtctatatttcactattaaaaaatgaaattgcatgttttcttcatgtcttattttagcccctagggcaatgtagagatcactgttttcttctacaaaactttcaggtgctactttgcttgtgaagntttggatgaaaaactatatgctattgggggattagtttcaaattcaagtgataattcttgggatacttttgaccctttgacaaagtgttggacattccatat

SEQ ID NO: 10031 - DNA, 1132 bp, Glycine max
  Clone ID: PAT_MRT3847_109068C.1
agtacaaaaaaaccagtatcatttccctttctctttgatatctatgatcttcactgtctaaaattttctgctgcctttttttctgatttcaccgtgaataaaaccagaaaaagaaggataatacacagagagattcaaacaagaaaaaaaaaaaacccaattatccaaattttatatgaccccctacacccccacaaaaaaaatctatcagcctctcagaatcaattaaccttccctatatacaaaaataaaatcaatttccaagcctcaattcaacagcactagtcttgatgaacttcatatctttcaagatgctgtggattggtgttgatggggttgttggctactgtgaacaaatgggtggaacctcggtttgccaaaggggaatccaatggctttggaggttgagtcattgttgttattgttattacttgttttgacactggccatggctcctgaatttgtagcattgatggtggcactaatagataaggaagtggatgtagaatttgtggccacgcgctcacaagaagggcacattagtggaaggtaattgcttgtaattgcattttgaagtcttcaaagcccgtatttcttgaccctcattcctgaagctcctattctcttccgttaatgccccacaacatctcttcaagtaccaacaatccacttctgtttgcttcaacttagtcctgcatgcaatacacacattcacgattatttattagtataaccaatagtattactcataagtcataaccatgcatataacaaaaatgaaactaatcaagtgtatgacactcccatgtaaagttctttctaagattaaataaaaattaaaccatacccttttatataatatggtgtatgaaaaaaaatggtatgaaatttgaaaaatctagcaaatagcaaggtcatgtggaatagaactatgctcatgtgtaggatgttgtaccttgctcttcggttttggaaccaaacttctacttggcgaggttgaagattgagttgtttagcaagagcaagcttttgtttctgcatcacaaaattacgcgtccaacaccattattaattaggtacaaatactactaaaaaaacaaaaccaaacaaagaaaaagagacaagataaatt

SEQ ID NO: 10032 - DNA, 213 bp, Glycine max
  unsure (1)..(213): unsure at all n locations
  Clone ID: PAT_MRT3847_109069C.1
gcngncganncnangtcgcnngcaggcgtacgtaagctcgganttcggcnacgagntcgtctntganncntacgcangagtncgagnnttatgntntcnnggattncgnancagnncagnngatcnntnncgntnggncaatnngatnnagtgcannangngcnnnanctcngngnncnaagggcncngangtgcantgnntngganggangn

SEQ ID NO: 10033 - DNA, 716 bp, Glycine max
  Clone ID: PAT_MRT3847_10906C.1
ttggcgagcagatgaccggaagccgtcatcaccacaagcgcaatcagcagcacgatcaggaaaatggcctgcagaggcatcagccccgcccacagcagcaggctgacgccccctgccccggcgacacagccaatgctgtagaagccgtgaaacccggacatcctcgcctgtccgctgtcacgttcgacaatcaccgcctgggcattcatcgacacatccagcaggccgttcaccgcgccaaaaaccagcaatgcgccgccaatctccacggcagaggtggcgtgcatcatgaacggcaggatcaaacagaagaccgctgcgcaggcaaggatcagcgtccgacagccgagcctggcgatggcgcgcccggtaaagggcattaccagcatggagcccgccgcaatacaaaacagcagcaggcccagcgtgccgtcatcaatatcgagccgggctttgacaaatggaatcaacggcgcccaggacgccatgcccagcccggcaataaagaagatgccccgtgtggcgttctgctgacgaagattcgagccgctctgcaagagggatacatttgtactcacaggctttgcgccactgacagatagtcggtatagatctgcggcgagccggaaaacgagccagttgcttccactcttcgtacatctgcttggtgtcccggtgtgcccgggcaaatttcgccgcttcatcggtggcgatat

SEQ ID NO: 10034 - DNA, 474 bp, Glycine max
  Clone ID: PAT_MRT3847_109070C.1
gttgggagaatccagaacccgggtagtatatcccggagcataggaatttcaagtaattaagctaggctataaaagatcgttgtaattgtatttaaagaagttcaacagaaatgaccgtcattaagttggttttaaagcccttccctattcccggttatagtgttttctcgtgcttgagtccactattcatccctacttccggctttacgttctgctacgtcactgatgtttcttcttgttattgctttaggggtacttggcaccgtagccgggcttgttatcacccttcttgtcgccgaagccatacttgtcatcgctattcttctcgccgaagccgtacttgtcatcacccttcttgtcgccgtagccgtacttgtcatcgccattcttatagccgtagccgtgcttgtggtcaccattcttttcgctatagccgtacttataatcgcccttcttgtcgccgtagccgtgctt

SEQ ID NO: 10035 - DNA, 1581 bp, Glycine max
  Clone ID: PAT_MRT3847_109071C.1
cttcaccaacaaaaaaagtagcccaaaaccgcaactcaccgcttcgcacgtttcttcgatcattatccacattcctcttctcctcataggatggaacagcaggatatggctgatacaaccacccttagttattggttaaattggaggttctatctgtgtgcagtttgtgttttgctgtctattgtcctttcatttcttgtaatatggaaggataagggttcaaggaaattcagatctggaaaaggagaaaatcaggaagatgggactttgtctggtgatgaagcatggaaaccattccttaaagaaattcacccagtttgtttgctagcttttcgtgttattgcattctcttccctgttggcatctctagttgccaaaattcatattaatggcagagccatatttttttattacactcagtggaccttcactctggttacaatttattttgggtttgcatctacgctatcagcgtatgggtgttatcggcataacaaatcaagcaccatcaataatgttaatgttgctagaatagatgtagagcaagggccatacatgcctttcttacaccaagatacatccaacctgtctagaatggaacaccttgctgatccccttgccgaaatacagaagaatcaagttgcacccatctggagttatattcttcaaattttattccagatgaatgcaggggcagtgatgcttacagattgcatttattggctcattatatttccatttcttactctgagggattatgattttaactttatgacagtgaacatgcatactctaaatgttgttttcctccttggagatgcagctctaaattgtctgaaaatacactggtttggaatgtctttctttgtgttatggacaagtttatatgtcatttttcagtggactattcatgctttcatctggatttggtggccatacccattccttgatgtgtcattgccctcctctccattatggtacttgttggttgcattgttacatattccatgttatggcctgtttaaactgattgtggatgtgaaatattatttcttgtcgaaatggttcccttcctcttgtcagtcctaaagattgagtggtatcagagttggaccgcataagagccagaaacagtttagccaccagcggcgaaactgcatctagcgctcccagcagctgcatagtgaatggttatggctctttcacatgctcttggctcaaacaaattacttgtattaagccaatatggtaattaagccatatttctaaaaaaaaaaaaactagttttgctaccattccactgcttcccagagtaaaggggaagcaggattgtaggatcaaatggaggaaggagctctttattttatggtactattgttctattcctcaatagttggaacttggaatcatgtttgctgtgtgattatcagaatacctttcaacctatggagtcgcaggtgtagatttgtaacgatacattcccataaatactgcagaactttgtaacatctttgtattgtgtatttcacatttgggaaagttgatatagctgaactgaaaaagtgtttacgattctgtttt

SEQ ID NO: 10036 - DNA, 481 bp, Glycine max
  Clone ID: PAT_MRT3847_109072C.1
acagaggcctttttttttttttattctctttatatttttttttttaactggttttcctaaaaactctaacattgtttttttagcctttctaaaaagaaaaattccaaaacccttgttagcttggttgcttttaaaggaagggaatcctaaaccttgtttattttagcaccctagctaaaccataaaaatttttttttatttttgacagttgttttattaaaacccttttttttattaaaccttgcttaaaaccatacccccccacccttttttattttaacaaaaaccctaacatagcatgcggtgggatatcccccccctgccttacaaggaaacatttttatttgggtggaaattaaggtgtttttttaaggcaaggaaaagcgctcctttttccaggaggattccgaaataaaaaaaccctttcttgtcttattggcctgggaacccctgcaacgaagggggtttgaattgaaaaacc

SEQ ID NO: 10037 - DNA, 201 bp, Glycine max
  Clone ID: PAT_MRT3847_109073C.1
aatatctagtgtttttttttatttgttttttttcgctgtgctgaaatggtatagtcagctcttggatgcacaaaagagaaagctgagcacacaacaacaaccagcagcaaaaaaggaagccagaccaccaacgcacctgacccccagctattgacacaaaaagaaagaggggggccccataaatcaaagggacggttcgac

SEQ ID NO: 10038 - DNA, 252 bp, Glycine max
  Clone ID: PAT_MRT3847_109074C.1
cacaagtttgatatccacgagttgcttatagcctactctgagattttgagtagaggttgcttcaactcttcttacaatgctgacacttttaatgtggcaaccctactgctcaataggttcaagcagatgaacaacgccgtataggaagagtttacgatcacatgataatgattgtgggttgacccatcctacttgcttgctcctgtcgctactattatagcaaggacgagaagctcgtcgtcacagactacg

SEQ ID NO: 10039 - DNA, 271 bp, Glycine max
  Clone ID: PAT_MRT3847_109075C.1
gaattttataggaaaaaaaaaaaaaaagatttaaaaaaaaaaaaaaaaaaaaaaaagaagtgaaaaaaaaaaaaggaaaaaaaaataaaaaagtcaaactttttatggttttaaaggttccatccttttatagtgccacattcttaactacattatattgcaacgtaattgcttttctttggccgactgtaaataactttaaatgtgggaaattttaaaaagtttgcactttaaaaactttgtcgtttttcactttaaccccatttggcca

SEQ ID NO: 10040 - DNA, 737 bp, Glycine max
  Clone ID: PAT_MRT3847_109076C.1
ccggggtcgacccacgcgtccggcaaatcccaggaagtcagttactcaaccacctgtgaatctgaggggaaaaagaaaaaaaatgggataattcacgaagatttagtgagagcataaaatacaaagtgattaggaaagagaaagcaaacatagcacgagtttttttttgtccctcatttaaaaagaacttaaatgatgtttaataaaagcaataatatatacaactcacttttgcaaaaactaatatttactcccttgaaaattcatttgaaatataatcaagtcaaaatcaagaataacaaacttgactccaatttaaaaaccacgttatctcttcgttgtggtaaacggaaagaaaaacacactacattgtagcaaacagaaaaacatgctactacagtacattatctatttgttgtagcaaacggtagcaaatcacataatccacaataagaagccaatttcacatttaaactacattatcaaactattaaaatattcattaaaccattaaggatcacaaggaatcaagttccaaccaagtaaaataaatattatactacattctcaagtgctcatagaaaccataatcaccaaaacagcttactttaaaatttagttgcttctcctaaaaataggtaaaagttcccctaagcaggattaactacttacaactaaagagaacacaatcaaccaccggatgtttcacaaaatctaagccttaaaacagaaagaac

SEQ ID NO: 10041 - DNA, 714 bp, Glycine max
  unsure (1)..(714): unsure at all n locations
  Clone ID: PAT_MRT3847_109077C.1
ccacgcgtccgtctctctctctctctgttccggcgtttttgcccgtaacccctttttacgttttactacaaagtccttcctttcttgccttttctatctattttttttctccatcttaatattatttgctacttgtttttcttttttttcttttcgtttatttttgttcttctccccaatttggtttttctgcttcctccgattcctaactgcttccctgaatcgccgtcaatgaacttttcccctttcggaactttctgagattttccgagggtttttgcgagatggccaacgaaggaagtaatgccgagaccttacctcctgcggagccacatctgttcgagaatcggcatgttgatgctaaccaacatcatccaacttcctatgctcccactacaactgggtctgaagctgcaccatggactgttcatagctctacaggaaatggagtttattctaatccaacctacctgtatgatcagcatccacagccacctggaagaagcattcaagattgtcaaaatgtatcatcagttgctggtaattcatcaaatttgggaacagctaatgtaacccaagattacaatgcatacgcatcatacccaagttcttctaatccatatggttatggcagcatgggattctcgggctactantacaactatcagcagcaacaacctaatcatacctattcacagcctgtaggagcatatc

SEQ ID NO: 10042 - DNA, 1027 bp, Glycine max
  unsure (1)..(1027): unsure at all n locations
  Clone ID: PAT_MRT3847_109078C.1
tctctctcaaaatattgtgatccatgcccaacgccctaccctgaaaaaatagtagagaagaggccactaacagagccattaaatcttctctcaaaatatttgtgattccatgcccaacgccctaccctgaaaatatggtagccgagagagaggttaacggtaacggcgtcggagagggaagaacaacgctaatattcacctacggaaccctgaagcgaggcttctccaaccacccccttctccaagacctcattcgctccggcgacgcctccttcgtcggaacctaccgcaccgccgccaaatatcctctggtctgtgggccctacaaggtccccttcctcctcaacattcccgggtcgggtcatggggtccatggggagctttactcggtctccacgcgcggcctcgagcgcatggacgagctcgagggaacctcacgcgcccactacgagcgtctcccgatcaaggtggttcctgcggccgaggaagaggacgacgacgggtttgatggggaggaggaggcggcggcggggctaacgtgcgccgaggcgtattatgcgcatgggaactacgcgatggagctgtggaagaaaaacgggaagcgtgggttgaggtgttattcgcagaaagagacaattggttatgtgaagcgcaaggataggcctcagcatttgaccttcctggatcacattcgcttcttcctttcctctaattagcctttctcgttaattaggttactccaatccattcctgcttcctgccctttttttcttcttagcttatgttatgcactactttgtattttgccaagaccaattcatgatcaccaggatctctgtctcttactcttttgtttagttctgtacgacgtgaaaaaacaaaccttgctatttttatttttttggtcaaagtttgaaattaattttatattttaagagngggtacttaatatgtcttttgaaagttttgagtggaacagngnggaatttatgtacaactaactttccnntatggngaaacttttgag

SEQ ID NO: 10043 - DNA, 454 bp, Glycine max
  Clone ID: PAT_MRT3847_109079C.1
gaaggattgtgtttccagagcacattagtctcaggcaacggtatgcgttactagggaacagtttaagcatagcagttgttgctcccttacttcagtatcttttcactcaaccttaatgatttttcaattgcaacatccattcaacagaagcagatatgtcctaggcctatctcctataattttgctgtcatagtgagatcatgtaacaaatgtgatttcttgtttcaatcatgatgatccaactcgtacatgagtttgaccatttttacttcagaattcatatttctaatgtagagttctatggccattctttcaaaaattgcctaatatgtggggcgaaaaatgtaattgaaatttgggagattcaaaatgtacttgtcaggcctcttgtagaagaaatgatgggatcttgtatcaaatttgaatgtaaacacatttgagaaaatatgcagtt

SEQ ID NO: 10044 - DNA, 277 bp, Glycine max
  unsure (1)..(277): unsure at all n locations
  Clone ID: PAT_MRT3847_10907C.1
caattgccaactacaatgcagcgtggcctccttgcttcctctcttccactctcaacccgctatnancttccttcctctccctctatgcanctcaagcccaaacccattcttctacaaactcaattcccatagtaagcctttcttcaccattcgcaattncagcagctccttcaaagtgaaaccctcttcccaaatcaaaaaaatccgcnccgaanctgagcttgatcccangctcacngcnctccganacctcttctccaaacccggngtaaacatt

SEQ ID NO: 10045 - DNA, 323 bp, Glycine max
  Clone ID: PAT_MRT3847_109080C.1
tttttctttctctatttatctctcttctttcaccacatgctcgacgggctagcttttttttttatatgagcacgtaaacaatataatacaatatgtgacatgattaaaattaacaaaatttacatttcgtggtgtcgaatacatggttttttctattactttaccttaacaaacattgggtccaaaacccacaaacccatttgcttcatcaaccgagatttcaatccctttttgctgaatgttccctatgatggaaagtccagaagaagaaggagcatgcgcgaagtaaaaactttccacgccatccactgggatcaaaaagt

SEQ ID NO: 10046 - DNA, 386 bp, Glycine max
  Clone ID: PAT_MRT3847_109081C.1
agaatgcatttgacaatactagtgtctacaacgcagaaaagggaagataggaaatgcatccttccgcataaaagatacatgctatagagtaaacagacacacttgagcattaattatgtaaatcatactttgcgccatgtcttgcgaggtaaaacaaagtacaaattcgagaatagaggcaagtacaacttagcaaagcctattgataaaaagaactacgactgtataagcaaaactgttataggaacccaaattcaagagggaaagtcaatcacacaatttggtagctatcccctatcagctgcgttctctgagctaagttggtacgataaccacccttgactggtttcatgtaggtacaattaaggctgacacctgagcacact

SEQ ID NO: 10047 - DNA, 434 bp, Glycine max
  Clone ID: PAT_MRT3847_109082C.1
agctcggaattcggctcgagattatatcacatatactcactatggatgtttaattggtcaccaccatagtacggtattttgtgggtaatttgacttatgagggtgaatggcatcaaccctagcgcctataaagcggataataccgacctgaacgtgtaatcgatctactgaataggctcacacgctctaccactgaagacaacctcatcgtggtacaacataataataaacaagtgcccataagacccactccgcttaagatacatcgcccaccttagtgtgcctacataccgtgttcactggcccaaacgttaatggccagatcttacacacacgcaactacctcgtctgggtcatagtgaggacccctggtcaattactgttgatggtgcaacacaccatgacccaaaaggtcttctttccatgcttggtct

SEQ ID NO: 10048 - DNA, 415 bp, Glycine max
  Clone ID: PAT_MRT3847_109083C.1
ggggggaaccttgcccttttcccccaaagtaaaaaaaacccccccgggccttatccccctacacaaaaaggccctagaacccccgggggggggaaaaaaagaaaaacaaagcccctagggaccgggggaaaccggggacaacaaaaacacaaatttttcaacaaaaaagaaaaccggaaatttcaaagaaacagaattccaaccggaaaggtgccccctctctggagggggccaaaaaacgaagccaaccccccagggggaaggggaaaataaaaaacttttggggcagggggccaaagaaaagctccaaaaaattaatccttttgggggggggggggggcccgggtccaaaaagggatggcccgaaacgggggtttggggcccacagagggaaagatctcgggggggggggggg

SEQ ID NO: 10049 - DNA, 850 bp, Glycine max
  Clone ID: PAT_MRT3847_109084C.1
ggtccggattcccgggtcgacccacgcgtccgcttccgccttgcgtccgcgcacaagtcacagagagagagacagtctctctcgagcgccaattcagactctgcgcgcagaacattctacgattctcgcgaacccgcgcgagccggtggagctcctccttttcaaacctcaaccggagctagctagggtttcgatttcattcgccaacgcaaactgcatgtttgtgaagctttattcctgaaatcccaataagcctcttaatgggagaaaaagttcttgcgacttgcataccaaaaggacagccttgatgctttgagaaaggttatgtgaagcagtatgactcttgaagatttctttacgttgactgaaatgaaagatggcctcatggccccttctcgagtgcaagagttggtctctgtaatgaagaaggagcaagattgtgttgctaagaatgctggtgatacaacaaggcagtgggctgctgttgcaagcactattgctgctacagagaataaagattgtcttgatttttttattaaattagatggacttgggttcatcaacaaatggttaaaggataccctgaatttgggtgctgataatactaatgatggcttcattgaagagtcaattactgcaatgttacgtgcaattgaaaaactgtatctagacagcgagaaatcaatttcatcaggaatttctgtgactgtaagtaaccttcttggtcatcgtagctcctaggtgcaggatagagcaagagtattatttgaccgctgaaaaggaggtggagatggagatgctgaaccaactgataattcggatcttggtagaatcaacaatgtgagtgatg

SEQ ID NO: 10050 - DNA, 321 bp, Glycine max
  Clone ID: PAT_MRT3847_109085C.1
ccttgagttgtaaagatcacggttcagatacactcaattattcatacacatagctatagtgcatcggtacaaaaagctatgtgtatgaataattgagtgtatctgaaccttgagttgtaaagatcacgaagataagtggttgccaataactttgatatctcattggtagttgctttccatatgccggggaatctaaattacttaaatgaaaggagggtgctatggttataatgctgtgtaagataagatggtgttggtgtttttattttttatttttatatctactttttggattataaattaagataaggtgttgttggt

SEQ ID NO: 10051 - DNA, 714 bp, Glycine max
  Clone ID: PAT_MRT3847_109086C.1
cggggcacatgaaggatccgcgtagacaaacacactaacacagcgaggcagacataggaaagggggggaaaaggagcataaatggcattgcgtcatttacgattcttccctcacacacttcctctaactctcactcccactcccaatcccaataacagtaaccgtttttccttcttcactccctcactctcttccaccacgctcatggccactgctcacaaggtcctggttcccatcgccgacggcaccgagcccatggaggctgtcatcaccatcgacgtcctccgacgctccggcgccgacgtcaccgtcgcctccgcctccgacaacctcgccgtccaagctctccatggcgtcaagatcatcgccgacgcccctgtccgagacgtcgctgccacctcctttgacctcgtcgctctccccggagggttacagggtgttgagaatctgagagactgtaaagttctggaagggttggtgaagaagcatgttgaggacggacggctctatgcggcggtgtgtgctgctcctgcggtggtgctcggaccttggggtttgctgaatgggaaaaaggcgacttgttatcctgcattgatggagaaattggccgcttatgcagccgctacttctgagtctagggtgcaggtggatggcagagttgtgaccagtcgtgcgccgggaactaccatggagtttgccatcactttgattgag

SEQ ID NO: 10052 - DNA, 2052 bp, Glycine max
  Clone ID: PAT_MRT3847_109087C.1
atcctaattcctcctttcaaaaccacagcaccctcctttgatttaagttttttagattccacggcatttggtaagcaactaccaatgagattatcaaagttattggcaaccacttatcttcgtgatctttacaactcaaggttcagatacactcaattattcatacacatagctatagtgcatcggtacaaaaagcttcgcgttcaaaaatcctaagggcgtgcgaacactactgcatttgcaagttctatctataacctagctcgcgtcaactcaggcgtccgattaacacagcgagacagacatctcttccagaagcataaatggcattgcgtcatttacgaatcttccctcacacacttcctctaactctcactcccaaacccaaactcaataacagtaaccgtttttcgttcttcacttcctcactctctctctcttccaccacactcatggccactgctcacaaggtcctcgttcccatcgccgacggcaccgagcccatggaggccgtcatcatcatcgacgtcctccgccgctccggcgccgatgtcaccgtcgcttcctcctccgccaacctcgccgtccaagctctccacggcgtcaagatcatcgccgacgcctccgtctccgacgtcgccgccaccgcctttgacctcgtcgctctccccggaggtttacagggtgatgagaatctgagagactgtaaagttcttgaagggtttgtgaagaagcatgttgaggacggacggctttatgcggcggtgtgtgctgctcctgcggtagtgcttgggccttggggtttgctgaatgggaaaaaggcgacttgttatcctgcattgatggagaaattggccgcttacgtagccgctacttctgagtctagggtgcaggtggatggcacagttgtgaccagtcgtgcgccgggaactaccatggagtttgccattgctctgattgagcagttaattgggaaagagaaagcgtatgaagttgcaggtccattggtcatgcgttccaatcatgatgatgaacatacttttaaggagttcaactcagtgcagtggacatctgacaatccgcccaagattcttgtaccaattgccaatggttcagaggaaatggaagctgttattatcattgatattctgcgaagagcaaaggcaaaggttgtggttgcatctgttgaagataaactagagattgtggcatcgcgcaaagttaaactggaggcagacatgctccttgatgaagcaaccaaactttcatatgaccttattgtgttacctggtggacttggtggtgcccaaacttttgcaaactcagaaaccttggtgagtttgctgaaaaagcaaagagaatcaaacaaatattacggagcaatttgtgcatccccggctttagttttggagccccatggcttgctgaagggcaaaaaggccactgcctttcctgtaatgtgcgacaagttatcagatcagagtgaagtagaaaacagggtggtggttgatggcaatcttattaccagcagaggcccaggaacttccattgagtttgcgttagcgattgtggagaagctgtttggacgcaagttagcactagaacttgcaaatgcagtagtgttcgcacgcccttaggatttttgaacgcgaagctttttgtaccgatgcactatagctatgtgtatgaataattgagtgtatctgaaccttgagttgtaaagatcacgaagataagtggttgccaataactttgatatctcattggtagttgctttccatatgccgtggaatctaaattacttaaatgaaaggagggtgctatggttataatgctgtgtaagataagatggtgttggtgtttttattttttatttttataaaaaaaaaaaaaaaaaaaaaaaacaggttctccacaattgctaacgcaaactcaatggaagttcctgggcctctgctgggaataagattgccatcaaccaccaccctgttttctacttcactctgatctgattaacttgtcgacattacaggaaaggcagtggcccttttt

SEQ ID NO: 10053 - DNA, 571 bp, Glycine max
  unsure (1)..(571): unsure at all n locations
  Clone ID: PAT_MRT3847_109088C.1
acttaagtaattactagtgttgtttataaaaagaaacacggtatatatttttacttttacagtgaaaatcgtttatttaaaaaaagcagtgtatataggttctacatttttataaatagcatttttgctatatataagaaactctctctatttaaagaattttggcgtagtaatctaatcaacatagtagtggggccgaaatcattctagagagcctaaacaacataaccatatcataatagttatgctttgggttcaaagccacatgtaatcaagccgagtatgaagtattacttgccaatttaaggccaataaaagaagttagggcttgaaaggtcaaatactgaagtgattccatggtagcatctaaacagatcaacaagngttttttttaggtgaaaactcntcagttgnnttaaagtattaccatgctttccaacagttaagggaagaatttgattgaagtccaggtgggacacatcaatcgagacattaatgaccgagcagatgagttgggcagactagcaacctcaccaaaacctgaacatttgaaaacttttatgcaataaat

SEQ ID NO: 10054 - DNA, 313 bp, Glycine max
  Clone ID: PAT_MRT3847_109089C.1
acgtttcactcctgattatgaacactggaaacgtttaatgtcccagtcttatctagaatctatggtaatttattaatcaaatgtgcgcaatgtcatcgatatgaagtctatctatcgagcatttgctgcagctttgatagatttcaacgtttgggtcataaatgtgcttacaatatactcccctcatacttcttcccattatattttaacgatgtctattcaatatatatcatcattcgtgtgaatcatttaccacctatcctactacctatgatctcctccatgcttatcaatctctttaaaacttaacaaa

SEQ ID NO: 10055 - DNA, 170 bp, Glycine max
  Clone ID: PAT_MRT3847_10908C.1
attctttcgttccaagtttgcttttgcaaggtctaccatgctcgaaacaccttatccggcatgagcgtgcccattaccattattgataatgagaagactccgaaagatggggtggctgatcagacttacctggtaaacccaccaccttagttcgtgacaactatcaacat

SEQ ID NO: 10056 - DNA, 317 bp, Glycine max
  Clone ID: PAT_MRT3847_109090C.1
aaaaaaaaaaggccccatctccccttttttattaaaaaaattacaattctgcaaatttttttttcagggattaaatccttccataaaaaatggttgggggatacaatcaaaaaaccccaagggggccaaacaaaaatccccgggggaacaaaatctcttcccctgcctaaaaggacttgaagggaatttattccgtcgggggagccttttttttttttttacaacaacaggggcttgggattttaaatatagcctttgaaggctttaaaccattgggccccaattgccccttttttaacacgatgatcacaggtgag

SEQ ID NO: 10057 - DNA, 409 bp, Glycine max
  Clone ID: PAT_MRT3847_109091C.1
accaacacttctatatttcctaatcattatttaaaaatgaattgtattttcataaatcataagtacaagcataaacgtgtcattcctttcttggttcaaagtgacatggaacatagcattgaggttattcattgtcctaatgtcgtaactatgctattctccataagttgaaatgacactaaaaaaatacaaatgttcaggccgatagtgggaatatattttcagaatgtcatagtaatagagtataatttattctaggctaatttttatgctatggtgggttagtggattcgagcatgaaatagaaatagcatagtgagatcaagaggattgcgtcagagctcacaccggcacacacagtttggggtgcttagtcatttgcttcacttaagtccaagaaagctttttt

SEQ ID NO: 10058 - DNA, 477 bp, Glycine max
  Clone ID: PAT_MRT3847_109092C.1
gccaagctagcgaggttataaaccctcatctattcaaacagttggaagggtgcaagggagggtttaagcgcggtgccgaatctaggatggcaaggaaagttacatttgattgtgtgagtgaatgtctggatttgagatgcaggcgttatgtagggggaggatacaaaatgtggatcaaagggtttgaaatggtgaaaaaaaaagaatggttggcagaaaatgtgtacaaggagatctcagattggagtggaatgggagactcaatggtagatgagcttgtggacaaggacatgagcagccaatatagaagatggctagagtatgaggttgatgcttttgaactcggatcagaggttgtggaccaaatatttaattctttggttgatgatgttgtgactgaaatgttgcaattgtaaaccccttaatgattgattttttgcggctgattaattatgaagaattatctttttattgatt

SEQ ID NO: 10059 - DNA, 290 bp, Glycine max
  unsure (1)..(290): unsure at all n locations
  Clone ID: PAT_MRT3847_109093C.1
tcgaatgtcctnccagtgatgaaggaattnggtgtanaaatggttggaatccgagangaagatttgganagcacnaatttcnccnatgganagaactncggatccgtcaagagtntagcccatatgagatgnaggntgaataatcaggncntgcatgttttntgtaacgtgtcgtctgtatgatcncnctacatncttcganatctcncagtngtangactgtcatggcacnataggaattctcttgganagtccatcngtagcagaattttccnccctggctagactga

SEQ ID NO: 10060 - DNA, 251 bp, Glycine max
  Clone ID: PAT_MRT3847_109094C.1
gaaagggaaaaaggaaaggcaggaaggaagaaaggttggtggaagggtgggtgccaataatgagaggaaagggagaaaaaaatggtattttggacttttggcaattcttagtagggggactaaagcaaatctgatatgaccaatatcaactccccacaaaaactgttattattgtccattggacttcaggcggcgcaaaacttcacactacttcaccaaaactgttggtccataaagtgataccctctctt

SEQ ID NO: 10061 - DNA, 277 bp, Glycine max
  Clone ID: PAT_MRT3847_109095C.1
acgctacctacaaaaaaaaaaaatcatctaacgttctaacgatgaatcaccaacaacactcggctgtgactgcgtatacaccacgggctgatatcatcctaccatctccaccaccacctgaaggttataccactgatgatgatcttccttgccaacaaaacgttcctgtcaaaaccactaccaggggtggtggcttatggagcggacgttgcacagcactccgctatggtggatgttacatacactgtgtgcaagggcgcttatcctgttgaacatc

SEQ ID NO: 10062 - DNA, 654 bp, Glycine max
  Clone ID: PAT_MRT3847_109096C.1
acgcgtccgcggacgcgtgggtgaaaacttattccttgtggacccgtggctctacttggggatgttcactccttgttattatgttgccgataaacagaggttcgctcacaattagaggaatacaaggcgccttgatcataagttcaattttccatgtgtgtatgggattcttgggcatttggaggtttgttgtcagcttagtaagtgcatggcatgcatcttttttggcttgttagagccaataaaatcctttaatcaattttagcattttatatccatctagttaattgcttcttcttgtgctgatttaggttcctaaacccactttctgtagtaccttatgtaacgtttactggacaatgtctttatcatcttgtatttccaatggtaaaaagttctacattagtctctcaatttttcaatcaaataggttgaatgcttgaatcttaattctcaagttttatgcaatttagttaattgtaagtctaggacttgataataggattatttactgactttccatctattttatagttggaaaaatgtattgaagtggggcttccaacactgattgttatggttttcatctcgtaggcaagtgattaatcttgctcgtgtcctgtagaatatgtgataatatatattacgaaggca

SEQ ID NO: 10063 - DNA, 840 bp, Glycine max
  Clone ID: PAT_MRT3847_109097C.1
ctctaggttcacacagcactttcccatcaatcaagaagcgacttgataaggaaattgaaacaaacgtctcgatcactgttgctccatcagaaacgggagaagcccttaaggtctcaggtcgaggagaacttcaacttggagttcttattgaaaatatgagaagagaaggattcgaaatctcagtttctccacccgaagtcgtcttcaaagaggaaaacggaaagaaattcgaacccatcgaagaagtcactatcgatgttgatggcgaatactcttccgccattctcgacaagatgactgggagaaaagccgaatttgtcgatatgaaacaaatcgctggaaaaactcgacttcaatttttgtgtccatcgcgcattctcgttggattaagaaatgaacttttgactcagactcgtggaactgccatctttaaccatctcttccactcatatgcaccatatcaaccaggacttaccatatctcgaagaggttcgctcatttcaatggcaacgggagtttgtacttcctattctctaggaatgcttgaagctcgaggaactctctttgtagaaccacaaacaaaagtctatcctggaatggtgattggagagcatagcagagaaacggatcttgaagtcaatccaacaaaggcaaaagcactttccaatatgagaacaacgagcaaagaagagcaagttcgattgagtcccatccgacaattctctttggaagaagcgattgcgtatgttcgaggagatcagttgttagagatcacacctcagtctatcagaattagaatggctcccaagaaggtgaagtaaaatctagttttgtgaaaaa

SEQ ID NO: 10064 - DNA, 307 bp, Glycine max
  Clone ID: PAT_MRT3847_109098C.1
cccacgcgtgcgtttacacgttcgtacactcgttctagttcctggagtttccagcggtggtgactgtaacagccttagtcaagacctatttccttggcggagcaatggacagaggatcgacgattgactggaagttcataaagcacacaggcatacgaatatacttcgaagataaggcggtgccgacactcgtcggtaagttgaatggtccaacttcacagagagttaagtcacaccgttcagttatacagggatatcattcaatgtgcgaacgaaaagctcattacagggtcctagattctgtcaa

SEQ ID NO: 10065 - DNA, 536 bp, Glycine max
  Clone ID: PAT_MRT3847_109099C.1
tcgctcacgcgtccgcgctctctcattcaaaccattcgatctcatcatctccccaacctgtaagtaaaactacaaatcactgtaaatttacattaccactctcttagttattaacttagaatcttccctttctagattataattataattaaatttttttatatatatttcctcccatatagttatatattattgttgggatatatgcatagaagagtcatagataaagaaagtcttgattattaatagtccaaggcagtttccttttgtggggtgtggttatttgatcatacaaaatgactagtggtagttgtattggaatctctaccatgaagccttgttgtagaatcctatgtaactataaaagtccatctatttttgggttttctccaaccaagttgagtgattcagcaatcatgggcatgttgtccagatcatgtcgtcacaactcaacccatcgtcataggtacaatacctgtaatactcagaatgtagggtacataaatgggatccatcccgatcggagagatttagtg

SEQ ID NO: 10066 - DNA, 459 bp, Glycine max
  Clone ID: PAT_MRT3847_10909C.1
tacggctgcgagaagacgacagaaggggggtgtcatctgaaaatctagttccttcgttcttgtgtatttcttctggtatactatctcttcacactctgcagagtgcttgatttttttttgccttgtggcagttaatataaagccacaggtgaatcaagtagcaagatgcttgccatgcaattcaatatactttatacacgtctaaggtaatatgaaggagcttcttttttattttctattagctcggtctctagtattgaagactgaaaccttattttgttattttaatggcgcttacccatgaatgatagagcttattagtctgagtaattttgactcatgctgaagtattaacagtactcatatttcaaattggaaaactgggtgatggaaactttgttgcattgtttttaaaaggatttctttattctagatatttacaacatattcccatttatt

SEQ ID NO: 10067 - DNA, 122 bp, Glycine max
  unsure (1)..(122): unsure at all n locations
  Clone ID: PAT_MRT3847_1090C.1
ggtccngtgtggcgaaatgcttnactgatttgagctacttccctgctgcacaaactgcagaaaanaagtaccaatgaagcaatttnccagagaatatcacacgantncccaaccctccccca

SEQ ID NO: 10068 - DNA, 280 bp, Glycine max
  unsure (1)..(280): unsure at all n locations
  Clone ID: PAT_MRT3847_109100C.1
tcctttctaaccgccgcttcngcaccctgcgcttccttctcacacnttctctaactatataantttnctttttctctctgtgtnttcctttttatttnatgctgtttntccgntngtgactgggcgttgnttggngtgtttttcgtgtgcgtcgaaccctctgcgttcgttaattttgttttgtgttntncggatcganntgtttcgcgttcggtngcngggatcttcggnttaggtaaatgagtggtaaagagttggttgtgnggagnagnagtttaaa

SEQ ID NO: 10069 - DNA, 137 bp, Glycine max
  Clone ID: PAT_MRT3847_109101C.1
agacctctatctattttttttcggtttttataataagacttaagcgactgctcgctttaacacaaatgcatgatactccacaaaggcttcttaccaccgcccaatacatacatgccatggcgtttcgaaactttaca

SEQ ID NO: 10070 - DNA, 1375 bp, Glycine max
  Clone ID: PAT_MRT3847_109102C.1
ccacgcgtccgagatattttccgctctttaccagtttaaccttttctaaccataaaagtggatcattcgttttgtaataaaccgaagatgctggaaatcaccacgaagatgcccaagattcttctttctccaacagcaggcggtgaatcggaatcccctcggtgtcatgcatcgccggttttacttgaggaactgatctcgaatatcctccacagggttccggtgagatcccttctgcaattcaagtgtgtctgcaagtcatggaattccctcatctccgatcccctattcgcgaaggaccacctttgcgcttccaccgccgatcccaacatgacccaccaacggttactctctttcaccgtttgtgaccccaaaatcgtatcatttcctatgcacttgctcctccaaaacccacccactcctgctaagcccctgtgttccagcagcttgaatgactcgtacctcattctgggttcctgcaatggcttactgtgtctgtatcatattcctcggtgttacgtagcgttgtggaacccttcaatcagattcacatcaaaaagattgcccaccggcttatcacctggcgagggttttagtactttccatggttttggctatgatgcagtaaatgataagtacaagttgctattagccatgagagttctcggtgagacagtgaccaaaatatatacatttggtgcggattcttcctgtaaggtgattcagaatttgccattggatccgcacccgaccgagcggctagggaagtttgttagtggcactcttaattggatagcgcctaaaatgggtgtaagtgatgagaaatgggtgatttgttcatttgattttgcgacggagactagtggtcaagtggtgctgccttatggagacagggacaatgtttgcaagcctgtgataaatgcggttcgtaactgtctttgggtttgtttctttgactctaggaaagctcattgggctgtgtggctgatgaaaaagtatggggttcaagattcgtggactaaattgatggtcattcctcgttttgttcaagaaaatagttggccctggaaattgatccctcatgatgagctctgcacttgtagagggtttccagcccttgaacccttgtgcatttcaggaaatggtattgctctgttcaaaactacagcttccaacatagttgtgtataattcaaatgatggtaggttggattttcttaggatttggggtgacctttggagttatctggaaagtttggtttcgccatcatgacattaaaatctcattcctattgcttattgttggcagcttgttgtgtttcttatttttcatgaccttggaaaagttctttaatttagtaagaatatggttttat

SEQ ID NO: 10071 - DNA, 185 bp, Glycine max
  Clone ID: PAT_MRT3847_109103C.1
gacgaatatcttatataatctaataatggcggagttctgatgttttatctattttcaataaggatattatatatgtagggctatgcaagtagcttaaaaatctgtagaagggcatgttcatggtgctaattatgttatgtatgcacgtgagtgcaattatgatggcggtggcaacgcttatgata

SEQ ID NO: 10072 - DNA, 396 bp, Glycine max
  Clone ID: PAT_MRT3847_109104C.1
acatcgtatcagcatttatactaagaaaggattgttcaagcgcacgagtgtcactatgtgcctctcgaaggtgtctactttcacacgtgcagagaggagagctagatactaacagaagatcactgtgagtctccgaatccatgctcacatcgagatatacattgttgctcgagtgtcaattagagaaatgacatggcttgcaagaaagggaatatatagcgctgcgcgcatattgaaccaggcataatgattgagtctcagatgagtttacgattctatgtttcaggtgaattctacgcgattcacaagaatcttgatgtagagagggccggaagaagggaacctatagcgacctgtggcactctgtgactatgacatgcctgttgagcttatctc

SEQ ID NO: 10073 - DNA, 192 bp, Glycine max
  Clone ID: PAT_MRT3847_109105C.1
ccacggggaaaacctgatcacacagaaattactctgaaagatgatcttcctgaccaggatatgactgatctttacaagacatagggaccttactgtccaactggtgaactgacaacggttccatttggctgctcacatcactactaataaggatgattctgagtatcttcttcaaaatcagcttgctgggat

SEQ ID NO: 10074 - DNA, 902 bp, Glycine max
  Clone ID: PAT_MRT3847_109106C.1
ggcgagtagctgtgtttcttctacgcctcactttctttcaattccaactcgtgtaagagataacagaagaatatccactttggtggcaatgctattcccttcttcttcttcttcatttccatttctgcttcttcctccagcactcctcaaatgcttctgtgcttccacttccactcagtcccttccaaccccttctgaaaagtgggaacctttcctcaagaaaaaggttgtaatgagagttggatatgttgggaccgattttagaggtctgcagatgcaacgagatgaacacagattatccactgttgagaaagaactggaaactgcgatctttacagccggtggcatgcgtgatagtaattttggggacttgaacaaagtgaaatggggccggagtagcagaactgataaaggagtgcactctctggcaacaatgatagcctttaagatggaaatccctgagaatgcatggaaaggtgatgactatggcattgtgcttgcaaaccgcattaactcttatcttcctaatactatcagagtttttagcatactgccttcaacgaagagatttgatcctagaagggagtgcaacttgcggaaatattcttatctcctccctgctgatataataggaatccagagtcattttagccaggatgaaattgattttcatattttggagttcaacagtatacttaatgtttttgagggagagcatcctttccataattatactgttcggtctaagtacaggaaaaaataccaagttaggcaatcatctgaaaatgatggcatgccagatagaataggatcatctagtttggcatcagcttgtgaatcagagagtgaagaaagtgatgatgatgatgatgatgattttgtgagtggcagaccaaccacat

SEQ ID NO: 10075 - DNA, 430 bp, Glycine max
  unsure (1)..(430): unsure at all n locations
  Clone ID: PAT_MRT3847_109107C.1
atattatgttgtgttgttgtgttttataattttcatatttattatattttgtcgcacactatagatgatgtgagcgttgagtttcagataatgtgagttgatccgtacggcacaccacagaaatatagagaatatcttttctattctacaggtatttatgttatttgagagaaacatctttgtggaaattttctcattcacacaccttcagaaattcagaagagataatattacccactcacaatattagatgggacacactttataacgattagtgtggagaagaggcagtgagttcagtgacacacccctttaagagagtgtgttgcagtgaaggatgcgacgtcaaggagtgcagaccctaccagcgngataataccttagaaggcagcctccttattttgaggaattgtgagggtgggagagaaga

SEQ ID NO: 10076 - DNA, 179 bp, Glycine max
  unsure (1)..(179): unsure at all n locations
  Clone ID: PAT_MRT3847_109108C.1
ccgcgggaattcaagaaccatgggactaacggtatctttcaatgatcagtaaaagcaatnaaggtgctaattcacttggggcatacaatcctgaaagccaagattgagtgttaagaaaaagacacacgttactgtaagagtcaaggccaccttctgtggataggtctttttagctttta

SEQ ID NO: 10077 - DNA, 502 bp, Glycine max
  Clone ID: PAT_MRT3847_109109C.1
ccacgcgtccgcgagatcatttaaattctttgtgggccgccattcgctctggcgtcctaaaagacaagaccctttggactaccgaatgactaaagctatgaagaactgaaatagtatgcaggaggatgacacgaaactgatcgacgtgctgccagcaactaatgcattgaagatactgaggcatagacataaagctagggggaagacatccattgtgatacaagcgcaagctaacgaaaaactcggcactcactgtctcaaaccatgcagcttaaatgtaacaactgtggaatacgataccatcagctacactgtgaatgaagtccaagtacaacacagagatccgttcacctgaggaggagatattgccatagcaactcatggctcatttgagaggtggatttagaggtccctagcacagtggaacactgctgggatggcctactcagactgttgaaagaggatcatctctgagagactgtttcactagtggatccctaca

SEQ ID NO: 10078 - DNA, 1632 bp, Glycine max
  Clone ID: PAT_MRT3847_10910C.1
aaatcaaatagtaatgtggttcacttttaagttttgccatgtaacctgtgcattctaaaatacttttgcactggttcacttttgatgtctccattaattgtttttcttaatctgacaaatattgcacatttagtaggttgtaaatggtcttctccaaagagaggattgggatacggcaataaagatgccccttggggtagttcctgcaggtacgggaaatggcatggcaaaatctcttcttgattcaattggtgatccttgtgaaagagcttatgccgttcttgccattatacgccacgcgtccgcatttcctaagtttagtagttactcgcattgtaatccttggcttatagcatttccctctctctcaaacgccaaaacccggttttaattatcgtcactgtttggcggttcggctatcgaaccgggcgagggggtgggccatcccagagcgaagccggatatggatccccagcagcgtccgttaatgtcggaccgggtcaccgttaacggctccgtcacgccgcttgctcttctcgccgacggccgtctatggtggtctgagggaatccaacggtgtttgtcgatcgaaaaggacgtcctcgggatcgttgccagtgggccctacataaaaatcaagagcctcgtggagacccgagacggatgctgcatcaccagcgcccctgcaagactcgttagaaacgacgtcgtctttatgccttcctccgaggaatctcacaggctctggtgccataaacttcgtgaattcattgattctctcggtcgtcctaagaggttgttggtttttgttaatccgtttggtgggaagaaatccgctacgaagattttcgctgaacaagtgaaacctctttttgaagatgctcatatccaaatcacagttcaagaaaccaagcaccagctccatgcaaaggaagttgctcgttcgctagatattactaaatacgatgggattgtttgtgttagtggagatggaattttggttgaggttagcttcattgccattacacttgttgcactatttgttatcatcatcttgatcgtcatcgtcatgttcgtaggtattaatacaagcatgtcatcataacatgtctcagatcacactcctctgttatatgtttaaactgtttattaaatactgacaggcagtaaacgaccgcttgatgtggctaccatcacataaggggaaaccagatttttcagtatattgatgctcgcatggggtaattactctcaccatgtactagattaatccaatgagatggtggcagatgtgctaaaacatctaggctaactgttcacaattttttctttctcttgatttatccagacttgggtttgcatatgattttgaccatgcaattcccttgacatattatatgatatccagcggaggtattattctatttcagatctggtggcagatattgacattgagtctgaaaagtaccggtggatgggaagtgcttggctagatttttatgttagtaatccattttataacttttacatgtttatttatgatgtttttctttcacttatatgtgtgtctcttatatggattattgttgcaattatcttctactcacttggtttgattgaaggaacgtgaat

SEQ ID NO: 10079 - DNA, 374 bp, Glycine max
  Clone ID: PAT_MRT3847_109110C.1
aacaaaaaaagggcccccattccccattaatttggcattaaagggcaaaaaaataccccaacccggcccaaaccctttaaacccctaaaatgggcccaaaggctggaaacccccccgggggaggccctaaaagggaaaaacccccccccccttatggggttttcattacccccaaaaaaccccccatttaaaaacaaaaaacccccccccagggggggggggacccaaatggccccggggggtaaaacaaaccccgttttttaaaaaaacggatctggtttggaagaacccctgtttcctggtttggaggggaggggtttaaatcccccttaaaaaaatttggccaaaaggggggaaaaaaaccgccaaaaagc

SEQ ID NO: 10080 - DNA, 3231 bp, Glycine max
  unsure (1)..(3231): unsure at all n locations
  Clone ID: PAT_MRT3847_109111C.1
aggtgctgaccccaaacccaatatccagaaatttttttctcactaaagccaaataaaagaaacggctgcgagaagacgacagaagggcgaagagagtgattcagtgtagggttttgtagaataagaagaaaattgttttgttgatgatggattctccagaaccttccaagaacaacaatggcagttcttcttctgcctccactctcaacaacaacaacaacaacgatgatgctccttcatcggaatcccctcaaattcaagaatccccctttgttaaattcgtaaagtctatgtttgcagttcattagatgccttgttatctgacacatattcaaacagggaaaccatattgatatttaacataaaaactgaacggaaagtgctttttcatttgatactgaaccagattaccaccccatcagtgttcttctaactttgtcaacaatctgagttcttgcgtaggcttctggctcaatggaaagtctacggcttccctcccacaaaattctatacagttcccattgacgttcttgtgttgagagtctaacaacttcagccaagaaaatacctaactcacaacgcttattcaagtcatcgccacattacattaatacacggggtctcgcctttcgactcagttctacaatgtatgcaactcagaagtttttggtatgaaactccgctgatctatcttcaaccgcagtgcttgacaaacctctttttattacgaatatcttaaacatttgcaagaaaatcggccaaaatgcaaccttaatatcagagtctttagaaatcctcataatgtcataacacaagcccttctgatcaacgcattgtatctgaagcagggtatgaactgggctcagtgagttatccacagtaacagtaggtgtcttcagtgttgtcatatcttggctgagaggatgcaaagacaacttgtctaacagctcagaactaaataactcttcagcaaaagctggtggaagagaagaaaacccctgcaaatgtccgtattcaggcccagccaactgaagttcactggagatacacctctctcctaaagcatccatcagatattcacatacataatcttgcctctttttggtgtgaagcaattccatcccatcagtgataaagaacatgtctaacacccttccatctggggttggcatcgctttgactctctgaataataagttcaaggttgcacaggatttcattaatatcatgtagcaatcctttttgatcaacacaccaaaccttcaacaggtaaatcggaggcggtgaaggactagtggagtgctgattgaagtgataggaaagcaaacatgaagggcaagctgaaaggagccgagtcttcaaactctcccaatcaacgttgagcgatgctggatgtgcaagaacccaatagacgatgtagcaccatcttccatccgtggaaatatcagcacgggtaatgcggagaccgaactcgaggatgattctgcaaagatcacagccgagaccagccttgtcggggcaattgacggtgacgatgcagggctcattgtgatccttcccttgctggatcacaacgacgtcgtcccatggaatacccatgactttgaagtgtggtgggtttaagggacgatggccaccgggaagaacattgccggagcgcaaaatggtggctccggacaacggggttggtgactgggtgaggaacaaaatgaaacatttgctcccaagattgttcagcctaccactgatatttcttcacatatggatgatgaaaatctgacaacaccgtcatcggcaaggcacaaaagaggttgcaattgcaaaaggtcaatgtgtctgaaaaaatattgtgaatgttatcaggctaatgttggatgctctagtggatgccgatgtgagggatgtaagaatgtccatggcaagaaagaagattatgttgcatttggacatacttcgagtaaagaaagggtgagcagtattgttgaagaaggatcagactgcacttttcacaataaactggaaatggtggctagcaagactgtttatgatctacactgcctctcacctataacgccatcattgcaatgttctgaccaaggcaaggaggatgctaaatccagagttatttctggaaactatctaccatcccctgaatctgatgtcaatatgttggcatcttgtacaaactacactaagtcttctgaaaatttgcatggcagtgaagcacttctggacacaaatgagatgttgggaaataccccctatgattcccaaattgaatgcagcgatgctgccttacttcagcttactcctctgcctaatcctgagcagtctggcacttcatcattctcatctgtaccaaatgagtgtgcaaagattactcactccagactctcccatggatgtattcgccagttacctggcggttctcttcgttggcgtagttctcccgcttaccccgagcactagagtaggtgaagcacaatatttacagtgttctgaatcagatagcaagctctttgacattctagaaaatgaaacccctgatatactgaaggaagcttcaactcctatgacgtctgtcaaagtaaattccccaacccaaaaacgagtttctcctccccagagttgtcatattgggattggatcaagctcctctggaggattgagaagtggccggaaatttatattgaaagctgtacctactttcccttcattgtctccttgcattaattccaaaagcaatggcgatgaggattcttgtaacagtccgagcaagtcacctctcaaagctaatgagtgccctcaacgtgagagttaacaagcagaagattgtgtaatctgttgccgacatcttgtctgtaaaggttgccgggggtgacttattatgtgaacaatcaacgcgaaattgaagttatggctgcatcttcctccaatgtctattcctttacattcttagcaatttggaattttagtttagtagttttttcttggaacagattcttactcttgtttttttctaccctctcgtggtatgaaatgctattgcacaatcttaaatggcgtctcatccttcaaggtaagcttgcttttttaattaggttaaataaataaaacaccactcattgagtacaaaattgaaaatatacaaaaaaaataaaagatttttacggacgcgtgggcgtaaacaagggcgcccgcgtgggcggncgcgtgggcggaagcgagtcgg

SEQ ID NO: 10081 - DNA, 1819 bp, Glycine max
  Clone ID: PAT_MRT3847_109112C.1
ggtccacggcaactgcaactacaacaacattcattcattcacagctgtcacgccgtgaacggaaaatggcaacggcgagacgcagtttcccgcctatcaccgaatgcaacggaacgacgccgtgcgagtctgtggccgccgacctcgacggtacgctcctcatctcccgtagctcgttcccgtacttcatgctcgtcgccgtcgaagccggcagcctcctccgcggcctcatcctcctcctctcccttccgttcgtcatcatcgcctacctcttcatctccgaatccctcggcatccagatcctcatcttcatctccttctccggcctcaagatccgcgacatcgaactcgtctcacgcgcagtcctccctaggttttatgctgcggatgtgaggaaggagagcttcgagctgttcgaccggtgcaagaggaaggtcgtggtgacggcgaatccgacgctgatggtggagccgttcgtgaaggactttctcggcggagacaaggttctaggcacggagatcgaggtgaatccgaagacgaagaaggccaccggtttcgtgaagaagcctgccgtgctcgtcggaaagtggaagcgtctcgcggttttcgagatagttcggcgatgaatcgccgtattttgtacggggagaacgcctttctgtttttgacttcatgtttatttgcaaggagggttacattgtgcctgtgagcaaatcagcaaagatagaccgacattggcgtctgatgagcagaatgatcttccacgacggccgtttcgtgcagcaggccagacccactgaacgctctcatcaccttcacgtggctccccttcggcttcatcctctccatcataagggtctacttcaaccttcctctcccagaacgcattgtccgctacacctacgagatgctcggcatcaacctcgtcatccgcggccaccgccctcctccgccttcccccggcacccccggcaacctctacgtctgcaaccaccgcaccgctctcgaccccatcgtcatcgccattgccctcggccgcaaggtctcctgcgtcacctacagcgtcagcaagctctcccgcttcctttcccccatccctgccgtcgccctcagccgcgaccgcgccgccgacgccgcccgaatcaaggagctcctccagaggggcgacctcgtcgtctgcccggagggcacaacgtgccgtgaaccctttttacttcgcttcagtgcactcttcgctgagctaagtgataggatcgtgcctgttgctgtgaactgcaagcagaacatgttctttggaaccaccgttcgtggcgtcaagttctgggacccttacttcttcttcatgaaccctaggcctgtgtacgaggttaccttccttgatcctttgccggaggagatgtcggttaaggctggggggaagtcgtccattgaggtggccaaccacgtgcagaaggtgctgggggatgtgttagggtttgagtgcaccgggttgactaggaaggataagtatatgttgttgggtgggaatgatgggaaggtggaatctctttatggtgccaagaagtgagatggtgaatcaggggttgctttggtttgattgcatgttttgggagttgattgatataagaagaagaaaaaagtaaaaactaatttcattttttcaagtatggttgatgggttaagataaatcaaaaggttagctagtaagcaaatagcaattggtattattttttgtgcaccctttttgagatggggttttgttatggactataactaagtgctggtttcacattagaaaaattaattcttgatctataaa

SEQ ID NO: 10082 - DNA, 653 bp, Glycine max
  unsure (1)..(653): unsure at all n locations
  Clone ID: PAT_MRT3847_109113C.1
acggcgtatttgatgagaaccgaacgtctatctgtagaagatgcccttgaatcgttgaggcagagctgtgaatttgtttgtcccaatgatggttttttagagcagttgaaaatgttcgaggggatgggttttaaggttgatcactccagccctatatacaagcgctttcgtctaaaattactatgtatggcttcatcccacaggcttttttgttgtagaggacttgtggtacatcttatcattcttcttagtttcatggtgctatggcacataattgagagacagtaatgatttgttataacactaccgatgtgagaaaatataggtgggtctaaattattttggggtgtatgatatacccctcttactttgtcgcatgtcatcactggaatattgttatctttatttttcatatgttaactttatgtctctttttggagcttatgcggaatattgaagacaaggtcaaatatcttgtttatttacatggcatacttgtgttgtgagtgattgctgccagattatttaaccaatcaatttgttttctcgggccacggctggcttagtggctttatgttatttttccaacttagacttttgtctgtaaaacaatttccattcttttaaaactacctncaccttaaattagttgg

SEQ ID NO: 10083 - DNA, 296 bp, Glycine max
  Clone ID: PAT_MRT3847_109114C.1
atacgaaaacaatacactcaagtttggagggtgcaaaatatatataatacttcaacggtgctatttcggattccaagttggtgtattctccatttaccagggaactacacatcaatgtaccaggtgtcaagctctggcacctaatcaaggtttatctttctttccccacattataaagtgtttgacatagcctagggggtattaaatagtaagggcttttgatttgccacaccccatacgtgagctactcacaactcacaaccatgcaagtttggacacgggtgaaaccacataac

SEQ ID NO: 10084 - DNA, 298 bp, Glycine max
  Clone ID: PAT_MRT3847_109115C.1
gacattcctagggctggtctttaaagattaattaaaatggtaacttgtgaactgtgtattgtgtaatggaaacattgaacttagacatcagtaccataaagattgtagagtctcgaactatatatcacattggtagaggagttttctgctgtgaatactgactttgtaaagattcagaaaaacgtggaatgatctatataagatgcggttgcacctacagacatgtgtacagaaaacaaacactacacgctgagatgaacccaattttaaaactgaataaccaatttattgatgactt

SEQ ID NO: 10085 - DNA, 535 bp, Glycine max
  Clone ID: PAT_MRT3847_109116C.1
ttggctttttttgtgcacctgtagatgtgtaggagtgccgccgtgcttgggggggggggggggggggggggcacgacaaccaacgtcgtggaggtgcgagtggggattagaccgactagatataatacaagacaagcaacgtgaggaggtgcgagtggggattaacggcggcagtagcgggattaaaccaacacggtttgggcttagaagtgtgatttgacagcgaggacaactagaacaaaagacacacacgttaaaaaagaacactgtagcaacaaatacgtggcagcagaacaagttagcttacgaagcaccggttacagtaaaaaatctagtaaaaaagtgtgggcgcttgccgaaagtaactggcacgaacagcgttagattagaatacaacaatgtttgggcgtcttgttgggccagaccttagaaagtgggttatatggcgctacagagggtagtgttgcaaaaattgtgagtacaattaagctatgcaataagccaaggactaataagaccacttctactgacccgt

SEQ ID NO: 10086 - DNA, 265 bp, Glycine max
  Clone ID: PAT_MRT3847_109117C.1
aaagattaaatggtctgggttaaaaaaaccacatgtaggatatatatgatctaaaattgttctgttaatgtaaaataacaaaaaatttcaccccaccgaaagaattttaaaatggaaacaagaaatttctcataccttatgggattgggccccaaagtcactctatataaagagtcgttgtctgcaaatccctcgattttttcgtagcgccatgccatcatcatcattataatagagttggtattactggctcatgaaaatacta

SEQ ID NO: 10087 - DNA, 716 bp, Glycine max
  unsure (1)..(716): unsure at all n locations
  Clone ID: PAT_MRT3847_109118C.1
ccacgcgtccggcattatccactatgtaagatcagttaaatgatacacatacacaacaccatttagcacagttaaaaattaaagtttcagaaatataaaaagaaaatattgtttctccaaacaagataatttgactagcatgctacctttgtgtttgctgtagtgcctcaactctggattttagcttcaggtactcttggtagcgcctctgcacaagggcatggggtgacatatgttagactttgccaaaagttactaatccatgttattggactttgacagactgcatttactagcagacaaataagtcatatacacttgagaaaaggaaataaaaatgagtatttaagaacacaacttaaatgtgaagtttaaagaatcaagtttcttttaataaaataaattcaatgtaatggattagaggaaagttttgactcttttangtttaaaatgggttagttaaggtcccgttttaattctaaacttttttatcaaaataaataaattaagatgataaaacataatactccaaccattgaacataacattttcaatgtaatatctatagtgctttgagaaaatattgttttataaataattacaaaaatatcataatcattattacttttgttntatttttaaaatttatttataacacgaaaaaaataattatttcacttttactttattaacattttttttcgtttctatcatca

SEQ ID NO: 10088 - DNA, 324 bp, Glycine max
  Clone ID: PAT_MRT3847_109119C.1
acgaggtgatgtatgtaatgtacattaggaaaagagatttttattgtacgctaacgtacacaccctgagaagtgatttctttataaaaaagagtaaatattgaatttaatttcttttatatatttaccgtaaaaaaaacccttaatcaaaaaagattttgaattagtcatcatatattttaaattttcccgtctcttaagctggcgtgctacgtctccatgtttatgcaataattttatggcaacgagtttacatttaccaatatataccttctttcaatataatctcaaattaataattcagttttttttattatttgcagtc

SEQ ID NO: 10089 - DNA, 192 bp, Glycine max
  unsure (1)..(192): unsure at all n locations
  Clone ID: PAT_MRT3847_10911C.1
tgatcaattgntggntaacttgacgtgagangcaaaaacaagcnnangaaatnctacaagaattagagggcttnggaagatctttnncanctggcaagcagagtcttgcaggagtnacanatgaccgtgacangcttangtcngtatntgatgnaaangacaaggnacttcagggctgaaattcnagngana

SEQ ID NO: 10090 - DNA, 500 bp, Glycine max
  Clone ID: PAT_MRT3847_109120C.1
gcccacatcaactaaaaataaagtcaagtgaggggcaaccctcaccccttaagctaatttttggggttgagttagatctaaactcacattctataccagggcttgggtgtgagggatgtgttaggaaaaatccaaatgtaattcttttgtggataataaccgaaaattttttgtaagaaattctatgcctaaatttctagtggatttcaacttcgtaggtaaattttatgcagattttgaaacttgtaggtaactttcttgtggatttaaaatttgaaagaaattttgcaagataatttttctgagaattttaaaataaattaaaatatgtttttcgtccttataaatatgaaaaattcaaaattcatccctgggaaattttcagcatgttttttgactggaagaaggtttgaacatttgaacctatgtgtattgtttttttgtcattgattatataaaaaaatatcatttatatcaattatatgtataattgaaataaa

SEQ ID NO: 10091 - DNA, 554 bp, Glycine max
  Clone ID: PAT_MRT3847_109121C.1
ggaagttttttcccaactaaaccagcaatcccaatttcagtttggacaaggcattgataccgttacctaatatttatactcttgaatataagtatcctaagatttagaaattttatttgaccctatccatcatcatgatcacatatgttaaacatttcactatcccagcagttgtacaaacaaaagtcactatcttaagtttctacacatcttttaccaatccataacatttggctcatttaggagagagagaaacttcagggatttaatgaggaaagatgcaactagtagcatcttttggtaaaaccctcctacaaacagtatgaaccaagattgatttatgagctagaggactacatacatgaaaatacaatccttgaagcgaaaaataatttattcaatttttacaaggttctgttcttgtcattttttcattacataatgctgaaagacaatgactacaaatattcatttgttcagcattactttgagaagagatttgataaagggaaagaagctattcgagctatagacacactacaaaaatttaaaca

SEQ ID NO: 10092 - DNA, 115 bp, Glycine max
  unsure (1)..(115): unsure at all n locations
  Clone ID: PAT_MRT3847_109122C.1
tgcttatgaaaaggagagatttgntgagtcaaaaaaagagctggatggtctactctctgatgaatctttagagagtgtcccttttcttgtgcttgggaagaagatagatattcca

SEQ ID NO: 10093 - DNA, 319 bp, Glycine max
  unsure (1)..(319): unsure at all n locations
  Clone ID: PAT_MRT3847_109123C.1
tcgatacacgtcttcttctatgattcttgctctctgtctgtctctgttgcttgtctctcatctgctgtacgtagcaatcgatgtgcctctgagtacgcagtggctatctgttatgctatagtgtagtgctttccgggccactgggttgtgtgccatgtcgcccagtcaaagaatgccttttgtgcgtcgaatgggtcgcgtgctactgctgaccctttgccgtgctggttttgagacctcagcaaccacctacattgccggtgctgagattatgttgctatgcaacctncaggttagcaacgaggttgtgtacacaacg

SEQ ID NO: 10094 - DNA, 260 bp, Glycine max
  Clone ID: PAT_MRT3847_109124C.1
tccaaatcatatgatttctggtgctcttttgtgtttacatatgctacgttactgtcctagattttttttgagctagttttgtttataaatgttagtgggagattcaaactgacaacctttcttcgttcccttttgccttcacctttaaactctctttcaaccacttggccaactttatatttccatgttattgtcttagtgcagacttaatttaccatttttttctttttttttttacctagcactaaatatatgactat

SEQ ID NO: 10095 - DNA, 428 bp, Glycine max
  Clone ID: PAT_MRT3847_109125C.1
agtgggggggggacaaaaaaaaaaaactttttttttttaaagttgggggtgctttaaaatttagccctggttaattttttttttttttccagggcaggttcgcccattggatttaattttttttggccccttttaaaaatttttgggttgggctttttgaattccccacaaccaatcaatttttttttggggggggagggggtttttcccccttttttttaaaaaaaatgtttttttaaaattttttaaaaaaacaaaaaggcctttttaaaacggggtttaacaggcctttttaagaacattgggggttaaaaaaaaaaggggggtgggtttcccagtttggattttgagtataaagaggggtggaaattttcgggtggggttaaattggccggtttttaccctttaaaatatgtccgctttttttt

SEQ ID NO: 10096 - DNA, 249 bp, Glycine max
  unsure (1)..(249): unsure at all n locations
  Clone ID: PAT_MRT3847_109126C.1
caaatattttttcacttgctctccatcttttttcagttcatcagnggccaggtaggccatgggangggctccatgttgtgacaaatccaatgtgaaaagagggccttggtctcctgatgaagatgccaccctcaaaaactacnttgagaaacatggcacaggtggtaactggatagctctccccaaaaaagcaggccttaagcgttgtgggaagagctgtcgtctaagatggctaaactatctcaggcc

SEQ ID NO: 10097 - DNA, 354 bp, Glycine max
  Clone ID: PAT_MRT3847_109127C.1
gatttccgggtagaccacccgtccgagaaactaaattaacaaacacagttgcttttttttctttccagtcccaactcaaaatggcatggggggtggaggttccagtttttgggttcatcaaggagccagaccatgttgtagcctattaaaagggcatttccaatgattcaggtcatgaagctggaagggaccataacatttttccagagtcttatgaacaaatcaatgagactcctgaacattattagttcaaaggaaagggcaaaggattatggggggaaggaaggtccaccagaaatttcgtgtaaggcctctgatgtccctaaggttaaaaattgggagggtaagttaacc

SEQ ID NO: 10098 - DNA, 227 bp, Glycine max
  Clone ID: PAT_MRT3847_109128C.1
cggggcggggtattattttttctaaaatgccctgtagttaggctcattagagactggcggaaagatggaaatagagggatactgctaggaaattgtcattctaatacaaatccacacatgaaactttttggcaaaatggatggtagggccaaggggggaatatgggaacataaactgaaatcaatctgagttgaacttatagtgggaggaaccgtgtgtagacaaat

SEQ ID NO: 10099 - DNA, 218 bp, Glycine max
  unsure (1)..(218): unsure at all n locations
  Clone ID: PAT_MRT3847_109129C.1
ccggaccgctgagtcccgtcgacaccacccgtncgcccacgcgtncgcccacgcgtccgcttggctatttcctttgcatgcaactgaaggcaaggaatgaaagagtaacaatcaatgcagtgcatccaggcattgtgaagacaggaattattagagctcataagggcttaataacagattccctattttttatcgcatcaaagttactcaaaacgaca

SEQ ID NO: 10100 - DNA, 214 bp, Glycine max
  Clone ID: PAT_MRT3847_10912C.1
attagttgtatgagtggggaggagagagaaaacactggcccccacgcgggaaaaaagaatggtcacccgaggggtgactacaaaagaagaccaggggggctcaaaaagaagcccctaagaaagagggaagcgaagggaccgatagaaggcccagaaaaagtgaggaatgcgaaagctggcaaaaaagctggggccacggccgaaaacaacaagc

SEQ ID NO: 10101 - DNA, 289 bp, Glycine max
  Clone ID: PAT_MRT3847_109130C.1
tacggctgcgagaaagacgacagaaggagaagaagaagaaggatcatggccatgagcatggccatgacagcagctgcagcagtggcagtgattacactgctgcatcacctatacatttaaaagggttatgggaccatagtagcgagggctgtgccttaatttctctctcagctctctgtctacttttctctctgtctctcgctcgcgtctctccctgagcggctgtatatatcggagtcaggcacccgtgagtgagacgttgtgcgtgtatttgggctataattcgagt

SEQ ID NO: 10102 - DNA, 421 bp, Glycine max
  Clone ID: PAT_MRT3847_109131C.1
atgcgcgcgtacgtaacctcaggcttccgctcgggcatattaccatcgtatatttatcgagtattatatgcagcagcatgccaatgtcttatgaatctatggagttttcacttacttgctgatgagaggcacctacacatgtattcatgaacggccatagttttgagaccggtcttactgcgaccttgataaaaagaatttgacaagctacagaaatattgacaacatggatgatcttcgacctggtgccatatatcgtggtgtgagctgaaagcatgtacatggcgtggcccatgtatcagctaccatacaatgtctggagaactgtggtgatgactgttcacatctatgatgtatgcgcctcactaaccttgaattgtattccgtttaagatttgataatgccggttatagctttatat

SEQ ID NO: 10103 - DNA, 163 bp, Glycine max
  Clone ID: PAT_MRT3847_109132C.1
gtttgtacatcttttggtttggtcgattgtacagccttttcagatttgcatgggttgcttcatagaacaacgtgatttgcggattgctgtaaagggcattattaggccataatctaatggacaagggggtgccttctaacctctactacaatgatggttcatt

SEQ ID NO: 10104 - DNA, 197 bp, Glycine max
  Clone ID: PAT_MRT3847_109133C.1
ttgagaggtgagacctacgttgcttactaaattgcgctctgaaccaggatcgagaggaagaatgagatcctccttacctactacagactctgtggtacgatgtaagatgcgtgagtgcgtttacctgtaaaaattacaataggggagttgccagcagatgtaattgtgcttctacacaaggagcacgcgaaccactg

SEQ ID NO: 10105 - DNA, 214 bp, Glycine max
  Clone ID: PAT_MRT3847_109134C.1
gcggtcctattgtgttttaaatccacaaaatcggggtgtgtcaaataggtggatgggtataactgactttcccccagggcactttgcgaagtgttcagagaatgcctctttctatagggggaggtgctgtggcgaatactgctattttcatgaatatgccgtctgctgccctttcaaagtggggatttttggctggagacttttcattggttgt

SEQ ID NO: 10106 - DNA, 507 bp, Glycine max
  Clone ID: PAT_MRT3847_109135C.1
actctgtaacgatgcaacaacatcatgcagtttataattgcgatgccctttgtttacaaacatagccctgttccaagagtttgtatcaacaccaacaatcaattagcaagtatataacttacagtaccaagtgagtgagtatttcccaccatttattttaacaattgaatatggaaagtaaaatacttccacattacgtaatttcccatatgatgaatttaaaaattacaatcaataaagacgatagaattattcagagaaccagtagtgtatccactcgaattgataaggcctttgttgtattgctccttgacactgctcgagaaagcatggctaacaatttcacctacagtaccgtgtcccttctggtgacttggttgagctttcaatggtgaatcggattctccactttttttgctagtgctagcctttgttccattgttattacaatgagaacaagcactacgcgaccatattccagttcgatgcgttttcgcaagaacctta

SEQ ID NO: 10107 - DNA, 413 bp, Glycine max
  Clone ID: PAT_MRT3847_109136C.1
gaaagttcatccacctgtcacaaagccatagtagctgatgttttttaattgggcacagcgccctgtggtttccacatgaagaaatgtcctattgctatccatgttttcgccgaagctatagacttattgtcaccctctaatcctttatgaatacaaaagcccttgttctagtatcgtaaccttattaaggctgaggatcttatgacccacctatatattcaatctataatacctacgaatggaatggatgaaactctagctgaatgctgtactgcttcgtctggactgagattgtataccagatgctctcaagcatttccttcccattgcatcaaacgacaatgctcatagtgcacaaaagagtgtgcaggcttctgccataaactcacttgttgcgaaatgcctgacattgc

SEQ ID NO: 10108 - DNA, 454 bp, Glycine max
  unsure (1)..(454): unsure at all n locations
  Clone ID: PAT_MRT3847_109137C.1
gttattaatcagaattcttcctcaccacaattttgtggcagagtttgatcttttggttgccagcacaagtttctagaggggagatttctattgtccacatacaaaggggggatgggagagcttcttttgagctaattaatgtttcattatatctttggttgctgtaggggaattcctcatcctcctattctgttcttttctatcatctaatgaactttttttgttggatattgtatctatggccttttgcaatgggcatattttaggatctacataattatggtaattagacaattaggatatctataattaatctcatttattacccatcttttataataactctctctgttgtatacatggacacttcgaattcaattgtctattggtttcttttcctctcaatactatngagttttaattcgaatattaataagatgctgcatacatgcat

SEQ ID NO: 10109 - DNA, 894 bp, Glycine max
  unsure (1)..(894): unsure at all n locations
  Clone ID: PAT_MRT3847_109138C.1
ggttgcgctagtttgtagtctgctgcgattgcaattttcaagttgccgacgttttgaggagaatcaaaagagcaaaagcaaaggcaaatgatcctaaagagactgttactgctactaaaacccttaagtgtatcttcaccaccttcccacatcaaccctcagatcttacagttcttggagaataggagaaaggtgcaccatgatgcaataaacttttgtcaagccattctgcaaaaaaagtcaattgaatggaaagctgtgcaccgtaacaatttgtcacagcccatcaatgatgttgacctagttgttacagttggtggtgatggaactcttctgcaggccagccatttaatggatgacaaaattcctgttcttggagtgaattctgaccctacacagattgatgaggtggaagagttcggcagtgagtttgatgctcacagaagcacgggccatctttgtgctgctactgttgaaaactttgaacaagtgagattaattcttttctgcctgtggaggaaatactaacagtaatgatttttttcttccttgctactccttcaggtgtggcagtaagcatgtgttgaatgaaagtttgaatatgcagtaacttgaaatgttaaaatttgatgacactattgttaatttatcataatgatgaaccagtaattacttctgtgaaaccaatttaatccttatattgtgacttacctgtcaaagccagtttagcatggaatagagataggactgatttgagaggttcagaatgtacttctaatcaatggtgagaaatgagaaaaccttcatagatgtgtatncagcatccatttcccttctttataaatacttttnttggctactcaactttgatgcaggtttcatttttgttacaaa

SEQ ID NO: 10110 - DNA, 304 bp, Glycine max
  Clone ID: PAT_MRT3847_109139C.1
gtacacatcgaggaagaaaattcacaaagattaagatgctgagccatctgaatttgaggaaccagttggacaggcatagtctgatctagaaaattccaacaatgagctgatatagagatctgaatagatttatacataaactcaactgtgcaaattgatgtttataggcatccgaaaggctgtgattatccatgtccgctacagactatggattagattccggaagattcatgtgaagctggtgagaaatcctgtatatatagtgtagggaaaaaatgttatcttgattagcgcgaggaggttg

SEQ ID NO: 10111 - DNA, 283 bp, Glycine max
  Clone ID: PAT_MRT3847_10913C.1
acgcgcgcgttgcttctctctaagtctgtagatggcttcacgcaggctcggatcttctctgattcgagcctcccttcgtagatctcaatcgaagccctcaaatgccgcatggacatggaggctcacgtcatccaaccgagcctcaccgcacggatacttgctgaaccgcgtcggcgagtacgccaccgccggggttgcagctaccgctcctccctcagctcgagatccagagaagaaggagacatgacagcgagcggcaagatcacgcgatgaagtcaccggg

SEQ ID NO: 10112 - DNA, 248 bp, Glycine max
  Clone ID: PAT_MRT3847_109140C.1
atgcccttttttttctttttttgtttggatttttgtttttattttcatcttttgttttttttacttttttgttcactaaaaccagcgttattccatgcccaaaggctttcattgataaacaagaggagactatgtaagcccaagctgaagccgcccataaaaaaaagctagattcctatgggccatagccccacgatgttttgaaccaactcaacaaacatgttcttatggcaccggtaaactggcca

SEQ ID NO: 10113 - DNA, 429 bp, Glycine max
  unsure (1)..(429): unsure at all n locations
  Clone ID: PAT_MRT3847_109141C.1
gagaacttaaacctcagagtcccagcaggcaagagtctggcagtagtggggcaaagtggttcaggaaaaagcacagtgatttctttggtaatgagattttatgaccccgattcggggttagtcctggtagatgaatgtgatatcaaaaacctaaacctgagatccttaaggctgagaataggattggttcagcaagaacctgctttgttctctaccacagtttatgaaaacatcaagtatggaaaagaggaggcatcagaaatagaggtaatgaaggcagccaaagcagcaaatgctcatgaattcatcagcagaatgccagaagggtacaaaaccgaggttggtgagagaggggtgcagntgtcaggaggacaaaaacaaagagtggcaattgctagagctatcctgaaagatccatccattcttttg

SEQ ID NO: 10114 - DNA, 1934 bp, Glycine max
  Clone ID: PAT_MRT3847_109142C.1
gaaagagcgagaagacgacagaagggggttttgaacttggtttttttttggtgtttcggtgtctctcatattaataggttgttcctacggctgctgcctccatcttcaccttgtttctcagcagaaactactgatctacctctccatcacccttctctacacaggaaatagtatcttcgtttcatcaatatgtttggttcatccggcatggcacaggaatctggtatgttcatggttaaccaaacaattggcagtgttttgtgctgcaaatgtggaattccaatgcaaccaaatgctgctaatatgtgtgtcaagtgtctgcgctcggaagttgatattacagaaggactgctgaagcgtcttgtgctggtgcattgccctgagtgtgagagttacttgcagccaccaagaagttgggtcaagctgcagctggaatcaaaggagttgctgacattttgcttgaagaaattgcagaagaatttgaattcgaataaagtgaggttggtgcatgccgagtttatttggactgagccccattccagaagggtaaaagtcaaggtcaaggttcagaaggaggttctgaatggagcaatacttgaacagtcttatcctgtagagtatgttcaacaagagcatatgtgtgaatcctgttctagggtccaggctaatcctgaccagtgggttgcttctgtgcaactcaggcaacacgtttctcacaggcgcactttcttttatttggagcagctgattctgaagcatggtgctgctgccactgctataagaatcaagcagatggaacaaggtattgacttctttttctctaatcgaagtcatggagtcaaatttgtggagtttatagggaaagtttctccggtaaggagccgccacgataagcagcttgtttctcatgatccaaagagtaataactacaactacaaatatacattttctgttgaaatcagccctatttgccgtgaggatttaatctgtctgcctcctagagttgctgttagtttgggaaatattggtccacttgtgatttgcaccaaggttaccaacagcattgctttgctcgatccatttaccttgagacactgtttcatagatgctgatcagtactggagaacatcctttaagtcgttacttactagcagacaattggtggaatatatagtgctggatgtggagactgtttcatctgaggtcactattggtggcacgaaatatcgtttagcagatgctcaggtggctcgtgtttcagattttggaaagaacgacacgatatttaacatcaagactcatcttggccatcttctaaatcctggtgattatgctcttggttatgatctgtatggggctaatagtaatgacatggaattggacaagtacaaaggacacattcctgaagctattttaataaagaagagttatgaagagaagcaccaaaagaagcgtgggaagcctcgttcatggaagcttaaatcacttgagatggaggttgatgataagggaagagttgatgaagataaaatggtctcagaatatgaacaattcattcaagatctggaagaaaaccctgaaatgaggttcaacatatcattgtaccgaaataaagagtacaagccatctgatggtgatgaatcttctgttccattggaggagttgttggctgatcttgatctgagtgagcatgaagatgaagaggataacatgacggaatgaacaaaagcttcttctaccttgattagtattttatggaattttggctttttgttcgtgtcaaaggttttcttttccctttcccatttatgttgtgttaattggcaatctctgatggtttgtttattgaaagaatgataagatggtaattttgcagactgtagtaacaatacttataaatagcttgtgttaccattcttttatcagcttgcctg

SEQ ID NO: 10115 - DNA, 738 bp, Glycine max
  Clone ID: PAT_MRT3847_109143C.1
tcatgattttgacaaagaagccaaagtgggtgaatacttcacacttcaataagctattggttgagcccctagccattgctgaatattatgggaaggggatgcatagaaccaagggcccttacatgcagcatggtagagagagaagatatgagatttttgataggtggtggaaggataaaacggttacttctggtagagaagaaaccaaggagaggggccaatttgctagtttgacccaagattcatgcttttgggccagagtggaggaagcaagggactggtttaattgtgttagaagcgagaaagcccctaacaagttggctctattgtgggataagattgaaaattttgagaaatatgccatagatttaattgaaaataaggaagtgtctggtgatgttctctttaagaattcaagttacagtatatgggtggaggatttaagagaattgaaacaactgaaagctaaggtgcaaaggtttcctcgtcagtttaccggttttctagatggggaagtagttccttagtatgtaatttggaaccaataaccttaactcattgtaagtgtagtatgtataagaactgcttccttctgcaaaatatctcgttttgcttgagttataactttttgtcgctttagaattttacttgaatacttatatagttatatgagagtagggctaaagtgaatcattaaaatattaatatcactatcaaatacaacttgtcgtctctaat

SEQ ID NO: 10116 - DNA, 1502 bp, Glycine max
  unsure (1)..(1502): unsure at all n locations
  Clone ID: PAT_MRT3847_109144C.1
gaggcaatgaagcaaccttttagccagagtgaagtgaagtgcttgatgatccagcttttagaaggtgtgaagtatcttcacgacaactgggtgcttcatagggatttgaagacttcaaaccttcttctaaataataggggtgagctcaaaatttgtgattttggcttggctcgtcagtatgggagtcctttaaagccatacacacacctggtggtaactctttggtacagggcacctgaacttcttctgggggcaaaacagtattcaacagccattgacatgtggtctttaggttgtataatggctgagctattgtctaaggaaccactgtttaatgggagaacagagtttgatcaacttgacaagattttccggattcttggcacaccaaatgaaacaatttgngcctgggttctccaaattacctggagtcaagggtcaattttgtcaaacaccagtacaatctcctgcgtaaaaagtttcctgccacatcattcactggatctcctgttctttctgattctggatttgattntgttgaacaagcttctaacttatgaccctgagaagcggatcactgccgaagatgctctaaatcatgaagggttccgtgaagttcctctccccaaaagtaaagaattcatgcctacatttcctgctcaactgctcaggacaggcgtgtgcggagaatatacaagagtccggatcctttaaaggagcagcgtcggaaggagttgcagcagggtgaaccagggactggtgggatttttggctaagaatggtgcttacaacactcccctgaatggttcagtgtataaggtgagggtatgccctgaatggaagttggaagcattgtttgttaaacgatcactcgtgctgttttttagcaggaacttgttggtttggtggagatgtattcttttacctcctgggaaccagattatttcaggttaacattcttgatgcttgatcattatatagaaatgcatctggggcaaggcttgctgctcaaggtgtggcattattggcttaggaattgtcagtgtcagctgaaactttgtaacatatccattggcatattgtataaacacattttatctggttttgagtattaaagcactatggattttctagcagctattttctttcttttttaatattcaccttgtgcttgcaagagacggttggtgtgaagtggaagaggaccttctgtgcatcttaccaaagaaattgagtgacattatgcattgaaagtatcaaatatcaaagcaagcaggttgaggaggttactggtatatcgtaaagtatagaacttcaattagttgttccttcagtctctctagagctgggagatggggttgctaagaggtgtaaagcatccacttctcattaagcatatcattcactggatgggcgatgatgcagtaagcataagctgtattctctcccccctctttcaatagtgttagggggaagatggcgatgatgattgacagtgattg

SEQ ID NO: 10117 - DNA, 298 bp, Glycine max
  unsure (1)..(298): unsure at all n locations
  Clone ID: PAT_MRT3847_109145C.1
cactggctgacaagctctgaacttattttagtcacaatatgaaaaaggttatcttccctccacaggtgtgcttattctacctagagggctggattttattgtgaggacgacagctgccactgaatctgtgattgtcacccttagatgggctgacttgaggagccctacctcagtagaaatcctatatcctgagtatggaacgcaagaggctactatgnctcatactagtcttgcgtctatcctaggttgtctcctattactactgaccatgcatatgattggatggaccagatgttac

SEQ ID NO: 10118 - DNA, 283 bp, Glycine max
  Clone ID: PAT_MRT3847_109146C.1
ttatgctgtaccaatgattgccatagacaatgatgatggcttctcttatacagcaatcagaggtcctaccattgacctcttatatcctaacgcacaggccttgaatcagatatcaaccaattttattgctatcctggtgctggagagcattaaccttatctgccatactagatataacgtcctcaagatcatgatcgagttgaatgactctcccgatgtgatgttgcaaatgccacctctgcctgtgaaggtgaatgaagagctagcctcttccttactcgct

SEQ ID NO: 10119 - DNA, 431 bp, Glycine max
  unsure (1)..(431): unsure at all n locations
  Clone ID: PAT_MRT3847_109147C.1
ntccgggccagtttcgtcccttacgatcccaattctgtgccctagcaatccaacacgcgcgagtgagtcagtgttattatagcgcanacaagcaaggaatcgggcccgcgcagtagaaactcgaaaggaatcagtgtttgtgtgtttcgcatattcttctccgttttagatttgagagagaagaagaaggaaaaaaaaaaaaaaaaaaaaaaaaaaaaaaaaaaaaagggcgaacgatatacaagatccaaagcactgcaatcgggcggggcggctggtatttaggaactaggctgaccaactggtacatcaagagcatagctcattcattgagttacatagataaacttaaccggccaggagttgaaccaatgaggctggcaaaaccgtaacgtcaaccaagataatagcgtagcggcatagactctttt

SEQ ID NO: 10120 - DNA, 516 bp, Glycine max
  Clone ID: PAT_MRT3847_109148C.1
tttaccgtgctacatgtgtgtagtacctcctgcttgggggggggggggggcacaaaaattgcgaacagtgagaggagggcacggcaaaccaggtaaaatagcttacagggaaagggtgtataagacggtagaggcagggaaaggagcttaatagggcaaataaaggtagctatgttagaggtgaccgaacttagatagctgctggcattactaacaagtgcaaaaagaccagatagaaaatgcggggtacaaataaggcgtatagaaggaactgccacgctaggggagaaataaactacagataaaggcccgtatagttgcattgtaggggagtaccaacgctgcggggtaaacgcatgcgcactcatccgccggcgtagtagtggtagtaagcccctgttgcgtagtagtttgaacctgttcctgcccctgctcctgagcgttaggactgcgaacctgagtagacttatttgtagtatccgtttggcgtacctgactaccctggtgatggggttt

SEQ ID NO: 10121 - DNA, 695 bp, Glycine max
  Clone ID: PAT_MRT3847_109149C.1
ctagttcagcttgatggtgtaaataatagttccacaaatgaagatggtacccgcaaaatagtaatggttttggcagccactaactttccatgggacatagatgaggcactgaggagaagattggaaaagcgtatatacattcctcttccaaattttgagagtcgaaaagagctgatccgtatcaatttgaggactgtagaggtgtcccctgatgtgaacatagatgaagtggctcgaaggacagaggggtatagtggagatgacttgacaaatgtatgtcgtgatgcttctctgaatggtatgaggcgtaagatagccggaaaaacgcgtgatgagatcaagaacatgtccaaggatgagatttctaaggacccagttgcaatgtgtgattttgaagcagctttgaagaaagtccaaccaagtgtttctcaggctgacattgaacgccatgagaagtggtatgccgaatttggatcagcataaaatggaatttgttttcccccacttatatgtagtttgttaactgatgcttgttgaggattacatttttcttctaggaaaaaaatgacggatgcttattgtaatcttcaggttttggaggggtattcaattgtttgttttgtatatcatttatgaattatgaaacataatgttatctgatatgttataaatcattaagaagttctcttgctgct

SEQ ID NO: 10122 - DNA, 659 bp, Glycine max
  Clone ID: PAT_MRT3847_10914C.1
ggtagtataaataaaatagtgaacacttggaaaacgacagcccgtttcatcaaatagaaccgtagaggcctaaacgacgtagcgcgcaagcattctgaaaagggggaaaatcgcgacgtatataaattagggtttttcaaaatcagatatagacggaacggaagttagtttgagatttaggacttgatggatacggaagaaggagctcatggaaagggaacacaggtggtatctttgattgagaaggccaccaactccaccgcgccggaggtcgatccccgcctcctaaaggccatcaagacggtggttcgctattccgattcggagctccgcctcgcaacccaaacccttatggatctcatgaagcgtgaccactctcaggtcaggtaccttgcgcttctaataattgacgagctcttcatgcgttcaaagctttttaggacccttgttgttgagaacttggatcagttactgagtttgagtgtcgggttcaggcgaaatttgccacttcctgctccaccagcttttgcttctgttttgcgatctaaggccattgaaattttggagaagtggaatgtgacgtttgggttacattacagacagctcagattgggtatgattacctgaagaatactctcaggcttcaatttctaacatac

SEQ ID NO: 10123 - DNA, 712 bp, Glycine max
  Clone ID: PAT_MRT3847_109150C.1
ctagttctagatcgcgatctcatactagtctcttaaaccaaggttttgctctgtctctttttattgcaccaccatccactcgagccgttctaagtaactaactaacttcatttcatttctcagttctcacccatggcgaggcctcttctcacctcttccatgcacaatcttctattctcctccatgcccatccccacacttttcttagctatactctcagtcttgtgtttattttccatcatcacttttctctgtggttctgacaaactgaagaagctccacttagaagcagagaaagaagcagcaataaaaacgaattccaaggagcacaagctgatttcgaagctgaacagcaatattggcaacagggcactctccatggtgaagatgttgtcttggaggaaagtgcaagagggagaagtggagggagaatatagtgatcaagatgaagaagccctttggaggaagaacatcttgatgggagaaaagtgtcgtcctcttagcttttctgggaagattgagaatgattctgaagagaaaaattaacacttctttttcgtttgtgttgtggagatgagtatggttagaaattgtatttgtgtggcttcaattagaacttgctaactaatttgctcagattttggacagtatctagagtttgctactatattgtaacataggaaataaacttggcaacttttttttttgtggg

SEQ ID NO: 10124 - DNA, 351 bp, Glycine max
  Clone ID: PAT_MRT3847_109151C.1
gaaagacaacaaactacacggttaaaagaaaaaaaaatagaagatggcttatatagaaggcattgtgcatacctgtaaagtgaacattgtaattataattgtaaaagatagacatctagtttcaagaagattgaagtccgaatccattcttatacccattatccatgcaacaaatacacttaatggaacctaaaattcattagtcattagatcattaaaatttgttggtaactaacattatagaatttattcgaagcatgatcatattagtatataatagtaatactaataattcaaccttaccacaaacatagaaatttgagttgcagatcccatagtaacacccaacga

SEQ ID NO: 10125 - DNA, 297 bp, Glycine max
  Clone ID: PAT_MRT3847_109152C.1
agcactacaaataaatgcatgttttttcatttctatatcaggtctaattgtgatgttggctacacattgattacggagcaaatttaagatgctgcagacgcacccatacgaacctatgagagtgttttggctcgggcttgattatagcttgtgcatatcagccttggacaccactcatgatctacttaaagactaattgcaaggaagaaagtagccttattgaggagctcctgctacatgaatgtgttggtgggccaatgggataaaaataacccctttgttacgcggttagtgatt

SEQ ID NO: 10126 - DNA, 393 bp, Glycine max
  Clone ID: PAT_MRT3847_109153C.1
ggctcgaggttcgaacccacgctgatggctcgctagctatacggacgactgactcaaagagctgcactcatacctataatctatgggccagttacttactacaccatattaccaagactagctgcgcacgattcaacagcgtgcaagggaccttgctaagctcgaacaggcagtaaccgatcgacactctaaagcagacgatatgcacgctgaagatgcacatatctatcctgatcaccatgcttaaggcactccataggatgggtcccgtggacaactgtcaacgaccacgcgatatgtacgctgccatagctatagtctactggagtaaagaagtaggagctgtgatgatgctaactagatgtggaataacaagactttagcagtgcgaat

SEQ ID NO: 10127 - DNA, 552 bp, Glycine max
  unsure (1)..(552): unsure at all n locations
  Clone ID: PAT_MRT3847_109154C.1
tggctttggattatctcctctcagagacactgttgctactcccaggattctgcccgacttgagatgagcacagaagcaagttatttattctgtcggcttctttggaaatctctcagtgacctcagttgtctgaaaaatgatgtaagtttatgctttgggctcagattgtttagtggtcaatatctactcggcagccacgcacgtgaaccgcacaacagagccatctatcctatgtagtccttatagttatccgtagttggacgatagtcaacttagcagttaacgcattttatcttcattttctcatgtagctactgacgagctcaaagatttgccctgttgcgagagagactttcagtactaagagaatatttgtctatgggcactgacaattatagcaagcctagagctaataaatgtggctatcatttcaagaaaaaaaacatatgatttggacatgatttcatttcttgccattnttgcagctggagactgccttgttgagccacactttcagtgagatgcgcgaggacccaatcaaagaccgatggc

SEQ ID NO: 10128 - DNA, 374 bp, Glycine max
  Clone ID: PAT_MRT3847_109155C.1
cccacgcgtacgtacgccggaacggctgatcttgtagagggatagtcacacggtgggcaacgagtctcaaactcgaaaacaaaagctcgagcccatcatggattcacggaattaaatacatgtgaatcggagctttacgcatcaacttgtatcgcacctcaagaaattcctaagaggcattgactagtccccagagtacatggccggatatgctcatatgactgatcaacttgactaacctaagaacaagctctattgtctagagatgaccagacccatcatctatgaaagggaaaatttgaagagcattgatgacacggtcaagacctgtgcaagcaaattccatgaagagatgtctagaaccatcatagaca

SEQ ID NO: 10129 - DNA, 393 bp, Glycine max
  unsure (1)..(393): unsure at all n locations
  Clone ID: PAT_MRT3847_109157C.1
ccgggaattgctaaaggctaaagcaaaggcacaatccaaacagggccttaaatttggcgcaggaaggcgagtccggaaatcaccgtactttaggcaaacgcaactgaaacagacagaacgcactcgatgcgaaactgaaacgggcgtttgcgtttgcgtttgcgtttgcgtttgcattgttgttgctgttgctgttgctgctgttcctatctgttgctctgaaatctgaattcaagaaataaaaaataaaataaaatagcataacatggcccangttctgagaagagattccattccatcatggacaagctcttccatcctcccaaacccccttcagcctccagttcatctggagtgcagttaccagggagtagtaagaaacgtccttaccag

SEQ ID NO: 10130 - DNA, 260 bp, Glycine max
  Clone ID: PAT_MRT3847_109158C.1
ggaagaaggagagggcgctcgccggcggggcgagggttccgagactgcgacgacgagggaggcggcgttgcaagagcgggatttggccgcgaaggaggtggacaggctgaggaaagtcgtgaggaggcagaagaaggatttgagagcgaggatgctcgaggtttccagagaggaggctgagaggaagagaatgctcgatgaacgagccaattacaggcataagcaagtgatgttggaggcctatgatcgacaatgtgatg

SEQ ID NO: 10131 - DNA, 1550 bp, Glycine max
  Clone ID: PAT_MRT3847_109159C.1
gaactctttcggagagagacacagaagtcagcgagtgcaccataaatgtagaaacccctcaaatcaaaacaaaaccatacaacacaaatcgtagattgaaaaaaataataataaagaatcagaaaaaatgggttctgagaacaaagaagccgcaggtggagaacttaacaattcgtctccttcgccctcttcttctcatgcttggaaaagtcgaatcgttattccaacccttctcgcaggagttgctggtgctggagctgggttgatttcaaagcatcgaagaactcttggtcttgctactgtgtgttctaactatgctgtgaatttcaccattgtcaccgggtgctattgtggggcacgtgaatttgtggctgcaactagaaaaacgggacctgatgacatattgaattctgcagtagctggatttggaactggtgctcttctagggcgtctccaaggtggtcaacttggtgcaatccggtactctgtcatgtttgctgttgtggggacaacagcagattttgctatactgaaactgaaagatgctttgagagatcacactaaaacaatataccaacacattgagaattcaaagaagagtggaacttggttaaaattgccggaatggttcccaatccaagtactcgacgaggaagctatgacggaaaaacgtgctcacgatgagaaggtccttcagcagagggcaaggattcgcagcctaagggagaagtatggtactggatagaacattttggctgaagttgatccatatagccgaccccatgtagtgggataaggcgttgttgttgttgttgaagaaatcaagatttgaatgtatttgtacccaagaaagcagggaaacttgcttatgcgattttcaaaatgctggccagtgatgttgaattttacaagactgaaaaaaagaaaaaattcaaaaataaattatgacatgcttgggaagggacacatttctgcatttgttttgggcaaaattgttcttgaaactatgagtagtggaactgttggggatggggaggattctgaagctggacaatgtcaccttaagactgagggcaccaaagaaactgctcaatcgcaacttcctgatgtagtaaaccatgaagtggcggcaatgaatggtgaaggacaacttttatcaataccagcaagggcaaaaaaagcaagaaacggaaattggttgagaatagatgaaagaagaaaatgagctccgggaaccaagaattgtatgagaaatttgaatacaaggaaaataaagaggagcaccagaagctagttaagttaagccagaaggttgatctgtctacagaggattctttgcccaaaaagaaaaatgatcacagaaaatagttgataagtgataggaagaaaatcaccagtgccaataaaagttttctacaccaagctaagcatatgaagacggatgaagacagcacatgcatgcgatcacaatctacggtatccgagaatcatcaggtggtagctaacagcaacatagacgtggatccaaaaacaacaaatgaatcgaactt

SEQ ID NO: 10132 - DNA, 715 bp, Glycine max
  unsure (1)..(715): unsure at all n locations
  Clone ID: PAT_MRT3847_10915C.1
attacactccggttctgcagttgagggttacattcctttctcttcctcttaattattcattcagattacgttgaacgtgtctgcctttttgtaatccaccgctagccggactccactctttttaccagtcttactttctgttcttcgagcattcatcatgcgcttctctaccctcgtccctttgctgcttgcggccggtgttgccaacgcccaattcggtggtcaaggtggtggtcaaggccagaacaacggccagaatggacaaaatggcggcaacaatggccagaacaacggtcaaaacaacggtcaaaacggaggcaacaacggcggtaacaacggtggcaacaatggtggtaacaacggtggtaatggtgggtggtttggccctcaatgccgatgtcgttcagaaggccagtcaatccgacggattcgaccagggtaaagaggacggacaagccgcgtctctcactgaccaagccaacttcatcaacttctgtcaaggcaagaccctcaccaatggtctncaagttaaggaaggctcctgcaacggtattgtcatgggagatatccctgctgtcggccaaatgatctcggcggtcttcactgatcccaagaacaacgacgtcaagcaagagaaccagaagattgacttctcggtgaagatcaacaacttgcaggccggatccttcacgaaccccgacacacctactacgct

SEQ ID NO: 10133 - DNA, 136 bp, Glycine max
  Clone ID: PAT_MRT3847_109160C.1
attttctcccttatttgtattctatatggatatgtatgttataaaggttacagttcagacacactcacatacaatcacatttataacatacatatccatatggaatataaatgtgattgtatgtgagtgtttctga

SEQ ID NO: 10134 - DNA, 610 bp, Glycine max
  unsure (1)..(610): unsure at all n locations
  Clone ID: PAT_MRT3847_109161C.1
tcggcattatctctcgtataatcctttacaaggaggaggaaaaaaaaaaacattgtcattgaattccaatgaatattttttttctcttgtcttacagaagataaagtatgctaccaatgaaatggacgaggaattcatgagtccttattaagagtgcgtttcttagcataactcttgagatgaaaatcaacaaagagggccaagagagaggcattaaaaaccgcattgaagcaccagccccaaatcccggagcatccggatccggagaagtggtagtggagcatgagacccgaaattgcgaagctgaagacgaactggatgatctggcagtcggtgacggcgcgcttccaggaggggcggatgccgagggcgctgaggaagtagtaaccgtacatgatgacgtggacggaggcattggtgaggagcgcgacggggaagagggattgggaggtttggagccngaggtagcacatgaggaggacggtggcgtggtggtnnangtggaggaannanaggcgtccgaaggagcgggagaggacgatgannngcgtgtcgaggaattcgaggattttggagaggtnnnnnntgtaggcccnnnnnangnggggcc

SEQ ID NO: 10135 - DNA, 482 bp, Glycine max
  unsure (1)..(482): unsure at all n locations
  Clone ID: PAT_MRT3847_109162C.1
ccacgcgtccggngnaaaatcatattttgcaaccaaaaaaaaaaaaaaaaaaaaaaaaaaaaaaaaaaaaaaaaaaaaaaaaaaaaaaaaaaaaaaaaaaaaaaaagaaaggacgtgccggtgaaaaggagccatattttctttaggtatgccgtgctcacgtgctctgtttttttgtagtgctaacgttcatttcatttgactggcgtggcgcttctcaccggtcttggctgggtaatgccgtttcctttcctaacttagtttgccttgcaggacatgtttcgtttggcgggtgtgttgattaaggggcaggcccgacccgccttcccttccctgccctggcgcgttttgtttggggaatgggccgtgtcctgtagcggtactttcaccgctggtggtggggtggctccgcgcgccgggaccttttgtctttcccctaccgtaccgtccgttcgtttcgttcccttcctttcttttctggc

SEQ ID NO: 10136 - DNA, 373 bp, Glycine max
  unsure (1)..(373): unsure at all n locations
  Clone ID: PAT_MRT3847_109163C.1
aatacgtactatttacctnttggtcccagaggtcccttgcgccacatgggagtttttcttgttttacaataaaaattagtgcagagtttatctggatcagtactctgcttagattctgcacctcgatggtggcggcgacgacgaaggtattgagagattcttgctggtgtaaaggagacagaggcaatatacttgggttcaacttgcctcgtatcttcagaggtagctcccttagcagcagaatttgcttgaatagttgtctcccggntatttgcaattgcatcctctatgttcatgttctgttcacaaccatactttggcttattgacaataatgttattttggacacgattcctagcccgaacgccaccaa

SEQ ID NO: 10137 - DNA, 1078 bp, Glycine max
  Clone ID: PAT_MRT3847_109164C.1
aataaaattggaagaaggaaaaaagaatctaattacaaatttttatagtttaaggacataattaaaaattaaatgaaagatcatcaaggagctactaatgtattattatcctataaaataataatataatttgttggtgtgataaaaacaggaaaggataattatttaatgggatgctcaagcttgtcccccatcaaagataagacaaagtttaaaaacaagtacaatcccttttgctcggctgctagctatcatgtccacagaaatccatatactagtatgtcaatagagattgtaaagtaatcatcacaatatcacatgctatttgctacggcctacgggaaagctcgggcgagcaaacttgcttggtgagtaatgctgactcgcataagtagtccattacttcacttgacaaggagtttcggatcaatgtcttttgttttgcgtgataacacgaatgcagatcaacttgcacactacttcaaaacgtgaatgataataacccaataaatcagtggatgaacttactttaacttcctgagccatgagggcttaaatatacagtaatacagggtattgccagttgcatgaagcctgcaagtatgtacttagaagtttattgtttttcttcaatcaatgcttgaacacttggtattggcatgagcatctactttgttgggcatatcatgctattctatgaagagtgaagatccatttcctaactttcttctcccccctcttgatatacctcttccaattttgatcttagaacaggcttgcaacttgcaagacaaaatttagtttgtacagcttcatctcgaccaaagaatataaaaaagaaaactacaaggaatcacttttgtcacaaaccaaagctatctaaacagtcgcaatgatgcatgtgaaaaagaaaacagaatcaggtgtaagaggagaaatcaagcaatgctgaattcccaattttacacattcaaaccagtcttaaacatgtgaaataagttcatttgtgattgcttgtcactagtcagtaaaattgtaaatgaagttcaaaacaaagcttagaccaatcttgtctgag

SEQ ID NO: 10138 - DNA, 638 bp, Glycine max
  Clone ID: PAT_MRT3847_109165C.1
ggcaataaaagaaacatccatcgacgaaaaactaaatgaaggatagatatataacagtaaatcacggaagaaagttcaacaacatcacgaaagtaatcaatattaaaccgaaatctttcaatcacacaattcattggctacgaatagtactactttactcaaaaataaaaaagacaaactaaggacctctaaatcaacaatatgttccgaaaaaaggttgaaaaccctaccaattaatcaaagagactgaatcccatatcgtcatccgattcctccttctcttccaccttttcctccttcttagattcggcggcagccggtgcagcagcgccaccaccgggagcagcggccacggaaaccgcggcgccaccgccagaaggcacggaggccaacttttccctaccggcggcgataagctccgcaatgtctttgcccttaacttcagacaagaagttgctgatgttgtcatcgttcgcgtcagctccaacggagccaaggatggtccttaagtcatcggcggaaggggctgcgttgcctcccaaaacggcgagcaagtaggcggcgatgaccttcattttgcgccggaatgttaatatgtggcagaaagagcgctgagagtgaagggaaggtgcaggaat

SEQ ID NO: 10139 - DNA, 1901 bp, Glycine max
  Clone ID: PAT_MRT3847_109166C.1
gaaaaactaaatgaaggatagattatataacagtaaatccttatcttctcgcattgtttagcgagaagacttaggaagaagggtcaagatttaaccggaggttttcttagttattgttaccatttgctcccagtactgaagagcttaaccgagcttcacaaagatgaatcgggaaaagttgatgaagatggccggttcggttagaactgggggaaagggtaccaacaaaaaccacagaggacacatggctttagctaccaaactgagcttacggagctcgaaatctgatttgaggattaaagtaatggacggtcagtagaactgaggaaagggtactgtgagaagaaagaagaaggctgtccacaagacaacaaccacagatgacaaaaggcttcagagcaccctgaagagaataggggtgaatgccatcccggctattgaggaggtcaatatctttaaggatgacgtagttatccagtttctaaatcccaaagttcaagcatccattgctgctaatacttgggttgtcagtggttcaccagcaaacaaagaagttgcaggatatactccctagcattatccaccaattaggaccagataacttggaaaacctgaagaagctagccgagcaattccagaagcaggctcctgaaggggccgctggttcaaccacagctcaagaggagaatgatgacgacgtcccagagcttgttccaggccaggattttgagacagctgctgaggagaccaaggctgcttcttagattgtgccatcgccatatatctcctgtgtttttatttttttttcttcttgattttccattttaagtatttcaggtgttcggttctcctgtcatatactttaaacagttcaaatactctattaaatatgctttccttcatctaactaggtattcagtttttgactgcacctgtcatcctcaacaccgtttcagtttatcagcattattcgtggttcggtagttaatgtaaggggtattcaattcctgtcccgtctcactaatctggcttgatttgaagttagttttgatggatttgagttctaaaccaacgtgtttttggtacgagttggttatgatttgggtcatcataacctagtttgaagttgcaatttagtccctgaaatgtacacggtttcatgttagtttctgaatttaaataaattaaaaacttcttgtttgttattaaaaaaaaaaaaagggaagaaagttcaataagtaatcaatattaaaccgaaatctttcaaccacacaattcattggctttgaatagtactactttaaccaaaaataaaaatgacaaaactaaggaactctaattcgacaatatgttccgaacaaaggtttaaaaaccctaacaattaatcaaagagactgaatcccatatcgtcatccgattcctccttctcttcaaccttttcctccttcttcgattcggcggcagccggtgcagcagggccaccgccgggagcggcagcaacggcaacggcggcgccaccgccagaaggcacggaggccagcttttccctaccggaggcgataagctccacaatgtctttgcccttaacttcagacaagaagttgctgatgttgtcatcgttcgcgtcagctccaacggagccaaggatgtccctcaagtcatcagcggaaggggctgcgttgcctcccaaaacggcgagcaagtaggcggcgatgaccttcattttgcaccggaatgtgaatatgtggcagaaaggctgagagtgaagggaaggcgggggtcgaaggaggatcgcgaatgaattgagccaattcagaacgagggtttaaggctcccttcggctcaatgatcgggttctaaggttttgatttttttacccatgggctatgtattacatttga

SEQ ID NO: 10140 - DNA, 576 bp, Glycine max
  Clone ID: PAT_MRT3847_109167C.1
ggtactttttttttttttttttttttctttgggaaaactgaacgcaatttctatattgccaatcccacaagaatgactggttacaacacattaatcaacaatcctatgctcccacatgttggctgtacaataaagaaagggtgactaattcttaagacctgtcttttcataagttatacattcctacagaaaaaactaacaccttcttggttcctttatcaaggccgaccaccacctataacttgaaagacccacttggtattgtacgtgattaatacaaaattacgcttcaaatatagggtcttttgctccacatttggaagaaccctgctgtcttgtattcaaataattggcttccagggggggaccaaaacgatccagccactgggttggacttgcagtttacattttcctccacccactcagaaggcatgccaatttcatgaaattgaagcgaaccaacttctgaagactttgcactcatctggctatcttacttgagattggagtttatataaacaaggtccttcaatgtttctctataaatctgggtccgcttctcaaagtgaatttgcc

SEQ ID NO: 10141 - DNA, 168 bp, Glycine max
  unsure (1)..(168): unsure at all n locations
  Clone ID: PAT_MRT3847_109168C.1
tntaantgngagnacgcgnacgtnagcncggaattnggctngagntnatnctctntctcnctctttctcnntccgtnttnntntgcactcanatgacacaacagaanannnngnagtacatagtactannagtaancnnggagtnatgcttnggngtngaatggggtc

SEQ ID NO: 10142 - DNA, 407 bp, Glycine max
  Clone ID: PAT_MRT3847_109169C.1
aaaacaaataatttcatggtactttttaaaagtgatagcaaaaaacacaaatggaaaacgagtttgcaatttgcacaattttaagaagtgaatcatacccttggcccggctatagcctacagatgtcacactagtttccctcctctttgaatatggaatgcgcaagggtttactttatcaaaacctgacattatttttgttgaaggcacttcattacagctggattttttttaccaaaagccacagtagggggagggtcttccttgttttgaccaacacaatggtaataaccttccttggccgaaaaattatctggcttggtatatttagaggccggggagatattcatccccacagattacaagggattttgaaggatcattttgatctgaaaatgctttattggg

SEQ ID NO: 10143 - DNA, 332 bp, Glycine max
  Clone ID: PAT_MRT3847_10916C.1
tatgtgcttgcatggacgtgcacagatgatacccccgatagtcaaatctaaccaactcagaccagggcgaagggtaatacggcgacgtgcaaatgcgagctcgccgtcctccccttccgctggggccatagacgcatgtacggaatcgagtcaccctaaaagcgactacgtactaaatcacgacgacgacgagcacctaaaattacactcccgactatcgtacgcgtatatgtctaacgtatcatctaacgtaatcgcgaagacaccacgtctcaacctacgttatctacaccgcaacagtctcacgcgtatatctctatatatagcatagc

SEQ ID NO: 10144 - DNA, 262 bp, Glycine max
  Clone ID: PAT_MRT3847_109170C.1
tctattattcaaaccatatttcatatttacaccaaattttttttaccaaaatttaccatatcacaattcacaaaccccatataatataaatctaaataaatcctccaaaacttcattttttacaaatacactttaaacacaactcaattatcttacatttatccttcaaagacatattcagtactatataaacctctcttcttatatttatatcaaaatatcttttttaaaaaagacaccaactttttcatcgatcataaca

SEQ ID NO: 10145 - DNA, 780 bp, Glycine max
  Clone ID: PAT_MRT3847_109171C.1
accagctctctctctctctctctctctctctctctctctctctctggcagacagaccgtccgaccaaccaaacacacactaactgaatgaatggacagacatacacggcggggcggggacaaacaaacaagtatgaaagaaaaacaaagacgctcggtctgacagagggagagagagagagacacacacacacacccccacctctacgtttgttagtatagagagagcgtgccaatgaatgagtgggtgcgagggagaaacagatagacagatccatacacaaagaacgatcaatgactgggtggggagggaggggggggaggaacaaagatgtatgtatgttcctcaccaacggaagaactgaatgagtgagtgcgtgcgtgcgagcgacagacggacgcgcgcgcgagatgtatatatatgcatgcatgcatgcaggcaggggaagtgaggaacgaaagacagacagatgtgtgtgtgcgtgcgtgcggaaaaatgcatgcatgcacacatacggagcgcgtgcgcgcgtgtgtgcaaaaaaaaaaaaaaaaaaaaaaaaaaaaaaaaaaatagagggtgggcgggggcgccactaccctatctagagagagagagtcgcgctcgctgcctgtcggtgatactaaaagaatgagaggaagagacagtccgaccaactgaatagatgcatgcaccttcgcctttggcgggttgggaagagagggacgaccgaccgtctcccaaccacaggcggcaagaggaaggaggacgcgccccgtg

SEQ ID NO: 10146 - DNA, 329 bp, Glycine max
  Clone ID: PAT_MRT3847_109172C.1
aaatgatttcaggtcaacaggtatctgttgcacatgatgcacctcctgcttcaactccgggagagcgaatggacatcatgactgctctacaacttgcgctgagaaaatctatggcctatggacgtctagcacgaggtcttcatgaaagtgctaaggtgatcgagaagtatgctttacagctgttcgttctatcacaagattgcgaccaacctgattatgtgaaactggtgaaggctctttgatcacagctcaatcttagcctttagacagttataagtgccaagacccttggagaatacgctcatttgtgccagatcgattgacaggga

SEQ ID NO: 10147 - DNA, 454 bp, Glycine max
  Clone ID: PAT_MRT3847_109173C.1
gggattgatcttagctcactacttacatatcttaaattatcttaaatttatgcatgttggctaaagcattgtttttctaaggactaaaaagagggtactatccgtacaaaacaagacataaactttcctagctagttgctacatgctgttgcaaatggatttgggataagtttcactattccctccatagctcgcaggagcacaggaaatgggctacgtattgcaaaagggatggaaggaaatatcaaatatctttggttgcagagtggagaatggaacttacagttcttcacactgaaaactttgaccacatgtagatgtgacatctttgatttgattcccttactatgtttcctcataacggatctttagaaaacttaaccagtatagttttgcctaagaattaattggcttcattttatgaatatcatcaatgtaacactaaatagtattg

SEQ ID NO: 10148 - DNA, 346 bp, Glycine max
  Clone ID: PAT_MRT3847_109174C.1
cttacacattttattaaacgaaacattaataaaacgcttaaatcagagactccactccagaccaagagcacataagccattttttttgcccctcaaaaaacacggggggttcctgactaacgcaaaagggaatatgctttctggaccaccaatcagcaaatgactatccttggcctaacagggcttggaagaatctccaagtgttggggtcgatccatggggtgtctacaagcccttctgcccacatttttccatgtgatgcctttgcagaaaacaggggaaaacaacaccgctgcatcatgagactgtggaaatgtaaccccccgggccgtgaaagggcccacct

SEQ ID NO: 10149 - DNA, 378 bp, Glycine max
  Clone ID: PAT_MRT3847_109175C.1
gccaattgtacttactggtctttgtagtgaatcatgggggccacggcgtggggggcggttcggataagcaaagtccatactccgttttgtctgtgtggttgggaagcgtaggcacactgtgtgaacaacagcttaatgctttgactgatggatcggaatcgagcataaaacaactcgtgggcttcgacagcacctagtgattcatcctgtggagctcacgatctgggttataaggatgaccctctgaagtgggcccacatggcttcttagatagatccagatgaccagggttttttgctactgcctgggcaccgcacacccaaatggttttgcacgtctaatgcggtgggtgcttaactcattgtggccggaatggtt

SEQ ID NO: 10150 - DNA, 255 bp, Glycine max
  Clone ID: PAT_MRT3847_109176C.1
ttgttgcttgggcgggtgtgtcccctttctcccattcttcacatcattagaatgccggcttggtggaatagaaagtggagcaagagcaaggaggaggatgaggaggatgagccacgtgccggttttcacttgaattttatgaaatctccggtttctgttacatcgtctaagagcaagagtaagaccacgacgccgacgccgatgaagaagaagaagaagcccaagagcttccacgagaaggtggagggtggttcc

SEQ ID NO: 10151 - DNA, 412 bp, Glycine max
  unsure (1)..(412): unsure at all n locations
  Clone ID: PAT_MRT3847_109177C.1
acagaatctgaactactatgaattaccaaaagcctatacatttgaaagattgagatcaaattcccttatctacggcagtttgttacacaaagacaccaacccgattacagggttagaattttgtttccacagtaaacagactgcacacataattacctaactacaattctatgtgatcacggcggtcgtccagtttcaaagagttctgtgcattcacttcctaaataatcacctataacatgtaatcttgctggcgtcttaaccaatagcatactgnggagtctccatatatataggccgccgcatggtcttgcggacacatagaaatctcaccttattcttagagcaagagatgcgaacctttcactacatggtcttcaccatactttgaatctcgctattgtattcaaca

SEQ ID NO: 10152 - DNA, 203 bp, Glycine max
  unsure (1)..(203): unsure at all n locations
  Clone ID: PAT_MRT3847_109178C.1
agncacaagcacacaaatgaaaaaaagctaacaatnatantatctctgcaaaccattaaggccatggcttttcttctccccaacctccaagcttcacttttagctcaatccaaatccaacaaagacaaagnnaaccttcaccaaactctctcnnctcaaaaanccacttctnagtttcctatntcttcnnccacatgntcctc

SEQ ID NO: 10153 - DNA, 121 bp, Glycine max
  Clone ID: PAT_MRT3847_109179C.1
cgaacaagtaccgcgagggaaagataatataggaatgtgcagtttgtctgtttggggaatacttcttgtcggaaaaggggagactcctcctttattcatcatcattactaatactttaaat

SEQ ID NO: 10154 - DNA, 504 bp, Glycine max
  unsure (1)..(504): unsure at all n locations
  Clone ID: PAT_MRT3847_10917C.1
gttagtttgagatttaggacttgatggatacggaagaaggagctcatggaaagggaacacaggtggtatctttgattgagaaggccaccaactccaccgcgccggaggtcgatccccgcctcctaaaggccatcaagacggtggttcgctattccgattcggagctccgcctcgcaacccaaacccttatggatctcatgaagcgtgaccactctcagattacaactgtcatctccagcacaaagtcctcaggttgaccttgacagatatgtgttgcaggtcaggtaccttgcgcttctaataattgacgagctcttcatgcgttcaaagctttttagggcccttgttgttgagaacttggatcagttgctgagtttgagtgtcgggttcaggcgaaatttgccacttcctgctccgccagctgttgcgtctgttttgcgttccaaggccattgaatntttggagaagtggaatgtgacgtttgggttacattacagacagctc

SEQ ID NO: 10155 - DNA, 348 bp, Glycine max
  Clone ID: PAT_MRT3847_109180C.1
cccactcgtacggtataggcttacactgatgcgtatggctccagtgttagcgcgaagtatagggaagtgaggtctcgtgctaccactcgtgctcacgagaacgttaatcatcaaagggtggtggatttcattgtcactgactaggatgattatgactggactgaaggggctgaccctggtgatagcgcaccaaccatcgctattcgtggcattatgtgcattggaatggctcaatagagcagaatagaaagagttgccagctttttgcttgatgccgagaggtacagatcttgcacagatctcgagcttgatcgatctaatctagcatgctttgatgctacatctgat

SEQ ID NO: 10156 - DNA, 431 bp, Glycine max
  Clone ID: PAT_MRT3847_109181C.1
ccacgcgtccgccccttgttaaggtgctctggaatggatttgcgctgatcagttacgcatatgtgttggtgcgaacaaaggaagctgcttcttttactatctctatataacgtcaagtgacactttccatccaagttcacattacttccaacccaactccatctagggtcattgaatttctcacaattcagcaaccactgcgtattcagattggtttaagaagaaagcatttggtccgggaaaaagggtcgctacaaaaagaccatctgctcaaaaattgggtgataccctccaaagcatctttgtctcctgagggacccattttagaggaagctctggaaaaagttccaaacattttagctgaggtgaagccttctaatgtgggtcttgaacaaaaggcgcaactggtgcgtgggaggaaaaggtccttg

SEQ ID NO: 10157 - DNA, 751 bp, Glycine max
  Clone ID: PAT_MRT3847_109182C.1
acggctgcgagaagacgacagaagggtatacagatattggttccttgcttgatgcaaaaacttgtgttgacaaagcccggttgatagagtatttctctccaagatgttggcatattacaggtaaggaaaatgtctgtttaagtttttatggttgaactcgtgtctgcattgagtgttcatgctcatggtaaactaatatgcaattccctgtgcacaattgcagggatgttgcttgaagctccatcattatacaaagaggcatttgtttccttttcagtatcattgtcaatagaaccagattacattcccggtatcatttccactgcagaattgttgatgaaacttggtatgcaatcacttccgattgcaagaagttttttaatgaatgctttgcgattagaacctacaaaccatgatgcttggttcaaccttggattggtttcaaaaatggaaggttcattacagcaagcagcagagttctttcaagctgcttatgaactgaagctttctgctccagtacaagaatttaaataatttagactttggaaaaacagccttattgtttttggttgagggaaagtgagcttgactaagagcatgatagaaaacaaaagagcagcaactagatgacaaaaatactcatcccacaattaccattgcttggttgttgatttgctcaaaatgtatagctaaatctagctgctaatctgtagatttccttcattctgttataatcaaatcttgttgtttc

SEQ ID NO: 10158 - DNA, 244 bp, Glycine max
  Clone ID: PAT_MRT3847_109183C.1
agaagctcccacgggaaacagttttgactgagtttaggtgaaaacctgcgtatatgttccatacagaccatgtaacatattttttgaccgatagaaaagatccctttagccaactttcatttatagcagtacttttccatggtatagagcaccgaggattcctattgttcctttttttggaacaccagtccttaccattatgaggacatcagattaagtgatattggtgctgaacttaccagtt

SEQ ID NO: 10159 - DNA, 2488 bp, Glycine max
  unsure (1)..(2488): unsure at all n locations
  Clone ID: PAT_MRT3847_109184C.1
atttctaaaatcgaatcttaaatgcttggatatccaaatttgctcccgcacaacaccctttcggctcttaacttctcggttcggccttggattcattctcttccctctctctcaaaaaacactgaaacccataatcgttaaaattagggcttcggctcgaggctgggtggagctttacgcaatcccattacactctctttctctccatttccttctattctctattattatatccttttctatttttatttttctcattgcattctctaatctttaatctctattctctacccattcatattcatccccgtttttctctgtcactgtcgcataacactctttgaaccaccgcaactaaagtaacaaccccatgtcctgaacctcacttttcttctcgccaaagcttccaattttcgatttttctcttgttttcggaaaaagatcaacaccccagataaaaatagaagaaagccttttctgggttaatttggtaatttggtttttttcatgggtaacataggaagcagcggctccaacagccgctggagacacggcggaggcggtggcagcgggaggcggattcacccgccgcctccgccggtgatgtcgccgccggaggtaacggcgaaccgattcgtgtaccctccggccgccacgccgtatcacaactaccccgggtactacccgccgccgaccaccatgccggcgccgttgccggcgccatacgaccaccaccaccgtccggcggtggacccgatgtgggtgaggtatccgccggcggcaccgccggcaccggcgccgtacgtggagcaccagaaggcggttacgattaagaacgatgtcaacatcaagaaggagacgcttaggattgagcctgatgacgagaatcctggctgttttctcgtgtcgtttacgtttgatgccaccgtttcgggaagcatcaccatacttttctttgcaaaagaaggggaaggttgcaccctaaccccaatgaaggaaaatgttcttccacctgtgactgtaaatttccagcaaggtcttggccagaagtttaatgggaagcctgggtgaaaagcaaagtcaattgctgctaaagattgcttataaacatttctttcttccacgtttgatatgttctggattttgatctgatctcacactagacacatcaccatacttttctttgcaaaagaaggggaaggttgcacactaactccaatgaaagaaaatgttcttccacccgtgactgtaaatttccagcaaggacttggccagaagtttaaacagccagctggaactggtattgatttttcaacatttgaggagtctgagttattgaaagtaggggacatggatgtctatcctgttgcaattaaagcagatgcatcctccagcgaccatgatgaatcaaaatcaaatgaaactccatcatccggtagctcaaactctcagataactcaagcagtgtttgagaaggagaaaggagaattccaggtgaaggttgtgaagcagatcttatgggtaaatggaatgaggtatgaactgcaggagatatatggtattggaaattcagtggagagtgatgtggatgggaatgacccaggaaaagagtgtgttatatgcttgtcagagcctcgggacacaactgtccttccatgccgccacatgtgtatgtgtagcggatgtgcgaaggttttgaggttccagacaaatagatgtccaatctgcagacaaccagttgagaggctattggagatcaaagtcgggcctgagcctgaggaatgaagattcaatgttagtgacacaacaagcttcctgtacagtccaactgttatagctaatacttttctcttactttatcaggtttttccaataatcccacaaaatagaaattggaatttatgtatgacattatgtttgacatgtacagcaggctggcattgcacctgacttgtattattgtataagccaatgcctccgccatgcttgtttggttttacttctaatttttatgtggctttcccttctgaatcatatttagatgtgtttctcaccttcgcttcagatcccaactgtttttcttcaacatttctccgtgtcttcttttcatggtgtcaccttacttttttgtattttccaataatcagaaaaacaaaagaaaatgtaatttatattaggacttgcgtttcaacatgaacgacaggctggcattgcacataatttgtacaagacaatgcctccaattagcttgtttgtctgtgcttataaatggcttccattctatatgattaaggatatatttctcttggagatgantggcattntttttactngtgatagaagggttggtatgtannataatggtaactaatattccttgccatgctgtaaantatgtaaaagttctcgactctcgaatccatatatagtacgcgataaagtgggntatgttaggnaatccacggaaaagggaanctaaaaanaaaaa

SEQ ID NO: 10160 - DNA, 351 bp, Glycine max
  unsure (1)..(351): unsure at all n locations
  Clone ID: PAT_MRT3847_109185C.1
aaaagaccaccaaaagggtacggttccaaaattccacccaaaggttacgcttcccaaacaacaccagaagggtaccgttccaaaaaaaccccacaagggtacggttgcaaaaatacaacaaaagggtacggctccaaaaagacacaaaacggtacggcttcaaaaaaacaactcaagggtacggctcccaaaacacgatcataaggctactgctttctantaagacgacatcacngggtacngcctgcgaagatataccatcagactgggattgtgcccaattcatcctttcttttcattacatacgcacaacccactttactccctctttcacataaagaattttgatat

SEQ ID NO: 10161 - DNA, 170 bp, Glycine max
  Clone ID: PAT_MRT3847_109186C.1
gacccaccgtcgcccacctccgtacgcagaaacacgaaggtatcaaactttccatggcttgatcattcaacgtgtgttgccctattgaagaaaggggggattcactgaataagggtggctatgtgtctcaacgccttttattcttaatgggaatattcactgcaattttc

SEQ ID NO: 10162 - DNA, 151 bp, Glycine max
  Clone ID: PAT_MRT3847_109187C.1
tttcagtttattgatttttgttcacttgatctcatcatagtcatcggcgtcaattgaaaaagatgccgatcataaacatcgccgtccgaaggccctaaaaagccacttaccccgacacgtttaaagccgcctttgctgaattcaatctaac

SEQ ID NO: 10163 - DNA, 598 bp, Glycine max
  unsure (1)..(598): unsure at all n locations
  Clone ID: PAT_MRT3847_109188C.1
attccaagtctcaacaattaaatctttcactcagttcttattgaaaccaattatattacaaatacatcgatacaaactacaaaatcatttcaaatagttcaataaaggctatgtcaactctggccatgcctatggtatttagctcatgcctcgtatggttatgttcatcctcgactttgttcaaaacatatataaatttcaccttgttcttgagtgaaatggaactctacgatctcccacttcctatttagcgaataagcaataaatgaaatacattgaacagaaaataataattggtcttcctagaccgtaaataatagacagattctgattccctagacatcttactaatgctttctgaaatgcatttgtaagcaagaggtgactaaactatgacagagcctatatctgagcaacaaggagttcgttccacgtgtctggaattccaggaaggcaccaatgtaaacagggacttaaattaagagtgcctctggcagtgtggcgtggcntgtgagcctgatccctcagttggggangggcgggtgtgtggcgggtgttagtgtttgggcccttgggggggtgctggtggggggggggg

SEQ ID NO: 10164 - DNA, 237 bp, Glycine max
  unsure (1)..(237): unsure at all n locations
  Clone ID: PAT_MRT3847_109189C.1
gcaaagattttttttttgacaaacaaaaacaaacncaaaggaaaggggaaataacatacacccaaacaggaccgatcaatcccgtaaggaacatggagataaacaaatataaataaaaaaaacagaaagggtacatccccataaatttcaggagggaaaacccccacacaacctcgaaaggctgaaaattcctagcatacacacgacagcaacccaggaatgaatcctacaagaaaa

SEQ ID NO: 10165 - DNA, 644 bp, Glycine max
  Clone ID: PAT_MRT3847_10918C.1
ccctggccctgataagtaggcctcagtagttacttacttgtataataacttgcactcaccaaacctcttcaacaactcatgctcctcaccaccaatttctctctcctctctccctttctcaacatatcatatccaccacctccttgatcaccaatccaagttcttccttcttccatagcactttaagggacaagcctcttctttcaaggtcttcaatttgatgggaacacctagagattttgaaaatggagactatgagtactacaaggaaaaccaagggataacaaagtcatattacttgataattttcatctcatctttgttgataagcataataggaggctctatgcttgggtggtggctacacaaataccatccaacaaatagacaactttggatggtgccctttggcctcattcttttgcttacccctgtccttgtttggctatccctcatcatttctgacctgtgtatttccaaaaaagaggaagaggatgttcttaagacgaatcaacaacgcattcatccacttgatgaatctctttgtgccccaaagagacgattgcttggatgtgtacgtacaagatgctgttatgtgcgggttgaaattaatcaccctcctttatttctgattttgacttgtt

SEQ ID NO: 10166 - DNA, 169 bp, Glycine max
  Clone ID: PAT_MRT3847_109190C.1
gagacctcaggtcaggcggggctacccgctgagtttaagcatatcaataagcggaggaaaaaaaaaaaaagcggacgatctaaaggagcggccgttactataggatccaatcttacgtactcgtgcttgcaacgtgttacctattttatagtgactgctaaatgcaata

SEQ ID NO: 10167 - DNA, 1527 bp, Glycine max
  Clone ID: PAT_MRT3847_109191C.1
aacccgcccccgcgctggtgggttggtctttcattctagaccattccacacatataataatcatcaaaacccttaaactcggaaaaaccacggtccgccgcattggcattgcaaatggctcgttacggcgagggcgacaagcggtggatcgtggaggaccgtcattaattactaaggaactctcccagaaaagaggcatcagttgcaatggctcgttacggtgagggcgacaagcggtggatcgtggaggaccgccccgacggcaccaatgtccacaactggcattggtccgagaccaactgcctcgactggtccaagaccttcttcaccagcctcctcactaacctccctatcctcgacggcgagggtaacctcttcctcaaaacgacgtcgcttcgctccctcgacggcgaggcctacatcaatgtccgaaaggggaagatcatccccggctacgagatcagcctcactctcaattggcagggagaagccaaagattccctgggaacctcgcttcttaaagtcgacggcaccgtcgagattccctacatctccgacgagaacgccgacgaggatcccgaggttagggttactgttaacgatgagggaccggttgggatgaggattaaggacgccatgctttccaaggggaagcccttgatcttggagaaggttagggtttgggtccagagcatggccaaaggtggtcctgttaaggaagaattggaacccaagaaggttgcgccgtcctccttttcgccgtctccggcggccgacgacacaaacgacgacaccgacgacgatgaaaacaacggctgctgcgccgaagaaggaggagaagaaggagaaggtgaagaagggaaggaagagtattagcatgacggagaggtttaattgcagagctaaagatttgtttgagattttgatggatgagaataggtggaagggttttacacagagcaatgcgaggattagtaaggaggttgggggtgaatttagcattttcgatgggtcggttactggaactaatttggagttgcaggagggtaagttgattgttcagagatggaggtttggaagctggaatgatggagttcaatccacagtgaggcttgagtttgaggagcctgaatcgggtgttacggttgttaagctgacacatactgatgtgcctgaagaggataggtatgggaatgctactgtggtggagaacacggaaagggggtggcgggatcttattttccagaggatacgtgctgtttttggttttggaatttgagatttttctgattgtgtttcctgcgttgtagaattcgctgattttgacatttattagtaaggaacgattaatggatgattgagattattggatagtgtggattgcaatgctttctgcttctgcatctttaatactttatgcatctgtggttatgctatttggcatgcttggtgtgaatgttgtttgtgattagtgacttttgtcatacaatgatgaataagttgaaaattgacaagtgacctttcttt

SEQ ID NO: 10168 - DNA, 179 bp, Glycine max
  Clone ID: PAT_MRT3847_109192C.1
tgctaataatacacctcctccactgttcggaggacagatacctgcgtgattgtggcgagcctccccgtgctgactaccgcgtggtgtcagatcaggccatggagtcagagcatatgaccaagttgcacagcggtatcactctgagacgaccgatccaacgaatatgggttgggcctctc

SEQ ID NO: 10169 - DNA, 350 bp, Glycine max
  Clone ID: PAT_MRT3847_109193C.1
agcgcagaaggcggctgcggggatgcagagcaggccatcctacccccaaggcaagcgggaggggggagatcggtcaagaaggccatgacataacacccactcatgaatgaaaagacgacaaggggaaggctccgagcacgaccgcgctgaaagatctgaaacacccctccaagatcgaggctgacgaggacaagaagtccagtgagggcaacgatcctaccatggaactatatgccaccgagagaagcggtagagggtggctcgtgcctcacactgaccgccctatgaccaagacagtgggtagagctaccctagaggcgctcataagagtgcttgcagacgcctatgat

SEQ ID NO: 10170 - DNA, 192 bp, Glycine max
  Clone ID: PAT_MRT3847_109194C.1
gcaaccccgagttcatgctccccaaagtcattcttctcatgttcgccttttgtctcaacagcaggccaagctagtgattacctatccatctcctcctcgagacaatgctgttgcacccaaaagggcacctcacacaaacattcccagcactggcatgaactcccatcttactgatcacccaattgttggaca

SEQ ID NO: 10171 - DNA, 494 bp, Glycine max
  Clone ID: PAT_MRT3847_109195C.1
tctcctacgcgtccgggcaaacgagtgggtttcagctgcaaagctggcccacatggtcgttccacagctgatggggcaaatatgttccgggagtttctgtgtggcagggaagattcgaaaagaaagcctcctgaaagctgcaatgcaatgattagaatcgagcagaatggtcaaaataagtgggttgttacaaaatttataaaggagcatagccattccatggctagcgttagtaaggtgcataatattcggccacgtaaacccttttctagtgttggaagaaccatgcctgaaacttaccaaggagtggggcttgttccaagtggtatgatgtatgtatctatggataagaattgcattcccactaagaatattcagggaattaagaatattcccacagctgttgctgttgctgaaacatatcagccggttaaaagtcctacaatgatgaattatgctgttaggccagctacacgaaagaggacattagggaa

SEQ ID NO: 10172 - DNA, 895 bp, Glycine max
  Clone ID: PAT_MRT3847_109196C.1
cctcaatgttaagtcatttgtataaatatacaattttattttatttatgattttaattttctttttaacattaaagtatttattaaacattgaattaaaaacaaacttttatttaaaaagaaatttggtgaataataattaaaagctataaacacactaatacgcaaattcaaattagttggtacattttagggtgattggtatagtaaaacgggcttattcctctcaatatgtgcttcgataataagtctaactaaaaatgcggtgagcgtggatcgaacacgcgaccttcagatcttcagtctgacgctctcccaactgagctatccccgccaattaattttactatattttacataataattatattatatataaaatattaaatctgaggtgtttttagtccttagttgagaagtgtttagaattattggaagaaaggctccatctttctctggttctgttgttgcctaagaatgggaggaaattccagtttcagggatgaatataccttcggtatgttctcccaactcctcttatcacctatttttttttttattactaccattattaagggtttactttcttatctgagacttgattgatttggtgtgtgcgcagaacaaaggcttggagaatcgcgggatattgtggccaaataccccgatcgagtccccgtaatcatcttctccttaattaatcaaatatttaatctcggtttatgtagaagcacacggtgacgatgaacatgctttccctaaccctaattttgtcattatatgatcgattcttcttgtttttcttctgcaggtgattgtggaaagatatgcgaaatgcgatctgcctgagttggagaagaaaaagtaagatcatccttcatgattgaagtcatgat

SEQ ID NO: 10173 - DNA, 322 bp, Glycine max
  Clone ID: PAT_MRT3847_109197C.1
aaaattttataataaaaaaaaaaaaaaaaaaaaaaaaaaaaaaaaaaaaaaaaaaaaaaaaaaaaaaaaaaagggagatccttctagaaaaggctttctttaggaacaaaaaaaatatatttttaaagcgccacctataatgttctcgtattacatgtatcttaacatcgtcttacaaaactgtggcctgggtttaccgtagcccatccctccctccgcgcgccccccttttatccttcttttttgcgagcgccaaattactgttgtgggtgcgcttttatacccctttccatcttgggtgctccctggttgccccctgttt

SEQ ID NO: 10174 - DNA, 421 bp, Glycine max
  Clone ID: PAT_MRT3847_109198C.1
gagctcacatgacggcggccgcccttctttttttttttggggtattttttttgttatgtggcggttttttatacaattctatattagggggcgaaggctcaaatccctaaaggaaattcttacatgcttcaaaaggaaattttcacactttgggcccccctaacttccagggacttcgagaaaagggacactcatttaggcacacagaaacagcagttcccaccaataagctttatacattggataaagggcgcaaactgagagtcacagcaccctaataggcaacaaatttttggaaaccctgttcagggttattttaggagaaggctaagaaaaacatcacctagatccacgagcatactttctgtgggggctaccatggggagaaaaaggaagcgacccaaagctatccctcctagac

SEQ ID NO: 10175 - DNA, 437 bp, Glycine max
  Clone ID: PAT_MRT3847_109199C.1
tgcttaacgagcaaccaccaagccactgcaatgcatgagggttctctaaaaaccgtcactgatagtaccgcaaggccagactgcaacatagatggaccaatgctggcggatgatgcttatcataccaatcctgcaagtgcagccagaactatcttggttgcgccacacagaggccgaaggcccactggggtggatgcattagcgaatgccatcatgcatattgaaccagacaggactgaatggcacaagctagtgagtaccactaccaatggtgcttatgatacaggaaaagaacttgcaatgcctaaagttaatgtagcacgtgcagcagcggcatgacaacacggtacactccatctccatatgcggaatctggtttgcaaccagacataaggtctatggtggagtatttgagaaggacgaccaacgttgctcat

SEQ ID NO: 10176 - DNA, 260 bp, Glycine max
  Clone ID: PAT_MRT3847_10919C.1
accattacaaatgagaatgaagccaagggtaaatacttggcaaagattcatagaagaaacagcagaaaataggtagtaaccttgaaaaacctcggaaaaccctccctttgtcccatgaaagcaaaaatcatcctcagtcagaagcttctggatctaatgaagcccttgcaagcaatgtgtctccacttaaaaaacagaaaaatcgatgatggttcccaagaggcttcactgctccagtaagagatgcaatttggtcagtt

SEQ ID NO: 10177 - DNA, 941 bp, Glycine max
  Clone ID: PAT_MRT3847_1091C.1
ctttaatcaacacaaaaaattatcatctgcagtttcagggaaataaaacaaattgggattttgttttcatttgaaatattgttctttggcgtgatctcctgtctcatacttctgttcacattggctttgccactttttaaacccttcctggttttatgatgctttagttgtgatacaatataaaggtgtgatgtttatagctttggggtcatattatgggagctctctactatgcagcaaccatggggaggaatgaatccgatgcaagttgttggtgctgtgggcttccagcatcgacgtcttgacattccagatgatatggaccctacaattgctgatattatcaggaaatgctggcaaacagatccaaatttgagacctacatttgctgaaatattggcggctctgaagccattgcagaagtcagttattggttctcaagtgcctcgaccaagtgtgtcggggaagcatgagaagggtcagtcattgcatgttgtagaagactcggcaagataggatacaattatacaactaaccaaatctttgcttgttttgctgctgaaaggtggagaacaagttgccaagttgtatagtatttttggaatgaaaaaaaaagtgagtggttgaagccatcacctaacttacattattgtccaagttgtgattctttccagtctttgttcctttccttttactttgttttctctttccagtcaggttgtaccatttgtttgaattcttttgtaattgttgtaatatcaattctaaattttgatgtccataaatagttaggaaattttgcagctgtaacttaacagctgaagaaaaagatggactatgagtgaaaaatgtctgttcctgtaaatagtgaccttgtaagttgtgcaaatgccttaaatttcatgtgcctagttggactcttccaacggttccccttcaaa

SEQ ID NO: 10178 - DNA, 180 bp, Glycine max
  Clone ID: PAT_MRT3847_109200C.1
agctcccatccgtagggaccagagaaaacgcaacaattagggttgctttttttttgccgacccaccgctcccaaagctgataagttaaagaaggctgatccaaaggcacaggccttgaaaactgccaaggcagctaagcccggtgcctactttaagaagaaaaccaaaatgatccgaaca

SEQ ID NO: 10179 - DNA, 306 bp, Glycine max
  Clone ID: PAT_MRT3847_109201C.1
cctcgtgccgaattcggcacgaggaaagaaattccattctgactatacattccaagttgtaccgtttttcttttttcatttagaatataacagtggcagtagtattaatcatggaaagagatttgtgatagatttagtaccagaacatcgttataatgtattatttgaaggtatgtgattaagattggaaattcttttagcatactgctgctgagaaactcattataaatccggtatttcaaaatgtaatacagtacttcatcataatgtgattaaaaaaaaaaaaaaaaaaaaaaaaaaaaaact

SEQ ID NO: 10180 - DNA, 488 bp, Glycine max
  Clone ID: PAT_MRT3847_109202C.1
gcagaagtgttctcagtgcttatctcccaatcagtttcaagacagttgttgcatggtgttaaaatttgccccagggcacctcctattactcatctatttttttcaaatgacaacattttgtttgtcagagcggatgttcgagaagcaaatcatgtttttgaagtgattcatgcatgtgaaagggtgttgggacagaggataaatctcaacaaacccgagatctccttcagccaaaatgtttcgactttcagatcaaatgagctagagatgcttctaaagttaaaggtagttggggatcacaagaaatatttgggtattttggtcctagttggaaagtcaaaaaagcaagtgtttcaattcattaaggacatagtttggaaaaaataaataaaggttagaaagaaagggctctatccaaaacagggagggaaactatgtcaattggctaggctattcctacatatgtgatgagctatttcaaactcccg

SEQ ID NO: 10181 - DNA, 370 bp, Glycine max
  Clone ID: PAT_MRT3847_109203C.1
aggcgttcgaagacgactgcaggcggagtcaatatggcatctgagaagtcagatcaaactttagtgacacagatgccatgcggaacgctagaagttggtctgatcagggctaaaggaatgaatgtcatggatatgatgtgtaagcactatactctatatgcatagctgacgtgaatgtcagatgctgcgtatgtcactgatcctgtttcatcaactttgagacgcatcgaaagtgctctgacttcacgatggactgatctagactagatctttcgcgattgaaatctgaggcaattagctcctgtatatgcagattggacatcataaagtacacctgatgctggtttgatctcgttatgtgctgaaagga

SEQ ID NO: 10182 - DNA, 489 bp, Glycine max
  unsure (1)..(489): unsure at all n locations
  Clone ID: PAT_MRT3847_109204C.1
gggccaaataattacatacttcaagttttggtgtcatgacatgcatatataaagttccatattaactgaactttaagaaaattaattaacattgtatttaacatcatatacatttgttttgtgcttcgtatacacatatcttaaaaataaaacttaaaattatataaagcaaacagctattgtctctttgttctgtaaaaaaaacaaaaaactattgtctctttgtgttcacaaaacatttgtcattcttgtataccctcatgatttcacattatttttttttaccctcgcctttatatatattttaaaagtgccaatctttgctctctcttctccactggtttgaagcaatttgacattttacaagcgtcaagagaatattaggaaggaaaaaaacatatgtgaaacaagcatttcttaattttttttctatattctttctctagctagntcagtatatgggaagctaaaaagatagttaattataac

SEQ ID NO: 10183 - DNA, 156 bp, Glycine max
  Clone ID: PAT_MRT3847_109205C.1
caatcaatcagcactacaaaattgaattgctataacgagtgagaacctgtgtataatgtactactactggttctcactcgttatagcaattcaattttgtagtgctataacgagtgagaacctgtgtataatgtactactactgctcgagccgaat

SEQ ID NO: 10184 - DNA, 455 bp, Glycine max
  Clone ID: PAT_MRT3847_109206C.1
ggctcgagggccattccaatcttcgctttttttcacatgcaatcaaccactgatgctgcctgcgggggacaaatcggtgggatacatcccaaagcgtctatagagcccttactcaaataccgtttcaaccctaatagacagctttgtcgcatagcactttttttacgatgaccctgagtccgtcaccgttaaccttgggtacatcggactcttggcctatactgttcacaaacagaagccgctcctcccatgctgcttgcgggactggatgacattctctgtttgttacaaggtcatcttgagaatgttgctgaccttaagcaacaatgtggattgaacaatacatctactgacgcgaccattatcattcgaacatgcaggactctacacagatcgtggtccctatcctgctgctcacgatgtgagagacttccagtgcaatttgcatgtattct

SEQ ID NO: 10185 - DNA, 452 bp, Glycine max
  Clone ID: PAT_MRT3847_109207C.1
cccctataaaccggaggataacatgggaaatgttcgggaaatttttttttcctatgaaaggactttgattataattttaatgcatataaaaggtttggaattttcgaaaaaagagtacctttgaataaaaatttaaaagtccttttttaaattaaaaaaaaaatcatttatggataaaaattaatttcttttttttaaaattttaattaaataaaaacttttagcttattaaaaataggggaaaaaattttaattgttattaaagggaaagggggcttgtggcaaccattcaaattcaaaagaagattaaaattttggaaccaatttcattggaagtaaaatttttaaattggaaatattccaccaaatttttccaaatccaaataatttggcggccattcaacatggtgggcttgagcctttacaatgaaagcaatttttttttgaatgac

SEQ ID NO: 10186 - DNA, 378 bp, Glycine max
  Clone ID: PAT_MRT3847_109208C.1
gcgtccgcataaccctaaaacatataaggcaacatgatattccctctcttttgcatacacaaagaggggataacatcgagggcgcgcaactatcttattttaatctcaaaactgacacccttacacatttttccgaaaagccaagttctgaaaagaacacccttgaatagatgctccacctgctcttaatatatacgatctgaactacttccacctaaaattcactggattcctatttgttgctactactactacctatgtctccccttctcttgttttagaacttttacaaaaaattgcacctttcttcaacaattaccttagagttctcaatgaatctttctttagcaagaactccgtgcttcgttatgaattact

SEQ ID NO: 10187 - DNA, 360 bp, Glycine max
  Clone ID: PAT_MRT3847_109209C.1
atggtaaaatactattatgtaataacacaaatgaagagtgcaaaggccaattcatgataagaggcttggtaagctttgggcatttaaaaataacattaggtttatggaaagcatatctatttttacaaggctgaattgttcacatgcaattaaaactctatgatagcttattacccaggaaaagaaccaaattctaggaaatattgtattattgacagactatgctgtacctaacacatagtcaatgctcatgccattatagatcaatattattagggtatgagaattgaacgagataaaagctaaccactttttacaatggcgatggtgattatctgaccaaaaatggtaaagaacgat

SEQ ID NO: 10188 - DNA, 435 bp, Glycine max
  Clone ID: PAT_MRT3847_10920C.1
cgggcgcagctgctaactcggctggggtcgccctttttctttttacagtgacacctatgagctgtgtagcgcttgagactcgcagtgctttcagtctcgctaaaagcacatctagatccttacactgacagacacacttgttctaagggacaatctgttgaacgtgacctcgacatgtacgtttcaaacacagatccccgtatgctagctaccctaaggggacaacactatcctgactgctttggtgagggatgtgcagcatcagccttgccgtacaccactgtcaccataaagagcgagcgacaagctctgccaaacaacacctcactaagacgggtggcagacccgaacaacatgaacacagccttggaaaaggctacggccggctgggtgtcttgtgctcaattcttaccctcgcgtacgaaatatcttctg

SEQ ID NO: 10189 - DNA, 162 bp, Glycine max
  unsure (1)..(162): unsure at all n locations
  Clone ID: PAT_MRT3847_109210C.1
cttgcaagatgnnctgactatttccacgttgccgaagncctggnaantcnaatcatgggttacnttattggtaangtngngtngcaaggataatcttggncatggccatgtaactgcggtancccgttnctccagattatcgtangtnagcagntagnccng

SEQ ID NO: 10190 - DNA, 423 bp, Glycine max
  Clone ID: PAT_MRT3847_109211C.1
ccacaaccacaactagtgcaggctcatctgagggagtgaggaagcttgaatatttaaaggacttcgccataagcttgaggagtaacaactctgattttgaacaagggtttccacgggatgaagtagctgaagcggcattgcttctgatggacttgtcttgtggttttgtccacttataattagctagctagatagatagaatctagatatttttgccatttgttgtttttgctttagttttggtttgggttttcatataaaaaagtatttcgtaattactttgtttggttgtgacttgcatgtgagttgtgaagtcgagctgatgcatgtatctgcaacagaaccaaaatattgtcggcaacgttatatatagctagctacatttgtgatgattaatgatcagtaaaagtttatgttagagat

SEQ ID NO: 10191 - DNA, 273 bp, Glycine max
  unsure (1)..(273): unsure at all n locations
  Clone ID: PAT_MRT3847_109212C.1
tcgactcgttcaagaactactccaacggcctaaacgccaacaacgacgcgttccggcggtacagcgccgcctcgacgcgccgcggcgaacagttcaataactacgccgacaacggcaacgtcgnccaacacgaacttctaagctacggctccgcgcgaatcaaacctccggcgagttcagcaactacgacaaanggtgaaacgttccgaaatctcggattcaccactaggactccggggnannaatcacaattntcgtcttgagttacggaat

SEQ ID NO: 10192 - DNA, 1162 bp, Glycine max
  Clone ID: PAT_MRT3847_109213C.1
gaagtgggtctgaataatctacttcttgcatagaaacacgctttctcctgctggaggagcctttgttcctaataagattattactgataatgatttaatagcattttgaatgctttaatttcatgaagaaaaaagtgacaatgaagtaaaggatgatggacttgaagttggacatgtccaaggtgtatgaaaatattcagtggctcattgtgcaaaaggttctcacttcgatgactttttctatgaagtttgtggatgtggtgatgaggtgtatctagttagtttgtttctcagtcatgcttaatggagtcccaagaagagaactcaagcctcatagaagtctcagacaagggaatcctctctctccctacctgttcattctctgtactgagatcttgtctaccttatatatgataattgttaaatatgggtctcttcatggtctgaatgtatgtccaagagcaccttccatatcacatcttttctttgcagataacaacattatgtttggtcatgcaacataggaggaggcaaagaaaacatctcttattttgaagaggtataaggatgcttcaagacaaaggaataatttccataagtcagaactctcgtgtagttgaaatgtgttgactcctcgagttaatcaactggtttatctttttaatgttaagacaattaagagccaggacaagtaactaagaccccataccattatgggtagatcaaagacttaagtgtttaactttgtgaaggaggaagtgtggaaaaaattgaaaggttggaaggagaaatccttgtctagagctgggagggaagttctaattaaagtgatggtccagacaaccccttcctacattatgggatgtttcattctcttagtgtctatctacaaccacattaagagcatggcaactaggttcttttagggagggttcattaacaccatgaaaatgcactggatgagttaggagaaattgaccagatcaaaagttgatggcggcttaggtttcatgatggcacatgcttttaacaaagcacttttggcaaaacagtggtggtggattatccattttgaggattcttttatggccaaagtttttaaggctaagtattttcccaaatttcatccctttgaagtttttaggagccacaatccaagctt

SEQ ID NO: 10193 - DNA, 200 bp, Glycine max
  Clone ID: PAT_MRT3847_109214C.1
accgagaatccgccatgccttggccaaccatgggggtcacgatccttaccttcgtttcgccaactttcactggacagagccctcacaggaagactgacacacactcaatcctacacgctctgttccacactcattacacagaccgtcgtgagatactgaataagccactctacacacactctcaaaacactgtacagaac

SEQ ID NO: 10194 - DNA, 898 bp, Glycine max
  Clone ID: PAT_MRT3847_109215C.1
ctctgccttcttggtcagatacttcccactactcctactccaccctcactcaccattacacaacacaaaattaacaacaaagggtcttttatttaccccttttctacacccatctgattcactacttcactaaccccacttcaattcaaaagctcatatttttattcgcttttccccttctcaactcccaactctcacaccccttttgtcctttttaccccctgcattcttctgtcaaaaccctagatttcaaatctggggttttgttttctaagtcagttcagacatggttttgggaactgccagcttgcaagtctgagttttatgtctggaatccaagcttctgatgctcccacattttttttaatagccacaacatttcccagtgagctttctcatgggttttcaatggatacactgttttgagttcctttctactgggtaggggtaggggtatttgatctcttattttctagaggggttattttagattcatctagttgaacaaagcccttgcaaaaccctttttccagcacacactttgccaagtatttgagcttgttgaccaatatatatagagctactgtgttttagatcccttttttttttttttgggggggggggtcaaaatccaatttttccatcatggtttgtgcctttccactttagcatcttcacctattttttaacttgagtttggaagagttttaggcttttagcttagttgcataagtagtagaaagcttgtatacttgcaactaaatacatggatggccgagaagctatggcattctctggtagctcagctccatattacatgcatagagtaagggatcggagggtctgcctctgggggtccaaccaacccctagggttcagacctttgcaaacaactggc

SEQ ID NO: 10195 - DNA, 310 bp, Glycine max
  Clone ID: PAT_MRT3847_109216C.1
acctaaaaaaggtttttcttaaaccaatttcccggaaaaaaaatccaccccttccagggttaccagttttttattccaccccatcaccttcttttttaattattgaggggatatttttaaaaaaaaaaatttttgatttgaggggatatttccccaaattttcctaccagcaaaatctttttttacctggatgatattcctttttattgaagttaaggaggccctttgttgatgattttgaatccctaacctttaaggttccagaattgttaggcaaaggtggccaattccagattcgggttttttcttt

SEQ ID NO: 10196 - DNA, 937 bp, Glycine max
  unsure (1)..(937): unsure at all n locations
  Clone ID: PAT_MRT3847_109217C.1
acccaagcgtccatacaggcgtcagtaggctacaaaaagagaatagaaggtgagagattaatgtattgtcatattagccatggggactttcaatcactatgtgattgtaaagtgcaaagatggtgtggcagttgatgatctcattcactggttggagatcatagtcattgggattgaccaagtcaagtcctttgaatggggaaaggacattgaaagtcatgatatgcaaaacagagttcacaagacaaaccctcgaaccgaacgtttttcagggttgatagaacacgatggttcagtacaatcttaagaagattaccgttgtgccaaatgggaaggacgtggtcgacatcatcctctctcgcacccagcgtcaaacaccaaccgttgtgcacaaatgctttggttggtgcgtgatgggatcagtgacaaagtggggagaagactgaaaataaaccaatagatcacataaagaaaggatgttaagtgtcagggctgcttcaacatgcagaagaagcatcatccaggcaaattgcatttgggttaacatagaatgaggtaaaagaatgacaagatgcatgggaagaaagggataaggattttgagaagcaaggaattaataagcaagattcattttggagcaagctaaagtcgaaggctgctagaaagtacgaaggttctgcagatgaagaaggcagaggaccaattacatgggatacctattgtcataaatatccaggggaaaggacattgaaagtcatgatatgctaagacaaggtttcactcatgatttcttgatggcattcaataggaaggaggagttcaacgcatttcagacccacctgactcaccttgagtttaccagagtattntcacctgctattgagaagattgtggtgctggatttccatctaaccttgtgaaacaccagcatgatcct

SEQ ID NO: 10197 - DNA, 150 bp, Glycine max
  Clone ID: PAT_MRT3847_109218C.1
gccttgaggaacggggagatacatacagaggcttctcttgttacccccgttcttctgaggagatcttgttttttcatctcactattcttctaattgaggaacaagctattccgcagcatgaaaacacctgagctaggctagcctctccac

SEQ ID NO: 10198 - DNA, 542 bp, Glycine max
  Clone ID: PAT_MRT3847_109219C.1
gcaaaaactactgctattaaaagcatgaaaagagtggactgcatggcgtgggagctgtctttgtggcctaagatagtgaactgtttcgtgtaggacgtgctgactttactaggcctctatgggttctgtgaggagtcataaactcataatactccttatcctgggaagtgaaaaggaatagatgacctaaatggattgactcgactcctccactttcacaagccacatctgccctcacatctggtacttcaaaagagatgagaccactttggggtgatagaaagcaaaatctttttgctttacacggccacatataatctgcttcctcatgttcgcaataattacctcaccgggatcttcattgctgctaaggagattgtcctatcgttcacagtggatctttctgctatctgaacatgagaggatcaagatgaatcacctatcacactctacatctatcaacctatgagatcccacatgatgaagacaaatcacttcatttcattaactacagtgaatctgctagatcacagtcttatgct

SEQ ID NO: 10199 - DNA, 269 bp, Glycine max
  Clone ID: PAT_MRT3847_10921C.1
gcgacccacgcgtccgagcgaagaaaaaggcgatacagcataacgcggtgttgtgtatccgaagatgccaatgtcgtggaggatccttaccctaccactagctgggtcgtggcatgggcggattcattgcgaagtgcaagcccaagaaagtgaggttcactaatcggagttgtgatggcactcctccataaagacattaaaagcacgacccaacaatgtggctccttaacagcccccaagcaaagaacagtgtgagcgtttgacattga

SEQ ID NO: 10200 - DNA, 371 bp, Glycine max
  Clone ID: PAT_MRT3847_109220C.1
ctgtccttcctttattttttttctaaatattattcatttttttttattataataatcacacggcactggggaaatgtatactccgacctcttaaatggataaatacactccaggttccaaaaaccaaccacagctacccttataacatcttatttacaacacccccaacaaatatacataaaaaatcctccacaaagcccaccaaaacagcttccacaaaaccaacttagatatttccctcgcacaaacactgtgtgatatgccctaatcaacacattgccaacactccacaatggaccctttggaggaggaacatcaatcgcaatacacccacaaaggcaaactactgtaatgccttctcccattcttag

SEQ ID NO: 10201 - DNA, 399 bp, Glycine max
  Clone ID: PAT_MRT3847_109221C.1
ggctcgagctcgagccgactctgctcaaaggtgaagccaacgcaactgaggcatggggagcgcagcgccgctgacctattctcaaacttggaatagggatgaccgtgcgactactgtgttgagccgaaccatggaatcactagctccatgtggaccatcaattggcaaggctaactgcctaagcaagatgaaccggacgccgggaacggggcccaactgctcaccaacctaaacccaacacagggtgctggtcggttaagactgcatgtctgcgggcaaggaacacgaaatgcgctacagagtgtgtacccactaagctgccggatcaactatccccaaaactggacggcgctaaagctcgcgacctatacgcgaccatcgggggcaggacctaacccc

SEQ ID NO: 10202 - DNA, 236 bp, Glycine max
  unsure (1)..(236): unsure at all n locations
  Clone ID: PAT_MRT3847_109222C.1
gaagaagacaacacaaagtgagagaaattaatataatcttttatcatccaccntatctgcctcacattggatcgatatcataggtatctgcgtctctcacttacccncctcactctcttcttactattcggacattaccacctaagacgctgacccatcctgtcccttccttaccaacacacaccccgcagcactccaagccaaatgatttcgctctttctgtggcactctcactc

SEQ ID NO: 10203 - DNA, 1232 bp, Glycine max
  Clone ID: PAT_MRT3847_109223C.1
tgtcagtacgtccgcccacgcgtccgaatcggctccaaacccacgagtccgcaaaacaccaccaccaccacctcgctctcttcttccctgcttcacaatttttattttaatgatactattttgttattgttaagacggcatcatcagggaaatggatcgggtgaagggtccatggagcccagaagaggacgaggctttgcggaggctggttcaggcccacgggcctcgaaactggtcggtgataagcaagtccgttccgggacgatccgggaaatcgtgccgcttacggtggtgcaaccagctctcgccgcaggtggcccaccgccccttctcgccggacgaggacgaggccatcgtcagggctcacgccaggttcggcaacaagtgggccaccatagctcgccttctcaacaacggccgcaccgataacgccgtcaaaaaccactggaactccactctcaagagaaaaaaatgttccgccgttagtgacgacgtcaccgatcgtccgcctcttaaaagatctgcaagcgtcggcccggcccatttgaaccctggcagcccatcgggctccgatttgagcgatccgagcctgcccgctctctcaaacccctccccctcggcccattacaggcccaatctcatggaaaccgcttcttctgcttgcgatccagccacgtcactgagtttgtctctccccgggttcgggtccgggtctaacccagtttgcgcacctcgaccggtatcggtgtctccgccgtcaccgcctccggcggagccggtggagcagcgggggaagcaaatgttcaacgcggagttcttgagagtgatgcaagagatgataaaaaaggaagtgaggagttacatgtcagggatggaacagaagaatgggttcagaatgcaaaccgaagcgattgggaacgcggtggtgaagcgcatgggaattagcaacatcgagtgaagaaaaagaaaacggtgtcgtttcgagattcgaatcaagccaactggcacatgaatgatgatgaatcacaagagtaggagaaaagtgagaaccgagaatgggaaacggtgttttttttttttcaattttttattttattttgtagttaactttaaattttaagtttaatttccctttacttaagggtaaaaaataggtaataattttggcactgtacagaacctcagaacagaagtaaaggatgataatcaatcaaatagtgctttttcctgtt

SEQ ID NO: 10204 - DNA, 995 bp, Glycine max
  Clone ID: PAT_MRT3847_109224C.1
ggctcgaggtcttctcccatggccgccaccgatgaatccctccgcaaatccctcgccgagaagcacgccgcagtggaagcccaaggcaacgccgtccgcgccctcaaggccgccaaagccgccaaacccgaaatcgacgccgcaatcgaagccctaaacgcgctgaagctcgaaaaaagctccatcgagcacttgaggcaatggctgagaaagaagctttggatatgaaggctgctctggagtcaaaaggggaggtggagtttcaagtgtgtacacttgggaaaaatgtgactattaagaagagtatgctgaccattcaaaaggagataaagaaagagcaccagcgagtttttacaccatctgtgattgaaccatcatttggaattggacgtataatctattgcctctttgagcacacattctacacgaggccaagcaggcttcaaagctggggatgaaaacaccctgatgtgtttcatcgagccaaatcagtagcccctgcaggaatacagaaaagaacatggtcaccctcagcagtatgatgtgattttaaaaaattggtgcccaagttcatcccccaaatgattggaaaggagatttaaaaggcaacatttagcatttttcctttacaaaatgtgttcctttgtaaagttaaaatccttaaagccccaaagtttgattttggaaaactgatggaggttcatggggattccttttaaaatgttggtgccaaggtggacaaccccccccatgaaacattggttgaggaaacccctaaagtagttggggcttgatttggctcaaaaagcatttttgttattttaaaattcctgttttttttacaaaaaataattttcagttttgttttaaaatttaaaaacccctttgttgcaaatttaaatttggatttttgttttgtccaaaaaaaaaaaaaaaaaaaaaaaaaaaaaaaaaaaaaaaaaaaaaaaaaaaaaaaaaaaaaaaaagggcggccg

SEQ ID NO: 10205 - DNA, 574 bp, Glycine max
  unsure (1)..(574): unsure at all n locations
  Clone ID: PAT_MRT3847_109225C.1
gcaaccactnncccctctcctttctcactttctttcctctcccttcccaaaataaccaccgaaagcaataaaaagtggggtcccttttggctctctattcctttgagttctcacctcgttttttgcgattcctcgtaccccatctgtctcaagtatggatctcacagcaacccgatccaacaacaaacaaacgcttcctccgaagaggggcctcgtcacgatcttggttgtcaaaagtgtcgtcaagtccgtcacggagtttgtgtctttcgttgcgggaaacggtaacggagaagaagaaaacggaacttctctcactaccccaccactccaagtggctacaactccgatgcctgaccctaaccgggtcggcccgacccggctactgcattaggatccaaatgttaaataaaaaaagtcagcatctgctagtcgtgttaacttagaaaaagggttatagtattagtatcttatgcatacgttgtattcattgattctgtatgaaaatatttgcagaacgctgatgcgtgcatttgtgattattattattgnnnngcatgaaatcatcnnntga

SEQ ID NO: 10206 - DNA, 414 bp, Glycine max
  Clone ID: PAT_MRT3847_109226C.1
atttatatctttaagtgaataaaaaccatctataacgactagctttgctgcctatattaaaaaagatactacgcagataaaggtccgaccaaagagcagaatatggtctcaatgaccctacactctgcaacgccgacatcgcagttacgccagtagtcctatgagtgcaatatcatactgtgccattgccacggttcggacgcctctagtaacaacgggagaatggttcaattggatgcgcactaacctactgacacctacgtaccgcagctgccattgggaaaccgaatggaggcaccacagagcgggatcatatgccttcaaaacacacactcaaagctccttacagaaaagtgctacagaatgtgccatgcatcatctacggggccgctctgagacagcagcacctgaagc

SEQ ID NO: 10207 - DNA, 277 bp, Glycine max
  Clone ID: PAT_MRT3847_109227C.1
taagaggtcattcttactcgggatgctactcatccgctgcactgctgaggaccaagattaccttggccgtgtccaatcataggccttgttagctgtccttacctccaagacttatgtataatggactgacatggagccgggtgaatgtgatgaaacaactctccatgatgtcaacatggaggaagatactgggaggacccggccccaatctcacgaagcatatgatgaggatgatgccctgcctggcggtgcacatacggcacagtgagtgcaacaa

SEQ ID NO: 10208 - DNA, 260 bp, Glycine max
  Clone ID: PAT_MRT3847_109228C.1
ctgacgcgtgggactctctatctctctctctctctctcgtgtttttgatatgagacagagaacgagacattcagacttggaatcctcgttggcaccagtctcccaaaagtcagcctctaatttgcgcctcacacactctctccgcttatttactaaacccaacaacctacgcttagccaccaagtctggtaatacattgtcatgcaccagggttaaggcccaactaactgaggttgccctctgatagctcctacaatgcc

SEQ ID NO: 10209 - DNA, 114 bp, Glycine max
  Clone ID: PAT_MRT3847_109229C.1
cttaaaagtcacgctccccattaatttttctagccacgctatgattttactttacaattttcggtcccttgcattagcaacacagtaatgttttctacaagcgaagaacaaaac

SEQ ID NO: 10210 - DNA, 391 bp, Glycine max
  Clone ID: PAT_MRT3847_10922C.1
gaaaaaaaccgacctaacacacggtggataagacatacgaaaagggaaactcaatggcctacacctaaatgaaccacaaaataaagggcatgaggtgcgtacacacgagagatagcgccatgctgaacatagacgcttagctaagggttaacaaaggggcgacctaccctaaaggagggcagcaagtcccgacggatgaaacactttaaaaaaattaacaaggacctttcaaaaaccaggcaaatactatttcaatggtgcggcaccgcccataataatggaagtgcgaccttcaagcaatgacactctgtatatcaccggagcttgattaataacaggatgtaacattggcgccgtgaaaataatttcgggaatttccgaaagaccaaat

SEQ ID NO: 10211 - DNA, 527 bp, Glycine max
  Clone ID: PAT_MRT3847_109230C.1
tacggctgcgagaagacgacagaaggggaaattaaatcgttcaacactggaactctttgatataatatagaaagagacagagagagagagacagacaagaagaacaaagatgcaatcttcaaaggagaagctgaaaaacatgaccagtgctgccaaggagcaagtcgacatctataaagcaaaaatagacgagaaggtcagcttttccatctctatacatccatatatttttgttccattatacaatgattcatttgtggcgtagctaggcatcaatatcatgaagttagaatcgtgatatatatttatatatgtatgtaacctcttcaacaagttttttttttttttttatgtcaaagcttgtcaaaattaatattatataatttatgtgtgcatcttgaagcaaagggtgaatatatgttaataatgacatgagaaatgaagtctttttaggggttgatatttgtgtagacagagaaagcaacggcaagaacagaagaggagagggtgattacccatgaacgtgc

SEQ ID NO: 10212 - DNA, 1023 bp, Glycine max
  Clone ID: PAT_MRT3847_109231C.1
aaaacgactaaaattatagaagcacagcgaagccatagaaattatcttgtaaaacaagtcaacaaggcttctacagtgattgtggacaaaccacttctaacaatcatatagaagaatcaaaaaaacctgcaacatttcattggtggtgataactttgttaagaaagacatctatatcacaattaattaaagaaagaatcttagctttcaatattatttagcaagaggagaatgatttaagtgaacaagaagtgccactgaagaaccataaggtggccgcataaactagaataagattgggacttgatctgtcccgacactttttctgaattttgttgttcaatttacagaagtcaggtcccaaaccaataattgtgcctattgttttgaagatggctgaatttgaccataaggcattacttgaggagtggatctctgctcggacatttaatgacaaatgtccagacctggataatgagaagcttatagccaacttgaaaaccatacaggattatctgtgctcattcacatcgcaggggttgactgtggtcaatgtatcggcaacaacatttcctcaaacattggattggctgcatggttaccttcttcagtgcatcgagcaaggtattaaagaaaatgttacaccagtagctccatcatagttcatgtaatgaatgcttccaattttgacagattcaacttcactttgtaaatggatgatgctggagaataacttatcaaatcaaaaggatcatggcttggggaaaagatagcagcataactgaataatagatgttgtaattattggattatcaacatttgctaccaaattaattgtatgatctatcatgtgttttgatgagaaatttcatgcttccattccattgcgttgtatgatcaacatcttgcggcataacaaatatcaacaaacatacacacccccaatccgtttgaatttaattatgcaattcatgcatggatgtacgatttgcttttaaggaaacttataaagatattgttcaag

SEQ ID NO: 10213 - DNA, 144 bp, Glycine max
  Clone ID: PAT_MRT3847_109232C.1
gttataacaaaacttcactaagacaatcaattttaaccacgcttgaccaatccaaacgaggcttaattatttcaacccaaagggggggggcttcaaactccaaaattataaacctgatggcctgaaacaacaaaaaatgaaaat

SEQ ID NO: 10214 - DNA, 311 bp, Glycine max
  Clone ID: PAT_MRT3847_109233C.1
ctcaaacaagtaaaattagtttgagcacgcgccgactacgatgttgatgatcgcttaccctcgttgggtgaggtatcttgcttcaacacttgcattcttgttggaacctctcatcactcgctggaacacaactgctttacactccaacaaatccatggaatcacattgagccacggcggaacaccttcagactccatatagcgtcttcttcctgcttcgacatcattaacgccaaagtacacggttggaagaaacaatattcagacttacgtgatgctttaagttttcaaaaaaacgacgcattacccttg

SEQ ID NO: 10215 - DNA, 573 bp, Glycine max
  Clone ID: PAT_MRT3847_109234C.1
attcagaccacatcactgggtctttctttatctctctctctcggaagctccaccagctgttgaagactttaagttgttagctgttgacaatttgaaaacgagaaggcagtgaacaaactttgagttcttctctcagtagttcttctcttcaaagtcacaaaattctgttttagttatggccaatgatccattttttgaagctcaccacagaacaagacaacaacaacaccaatgcatgatgatgatacaacaaccaaacaatgatgatgatgttgtcccagaacacacatgtgcacaacaacaacaacaagagcaacaaaaccaatctccaaaattggctgcttcttccacttcccaaaatgctacacctgtgctacctgcttttgttgccttgctgctccttgttacttcaattgccccagcagcactctgccaccctttgcaaggtagtaaccacacttttaggccaaatcatgagttgctcaagttgaggagagtcagagcacacttgaagaaaatcaacatgccttctgtcaagacaattcagagtacatatggtgatttgatagattg

SEQ ID NO: 10216 - DNA, 268 bp, Glycine max
  unsure (1)..(268): unsure at all n locations
  Clone ID: PAT_MRT3847_109235C.1
cggaaatantagccgacgcgcgggcggacgccagggggggaaaactttaaagccagcaccctcagctccccaggccacagccagaccttctgaaaatgcggaatccctagcctgacctggaaatagaattctcaaacgcttcgcacgctagctcaatctaacaaaggaaaacaggcatgaccctatcgcagagaaagatctgacaattagaaaatatccacaacttacattaatagacacaacagacgtgtgaagtgtgcgtcactct

SEQ ID NO: 10217 - DNA, 502 bp, Glycine max
  Clone ID: PAT_MRT3847_109236C.1
aaaaaaaaaaaaaaaaaaaaaaaaaaaaaaaaaaaaaaaaaaggggaaaaaaaaaaaaaaaaaaaaaaaaaaaaaaaaaaaaaaaaaaaaaaaaaaaaaaaaaaaaaaaaaaaaaaaaaaaaaaaaaaaaaaaaaaaaaaaaaaaaaaaaggggggggccccccctttggggcctcttcccccgggattttattccgggccgggtccctgggggtgtccaagtttcccttttaggggggcttttaaagcttgggcaaaaaatgggaaaaagcttttccctgggaaaaattgataccgcctcaaatccccccaaaaattccgaccgggaaaattaattggtaaacccggggggcccaattggggggcctaccccactttattggggtgggcctaatggcccgtttccaagggggaaaacctgtgggcccatttgtttatataaatcgcccaccccccgggaaagggcggtttccttttgggcccccagggtggtttttttttt

SEQ ID NO: 10218 - DNA, 330 bp, Glycine max
  Clone ID: PAT_MRT3847_109237C.1
gactctctgtgagtcaaacaccgatctgaatacacaattgagcagcaagtacggatccatggtgagggaaatagtggtgatgacagtaacgataatgtgaattagatgaacgaacacgttcaagttgacgctaacggagagattgaggaggatcagagtaaagtgcatgccagcctggagcgggtgcaccggattgttacagcgttagggatcaacctggactaactggtgagctcagaggattattggagcgttttcaccacgataggagtagtggtgaacttgctgaacgctgccatggacgactgttcggagtgctacatgtactag

SEQ ID NO: 10219 - DNA, 213 bp, Glycine max
  Clone ID: PAT_MRT3847_109238C.1
aggaggcgttggctcacgcagagcttgatgtggactcattcgtataaggcgggaatctatgcatgtctcgttgggcaattacgaagaacatccatttggcacgagcctggctaactgcgaatgcccttgagtgatgggctacctttaacaggctggcatattgcaacccaactgcggagactttgcgagggactgtgacatcaaataacgatg

SEQ ID NO: 10220 - DNA, 420 bp, Glycine max
  Clone ID: PAT_MRT3847_109239C.1
aagaagcaaattttgcctatgttgggtgcagatcatgcaagagctgcagaaactgaagaagggaccccagttagagtttgggacatggacaccaaatccatgcaccagctcgttctaaagcgatggtcttcatccaagagctatgttcttattggaaagtggaaccaagatttcctgagaagaagagatctcaagaaaggggatgagatcggatttcattgggatccgtataattgcgttttcaatttctgtgtccttaaacgagctatgccagagaattaatctgtgttagctttattctactttcaaatcattgaggaaagcaatggccaatatattatgcctatatgtaacatacaataatgttattgcaatagcatgtacttcaaactaattatttaataccaaaaaaaagaaaaa

SEQ ID NO: 10221 - DNA, 207 bp, Glycine max
  Clone ID: PAT_MRT3847_10923C.1
ctttgttgtgagctataagctagtttatcgtgaggagaatatgaagtcgtatgtgttctttgttgctgcagtaggtttggtagcatggccatgacatggtgcagggtaccaaagggtccctctccgagtgacaactggctatagagagcgttcatcggaggtaaattccccaatgctcaggcttgctctggaacgacacaatatccg

SEQ ID NO: 10222 - DNA, 426 bp, Glycine max
  unsure (1)..(426): unsure at all n locations
  Clone ID: PAT_MRT3847_109240C.1
gcgtccgctgtcgttccagaccccaagtaatctttgggttttcgccttacagtttaatgaacatgattgggacgctcaacgtgtacgccgcattttgcaagcacgagggtgtgccggtgagatcccccggaacgagaggtgcgtgggagagntatgagtgtttctgcgaagcagatcagattgcggagggggggatttggaccgagcttgatccctacgcgcgcaacgaggcgacggactagctcaacgcaccacgttgttcatgtggatgcatattagctcggcgctgccggtaccgtttgggttagaggagattggggcggaccaatgagggataggattactgaagatgtcagcacaccaagtagtatggcctcagagatcttagcgcctctgactcctgggattgagggtgagatcttgcgg

SEQ ID NO: 10223 - DNA, 1397 bp, Glycine max
  unsure (1)..(1397): unsure at all n locations
  Clone ID: PAT_MRT3847_109241C.1
ccacgcggcagatctcaagatcagatcctcatctaccaccattccaggtgtagccatcaaaacaacgtttgtttaacaaaacccattatcagatcagatccgatcagatcctcttcagattcggatcaccgccgagtccatgagcacgccagcgctttcagggggcacgggcctcttctctggattcacgcgtttatgcaagggccttgcggtggtgcttgtttgcggtcacattgcggttcagtttatcccttcagctgttaactatcttgctcttattcccgccaggacaatcccatttgcctggaatctcattacagctggatatgttgaacaatctatatatggggtagtggtcagcacattaagtctcctgtttattgggaagctgcttgaaccaatatggggctccagggaattctttaaatttatctttgtggttaatcttctaacttcagtatgtttattcatcactgctattgccttatactacattacaaggctggagacttacctttacatgccactttctggatttcatggagttgtatctggttttcttggttggcattaagcaaattataccaggatcaagagcttcctttcattaagtttaaaaacaaagtgggttgccatctatcactgttattgctttccattgctattagcttctggacactagagggctacagcatatcttccaaccattatatctggcacgtatataagctggatttatcttagatactggcagaggaaaccagaaactaaacatagaggtgatctgagtgaagattttgctttctccacatttttcccagaatttttaagaccagtcatagaccctatcgcttcaatatttcatcgaatgctctgtggaagatatgatgcttctaatgatggtcaaggcaacagtctggaaagtgagcctttaccaggttcggactcaattgaggcatccaggagacgagaaagaggtgctcgagcactggaagaacgattggctgcagagaggttggctgttgcacgacgtgagttgcaaagagaggctgaggaaaatgtataattccccagcgtttgtaaattttggatcagttcaggcaatatgcacctattaggagtgatattttcagaggtcgtacagtaattagaaattttttgtttaggtcaaggaaaattttaatgtggttttgccatggactatgatctttacaaaaccgaaggtttctctttcttttgtcagataaatatatttgactttcttgtgtactttacacaaatacatagaatctaaagagtttttcagttgtggggggngtgngggggggtaaaaaaaaaaaaaaaaaaaaagggcggccgttttaggggttccaagtttacttccgcgtgcttgcgac

SEQ ID NO: 10224 - DNA, 346 bp, Glycine max
  Clone ID: PAT_MRT3847_109242C.1
aatgtttcaacactggtcaaatcatcattaatgttgcttgagattatagaccttggtatcacataataattacatacactaatctttctccaatttcctgactattttggctgggaaatcatatacatgatgttgaatggttatggtgataggattagagatatgcatttggaaatgtaaattttgagatattgatttatctgatccatgtacattctacggattacgtcatgtcctgtatcttcatgtgcgacttggtgtaacatagtcatgatatgatactttagaaattattagcttttttttcgtcatcacagtttaatttttacgactttacttgaaattt

SEQ ID NO: 10225 - DNA, 198 bp, Glycine max
  Clone ID: PAT_MRT3847_109243C.1
ctccattgacgaactgtaattccaaataacatattcttttcactctaaggagattacaatcttttagtgatccatctacatttaccaacactttaacatctttttaacttctacattataactctatcactaaatacatctctcatactcgctaatcaaatgatcaaccttattgacttcattcattcatactctttt

SEQ ID NO: 10226 - DNA, 555 bp, Glycine max
  unsure (1)..(555): unsure at all n locations
  Clone ID: PAT_MRT3847_109244C.1
gcacgagcgcaacacaacaaaaaaagacaacccagagagcgcgtcttaataaacgctcttctctgaaaacccccatttcttttcttctttcttcttctctttcgcttcttcgatcttcgatcttcgtcgctgaaaatgagagagtgcatttcaatccacatcagccaagccgggattcaggttggaaacgcctgctgggagctttactgcctcaaacacagcattcagcctgatgggcatatgccaagtgacaagaccattggtggaggtgatgatactttcaacaccttcttcactgaaactggagcaagaaagcacataccccacacaatttttatagatcttaagcccactgtaattaataaagttaagactgaaacataccaccaactattccatcctaagcagctcattagtaaaaaagaagatacancaaacaactttacccataaccactataccattacaaaagagattattaagctttacttagaccacatcacaaanctgactaacaactacacaactctccgaaattttctaattctcaatact

SEQ ID NO: 10227 - DNA, 406 bp, Glycine max
  Clone ID: PAT_MRT3847_109245C.1
aattggcctttaaaataatggtttttaattctgttattctttcaatttttttaaatctatatttttaatttggttaattatgtggccttatatatataatagaatatatttatatataatatgattaaaaaaacatattttaaagaatacaagcgcacacacatatatatatatataaaatatttttctctgtttgccatcctttggccatatgccacaacaccatccgctatggtccaccatcgataacactggtaagttaagtgattcatatccatcaaatgttaaatgcatatagttttcttaggaaccactatttaggaagtcacacccatttacattttgcctaggaaattgtcctcacttagtctataatcaatttcacataagcaaccccccccaccca

SEQ ID NO: 10228 - DNA, 357 bp, Glycine max
  Clone ID: PAT_MRT3847_109246C.1
cgaaaggaatcagaatcgcttggtggtgatttaataacaaaatctgtgtaactatcatccatacgtcaaataacagaacacatgtataattcaaggtgaaaatgaacataaattgacatgtaatgacataacttgtgttcttacttgatactcgcaaataattctacaatctgacacacgcttatgtctacgatctctaacaactgtacacctactataaccagaaactctgagcccaacgattgggattactatataaaggtaattaacacttatatgctcaatattaacaacgagcattatgagtgcatggcgactctcttgttcgacattacctacactgactgctatacactt

SEQ ID NO: 10229 - DNA, 442 bp, Glycine max
  Clone ID: PAT_MRT3847_109247C.1
aacaaaaaaaggggaacaaaggccccacttaaaatttggaaaaagggcggaaattttacttttaaaaattgggaaaaaaaaaggtccattttaaaaagggttcccttaacaaaaagccccggggttttttttgaaaaaatggggcctatttaaaaaggggccaaacccttgtttttttgaaaaatttgccggggccggaaaaaaaaccttgggtgggaggggaaagaatattcggggggaaaaaaaacaaaccttttaagggcccccccccctttagattgggcacccccttttttagccccaaaacttgggctgtccccctttttgaaaaaaacccaggcgaaaaaaacttttttttaacccaaaaaaaattttttggcattttgggctttttggagacccctttaaaccccaaggttttttttttaccccaaaggggggg

SEQ ID NO: 10230 - DNA, 1199 bp, Glycine max
  Clone ID: PAT_MRT3847_109248C.1
cggacgcgtgggagtcggcgagaagacgtcagaagggggtggtttaggtcattagaggcagggaatattggattggttcaatcttgagttggaatggcgtttgaagactttgatcctatcttcagtaaacccaaagtgaagtgggattctgaaagttgttcttcctcgtgtccctttttccttcatgcctatgcccctgattcttctcaccttgtaattcatgtcaccaatatctacgatgcctgggaaactcgtctttcgctctccatgcttgaggacattagggatattgttggtatagggggctcttggtcagactttgccgattattttctaacatccctcaagtcacaagatcttaagctggttctagagccagattcaaattctgatggtgttagtcatgtgaaattagtagctcagaaatcaaaagggatgcctttgatcaccattcctctcaccaaacttatggactccgctgctatggaggttaagttaaatttttgttcgagcctctttgaggcatttgaaatcaaaagcacagagtgttctcttgaaaaagagcgagagcactctgctcggacaaacatgttagcagctgaaaaggaaagaaatgaagccatacaactggaacagcgacaaaagtttcaaaagattagcaactcagagaatggcgtttctactgatggattgcaaaactctccagataagcaagcagctcgggatacaggtgctacaaaagtcaagaatcgtaaggtgccagcttatcgcaggactagaataagaggggccctcttacatgatagtgatgaatgagttatgtaattcagttctcattcaaaccagttgctcagtagaaagcgaaaggataagtaacgaaagtagcattccattgaatttcagaaatttttgctgggcttggtagatgggggaaatgtgatgggaggaaaaagactgggccatagggatcgtgtcagtgtatgttttcaacttttcatggtgaaaagtgaaagaccccatcgaaagaagaaaatgcatttacttgtgagagtgttcccagacaagataagattgttagttatgtgccacttgatgatcacgaccacttaatctagactaatcttacattacagtggatgtgcttgtacatattgcaactattaatacatgcataatctttttggtttgtgcttttagat

SEQ ID NO: 10231 - DNA, 1271 bp, Glycine max
  Clone ID: PAT_MRT3847_109249C.1
ctcgagccgattcggctcgagatgttttccaatacataaattgtgaagatggaaagatgtctggtcctcctggggatgttgcaaattccctcatggacggctattccaagggtaataatgaagtgagacgaaggtctagattcttacgtagaagaggaagagtccgtcgattgaagtacacctggaaatctgctgcttatcattcaattaggaaaaggattccacagaaaggggatcaaccctgccgacagtataatccatgtggttgccaaacggcttgtggaaagcagtgtccttgtcttcaaaatggaacctgctgtgagaagtactgtggacgccccaagagctgcaagaatcgatttcgtggctgtcattgtgctaagagtcaatgcagaagccgtcaatgtccatgttttgctgcagatagggaatgtgatccagatgtttgtaggaattgttgggtcagttgtggcgatggtacacttgggattcctagccaaagaggggacaattatgaatgtagaaacatgaagcttcttctcaaacaacagcaaagggttcttcttggaaggtctgatgtatccggctggggagccttcttaaagaatagtgttggtaagcatgaataccttggagagtatactggagagttgatttctcatcgggaagcagataagcgaggaaagatatatgaccgtgaaaattcatcttttctctttaatttgaatgatcagtttgttcttgatgcttaccgaaagggtgataaattgaagtttgcgaaccattctcctgacccaaattgttatgcaaaggttattatggttgctggagatcatagggtaggcatttttgccaaggaacggatttgtgccggggaggagctgttctatgattatcgttatgagccagatagggctcctgcgtgggctcggaagccagaggcatctggatcaaaaaaagaggatggggctccttcaagtggtcgtgcaaagaagcttgcttaatgggtgtttgttcttcaaaaatcaattcttttaagttattctttaacacgtaggggaagcaatctcattggtagcggaaagaagtattgttttaagttttttgttcgtagcaaggccgtgcaattgttgctgcataggtaactaactacatttaaacaattcattttaatattaatcgactgtatattcaccattccaaacggaaaatacaagcttaatcaaaattccatgcaattctttcccggagggaaatgggcaaatgcacat

SEQ ID NO: 10232 - DNA, 299 bp, Glycine max
  Clone ID: PAT_MRT3847_10924C.1
cttaggatatgttattcattaattaatgggtgtggctgactggctggtgatctgtagccgagggacttcctaaacccgctactatagactgcaacctactgaactaactcattccagtggctgtgtgccatgcattaagccacgtgaccagcaatgtcttattagctgcacatgctgtagcttacactcataccattaaagctcttgagccattcttcaatgctggctgcttcacagttcatacttggccaatcaattcctcatcactttgtttctgatactaggctaattgttgttat

SEQ ID NO: 10233 - DNA, 280 bp, Glycine max
  unsure (1)..(280): unsure at all n locations
  Clone ID: PAT_MRT3847_109250C.1
caaggacgacactntagtctgggaagctggaaaaaacaaaatgttgaaaggtgcccagggccaggtattttggccaccgtgctactgggaacccactcaggaaactttgaactactttcttggatgatgatgaacagtacaagtgcagatattatgagtcttgttccgatcagaagcaagtcctttgtggtcagtggcaggtagcctattcattatgcgatcacgacatcgtccatgaacaaacgaatggacctcagtttcaggctgcttcagtcgtcag

SEQ ID NO: 10234 - DNA, 610 bp, Glycine max
  Clone ID: PAT_MRT3847_109251C.1
cacgcgtccgccagcatccagcgcaaagctgcatgtatctattcatcatccccatccacgcgccaagggacatcgatttcaattcaaccaccgtcacaaattcaccatttttccttccccttaaaccctaatcgatcccaatctcaatcaaattattcaccttgattccatcccagaaaaaaagacacaaagaaacagattaagattaaggtgaattacaacttgtttcttataaatagaaacggaataggaacggaggaggtagtatttgtttcagattcattcccgtttccagaaaaagaaaataaaacataattttgagagatagaaagaaataaattaagaaaggaagagagtgttgtgttactgtggagtgagaggagagagagaaatgccaagtgtggctgtgaagctctacagcgtgttcttcaagttcctcttgaagcaccgtctgcacaaccgaatccaaaccacttccgaaccctccgacccgttcggcgtcacgacccgacccgaagaatccgtcgctccagcgaacccttccttctccgacggcgtcgccactaaagacatccacatcgaccccttaacctatctctacatccgaatc

SEQ ID NO: 10235 - DNA, 584 bp, Glycine max
  Clone ID: PAT_MRT3847_109252C.1
gacaccacgcggcgggagaaagagtgtgtttgtgttgacgagagagcttcacaaataaactcacaaaaccatatgatttttcttcttctgggtctttgagaccatgaagtagtagttgtagtagattatacccttttgagttttttttttcttctcttttttttttctccaaaatccttatttcccccgaaatctagactagctaagatctcttgtggggtatttgagatttcttttttttttcaagtgttttgaagaggtgaatctagtttgagagatatagaagaagtccattaatcttgcacctatgaggatccgtaagagacaagtgcctttccctctcttgccggcgacttactcagatcccaacctgatcaaccggtcaccggtgatggtgcaactcaacgatgacaccaaagcttcttcttgcactcattatcatggttcaaccaccactgcaccctcacccctcttggatcgccctcagccggccgatcagcctctcccaccgatcgggaagcccaccaacggctctgatgagtccttcggagaatggcacaaaaagcaagaagagtcttttggtg

SEQ ID NO: 10236 - DNA, 301 bp, Glycine max
  Clone ID: PAT_MRT3847_109253C.1
aaccaaaatctggccccggaatcttcaaaaaaatagcaaaaaaaacctttccccaagacattccaagacttttttaagatttttcccaagggggaaggaaaaccccgattggggggtgagccataaccgggttggaacaaaggcccaaatcaaattaagtagggagaatgggggggggggagtcaggtttgccccccaaaaggggacccctgggggcggggaaaaattcaaaacctggcagctcggggacatttcctttatggggaacccccaggggggacccgaaaaggggccccggaag

SEQ ID NO: 10237 - DNA, 372 bp, Glycine max
  Clone ID: PAT_MRT3847_109254C.1
ccttcgtcagctaggaatgctgctggggcgttgatctctatagacgtttccataaatactcggaacctggcatggaccaggcatcactgtatgactatcacagtcgaataccgggcttacttactaatccagctgccaagctcactagagccttccaaaccgtgttggagtcattatgcaaactcaaccagcacaatatgccgagaacactcatgacgacgcctacatacaagatctctgctacgactttgttcacaatagcgacacagtccacatcgttgccgacgaatacctacccctcagacacttacaagcacagctgagtaccagaagctcggcttctacgccctgataggactggccgccacctac

SEQ ID NO: 10238 - DNA, 172 bp, Glycine max
  Clone ID: PAT_MRT3847_109255C.1
tcagttcttccacgcgtgcgttcagcctagcattacatagctaaggtcgcggctacgacgctgttggcatctaagaaatgtaccccgatactcctaaatgcgagggttattactaactgggactggaactggaacaaactgatttatttattacattaacgatacttgctgt

SEQ ID NO: 10239 - DNA, 469 bp, Glycine max
  unsure (1)..(469): unsure at all n locations
  Clone ID: PAT_MRT3847_109256C.1
tacggctgcgagaagacgacagaagggccccgggcaggtatcagcggactacatggagtggtttttcaagatatctcacctatttgtcacaccgacccacgaaggcgatgagcccaaacagccaactaccccagatgtggatgcatacgtcgagccacatgtcccccggaggttccaattgcagttgatctccccatacattcagtggtattttaatttggttaagtagtttgtaatttgttttttatttaatattttgtaatcattgtgtttttatgactgtcacaggtttcttgtgaaggttgcgaagcaatcgcataaaggttggagtgtgtgctcaaccttaggatggtgactgcaggaatagagttacatgatatcatggaagattgcctacggctcgctaaaggagaggcctctgatggaagtcttanggcacgacgtagacaacgcataaattaacttttaa

SEQ ID NO: 10240 - DNA, 580 bp, Glycine max
  Clone ID: PAT_MRT3847_109257C.1
gatttcgtctcttgatatattattgctgttaagagatgaccttacctgcggtgccaatacaagaataaaatttcgtctatggttcccggggaaaaaaaaaaaaaaaaaaaaaaaaaaaaaaaaaaaaaaaaaaaaaaaaaaaaaaaaaaaaaaaaaaaaaaaaaaaaaaaaaaaacggtaaaaaaaaaaaaaaaaataaattatgatgggcgagagcttttaaaaagggccccttaaattaaaaaacacaagttagatttgataaatcaacttaaaaaaaaaaaactctggaaacccatactgctgcccaatagaaaaaaacccctttaacaaccctttgccttacgtaaaaggggcccacacagagccctctccaaaagttgggcaacccaaaaaggaactgggactcgccctgtagtggcgccttatccgcgcccataagagagggtacacgcaccgtacccccaaaacaagccccccccttataccccccttttttttcattttctttttttttttttccagccttttagggttatgccctgggatttttttattgggggttttttttggggggccc

SEQ ID NO: 10241 - DNA, 759 bp, Glycine max
  Clone ID: PAT_MRT3847_109258C.1
tctccacgcgtccggcgagctcaatggaggcggaatggtgagcccgaacgtggcggcgccggtgaggttcccttcgcgctttgatctaagttatactaacgctctctcgtttacacccaaaagggccccgacaatggcttcaggggagcaaaaagcaccaccccaaacccaaaggttgcaaatttatcccaatacaaattctggggtctcacctttctggagagagaagtatgaaagagaagccaagaggtattgggatgttttctacaagctccacaaggacagagttagttttttcattagtatttattgtgtttttggtctctgtcaatacaaattttgttgctcacttgtgtattcaatcaatactatttgtgattgtggtgcctctcttttgaaaaaggcaaaaattgtgtattattattaataaaaactggtcattaacactaggagtgtaaataaccagaaacaggttacaaccagtggatccaataatagtggatagagtttacatttcaaagcatcccacacaaacttcccatgcatgttgtgtgtttgtttttccattgaacactaaccaaacagaagttgttgcttctcacaaaacggtgctttagaacgtgtgtccatggaatgaaacggtaaaccaaatgttgcctccaaattttccacacagcagcaaaccagaagacaacctgccagatttttgccttttgatatgtcacttacctagtttttaagttctctctctctctctct

SEQ ID NO: 10242 - DNA, 300 bp, Glycine max
  Clone ID: PAT_MRT3847_109259C.1
tacggctgcaaaagaacaccgaagggaaggctgttcccagaggagccttagtgcttaccaacatgtatgacgagaagctaccttcacatatgaactatgctgcacccaaacaatagtacgcttagatgctgtctcaaaaagcgatgtatgtgcatgcatctgtatcttgatacgcttgctggataaaccgcactgatcaccagactgttgcatctctctactacattgcttcacataaacagatcgcaattctaggcttgtagtccttacactaatttcacatattgcaataatctagtg

SEQ ID NO: 10243 - DNA, 541 bp, Glycine max
  unsure (1)..(541): unsure at all n locations
  Clone ID: PAT_MRT3847_10925C.1
ggatcctaccgtggaaaacttgctacctgattttgactttgatcacacggtgggtaggaagttagcatcatctattgggacccggtctgtggtgctgatggctgtggatgtagcggattgcgatgggtgtttatcaaggaaagctgcaaagctggttattaaaacaatagaggatcattttgctgcgtggaagcatgctaagtcanggaatgcgcctaaagtggcgcttgtggtgacgaacattgacttgacggctagatcatcgtcaccaacatggttgcagcattggatatcgcacagagcataagacggtggactgaataaggtaactagctggcacattgagagcgcatccagggactggcggtcttgcactattgtggctacttcggtcactcaggcatgacttacagggcatgagtgggctgctggagctcaccgtgcaggaccgagttctgggagagactctatcggtaaatctgctattcggaatatctcacctcctgctcaaccacctgtgaacgctactagcattaccgta

SEQ ID NO: 10244 - DNA, 487 bp, Glycine max
  Clone ID: PAT_MRT3847_109260C.1
acatacatgtatcatatatgccttcaaaggccagggtacttttacattagaagaaaggcattaccatggcagatattatagcacacaagatgaaccaacaacaaaataacaaacaggtccaaaaaaaaagtccaagtaaataaattgcaagatgttagtcttcattgaaacaagtggccataaaagaataataatgcagctcaaacaccaaatatatgtactaaagatattaacatatgtgtgtaaaacaatatgtaaaaaaaaaaaaaaaacgtattctgcaaatgaattacagtgtagtctagatagcatgtctaaaggaaaataacaagtcttggatgcatatctgaagtgagttccaaatcaaccttaacaatataattcaaaagctaaaattgaagcaaaaagtaaatattagtcatctagtaactggattcaaccaaataaatgaacaaatgattattcaaaaattatcaaaacattgaag

SEQ ID NO: 10245 - DNA, 296 bp, Glycine max
  Clone ID: PAT_MRT3847_109261C.1
cgacttgatactgttcctgcagtccccccttttatgcccttgattgctctattgtatcctcatgggaaactagtagctgtgggggcaccggagaaacctctggcattgcttctcccacctttaattgtgggtaagaatacaaacacgttttttcactgattcatgttccatttgtcattcacttgaaggcagatttcataaggatagaacaaccaagcacatgaattattttatctcatttcgtggcaaggaaagacacaacttgttcacacctaagacattttctttggctaaat

SEQ ID NO: 10246 - DNA, 516 bp, Glycine max
  unsure (1)..(516): unsure at all n locations
  Clone ID: PAT_MRT3847_109262C.1
ggataattaatataatctaatcaaatgtgtttacatatatatatatatatgttctaaaaagttgtcatttgggtttgtattgttgtaaataaacaatttagtagtactagtgcatttgtactcatgttactatgcatttgggtggaaaatatgtattataatggtagaaaaaagggtaggagggtgcgcaatacgcacggtagactttgtatagggtggacagggaacttcatcagattcttttgctctcgagtgtgaagctgaaacagcagcagaggcaagagggtgtgttccacagaatgatatttgactgaagatgaagatgggcatgcatatcttgcagtgtcctctcagttgtcttgttcaatatgtatgttcaaacttgaaagttgaaagcatcagtgtgtgatggtcacagtctgagagcttttgagctgttaagaggtcattgtcgatctgatagcnttgcagggtcacgcttgctcttttctcaattnggngtcttttcctatgctc

SEQ ID NO: 10247 - DNA, 253 bp, Glycine max
  Clone ID: PAT_MRT3847_109263C.1
ctagtagctaccagaatttagccgtacttgttttaccttgcttgttgtatggttttttagtatgtaaataaacctttatcatattcctctaggctaaatatgtatttaaaataatacttttattttaaatacatatttagcctagaggaatatgataaaggtttatttacatactaaaaaaccatacaacaagcaaggtaaaacaagtacggttaataatgtatttaaaataaaagtattattttgaagccta

SEQ ID NO: 10248 - DNA, 852 bp, Glycine max
  unsure (1)..(852): unsure at all n locations
  Clone ID: PAT_MRT3847_109264C.1
gagtggtgagtaacgctaacactggcaaaggcaagatgattcagacgtatggattggtgtatgcttcaggaaggagttaaaccgttcattatggtcttgtcttcccccaacaaccgtttccttctcttttattcatgacacaccacactctctctcacatcttccatctcctccatctttctcacacttttctcccacatcacaatcacatcattacgttgcattaatacaatggaccaaacaaccgccgctgccaacgaggttgtccgcgagttccccggcctcctccgcgtctacaaagacggccgcgtcgagcgcctcctcggcaccgaaaccacccctcccggcaccgaccccggcaccgccgtccaatccaaagacgtcaccatcaacgccgaaaccggtgccggcgtccgcctctacctccctcccaccgccgccgcccaaaaactcccccttttgatctacatccacggcggcgccttctgcgtctgcaccccctacaaccccgcctaccaccaccacctcaacgccctctccgccgccgccaacgtcgtcgtcgcctccgtccactaccgcctcgccccagagcaccccctccccgccgcatacgacgacgcctgggaggtcctccagtgggtcgccgcctccgacccggagccctggctcaactgccacgccgatctaagcaccgtcttcctcgccggcgacagcgctggagccaacatcgcccacaacaccgccatgcgaggcaccacacaaggcttcgggaatttaaccctcnaggcatggtcttgcttacccatacttcgggacgatanaaagacgagcttctggagtatctatacccta

SEQ ID NO: 10249 - DNA, 1155 bp, Glycine max
  unsure (1)..(1155): unsure at all n locations
  Clone ID: PAT_MRT3847_109265C.1
cccacgcgtccggcactacgctgtcgtttgcggtgttagaagacctagtcgggcgtgatggcgaagaagcgatcagccccgagtggcggtcgtcgggaaaaccgagccgaatcatcttcccgacggctcaactcagcttccggtcgcagaaaactcgttgcgttcttcatcgtatcgtccatcatcgctatcgtcacttatcgttatcgcttcagacaatcttctccttcgcaaggccttgtcacaactcatgctaattgccaacatatactcgccgaaaattcaaaagtatcaggaaattcgtctcagcgccattatacttatcctgtgcttggctacattactccctggaattctcgaggttatgaattggcaaaaaggttcaactctaagttcacacatttatcacccatttggtatgatctaaagaggctgcagttggtctatgttttaggttctcctcctgagaagttgcaagagtatgatttcggtcctaaatatcttgagactttaagtgaagaagtagatgggtgggggttaatgacatatgacctctctaatccacattatcctggtcctagttcatctttgaaatggattcaaaaagttctacagctgcttctcggtacctctggcaatagagcccaaagccttgcccccaagatacttcttggtatcaacttctatggaaatgatttctccctttcaagggatgcagatgcagggggtggagctattattgggagagattacctggcacttttggagaagcactggcctgaactgcagtgggataagaatagtggggagcattttttcttttacactgacgacaaggatatcaggcatgtggtattttatccatctttgaagtcaatttctttaattttggtttccaaagtcttgttattttatttacccttctttatactacaaattatgacctgagatgccttccttttggaaatgaaatattaagggttgatttgaactgacatcgcagcctccttgagggtcagcagaatattttaatcctcatatatgtttgcaatttatgcactacaatgaaattctagtgaatacttgattataagtccttgggtttggttttttagtgagtttttattatatcngctttatgggtttgcttcatca

SEQ ID NO: 10250 - DNA, 1472 bp, Glycine max
  Clone ID: PAT_MRT3847_109266C.1
ccacgcgtccgggcactacgctgtcgtttgcggtgttagaagacctagtcgggcgtgatggcgaagaagcgatcagccccgagtggcggtcgtcgggaaaaccgagccgaatcatcttcccgacggctcaactcagcttccggtcgcagaaaactcgttgcgttcttcatcgtatcgtccatcatcgctatcgtcacttatcgttatcgcttcagacaatcttctccttcgcaaggccttgtcacaactcatgctaattgccaacatatactcgccgaaaattcaaaagtatcaggaaattcgtctcagcgccattatacttatcctgtgcttggctacattactccctggaattctcgaggttatgaattggcaaaaaggttcaactctaagttcacacatttatcacccatttggtatgatctaaagagccaacagactagcttagttctagaggggagacataatgctgacagaggatggatctcagagcttaaaaaggcaggagaagctttgattttgcctagagttgttctggaagcatcaccagcagtgctgttgggaaaggaaaaacaaaggaacaaagccattaaccttatagtaacagagtcgagggaaatgggatatgatggtattgttttggaatcttggtcaaggtgggcagcttatggtatcttgcatgatccaagcatgcggaatttggcattgcagtttgtaaaacagcttggagatgcactgcattctataagctcagagaaaattagtgggcagcagctgcagttggtctatgttataggttcaccttctgagaagttgcaagagcatgattttggtcctaaagatcttgagactttaagtgaagctgtggatggattctcgttaatgacatatgatttctctaatcctcataatcctggtcctaatgcacctttgaaatggattcaaattgttctacagctgcttctcggtacctctggcaatagagcccaaagccttgcccccaagatacttcttggtatcaacttctatggaaatgatttctccctttcaagggatgcagacagggggtggagctattattgggagagattacctggcacttttggagaagcactggcctgaactgcagtgggataagaatagtggggagcattttttcttttacactgacgacaaggatatcaggcatgtggtattttatccatctttgaagtcaatttctttgcggttagaggaagctcgttcatggggatgtggcatctcgatctgggaaattggccaaggtctggattatttttttgaccttctgtgatagcttgttatgtgtacttcttttgtggcccatgttaatgtttattcctacgtcgtaatgttgtgtattcagtataatcgaaacgtacttcagttaaattgggattttgtttttcagaaatctagtttgaggaaatgtgcagttagttcacttacgtgac

SEQ ID NO: 10251 - DNA, 192 bp, Glycine max
  Clone ID: PAT_MRT3847_109267C.1
gttacgcgttcgaactaattcttattttattgttgatctccctaaccgatatttggttcattggactataaaatgactgcggtggggtgctaacttgttctacataaaatcctgatagagctccaactctttaacaacctgaataaatttcctatactagatctacacattttaaacaatcacaaaaatctt

SEQ ID NO: 10252 - DNA, 739 bp, Glycine max
  unsure (1)..(739): unsure at all n locations
  Clone ID: PAT_MRT3847_109268C.1
tnttttttttttnggagatgaactaatagtcattaagaacaagtcagccaactaaactaaaggataatgatacattattcaatatttcaagccaaaagaaaaacacggaaaaaatgttctttttgtgtactgtagtttatcatgatacgggtaaaataagcaaagttcatttaaaacttctttccatttccagagggagaaaaaaaagaataaatttttgcagaactggtcattgatattgtttccgctgtctcatctgctgtagtattacattcaatttaataaataaaaaaaaaaaagacaaaggaataccaacttttctatatttcaatatagaaaatcaagcaaccgatgcttatcgggtcctcagggtcatggttcataggattttggcacctgttagtagtcagtttctgtatttttggcacaatcagttattttggcctcatcttgtcaggcttgatacacgaatgtcaatgtatatacacaataacacagtaattttttgtgccctttcactccaacatctgcttctgttcactaggacaagttcagtaacagaagacacagaatcagagtaaaaccctcaatcaaatccctaagattgtaggtgtcagaccccgtgctccttaacattctaaaatcctcattttagtccctgactttgcaacaaaaattattcactgtagtccatgtccacatttttgaatgtatgaacaaaaaaaagtgaatgacattt

SEQ ID NO: 10253 - DNA, 331 bp, Glycine max
  Clone ID: PAT_MRT3847_109269C.1
tcatgtcatgccaactcccctcatcaatccctttcatttcattctcaaataccttcaactaaagctatcctaaatattccaaacacattcttccaagtccatctatgatttaatcactttgtccataacatcttccataatgagcctattccataaagcctaccaaacaatctctcaactgatctccttacactaaccaaactcttataatccacactcataccagttttatacacatctcctcaaatcatcttcatctgaaaacaccatctccctacattcaacacccatctttactacttctgcatctctttcaaaacacatttattat

SEQ ID NO: 10254 - DNA, 412 bp, Glycine max
  Clone ID: PAT_MRT3847_10926C.1
ggctcgagccagctaccatgtctctgtttctgtcttagagcctgcttgccagaagttataatggcccatgatactgttctattacatatgaataaaagaacgacgggctccctgacaagctctgcgaccacatctcctatgctgagctccatgcatgcttatagctcgaccctgacatggagggcgcctgctaaacctgtaccacaaccaacatgtggatggttttaggagagatcacaacccagggcaacgtgtactatgataagattgcgacgtgcacatgacggaacattgtctttgcttctgatgatggatggccttgactctgacaactactggggactggacagcattgatcaaccgagcgctgatattgctcaaggtgggcacggacacctcacatagaggcctg

SEQ ID NO: 10255 - DNA, 278 bp, Glycine max
  Clone ID: PAT_MRT3847_109270C.1
aatttctacttgcagagagtatggttcatctcggttgctcattgtacatcaccaactcaatggaggaaaatactaccgtattacattagggagggcctcccgtgttcaattgttgatcctcatggtcgatctttaattagtgctggaatgaaatgaaagcggaattggagaaatattcatagttgcggcttattttacggcggcagctacaaatgttggcctaatcacgagaaaaatatggatttgccagacgaggaaaagatggaggtgttcagaaa

SEQ ID NO: 10256 - DNA, 182 bp, Glycine max
  Clone ID: PAT_MRT3847_109271C.1
aacttacatacatcttttttccaaaattcccaacttacatctattccaaattatcaagtgattttattcttctacaataacaatccaatcattttgtaaacaatcccttctctgtattctacatctttactcatttaaaacttatattaatcttttatccacaaatcctatttttctctttt

SEQ ID NO: 10257 - DNA, 403 bp, Glycine max
  Clone ID: PAT_MRT3847_109272C.1
cgagcatggaataccctttctttcagttccagcagctcccactatatgtgtaactagatttcatttgattgcgtagtgctatcgtgaagaattgtcaaattaataacgttaggcgtcgatgatgattgatgtgtcggcgctgcaagatccgtgagtgcctcacggctgtgtgcggtgcacgaagacagagatacctccgtagtcttccgtggaaacgaaggagtgctgactcggggagctaacgctgacgacacgctggaccaccatggtgtacccaatcctcatatcatcactgaacccacttttatacctgtgaaggctgtctgcatcgatggtcatggacaagcagctatagaaggtgcgcactagttgcgcgagctgatcagatcatagctattgctgg

SEQ ID NO: 10258 - DNA, 686 bp, Glycine max
  Clone ID: PAT_MRT3847_109273C.1
aaatgctaagagtgggatatgattaatgaatttagtccttgtataaatagctcctcaacaagtgattctgttgtccaaattgtcttgtcagttaccaaacttaaaatttaattagggtattaaaagtttagctgaaagtaattttggtatttctacaacaattacctttaggaagaaccctcctaaatgtacaactcattctactgaagatatttcttccaaatgaattccactcaatgactcaagtaatactttaccaattatccaaacatgcacttggtacttttaaaatagatacaattttagtagaactcccgtgtgcggtgattatataattatactcaaatattatttatttctaccgtacagttttatgtttatcctgacaagactctttatagcacaaatttcatagaaaatcttccatgtgataatcaattctcttaatttagataatcttaaattgatttgtaattgttcacaagaaaatctggcaagaaggatcaagataattaagtatacttcaatggttggatcgatgaagaatacattccttaaaaatattttaaatggtggaagcgtataaagatttgcacttgtattgattgagatgtgcataataaactaaaaattaaagctttaggtctttctcctttgcctgcatagtctagtataaagggttattc

SEQ ID NO: 10259 - DNA, 1795 bp, Glycine max
  unsure (1)..(1795): unsure at all n locations
  Clone ID: PAT_MRT3847_109274C.1
cgtaagnctcggnaattcggcttcgagctactgactactggtacatggtaatgccctctgcgcccttacacatgatctgatgccagaactttacctccggcaaccgatcgtcccttaccagcattcacttcattagatcaaggggcattaactcccgggtaggacaccacgagaacagcggctagtggacccatgtcgtgtctgctctttcatgcttagaactcacttgaaaaccacaagtatgatgctgacttttgagagggggaaggtccttggcaaatgaaactaaaacgagtgaaaagttattacaggctgagcactctttactaagccggacataccaatctagcttgctatcatcctttaagccgtctgcactcaatcagagcctgctgggacgactaatttagtatctaaacaatctaattcctctcccccattcaggtcatcaagttatgaaacaagggggtttttatcttctgggggtccttgatcacgaaccgcaatacctaaggtacgtgcatcttgaactacatcttgagaatcatcctcagcttgaggaccttcattatctgctagatatatatcctctaggagtgccaaccgttttaggttcataatcagatgcaggaccacatttgccgttatcgaaccggcaggttctgcgagtaagcagtgggattctgatactaagacttcggtacctgtagctagacggggaattatatccatattctttacacctttgtcaagatctgcgcaacgatcggctactcaattcatcaggcctacttttcctccttactagcccacatcaggagcaactactccaacccggcgaccgtctttatcatcgaatgaacccagtatatatgcttcttcagttaaagcttcttcaagccccaagccagcttctgtgacatcaaggcagccaactcctgtgacagtaagaaagcaagctcctgtgaactcaaggcagccagcatcaccatcacgtggcacttcaccaacagtgagatcaagaccatggaagccatctgagatgccaggtttttcacttgatgccccacctaatttgagaacaacattacctgacaggccactgtcagcaactaggggcaggcctggagcacccacttcccggtcttcatctgtcgagccttcttctagtggaagacccaggcgacaatcatgctcaccttcaagaggacgggcttccaatggcagtgttcatatcagtggaaactctatgccggcagttagccgggggcactccaaagtaaatgacaatgtcagtcccgttgtaatgggcaccaaaatggttgagagggtaataaatatgcgaaaactagtgcctccaatgattgaagacaaaaactctccccgtagtaatctgtctggcaagtcagcttcatctccagatagctcaggttttggaagaacactttcaaagaagtccttggatatggctattaggcatatggatatacggagaaccattcctggcaatttacggcctttgatgacaaatattccagcatcttctttgtatagcgtgaggtctggatctcatcacggccgaacaattagtgtttcaggctctcctcatgccacaagcaatagcagtgaggtagatgatgatattggcagtgagagatgtggtcaatcccctgccagtgtacggggtagccatagcggatttgcttatggagctaaccttgcttgtactaatgtaaagcttcttggaagtgatgtaacctcatgtaatgagaagctctataagcctagggagtag

SEQ ID NO: 10260 - DNA, 700 bp, Glycine max
  Clone ID: PAT_MRT3847_109275C.1
tccgcacgccgagatttgaacttcgcgaagagattcagctctttttcttctttctatggctcttggagagttcgctgtgtagggaacaaactcggttattggttctgtgtgtgaggtgaacgagaaacaaactcggttaggtttttcggttggggtttttgaggaatttagggttcgtgtggtttggattttggggatgaatcggagtttcagggctcaggaatcgcaaatgctcgctgctttaaagcagagggagcagcaatttgggggtttgagggcttccgtgatgaaggagaaggaggaggaactcgcattgtttctggagatgaagaagcgcgagaaagagcgcaatgaccttcttcttaacagctccgaggagttcgatgcacctctcgggtcaaatgggggtgctaatcccatttttaacatttcgtcttctacgccggctcctgtacggaagactggcgttgatgattttctcaattcagaaaatgataagaatgactatgactggcttctaacgcctcctggtactcctctttttccttctttggaaatggaaagtcgaaagactgttatgagtcagcttggtactccaaccacacgtcctgtagcattaaaatccaggaaaacttgttttgttggaagtatcattattgatatgcatgatgaatgtggtcttgactttcaacagaagtaa

SEQ ID NO: 10261 - DNA, 2680 bp, Glycine max
  unsure (1)..(2680): unsure at all n locations
  Clone ID: PAT_MRT3847_109276C.1
cccgcgtccgctccccactctctcttcaccgtcaaactcaagcttcccgttttccgatccctcttctcccacgcgcttctcactcccaccttccccacgcgacgttggcgttttctagaatgcacttcgtttttttttcttcttctctctttatgacaatgtcgttttgttcgagctgcgagcgttttgtattccacgccgagatttgaacttcgcgaagagattcagctctttttcttctttctatggctcttggagagttcgctgtgtaggaaacaacggttattggttctgtgtgtgaggtgaacgagaaacaaactcggttaggtttttcggttggggtttttgagggatttagggttcgtgtggtttggattttgggaatgaatcggagtttcagggctcatgaatcgcaaatgcacgctgcgttgaagcagagggagcagcaatttgggggtttgaggacttcggtgatgaaggagaaggaggaagagctcgcattgtttctggagatgaagaagcgcgagaaggagcgcantgatcttttggcaaatcatcaatcagagcctgctgggaggactaatttagtatctaaacaacctacttcctctcctgggttgagctcttcaagtggtgggactaggaggccttcatcatcagggggtccaggatcacgacctgcaacacctactggacgtcctacattgactacatcttcaaaatcatcaagaccttcaacacctacattaactgcagcttcgaaatcatcacgatctgcaactcctactaggtccatggtaacatccaagaccacaacttccacaatcaaaccggcagtttctgctactaagcatttggcttctgccactaagactccggtccctgcaactaaaccagcaattccatcaagatcctctacacctttgtcaagatctgctgcaagatcttcaactccaactagcaggcctactttacctccttccaggcccacatcaagagcaactactccaacccggcgaccgtctttatcatcgaatgaacccagtatatatgcttcttcagttaaagcttcttcaagccccaagccagcttctgtgacatcaaggcagccaactcctgtgacaccagcatcaccatcacgtggcacttcaccaacagtgagatcaagaccatggaagccatctgagatgccaggtttttcacttgatgccccacctaatttgagaacaacattacctgacaggccactgtcagcaactaggggcaggcctggagcacccacttcccggtcttcatctgtcgagccttcttctagtggaagacccaggcgacaatcatgctcaccttcaagaggacgggcttccaatggcagtgttcatatcagtggaaactctatgccggcagttagccgggggcactccaaagtaaatgacaatgtcagtcccgttgtaatgggcaccaaaatggttgagagggtaataaatatgcgaaaactagtgtgatgaactactgtcccatctgataggtacgtctgcgagaagacgacagaaggggggttttggaagaacactttcaaagaagtccttggatatggctattaggcatatggatatacggagaaccattcctggcaatttacggcctttgatgacaaatattccagcatcttctttgtatagcgtgaggtctggatctcatcacggccgaacaattagtgtttcaggctctcctcatgccacaagcagtaatgctagttccgaactgagcgtaaaccaaaatggcatttgtttagatagcagtgaggtagatgatgatattggcagtgagagatgtggtcaatcccctgccagtgtacggggcaggtaaacttttcacactgggtaattctgcatatttagctagcatcaacgttcttatcctggtttcagccatagcggatttgcttatggagctaaccatgcttgtactaatgtaaagcttcttggaagtgaatcaagtgatgtaacctcatgtaatgaggcactctgattttaagtagatgggttatatgttgtagcggtaatgctcattttttgaaacaaaccgaggtttatcctccatttatgaaaattgagcttattatctggaaacaataagccagatatttatcccatgtcaatgtaaatgctcgactaattcgcctagatagcattaggcctataggcttcactttattttttaataattgatagctttataagcctagggagtagggagggagtggataaaaaataagagaatttgcgaaatacatatacgttaaaataaattcaattgaacattttcatatctgttgagtgtgaattgattcaaatgacatactgagtgtgatcgtaacggttgttggccgaacaattagtgtttcattctccatcaccttcagttcttcctctattaactttatcacgcacctcacactcttactcctcattgaattcaccaacatcatcgtttattgttggacattcctcacaaagcacagaactatcgataagattaattaacgacatttatgaatgcaaacaactaaaaagggcttcaatctgtattacaccaacgcacaaaaaacaacaattcagtacttaataaaggcataccattaagatgagatggaaggatagcaaaaccttgttcactatat

SEQ ID NO: 10262 - DNA, 607 bp, Glycine max
  Clone ID: PAT_MRT3847_109277C.1
atgctggaatatttgtcatcaaaggccgtaaattgccaggaatggttctccgatgcagagaagatgcataccatatgcctaatagccatatccaaggacttctttgaaagtgttcttccaaaacctgagctatctggagatgaagctgacttgccagacagattactacggggagagtttttgtcttcaatcattggaggcactagtgagcatgattgtcgcctgggtcttccactagaagaaggctcgacagatgaagaccgggaagtgggtgctccaggcctgcccctagttgctgacagtggcctgtcaggtaatgttgttctcaaattaggtggggcatcaagtgaaaaacctggcatctcagatggcttccatggtcttgatctcactgttggtgaagtgccacgtgatggtgatgctggctgccttgagttcacaggagcttgctttcttactgtcacaggagttggctgccttgatgtcacagaagctggcttggggcttgaagaagctttaactgaagaagcatatatactgggttcattcgatgataaagacggtcgccgggttggagtagttgctcttgatgtgggcctggaaggag

SEQ ID NO: 10263 - DNA, 849 bp, Glycine max
  Clone ID: PAT_MRT3847_109278C.1
ccgttttccgatccctcttctcccacgcgcctctcactcccaccttccccacgcgacgttggcgttttctagaacacacttcgtttttttcttctctctttatgacaatgtcgttttgttcgagctgcgagcgttttgtattccacgctgagatttgaacttcgccggaattcccgcgctttcttctatcgtccgttcttcttggagagttcactgtgtagggaacaaactcggttattggctctgctgtgaggtgaacgagaaacaaactcggttaggttttgcggtttggggttttgaggaatttagggttcgcgtggtttgggttttggggatgaatcggagtttcagggctcaggaatcgcaaatgctcgctgctttaaagcagagggagcagcaatttgggggtttgagggcttccgtgatgaaggagaaggaggaggaactcgcattgtttctggagatgaagaagcgcgagaaagagcgcaatgaccttcttcttaacagctccgaggagttcgatgcacctctcggtatagatttttgctcattttcttttttggtgttgagtttttttttttttttttgaggatttgcttctttgcagtgtttagtgtactgagatgagcttctgaagttgtgtatatgttagtttgccatgtggtttaggacttttaagtgggtgaagtacttgaaaatgatctgtgttgtttgaatttctgtttgttaacctgtatgtttcatggttgcagggtcaaatgggggtgctaatcccatttttacatttcgtcttctacgccggctcctgtacggaagactggcgttgatgattttctcaattcagaaaat

SEQ ID NO: 10264 - DNA, 193 bp, Glycine max
  Clone ID: PAT_MRT3847_109279C.1
ctgctcgagcggctcgagcggctcgagtacggctgcgagaagacgacagaaggggggagctgcagctgaggaaacccccaaccccaacctcaaccttaagctctcctcactttcttttcaaaccagaataatgttaaggcttttaaagttaagggaaaaccgttgagacctggcggaaattgcgattggcgga

SEQ ID NO: 10265 - DNA, 784 bp, Glycine max
  Clone ID: PAT_MRT3847_10927C.1
ccacgcgtccggggagcaagatctaaacttccttggtttggagatcaatgaaaaggtactgtatcgctactaatgcaacatcaacattccattctattgtttcttcttatccaggagagttagttcttgtctcaatacagtgtccaaaccctgatttcaataaacctgagcatagatggaggatgctgcagagatctttaatcgaagcagtggtggatcttctagcacctaatgggaagatctttctgcaatccgatgtagaagccgtggcaataagaatgaaagaacaatttttgacatatggcaagggtaagcttgatatggagcatggccaaagtgagtggcttgaggaaaacccatttggacttgatcagattgggaaaggcatgttttagagcgtggggcccccatgtaccggataatcatctgacattagggaagtttgagttgctaatgatgtaatccagaaatctggctaacacatcaaccctccaaagggtttctaccttttcagaatctatcacacagctaatgatttctcattgctggggctgtattttactggcatgaacttccttacagcctgtggagaattatcgatgagcacagtcaaatgttccataagggtttctaacgttattgtaaaatgtgcaccactgcatatgattacttaactccaaggtatcttcaaagatgcatttaaaagcttaccactgaaatcaaagcttgtgggtctcagatgaaccaaagttagcattgtgtatatttgtaaacgtagttatat

SEQ ID NO: 10266 - DNA, 249 bp, Glycine max
  Clone ID: PAT_MRT3847_109280C.1
ggctcgagcaggaacatatgccaatttttgctggtggtaagtgatggatcattaacactattgtgggacaaacccggacctatggccacctgggcttgggctggaacactcttttggtgttatgtgatacgcgtgtttaacggaatacaacgatgctgacgagttctgaacgaaccatgttcacagtgggattgagtgattgggatgatgcatggacgagaaagaaacggcctcccactgattcttttg

SEQ ID NO: 10267 - DNA, 496 bp, Glycine max
  Clone ID: PAT_MRT3847_109281C.1
ggtagaaaaaaaatagaggaacacactcttattgttttgaatttattgaaaaccacaaaaatgtgtgatgctcttgaatcctgattttgtaatttccaataaattctaaccagtagcaaagagtgagttagagagtatgttcctagcactcctcaaaaaattaaagtgcaaaatgacacaaaacatggtctcaagcagtcaagccaaataaacccatgataacacaccgagtactcaagctctgaatattaacatggagccaactctagaaaagccagcttagaaacaaactaatcatgatacaatcattatggcttaacactattctacaagcagcttgcagataaaacatgcacatccacattggttccatcatccaagaaaacaaaaaggcaaatgttaagtttggtgagtgcccctcaaagagtcatcaacaacatgaagcttgttccctacagtcaatgaagaccaacattttcattatagcactttgatt

SEQ ID NO: 10268 - DNA, 355 bp, Glycine max
  Clone ID: PAT_MRT3847_109282C.1
gtgcacgcttttttttttgtcaggaccactgacttaggggcattcaccaattgtccaacgcacggatgcttaccgcaattgccttctaaaccaaccgcaaggaccaattgtgcgactgaaccgatactgtggtactacgaccaattcctaatgcaacactgacatcgtggggtaaaaccaaactgtctataatcggtaaacctagctaacgctacctagcgtagggtgagacaatacagcgctgggggaattctgccacacactgatgagaccatgcgatatactaggaacacattgcaacgtcggtaggaacgctaggatgccataagctccccaattcttggggccacaattc

SEQ ID NO: 10269 - DNA, 172 bp, Glycine max
  Clone ID: PAT_MRT3847_109283C.1
tgttgattgatacaacaagtaagtctattattgtgattgaggacattgattgttctcttgatcttactgggaagagggtggtaaaaaggggaaggaaagagtgaggatgcgaagatcctgtgagagactgacaagagagttatatgagagtagtgcttgtcggttgtgaatg

SEQ ID NO: 10270 - DNA, 1774 bp, Glycine max
  Clone ID: PAT_MRT3847_109284C.1
ctggaagtaaccgttgttgaaagggttggtaactgtgccagcgagaagcgtggccaagttaataaccattccgtcaaccccggcgtcgccgttaggagaaactaacggcggcgtctggggcccgtaaatcggttggtggaatggccacgcgcattgcccggggcactgtgtttcggagtttccaacccagatatacctcgtgccgaattcggcacgaggtttttttgctgctaaaaaagtagcattcaaatgattaatcacacaaatgttgcatatacatcgaaatatagcgcattaattagtaccatcatcttaattaattaagctaaatgagaataaagaaaactaattaagcttgatttccatgaattatgaagtcttcaagggcttgcaaatactgtcacggctagctagcacacattttattcaggaataatgaagtatagcatcatgagcaatcagccttagattttttttagcagattgactgctcatgatgttatatcatttccatgaatttacctctatgcatgctaccatatttatatgtatatgctgccccatttgtaaaaaactcctaacgaaagccccctcctagggctggagcccaataatctgctccattgtcacttccaacttgcagtgtgcatgacactggcaccagacacaaccctctactcctcagccccttctttggttcttcttgagtatccggctctccagctgctttcctcttcaagcagttttcatccagcagctgaccggggtcttcagggaatatacaactcttctctccttgaacagaatgttgctgcctcgtgttccctgatccaccgctcaagtatggtaagctaagagcctcaatttgactctgaaggaatctgatatacccaatagcttctaacaagacagaggccgtgtcagtcttcccaaatggggaaacgagctgatgaagggccgtaattctctcacctagcttttccttcctaaccttgaatgtagtctgcgttgtagcagagggttgaaccctagctttcttgagtgccccaccagctgcagtgctgttgcactcagaagatagatctggtggtggatgccttccatctgtcttattgttagagaaatctaacatgttgctactgaaacttgttgtcacacatgattttggagaccaagatggctttgatgactgaagttcttcgcttccatgcccatatgcatagctgttaaccaagttttcttgtttaacatcaacaagagaagcgtttggagcctgacctagcatttgatcctcccagctctccaacttcttagtctgaataaactgacccatcccagccttaccttgttcatccaccactccactcataagtagctggctccatgactctggaagatcttgattctcatgccaagaaggaaagggaagagaagtgggagcacaagggataggaaagttgttaggagtggacaagaaaggaggagcttgtggagccatgctattgatattgatgttccaccagttagggtttccagtcatcatttgttgcactggtgagctctgaagaacacctctattcatgccttctttccctttgaggtttttagctgttcgcaaagaaagatgaattctctttctgtgatctttctctttccctttcttagcttgatgtcccaacccaaacactgcctttgtagaaaatttgagaggtcctccttgggttgattaagtaggggcttggacccgttttgaaagaatttgcgaacgcgtggg

SEQ ID NO: 10271 - DNA, 373 bp, Glycine max
  Clone ID: PAT_MRT3847_109285C.1
ggtagatgaaggatggagcccaagatgtgctgaaggatgatggtaactactgcaaattctgacacgtacttgcttaatgtgatcgggaatatgctgtgtttgcatctgtagcgcaggagaaagtttctgatcctggaggctgagcactgtggtctaaacatgcctgcgaattggtacccaccatgccgtggattcacgcatatcctagatggaatctagtatgagctgaagagcagagttcctcaattggagatagtctatgcgtccattgaagaacactaggatgcctttaatagcttgtatgcagacatgccttcgatagcaataacaatctcggatgtggaaacatggaaattcttgaccagaaactact

SEQ ID NO: 10272 - DNA, 588 bp, Glycine max
  Clone ID: PAT_MRT3847_109286C.1
ccacgcgtccggtttggtgttgggcacatgcgtgacacaaagacaaaaggtagatagaaattactatctttctcatggatatgcttatttggatataatattttacaacatattttttaatcttttggttcacatctccaggaatatgggtttggggaacacctatagatttggatattaatggagtaagaacttctgtcttttaccttgatacagaaggatttgaaagtgttgggaagtccaatgtatatgatgatcggtaattgctttcagatcatgcattctgtgttctgtgttgaatcatatatgattgtttagttggctttttcttgtgtttgcttttgcaggatatttgctttggcaactgtcttgagttccgtgctcatatataatttgcccgagacggttagttattgttgtcacctcccaatttctggtttattctgttgtttatctttttgtaacgttaaatggacaaaagaattggtattagggatgattttaaagcaagggtactgagtatggattggagaaaggatttggtaatccatgaagttaaagcttgttcagtcattaaaataatttgtg

SEQ ID NO: 10273 - DNA, 340 bp, Glycine max
  Clone ID: PAT_MRT3847_109287C.1
acgtttgttttttaagcaaacctaaagaaggctggcttcgacgcatggttacagttaattctggaaggatccacatcttattattccaaatgcacttttatacaaaaatagcaatgggagagaatctgttgaggcagtgatacagaattgttggaattattggagaccaatggagcgatctgcttggagaccacagaggcgaaagcaggatctttaagctttctaatcccatgtactacattgagaagtaactttaacttataaacataacacctagaggttgctcctatctatatgtaataaggtttgctgatatgcactatttaaaataagaatagga

SEQ ID NO: 10274 - DNA, 345 bp, Glycine max
  Clone ID: PAT_MRT3847_109288C.1
ggggatgatttaaagagatttggcgatataaccatgcgaagacataagaatgtacgatactaattctcaaaaactcaataatacattggcttccaggcgcttaccacactgggattaccacaaaacaattctggcatcacacaaccattttcatcaagcactggaaccatccaggtcattcaccctgtaagcgagtaccattttctgcggtggcattgcccactcttacccatgtttcggggtaacagccatatccacctcgccatttatgtcatcctctatgtcatagataatggtgcgagaatccactatagtgggcactcccgaggaacagcatcttcaaga

SEQ ID NO: 10275 - DNA, 219 bp, Glycine max
  Clone ID: PAT_MRT3847_109289C.1
caaatttcgaggagaacttgtctgccactccaaaatctagaaaagatgcagagcgactatctggactcagatcctgaaagatcaggatatgctctacagacttcaaggacttgtgtaattatactctaacttaaccctgaaactcaatatcagcttgataaaggctccatataccattgtaaagagtctctaggtacaaatacacaaggtaatagagac

SEQ ID NO: 10276 - DNA, 577 bp, Glycine max
  unsure (1)..(577): unsure at all n locations
  Clone ID: PAT_MRT3847_10928C.1
ggctcgagagactggtctgaactcccaaaggacctcctacacaaaatatcacaactcctcctcgaaagccctctctacctcctccgcttccgatccgtctgctcctcatggcgttcttccactcccccctctcccttcaacccctcaatctccctcaccaacaccttctccctctcccaccgcaccctcctcctcctcaaccctaaccctaaccctaaccctaacccccgcccctggctcgtcaagctctccctcgacccacacgccagcaccgcgcgtctcttccaccctctctcccgcttccccatgaaactgccccgtttcgccctcgacctcttcaccctccccgccctcgacctcggccgcgagttcctcctcaccaacacgcgccacacccgcgactccctctacattgaaaagctcgtcttcctccctctcacccatcgaaaagaccgttttgccctcctcacgatccacgtctnncggaaactcgccctcttccgctccggcgacgacggcttgaccgtgatccccgacatgccgaccccctacgacgacgtctgcgtctttagggcaa

SEQ ID NO: 10277 - DNA, 363 bp, Glycine max
  unsure (1)..(363): unsure at all n locations
  Clone ID: PAT_MRT3847_109290C.1
ccacgcgtccgtgcatttacccaaatccttcaacaaagctactagccaagaatatatatggaaactataaataagagagccttggataatggattaactaaactcgtactatgatggacactaaagagcctttccaagccaccatttgaagagacgtttgacaggagagaaattttaagtttcttgggaatcttgggttaaaatgttagtttcccatatttggtatatctattttttttttagaaaaataagattcatggaaaataatgtttcctgataatgccttttaaaaagtgtggcagagttggtagtgagtcagtggttttagtgttncatgttcatggaggtgggtggtagtgattt

SEQ ID NO: 10278 - DNA, 1534 bp, Glycine max
  Clone ID: PAT_MRT3847_109291C.1
aggccacttcatgatccctatttattgagtggtagtggaccacttttaagaaacaaattgtcttactaagtcttatagtgattgctaccacaaccatgaattgtaggaggttggtttatgtagttgtgtggttcaatctgtatgtggcatgcacattcattcaagtttcaggtctggacgcctctaacttcagcaagtgttggttcccagcaatttacaactttggtgactcaaattcagacacaggagctgtttttgcagcattcacaggggtgaagcctcccaatggcataagcttctttggaagcctctcaggaagggcctctgatggtcgtctcatcatagattttatgactgaagagttgaagctgccatacctgaatgcatatttggactcggttggatcgaattacaggcatggtgcaaactttgcagtaggaggctcctccattcggcctggtggttttagtccattccctcttggccttcaagtagctcagttcctactgttcaagtttcacaccaacactctcttcaatcagttttctaacaacaggacagaacaaccgttcaagaatagtcttccaaggccggaggacttttccaaggccctatacacctttgatattggacaaaatgatcttgcctttggtcttcaacacacttcacaggaacaagttataaagtcaattcctgaaatcttaaaccagttcttccaagcagtgcagcaactatacaatgtaggggcaagagtgttctggattcataacacaggtccaattggatgcttgccctacagttacatttattatgagcccaagaagggtaacatagatgcaaatggctgtgtgaaacctcagaatgatcttgctcaggaatttaacagacagctcaaggaccaagtgtttcagctaaggagaaagttcccacttgcaaaatttacatatgttgatgtgtacactgccaaatatgaactaatcaacaatacaagaaaccaaggttttgtgagtccattggagttctgttgtggcagttactatggttaccacataaattgtgggaagacagccataataaatggaacagtatatggaaatccatgcaaaaatccttcccaacatgttagttgggatggcatacactactctcaagcagcaaatcaatgggtcgctaaaaaaattctctatggatccctctctgatccaccagttccaattgggcaggcatgtttctgagcatagctagtcacttatattgagatagagtaccatacattatgggggtcttcattcttcaagttgttatttccataaacaagcaattgtgttagaacaattaattggggagccgtatacatgagtaagaacatatatcataatttatgttgtgggaaaagctattgtagcttaattttggaaatgtgaggtcacactgtaacggctcaactaccagataatgttagttcagtcaacttaaatatttggattttagtgcaggtcccttttatagttcaatcccaaatgccttttgcccc

SEQ ID NO: 10279 - DNA, 377 bp, Glycine max
  Clone ID: PAT_MRT3847_109292C.1
attcccgggtcgaccgcacgcgtccgcccactcgtccgcccactcgtccttttacgctttagcggctacaacaacacgacagaggcaggctctctctttacagccatcgatccaaaacttccttccaaaattcttctgctatataatctcatcaatgacattcttactaaccctcaaccttttctctacctcagcaagctcataaaactcaccaccctcaaaactatttatgaataatacattaacaatctgcctaacactttcactatgccttctacacctacaacccctattactcccacaactacaacgacacctatatccatacctaaagctcaccaccttcttatcatccctcttccatcctgttaacaact

SEQ ID NO: 10280 - DNA, 153 bp, Glycine max
  Clone ID: PAT_MRT3847_109293C.1
gaaacgcgggagacccggtctaccctttctgctattacggaccaggcacgagacaccaggcgtacatctgcagacatatgactagacgtcacatggttcacacatctcacacaccgcgtcgaatgtgaacgtctcttcacgggacgcctatac

SEQ ID NO: 10281 - DNA, 706 bp, Glycine max
  unsure (1)..(706): unsure at all n locations
  Clone ID: PAT_MRT3847_109294C.1
gagcattggaaacggcattcctcttggtgctgttgtgacaactcctgagattgcgaaggcattgactcgccggagttacttcaacacctttggtgggaatcctgtttgcactgctgcaggattggctgttttgagagtgatagagaaagagaagcttcaagaaaatgcttttgtagtgggttcctatttgaaagagagactcaatgcactcaaggacaaatatgaatgtattccttcgtcacttcacttcttattccttgttcattctagattagtgcacaagcatgcatgaattaattctagaatagattgagttacatgatggagagcggaggaccttagagaagcattagtttcacaaaagaatctgggattttttttttcattttccttctaccaactcttatatgtgagaaacgctagcaatacattttttattattgattgaaatttattagaaatcatggaaatttgttgccccacttttcatttaactagttccacttatagttttatagtttttaataaattttgaccataatagagattgtgtcaatagaagtgtgttagaaaatatattgctagcattcttctgctacatgcttctaaacaaacttgttgattntcttctgcataattggtgatgttagaaggaagaggcatgatgctttggagtttgaccttgtcagtgatggcaaacttaaaa

SEQ ID NO: 10282 - DNA, 370 bp, Glycine max
  Clone ID: PAT_MRT3847_109295C.1
atattttttccttttctatttctgtaattgctacctattcttttactactaaacacatatcgttgcctattgtcggattaacccattgttttactacctttgaatatctgtttttcacaataaaattgtagaaatcaaggcgcttcttcttctgaattgggaaatgctaccaacaacaacaatctctctaatacattcttttcaagcatactcttttttatcgactgaaatttttggaaaatcacaaaattttgcaggactccgtatgctcaagaacaggtcaatataggttccggtccacctgattccaaagttagaatggttccgtcaatttaccattgaacaccggttatttaacacggttacattt

SEQ ID NO: 10283 - DNA, 869 bp, Glycine max
  Clone ID: PAT_MRT3847_109296C.1
ccggtcccttgctcgacggagcgtccgatcggtgttacgtcgcccttcacgcctgagaataaaaaatcaaaaagctttcgccgccatcaaagtttctccctctgtgcacggtgcgtgagaatgcgtggtggtggcggcggcggcggcgaagtcgaagtgaaaagggtgtttattggagcgggatgcaacagaatagtcaacaacgtttcatggggtgcttctggtttgctctcttttggagctcacaacgccgttgctattttctgccccaagagtgctcaaattttgactactctcccgggtcacaaggcagttgtgaattgcacccactggcttccatctagcaagtttctatttaaagcaaaactattggagcagcactatttgctatctggagatgcagatggtgctattattttgtgggaactgtcccttgctgatgggaagtggaggcaaatgttacagctgccacaatcacacaagaaaggtgttacatgcattagtggaattatggtttctcaaaccgaggcaatctttgcatctacttcttcagatggcactgcttgtgtatgggaacttgtatttccaacgactggtagcggtgactgtaaattatcgtgcctggattctttctctgttggttccaaatctatggtagccctatcgttagctgaactgcctggagatagtgggcaaattgttcttgcaatgggaggattggataacaagattcacctttattgcggtggaaggaccagaaagcttgtacatgcatgtgagctaaaagggcatacagattggatccggagtttggacttctcattacctataagcatcaatggggaagtaacaatatttttctggtagtc

SEQ ID NO: 10284 - DNA, 151 bp, Glycine max
  Clone ID: PAT_MRT3847_109297C.1
gaatacatcgaacgctggtgtgaattagtggtgggcaggctcgcaatcattttaaaagcaaaaggaatgttcagcagatatgaaagaacgaattgctcgcgtgttatttgcagcccctaggtcgcttgaaattccagaacttgtggcactt

SEQ ID NO: 10285 - DNA, 337 bp, Glycine max
  unsure (1)..(337): unsure at all n locations
  Clone ID: PAT_MRT3847_109298C.1
ggggcccaagttattttttctaaaaacatgcactgtattaaaaaccaacaaggttttggcaacccaattngtaatttgtttcctagatctggggggaaacgggaaaaaaaaaacaatccccccgggacttaaggaacaacagagtctccaaacttaataaattgtccaaaagaaaaaaaaaataagggaacagattaaagcgtggtttgaaaaaataacaatttttttataaaaaaatgaacaaccatttgccttttaaaaaaaatcctcaagaaattttctggggggcgaaaaccctttttttaaaaaaaaaaaaaacccatttttaaaattataa

SEQ ID NO: 10286 - DNA, 496 bp, Glycine max
  Clone ID: PAT_MRT3847_109299C.1
tttttattaaccgcgatcataggttgccgcaccttaaaaccggaaacaaaatcaatcgatactttgattccaagaatctctcaatttcttcctacttttttgtgtacgatttcttaagggaaagataacactctttgagctggccatatactatgagaatcattttcttttccacttcttagtttattagctgaacactctcctatttgatataggacttctagtcagaattaaacttctttctgttgctttttcagatctttgcttaaattcaagtttaagctggagaaattttgatatagggcaaccacttttctatttggtttaggactttctgggttgacttttttattattctactttctttcacttttcttttttgaatgattcgtattgttcgtcaaagtggttttatttgaataatacttttgcgtttgtgcaaaagtttgctttagtaatttttttggagacaacgtgttaatgggccacatttttt

SEQ ID NO: 10287 - DNA, 314 bp, Glycine max
  Clone ID: PAT_MRT3847_10929C.1
tcgttgaaactgatgaagagcgtgaggcgtggaaagagatatctgccttgcttatatcataatatgcagagtacactccgatactagcaacgatgagggaagggttagattcttggtgtaatatcaatgacaaaattcatcattaagaataggtgtgtggtgcatacagtgaggtgattaacaatattgacagagaagagctaagataaatttttgctctaacaaatgatccacaagatggggaagcggagaatgttcggaaaaagacgcgtgttacgcgaaaccgatagtgacatgccctagttcaaaggggg

SEQ ID NO: 10288 - DNA, 310 bp, Glycine max
  Clone ID: PAT_MRT3847_1092C.1
gggccttgtgggtgaggattaatcccatttgagtatccctgacgagccgtgttcacttgctggattactacgcccttatctgattggtggcctactccattgcatgtgtaaccccaatctgctaatacacaaacagcttgtatggctccaactagcgcctgtaacacccttcatactggaccatctggagaatatatgaagcttatcaccgaccacacattagtggaaaggattgccagaacccatttgccttccggattccctgtactccccgaatactctgaacaaaggtatttccctagccaaatcc

SEQ ID NO: 10289 - DNA, 1414 bp, Glycine max
  Clone ID: PAT_MRT3847_109300C.1
ggcggggctacccgctgagattaagcactccaatggagaaatagaagccgagggcagctgagaaaaaaaaatggatgtagagaaagccttccacatgactggaggagttggcaaaactagctatgccaagaattcctcactacagaagaaggaatctgataaagtgaagcacataatcatacaaacagttgaggagctctaccttgcaaccactccaaagagcataggcattgctgatttgggctgctcctctggaccaaacaccctatcaatcatcaaagatatctttcaggccatccaaggcataagccacaggatcatgcaccactccacagagttcagggtgtacttcaatgatcttccaacaaatgacttcaattcaatcttcaaggccatcccagagttccaaaatttgcttaggcaagacaggaaaaatgggttcccttccattttcatgggaggctaccctggctcattttatggaagactgttcccaaacagttacttgcactttgtccactcctccttcagtcttcactggctttcaagggttcctccatcactctatgatgagcacaaaaggccattgaacaaagggtgtgtttacatttgtgaatcaagccctgaagtggtgtctcaagcatactatcaacaattccaagaagatttttccttgttccttaggtcaaggtcagaagaactagtagtaggtggaagaatggtgctgatatttttggggagaaggggcccagaacatgttgacagaggcaactctttcttctgggagattctttcccgttcatttgctattctagtctcacagggagaagtagagcaagagaagtttgattcatatgatgtacatttctatgcaccatcaagggaagagatagaagaagaggtgagaaaagaagggtcattgaagttggagaggctagagatgtttgaaatggacaagagtaataatgagcatgaaagtagtgagagctatggcacacaggttgctgtggcagttagggccattcaagaatcaatgatctcacaccactttggagaagggatcttggaaagtttgtttgagaattatgcgagattggtagatgaagaaatggctaaggaggatattagaccaatctcttttgttctggttctcagaaaaatatgatactagctatgattattattattattgtacaaaaatattaattatatattaatgttattaattattttggtttgcagtattgagacgtgtttaaattgcagtcatttactgcccatcactgtaatcatcatgatcagtctaatgtcaagtgttggtgtttcagtttatttccttcatgtgtgtatgtatactcttcctgtatggtgtatttaatcatatatttgaagattttcaaatatactaatattt

SEQ ID NO: 10290 - DNA, 346 bp, Glycine max
  Clone ID: PAT_MRT3847_109301C.1
ctttaattaataaccaattttgtcctttaaacaaatatatagttttcttttttaaccctgttattcggatataatagcgtaacagcttacaacacactgtactcaatcttactctaattttaggagaactgatgagtaagggtagtttgattactattcacaaataaattattattgatagtaagggtagtttgattactattcattaacatcacaaggcatttcacgtcaataagtttatttttgatgattttattaagggtcatatcaagttttttatagtgtaaattcagaaaacatgtaatgattcaacaaataaattattaattttttaaaaaaaaaaaaa

SEQ ID NO: 10291 - DNA, 425 bp, Glycine max
  Clone ID: PAT_MRT3847_109302C.1
accagcttcggtcagaaacgatcatgcctactcctgtgggctatcagagtccaacctgtatgattatgccttcaagagcctaatctaaacctgtgggactactaagctattgcttgctatcccgcccctcttgaaattcactgaaacgctctcccttaaggcctactctgtgaattacaccaggggaaggagcgatttatcccagggctgactcatattcgcatcaccacttatctgacgaagtagctattcgcgagcgcttcttcgtgccacttgttgcaggatgcaatgctcatattgcgggtggccagacaaaacacagagctggcgtgtttactgtgttcttgcagatactgtgtctgactgtgacaatgagtacactgttgagatgtgcatgactggcccgaatagatagatagcccagg

SEQ ID NO: 10292 - DNA, 1039 bp, Glycine max
  Clone ID: PAT_MRT3847_109303C.1
ctacaaggaggctctatcatcttcttcctctttagttctttcgtttaaccctataataacaaccactccactctggtctactctccgcaaccttacgacgtcgtctcaaccatgaacccttccacactcaccccttcccacacccaccgtcctctcctcctaccctctcccttccacaccagacggcgtcgttttaaagtctccctccctcgctgttcctcctcctccgccgcctcctccccccctccttcgtcacctccgccgccgcagcgaccgcccaaggacctcaagggaatcgatgtcctcgtcgacaagctctcgccgccggccaggctcgccacctccgccgtcatcgtcgccggcgccgcggcggccggatacggcctcggctcccgcttcggcggaagccgctacgctgcgctcggtggagctgtcgccctcggcgcggccggcggtgctgcggcgtacgctctgaacgcggctgctccgcaagtcgccgccgtgaatttgcacaactacgtcgccgcgttcgacgacccttcgaagctgaagaaggaagagattgaggccattgcgtccaagtatggtgtgagcaagcaagatgaggcattcaaaactgagatttgtcatatatattccgagtttgtatcttctgtgcttcctcctggtggtgaggaacttaaaggtgatgaggttgataggattgtcagcttcaaaaattctttgggaattgatgacccggatgctgctgctatgcacatggagattgggaggaaatttttcaggcaaaggttggaagttggggatcgtgatgctgatgttgagcaacgtcgggcatttcaaaagttgatatatgtgtcaaatcttgtatttggagatgcatcgtctttccttctaccttggaagcgtgtattcaaggtcaccgattcccagattgaagtagctgtacgtgacaatgcgcagcgattggttgcttccaagctgaaatcagttggcagagatattgatgcagaaaaacttgttgcactaagaaaagaac

SEQ ID NO: 10293 - DNA, 208 bp, Glycine max
  Clone ID: PAT_MRT3847_109304C.1
caccggccgcgggatcattatcggttcttatggaggatgcggtactcatggtgccggcgctttatcatggaaggaccctaccaacgtagatatgatgggagcttacattgtgagacaggcttctaagaacatcgtggcacgtggacttgccacaatgtgcaattgacaatgtgtctctgccattggtgtgccaaagcctttgtctgtg

SEQ ID NO: 10294 - DNA, 669 bp, Glycine max
  unsure (1)..(669): unsure at all n locations
  Clone ID: PAT_MRT3847_109305C.1
tgaggactgaggagggatgagttcgtcctctccacaacgttctcgcggcgacggcgagaaaaggcccagatttttcgactcaaacgcgaaggccatctgttggtctaaagctgatactgtccccggccgtcaccctgagaggtggcgcaaagacgccgccggtaacgttgtctgcaaacgtttcttcaactgcatcggctgcctctgctacgagtacgatcacatcattcccttttccaaaggtggtgagtccactgcggataattgccaaatacttcaatcaagagttaacagactcaaatcggacaaatataacattgattcggatcaattgaaagactactcctgggaggttaattttactgataaggaacttgatattattgagatggctgtttatggcgatgtgatgcggccaggaaaccagtgtcgttgcagaactattgctgaaaagcttggcaaagtctatccgtcgggtctcactcatccacgtatgttgccataggacaattgcatatattaagactcactagctaagttggctgagtagaatgtgtgttatttttattttttttacctgcatttgttgactgttaaataacagttgtttcactttctatcnnaaaaaaaaaaaaaaaaaaaaaaaaaaaaaaaaaaaaaaaaaaaaaa

SEQ ID NO: 10295 - DNA, 260 bp, Glycine max
  Clone ID: PAT_MRT3847_109306C.1
cttttggaaaccactaagccaattcgaactggagccaggccaatcctactatctgctaccattcagcaacagaaacaacaaccacaacaacaacaacagcaacaataatatagacactctaccatgtgatggtgaaaatgttaacgttgttgtgagacaagggcatgttagatctcaaagtgttcctacaatctcaaaccctgccttgtatagaatgtccttggactaccaccaccacaaccagggaatggggttgctca

SEQ ID NO: 10296 - DNA, 221 bp, Glycine max
  Clone ID: PAT_MRT3847_109307C.1
taaacacttgaaaacagaaacaagaaactaggtgagggtgggtttcttttatagggaacatataaccattaagatacagaacctaactttattattttatctattccaattactttatcttgttaaaccggataaccttattgaaattacaatttcacaaatccacaccttttatcattccaacaaaactttcccaaaagctcattctttaactatctcaa

SEQ ID NO: 10297 - DNA, 644 bp, Glycine max
  Clone ID: PAT_MRT3847_109308C.1
gctttctttgtttagcctaaacagtgtgccttttttgtctcgagtaacgaagccagaaaaaaagtaaatttaaaaaagaaagcgagtaaccaagagatagagaatctggtgggctttgagctgtgatttagctgtccttttgatgcattatttcatccccactctctctctcttctcacactcatatacgctccttcacgcctcacacacacttccaaaatccctctctctctctcacattgcacattgcacattgcacattgcagccattcttctcagatctatagcaacgtccaaggaaatcaactttctcttaaagcacacttttaaagtctttgtttgttgaggcgtttggtttcctcagatgcctcatgtgagatgaggaagaaaacctactccgacttgtctctcttttttcttcctctcttgctcattctagtttcacactctctctgtgcctccgcattctcgcacaatggacctctcacagactcccaagtgtctttcatcaagcagcgtcagcttctgtattacaaggactacttcggtgacagaggtgaaaaggtaaccctcgatccctccttcgtcttcgaaaacgaccgtttgagaaacgcttatatagcgttacaggcggtggaaggaag

SEQ ID NO: 10298 - DNA, 232 bp, Glycine max
  Clone ID: PAT_MRT3847_109309C.1
tgggagaaaaaaatcaaaaaaaacccaaagcttaatttttaaaatcttccaaggatgaactttaaggcataacaacaagccctgtatctaccatttaagaacggggaccccaaatatttttatacggaaacccacattcaaaaccttttaagcttggccatgatggccaccagacgcctaacgcaggttgtaaaaaactgtggtcccaactgaacggattaaatacttttcc

SEQ ID NO: 10299 - DNA, 136 bp, Glycine max
  Clone ID: PAT_MRT3847_10930C.1
tttctcacacgttctcaaaaaaatgtagagatggcgtatgagcaggcgggcactacatgactgattgaaggaagcaatcaaagaaccttctctggctagtaggtgctcgatctgctgttgaacgaactgccaaaag

SEQ ID NO: 10300 - DNA, 1202 bp, Glycine max
  Clone ID: PAT_MRT3847_109310C.1
ccacgcgtccgcctggttattaacttaacttgtttgttcaggtcgcgtttggatgggggcatgctcttgctcgtactgcggatggcaagttgtttggatggaggctattcagcggacggtaggataggaaaaatggggaataattacttccaatggggtccgttggaatccgagtctccaaatatctcacagctcttccaaataatgaacaactctcaacttcagtcctgcaaggaatggaaaagggagtcttcatggcaattgaacgggagaataacatgccgatagtatgggaaccccgcttggtcgaagagttacgcggtgttcatgttttagacattgcatgtggccttgatcattctctggttctttgcgcgtgatggtgtgctcttgagctgtgggagcaacgtgtatggtcagttggggcgagctaaaatagatttgggagttttccccgttgaaatgagcttcagtcccgtttttatagcagcagggcttgggcattcattggcaatatgccagttcggtgaatcagatgttagtgtggggactacaaacattgcttcatggggatggaacctgagttctcagcttgggaggcccggggatggaaaactaccctctttgattgatgcattggatggggaaaaccctgtctcggtttcggcagggcgtgcacattcccttgctctcacgtccaaaggggaattgtgggtctggggctctggtaaaagtggaagacttgggttaggaagttctgttaaccaagtggagccatcttgcattgattccttggaggcttttcaaattttacaggccgtgtctgggtttgatcataatctggttctggttgcgggctgatttcgcttcaacaaataccttgctttgggggggaaaggaaaggaaaaacagaaaagagtctcttaagtttgaacttcaagttggactgctggagtgaagtctatctctgactataaataaatctaagcactctcttgttccaaatgttatgcctttttttctctttcttggaggttttgtatgtattctaagcttaaacttcatcgtggagtttcatccaaacacttgaaactcgcatagttttcttgataagtagtttggtctatattatgaagtgctttaaataatgtataaaggggagggaagtaagatcgttacgagattaacagggttctttgttt

SEQ ID NO: 10301 - DNA, 519 bp, Glycine max
  Clone ID: PAT_MRT3847_109311C.1
tgacactctcatttggtaactaacttaacttgtttgttcaggtcgcgtttggatgggggcatgctcttgctcgtactgcggatggcaagttgtttggatggaggctattcagcggacggtaggataggaaaaatggggaataatcacttccagacatctccgttggaatccgagtctccaaatatctcacagctctcgcggaccttgaagctgctgaaaagagagtcttgcaaggaatggagcaggagaataacatgccaatagtatgggagccccgcttggtcgaagaattacacggtgttcatgttctggacattgcgtgtggccttgatcactctctgattctttgccgtgatggtgtgctcttgagctgtgggagcaacgtgtatggccagttggggcgagctaaaacagatttgggaattttccccgttgaaatgagcttcagtcccgttttatagcaagggctcggacattcattggcaatatgcgaactcggtgaatcagatgttagtgtgg

SEQ ID NO: 10302 - DNA, 417 bp, Glycine max
  Clone ID: PAT_MRT3847_109312C.1
ctgcttgggggggggggggggtagtgttctgccgcacagatacatgggcttatagcgagtattgctcacatgtcactagcgctttgaggtggtgtactggttactaatttaacgtcgggtcgggtactactacggtcgggggccgcaaggctactatcgatatatgtgggagagggcggggtgtcacttagttggtgtagtaagcgtgcacatcattgggtgtgagcacaactttggtgggcttgcacacttggcacaagaactagttgaggacttgtgcttgctgcaatatctcaggtaatggggcggttaacttgtagctcggtaggtgtagactctagggtaatgttacgggggctgctggcatctaaggtagttacgtggctgaaaatctagtgcccttggaagtaacagctg

SEQ ID NO: 10303 - DNA, 443 bp, Glycine max
  Clone ID: PAT_MRT3847_109313C.1
cccacgcgtccgtacggctgcgagaagacgacagaaggggcagccacacttgcaatgatcaaagccaaaagcacaacaaaacaaattattctataaataaggagccatgaaggatcaattcctttaagacaggtgttccatgcttcatcctcatatagcaatccagcttcttcctccccctgattttctccactattcgatcttgatttgttgaatccttcatatttgaatattaaaaaagatgctagagccatggaggctaaaatccatagtgcacagaagaagaacctccaattcaaccaataacttagggtagtagagtctgaagttatggttggttgccatgtatggctagaggactctgtgaagaaactcatgagttatgtgtgctagctttagaattttatgtttcttcttgatggggttcttgaaacactatgcac

SEQ ID NO: 10304 - DNA, 197 bp, Glycine max
  Clone ID: PAT_MRT3847_109314C.1
acctgcgaagtactggtcctgtatttccggcatgaccatagtgttccttcagataccaagagaagacgaaatgatctaggcggtaaatccaaacgctttagtcattacatcatcttgagagctttggcaggtattccaggcttgtcaggcaccattgtcaagttcctaaagctatcatcctgaactctatgtgcata

SEQ ID NO: 10305 - DNA, 272 bp, Glycine max
  Clone ID: PAT_MRT3847_109316C.1
gtgatagcaatggcggtggcggtgacgacagcagcaaggccatagttggagcagtgcttggcataggaagcgtgcttcttattttggtcattgtttgcgttgtttgctccaggaagaagaagaagaatagaatgtactattatgcaggagagcaatccatgggaaaagggaataataataactattacaatagcgggcaacacccaaattattacggaggtccacatggggaccatgttgtgaggatgcaacaaaatggaatgggtcctggt

SEQ ID NO: 10306 - DNA, 353 bp, Glycine max
  unsure (1)..(353): unsure at all n locations
  Clone ID: PAT_MRT3847_109317C.1
aacgtacacatctgctcacccgacgagcacaanggggacccgtctaaagccaagaaacgngccacccacgacgacgcccacacaaggggggggcccaacccacccaccgacaaacacgaaacacaacaaacaaaaaaggggccgacccaaccancgggcaacgaggacaacaacaacagagccaccacaaaggcagcgaacaacaaagagagcgaaaagaaggagggcgcaccagcgccggacgcgcccaagaggccaacaggcaagcggcccaccggggccgggcccaggacagggngcgcgcgcgaccaccccggacaccaccaaacaagggccccggagcaagacaaccc

SEQ ID NO: 10307 - DNA, 685 bp, Glycine max
  Clone ID: PAT_MRT3847_109318C.1
gaaaccggtaaagggttgtggcttgattcttcatcacagtgggttttggaaaaattgccgccacctctgaagcctaaacaaagtgtagatactgaaaggacactggtttcataagcaatggacagtgaagtagaaaatggagtcattctctttgttacacttccatataactttgcccgtgagaagttggctgctgagtatatttgtagagaactacgtgaggcagatgaaacaaatttgcttcaggaagaacgttgtctgattttcttttttttacttggtgaatcgaccctttttttaatacaataagaatgaaggtgctgattgtcacatgctgaaaatgaataaggctctgtttggaaaaacttctcaataagcacttatagaagaagaaaataagaagggatggcaagacccagcaacttgggccaaaactctgggaaatagttggagaacaacaggggatattgaagatacctggaattggtgagcatactcacattcgtgcttttattggacacttgacaaagatattggcagaacaaagctactatttaggttgtgtgaaagcagaaggatctacatacaacatgtgtgttgttctgcttttatttaatgtaacatcttatgtggatgcaagatctaaatttaattatatatgtgcatcattttccccttcatagat

SEQ ID NO: 10308 - DNA, 253 bp, Glycine max
  Clone ID: PAT_MRT3847_109319C.1
caacccaaggctaaaagggggcattttaaaaaaaaaaactactttaaacccccgggggggtggggcgccccccccaaggggaaacataatgggggggaccaccaaactggggaagcgcccgagtcccacgaaaatttcgcatggggggcccccccacccagcggcggagaccccccgcgaaaatttagggcggggcccacacgagttttgacccccccggggagggtttcgccccgagcctaaattccccccc

SEQ ID NO: 10309 - DNA, 689 bp, Glycine max
  Clone ID: PAT_MRT3847_10931C.1
cggacgcgtgggttcaaattcaagcacacatgtcggtttcttgtgttaaaaacttcttccagaggttctggcaagatgaatttcaaacgggaaatattccccatggaagctttttggccaatgatgatctccttccatctcttggagctaggataaaccaggaaactagacttagaagatacataatctctcctttccatcctcgctatagggcttgggagttggtactggttgttctagtcatatactcagcttggatttgcccatttgagtttgcatttcttccttacaaggaaaatgctctattcatcgcagacaacattgtcaatggcttctttgccattgacatagtgttgacattctttgttgcataccttgatcgccattcttatcttcttgttgatgatccaaagaagattgcgatcaggtgaatgtccatcaactcttcttcaaaactaagatgatgctacaacaactctgcttacttcacaaagctcaaccaaacttgcaggtacatatctacctggtttgcttttgatgtctgctcaacaataccatttcaatccttcagcttcctcttcaatcatagcagtgaacttggcttcaaagttcttaacatgtttcggttatggaggttgagacgagtcagttctctggttgcaagacttgaaaaagacattcgcttcaat

SEQ ID NO: 10310 - DNA, 242 bp, Glycine max
  Clone ID: PAT_MRT3847_109320C.1
atggatatctgcagaattcggcttaagcagtggtaacaacgcattttacgcggggatataacaaagtaacaacctgtctacatctctgcaacaaaagcttaccagcttaccttctagaaccttccataacaccgattaaaccgttcgttaatcaccgcaatggctgccgttaagcgtatctcctcattcatcgctgatcaagttatagtgattgcagtcagacgtggatttgcgagtgctgc

SEQ ID NO: 10311 - DNA, 187 bp, Glycine max
  Clone ID: PAT_MRT3847_109321C.1
cctcaacctttgaaacaatgtgtttgggcccgagaatggaaatagggggtaaaaatttaagcggtttattcaaatttaaggttattggggggagggagaaatccacatgggaccctcacaacttttttattttttttctccccctcaaacaaaaacaagatttgagggtaatgcggttttttttttt

SEQ ID NO: 10312 - DNA, 447 bp, Glycine max
  Clone ID: PAT_MRT3847_109322C.1
ctttattttattttatttattttctatttttatgcttgcagttgcttcaatgtgccttgtttagtaaaccttgtgaatttttaattaggttggaactcttgctatacttgactcgctgttgaagtcaagactttatttaattatgcataatatttaatttaaccctctgatactgctttctttctagtacggacaaaagcttgtccaatgtgtttgtcttataataattgcctgtttgtgtctttctagttttttcatgatttttcctcctcctctatcatctatcactttctattcttgttcaattggactttttttacccatgcttttttttcacttggcttgttaatttaagtttggttaattccccttagtgtctcactatttttatatatatattgaacaaaataattaagttcatgccttgctccctgcttgttttttttt

SEQ ID NO: 10313 - DNA, 428 bp, Glycine max
  Clone ID: PAT_MRT3847_109323C.1
caaaacaataaggtataaagagcaattaaagagcaagtcgttctacgatgacaagcaacctcaaacctatagtggccgtgcaagcaggcaacgagtccaaccatggtacttcaagctcacttaacaatagcaatgggaaccagaatatcaccggctcaaagatcaacgctggtgcaaactccggcgacaagaccaggtatgttaatagtcgtgttataaataacaatggtactttcaatggtaatgccaacggatgctttatcgagggtggctctcacaccacacaaaactactttgatgggcgtaaagattaattgttgtatatgctgcgcagtaatatggtctaccatgttatgctgtgctgataaagaaagtgtgttctataacaaatgtaatggttttcgagtgttacctaaaccttactatgt

SEQ ID NO: 10314 - DNA, 221 bp, Glycine max
  unsure (1)..(221): unsure at all n locations
  Clone ID: PAT_MRT3847_109324C.1
gaagagaaggaggagcacataataaccctaaaactccatttcactcacagtacaatagtccgatagagagatcaagtgctgcagaatacacatatacacaccaactgctcgagcgagagaggtgtctctaagaagataagaactgttagaaaaattgtantccaaaagcagatatgtgactttgcaaatttaacaactgagtacgaagatctgtgatgtct

SEQ ID NO: 10315 - DNA, 266 bp, Glycine max
  Clone ID: PAT_MRT3847_109325C.1
ggggctgggaagtgtaggtggccatagactctctggcagggcggataggtctagtacagctaaaccaccagggaggctcttgattcttgtgaaagcagcatctccctctagaaagcctaccctggttggagacactacccttagcgcagacagcacagcaatgatatagggcccaaggtgaaatgccttgtaggagaagtccacacacgggtctctggcattggcagagcatgaagcatcctgaagatcaagctattatcttcatc

SEQ ID NO: 10316 - DNA, 591 bp, Glycine max
  unsure (1)..(591): unsure at all n locations
  Clone ID: PAT_MRT3847_109326C.1
ccactgtcactcagaccccaactgtaaccaaaaccaaaagtgttacccttagcaagactgatcctaccattatcacagtctgctaccttgccaccatcactgtcaacctcgcaaactttttactccctgtccccatttccatccaactcttcgtaaacagtatttcatgcatattcatcggtagttatagaggagccatcctccaccacactctccctgtggaagaacaaagcaagctcgaaagaatgtccagtaaagacgcctatatgttccctgtctatggatctggagtccttttcggtttatattgcctctacaaatatttcagcaaggatcttttaaacaagatcttgtccgttcacttcaccttctttggattcttcagcttgttacaactcatagcatatcatttagaaaaggttttccccgactgggaacaagttgtcatccataaggctttaagcattcccctncctgtcttgggcactaagaaattcgacttagtcgtcaagaagagtgaaatagttgctggtcttatctccacttctcctactgctctctacttcaccactaaatactggcttcttaaca

SEQ ID NO: 10317 - DNA, 160 bp, Glycine max
  Clone ID: PAT_MRT3847_109327C.1
ggttaacttttacatttttttaacaccactgaaatcctcaaatagtgtggtatatacaagcagagaggcttatttagtttatttcaaaacaattactatagagcttttacttattttaatatcctttatgcctacaatgaatctgatgattattagcaac

SEQ ID NO: 10318 - DNA, 413 bp, Glycine max
  Clone ID: PAT_MRT3847_109328C.1
aattttgcgagtgtcttctcaccctaggaaagtgtccctgcagccgccggaacccgtcgacccagctcggaatataaagctatcaacttatgggagtgatcctgaactccctgtttgctttccttgaagcaaggccattttatggacccattattgggacactgctatcaaccaacattgtgttattagccatgcatcttgagcaccatgagaatgaatggttaaaataaatatatgtgctgggtggagactaccttcttagctagattgctagagctagaattaacctacctatggtctgatagactgcttcctacttaaagagagcatatctggatcagggttcgtattctctctttatatatatatggtaaaagtggtaaaaaaaaacttctaacaaaaaaaaaaaaggg

SEQ ID NO: 10319 - DNA, 163 bp, Glycine max
  Clone ID: PAT_MRT3847_109329C.1
catcaatactaacacggataccggacatgacacggacatggatacgtggacacctgtcaaatacatcaaattcaacccgaacacaggcatcggtgttgtgtcggtatcggtgtcggtgtcatatccggatacggcaaggaactgtggtgtccgtgcttcatag

SEQ ID NO: 10320 - DNA, 547 bp, Glycine max
  Clone ID: PAT_MRT3847_10932C.1
gtattgtttatcacttgaatatattgtgaataggctgaaattaagagacatgggttactaattgtctggagtttatcttaaattggaaacttaattgtggtgaactataatctttgaacatgtaaaacatggtggtaagttttaacagtattgatccataacaaataggaaaaaggaaacagaaatttgaggtttttaacttgccggctaaagtatactaatccagccactctctcggtcctcttggaggatcccttcttttatttaatatttatattatatttgtaatctatcccattttgcacctccatgttttgttctctgttactgattgatacaagaccaacctagaatatcagctttcctttggatgcgttgctttggttaattttgttgctgttgatcttttgccttcaaatatgtagttcttagagtttcaagggctggttgggctgatgcactcatttatttcgtcttccaatcactctaacaatgttttgatgttgttaaggaagtgaaggcattaacaagattttttctcctgaga

SEQ ID NO: 10321 - DNA, 607 bp, Glycine max
  Clone ID: PAT_MRT3847_109330C.1
gtttaataataactatttagagataattaatttaatagacttttaatttttttaaaatatagtgaggattttaagaatggtcatgattttttaaaaattcgtcttaaaaagaaatatacattgtaagacgattgtttatgagattatcgtcaaaaatcttaattttctactggaaaatcgtcttaaatatgctatagaaccgacgaaaaataagtttttgtagtagtgagcattactaaagaaaatactgcttgtaatgataaacaaatctaatactaattgttccgataataaaaatctaattaatactgcttgcaacatctaattagactcaaatatgaatgattaataaagaaattagtccgatactacggcgtcttcagttacttttatttgtttttgctttatttacggcgtcttcagttacttttattagcttttgctttatttaattacttctgactattattattttattattacattgtaattttttgcattcgaaaggcttaccatgtgcgatggtgtgcatcaatttgtatataaatcaaatcatatcgattaattctaacttgtatataaaatctctcttccccttttcttttcc

SEQ ID NO: 10322 - DNA, 596 bp, Glycine max
  Clone ID: PAT_MRT3847_109331C.1
gatcgtttctcttgtgacttcattaagcccttcttcttcatcatcacgctccaaactcctccccaggctcgatgaaaaatgagggtgctgttgctttcttgatttttttgtgtgcagttggaaatttttggattagtttatcttgtggatcactctagctttttgcttccacagatgaggattggactcaggatacttgaagactaaccctgttcttcttaggacagtgtatgggttggaataaatgaagccacagctcaaaattgctcttgctttagttattagcttgctttggattcagcactcattttgtgatgaaaattctgatacatctagcttaaacaagtggagatgtagatgttctttccaagggaaccagagctattctcttgctaattgttcaaaatcatgtgattgccactcagattctgaagagagtgcatctgtatggacatgcgtatgtgattccaatggatttccccaagtggcagcagatggtcgtagctctaattgctttagcacttgcaactgcacttggggaaccgtcagcaggccgggaggttcaaagagcatgttccagcaagatgggtgagtta

SEQ ID NO: 10323 - DNA, 1900 bp, Glycine max
  Clone ID: PAT_MRT3847_109332C.1
tttttaaaccaaaataatctaaactttattcatcgagtaatatctattaaataaccgatggtaaaatcattccttttaatcgcgattttttttttctatatacaaattttaaatttaagacattatgattaaactaacactttaattagaatctaaataaattcttatcttataatcgaagaggatggatagagaaagggcacatgtgaaatcgagaacagccatgtagctatacagacaatatactccatgaatggtgggtcaaccacatccatatccatgacaaccctttcataaaccagccagtcattattcatattatctcattctcatatatctctctcaattcctcatcccaccacgcacacacagtcacaaactcccttcttcttcttccaatggccgccacagacgtcacggagcccacgtgggccgagctcctgggccgcgacaactgggcgggcctactagaccctctccacccctctctccgctccctgatcctccggtgcggggacctcatccaagccacctacgacgccttcaacaacgacaagaactcgctctactgcggcgccagccgctacggcaaggcctccttcttccgcaaggtcatgctggactgccccgagaattatgacgtcgcggcgttcctctatgccaccgcaagggtcaccgtccccgaggccttcctcctccactcgctctcgcgcgaggcctgggaccgcgagtccaactggattggctatatcgccgtcacatcagactcgcgatcccaagaactcgggaggagggagatctacgtggtgtggagagggaccaccagggacatggagtggatcaacgtctttggggctgggcaggtggatgcttccgggttgctcagtgctaagagcctcaaagagctgaaggatggaaacaaagacggtagtagcagcagcagtgacgaggaagacgacccgagaaaaccgaaggtgatgtcgggttggctcacaatctacacgtctgacaacccaaaatccccctttaccaaatccagcgcaagaacgcagcttcaagcccacgtcaaatccctcttacaacattacagctctgagaaccccagcttggtcatcgtggggcacagcctcggcgcaaccctatccatcgtgagcgccttcgacctggtcgaaaacggggtaacggaggtcccggtcaccgccatcgtgttcgggtccccccaggtcggaaacaaggccttcaacgagaggttcaacatgtttccgaacttgaaagttttgcacgtgaagaacgtgatcgatttgatcccacactacccggggaagttgttagggtatgagtacatgggcacggagctggtgatagacacgaggaagtcgccgagcttgaaggactcgaggaacccgggtgattggcataacttgcaagcgatgttgcatgtggtggcggggtggaatgggaagaaggaggagtttgagatgagggtgaagaggagtgtggcgttggtgaataagtcttgtgagtttctgaaggaggaatatggcgtgccagggtcgtggtgggtggagaagaataaggggatggtgaagagggaggatggggagtgggtgttggatgcgccagatgaggaggatgtgcctgtgctcgaagagatttgattagctttaagcttggatctagtaggactgttaatctctttatgtaatggaacattattcaaatctaaatcttctataatagatttattttatgtgagaatcgaaaataaataaaaatttatatattttatgtttaattgattaagttagaccgaatggggtgttgatatatgtataatgttcatgttaaaaaaaaaatgaatgtatcataatgacattgtccttttttgttttgttttgtt

SEQ ID NO: 10324 - DNA, 2671 bp, Glycine max
  Clone ID: PAT_MRT3847_109333C.1
ctttctatcactctgttgagtgagtaagcaaatggaggaatagcgatctgaattttcggattctttaattgcttctctcgctttcaccgtccgaactcaatttatagatactccgtcaacctcaatcccaactaactacctctcttcttcctttttgttggttggttggttgaataaagagagaaaatcgtttttgttgcttcttatttaacaggttccttttcgcagcttcacaatatctccgaaatgaaaggtaccgtcctcgtcgctattgccgctgctatcggcaatatcctccagggatgggataatgcttccatcgccggggccattgtttacattaagaaagaccttgcgttgcaaacaactatggaagggcttgtggtggccatgtccctgattggagcaacggtaatcaccacatgctctggtcctatagcggattggctcggtcggcgacccatgatgataatctcatctgtgctctatttcttgggtggtttggtgatgctgtggtccccaaatgtgtatgtgttgtgcttggcgaggctacttgatggatttgggattggccttgctgtgactcttgtcccggtctatatatctgaaacggcgccgtctgaaataagggggtcgttgaatacgcttcctcaggtcagtggctctggaggaatgtttttgtcgtactttatggtttttggcatgtcattgagtcccgcgcctagctggaggctcatgcttggggttctgtctattccttccctcttgtattttgcattgaccatttttttcttgcccgagtcttcctcttcaggctcggtcagcaaaatgtaatttgatgctgcgacggcaaacaaagtgctcccaaagattgcgcggacgggaggatgtgtctggcgagatgaccttgctggttgaaggatctacgggattgggggtgatacatctattgaagagtacataattggaccctgctgaccaggtggctgatggtcatgaacatgcaacagagaaagataaaattcgattatatggatcccaagcaggcctctcttggttagcaaaacctgtcactggacagagttctattggccttgcatcacgccatggaagcatcatcaaccaaagcatgcccctcatggatcctctggtgacactgtttggtagcattcatgagaagctccccgagacaggagcaggaggaagcatgcgaagcactctgtttccaaattttggaagcatgttcagcactgctgagccgcatgctaaaaatgaacagtgggatgaagagagcttacaaagggaaggtgaggactacatgtcagatgcagccggtggggactctgatgataatttgcacagtcctttaatctcacgccaaacaacaagccttgaaaaagacttgcctcctcctcctccttcccatggcagtatccttggcagcatgaggcgtcacagtagtctcatgcaagggtcaggtgagcaaggtggtagtacaggtattggtggtggctggcaactggcatggaaatggactgataaaggtgaggatggaaaacaacaaggagggtttaaaaggatttatttacatgaggagggagtttctgcatctcgtcgtggatccattgtatcgattcccggtgaaggcgaatttgtccaggctgctgccttggtaagccaacccgctctttactccaaggagcttattgatggacacccagttgggcctgcaatggttcacccatctgagacagcttcaaaggggccaagttggaaagctcttcttgaaccaggggttaagcatgcattggttgttggagttggaatacaaatacttcagcagttttcagggataaatggggttctatattacacacctcaaatccttgaagaggccggtgttgaagttcttctttcagatataggcattggctcagagtcggcatcattccttatcagtgctttcacaaccttcttgatgcttccctgtataggcgtagccatgaagctcatggatgtttcaggcagaaggcagttgttacttactacaatccccgtgctgattgggtcactcattattttggtcattggaagcctggtaaattttggcaatgtcgcccatgcagcaatctcaacagtatgcgttgtggtttatttctgctgctttgtgatgggttatggaccaattccaaacatcctttgctcagagattttccccactagggtgcgtggcctctgcattgctatctgtgcattagtgttctggattggagacatcatcatcacatactcgctgcctgtgatgctgggctctttaggacttggtggtgtattcgccatttacgcagttgtttgtttcatctcgtggatatttgtgtttttgaaggttccagaaacaaagggcatgccccttgaagtcatctctgaattcttttctgttggagcaaagcaggctgcttctgccaagaatgagtgacacaacacaagtccgttatatactccgtaactttagttgttaaagccatcatctctcgtctttacagattttgcttgtcataagtttatttggaggaagatatgttgaaacatatggatgtattattctttcataaatataaaattttgcatttttagagtgaaaatagccttttggattttccactttagaagc

SEQ ID NO: 10325 - DNA, 505 bp, Glycine max
  Clone ID: PAT_MRT3847_109334C.1
ggctcgagctagacatgtgtcaaacgtgatgatcctggcatgtggagcatcatcaccgctatctgatctgatattattgaacaagtcaacgtcatcctgggttgctaggctgcatacatcggtgacactcatgggcgctatacaaagaacatcgcctggataaaacggggcttcaacttactgtacgatcaccaccgtcttcgtgcagaagtagcttgcaccgagcaccgaccaccgcatgcgccacaaccaccaccaaccctactgcgacgcgtctcccacatacctaacacggattatttcactctttcattacgcctacggattctgttgcgcgatgaaacaactcaacacgccaaccatagcccttgcagcaaatattccagcaccataagaaacctgtagcatgatcagtgaccggtgacaaagcaatttgatcaattgaaaataactgtagccattgttgaagagccttattatatcattcaattgaacgctcgacaac

SEQ ID NO: 10326 - DNA, 259 bp, Glycine max
  Clone ID: PAT_MRT3847_109335C.1
aaagagattatgcctcttaaaaaggaatctttgagtttggaaatgctgccctcgatatccccaatctctaattcaaatgaagtgagattgatgagaaatatatgccatcttgaaagtgcttatttttccatgagatcaaacttcagctttctgaaacagatgcttcaactcaccctgataaagatatactaagaaatcgtgagaactggaatgtggctgaaaaaagcgaggaacaacctaagaaagatactttaggggc

SEQ ID NO: 10327 - DNA, 868 bp, Glycine max
  Clone ID: PAT_MRT3847_109336C.1
cagggagtaagacggtatcctacattctttgccatgttggaggcagaaagccttggaaaagttcttcctggagttgaaagtagtgaagaaggtgtaaaagtctaccagagattttgcacagaggagaaggaacaagcaaatggtgtccttgcaatcgttgtttcaaaattcacccctcaaccatacgattctttggctagattattctgtgaattgagctatgagggtgttcaaagccttctaggtctcatgcataccacagggacaattcctaatgcacttcctccaccaatatcaactctattagcatcatttaattttccatgcaatccaaatgaaaatggcttgactgatggagctcgtgcattggccaagcatgcttgtaggagtagcagtggttattggggttctctgaatggaaatgattctaataaaaataggcttgcaatggatgttattaaccgcctaatatcacattgttgttggctgaatgtgtatactgttccaccacatggagttgtctttgaaataagggttgctaatggatatggtgcacgctggacagaagatggaagtaagtttattggatttttagaaccctacatgcaagatgggcactcaaagcgatggaagcactagttctgctggccagaccacgacaactacagctaaaaatgtcactagttttccttttatcttgtgatggaactatgtttatggcacagtatttgtttttctctctctttatttcagctaaggactttagctaactatctagtctaatgtctcagagtaatctacttaagtagacttctgtatacagatgatggattcagtataagtattacttgtttcaaactgtactttt

SEQ ID NO: 10328 - DNA, 460 bp, Glycine max
  Clone ID: PAT_MRT3847_109337C.1
ctcctgccgaaagatactcactcaatctcaacataaagagagagagagagagctagagagagagagagatagatatgaccgattacacagagagattcgatgggaacggtgaaaaaaaagaactggacaactctcatcattagcctaattctgattgctttcctctacccacccgctacgatctcaccgatttcatatctagccatggatctcgcgattatgacagagattctttcataatctgagattaagagcggctgatagggagagacagggtgataaactgggaaaaggggaggtacagcgaatgggacaaatgtttggatcgggactcggtgagaatcttgcaccaggacagatatctggattttaccacactctggtagagggagcgcgatcttcttggtgagaacgaatgggaccgactcggggaccgccatcattgatatcgacacatgga

SEQ ID NO: 10329 - DNA, 526 bp, Glycine max
  Clone ID: PAT_MRT3847_109338C.1
ggcttcctcaatgatctcttccccagctgttaccactgtcaaccgtgccggtgcccgcatggttgctccattctctgccctcaagaacatggatggtttccccaccaccaataccaacaatgacattacctccattggtatcaacgggggaacaccgcaatgcatgcaggagtggccaacacttggctacaagaagtatgatactctttcctacctgccagaccttgatgatgcactattgacgaaggaatgaaaataccttcttaagaacggatggattccttgcttggaattccagttggagcacgggttcgcgtaccgcgaccacgacaggtcaccaagatactacgatggacgctactggaccatgcggaatctgcctatgtttggttgcactgatgcttatcatgtgattaaagaccttcaagaggttaacactgtataccccaacggcttcatccgtatcatcgaattcaacaactttctccaagagcagcgcatcagcttcatcgcctacaagacccca

SEQ ID NO: 10330 - DNA, 434 bp, Glycine max
  Clone ID: PAT_MRT3847_109339C.1
cacggctgagggatggtgaaacccctaatgctgtaccatcacatgcaaaattacatggactgcttcttgaggagcgtattgagaatggttatagtaatcctgcacgcctagtgaagttgaagaaaagacaattgaatggaccagcagttgaaacaagagctgggaagagttacatggagaaatttctggaaactccttcacctgatcataaaatggtttgtgaaacttcaatctttccattgcctgtgaaacagacatcagatgatgctagcgaggctgggattaaaattcttgaaatcagcagcattagtcctgtgaaaaagtcattgggaaataaaaacacctattcatcccctgatgagaaggaattagaactaaaaccattttcacaaatggatggtgggacaaatggagatcttgtgaaggtgaaagaa

SEQ ID NO: 10331 - DNA, 262 bp, Glycine max
  Clone ID: PAT_MRT3847_10933C.1
gcgagggtccacccgttctggtgcgacagggttcgtatatcctgctgcaaagaccaaaacaagtatcccccggtacgcgtcggagaaagaggaaacgcccgagcggaaaaacctcgccgcagcatgatggctgccactgcaccaaggaaggccggggggcctgtcccttccggtggccgcacatcgccaagggccgcaggcgatgctgccccggctctgcacgtaaacctctcccagccgcaggggcagccctctgccacct

SEQ ID NO: 10332 - DNA, 1695 bp, Glycine max
  Clone ID: PAT_MRT3847_109340C.1
cacgcgtccgatcgtggaatgatagtaaatggagaagatcaatccagaggcagagtccaagctgagcacaacactattctagttctagctattttctattcccacctaggaaggatattaacaccaccaccatcaccgattttctctccccttctatcgcacttcccagcctgagatggatttttctcttccatttccaccgcctaatcctgtctcttcctcaccttctgcaacttctctaaggtgaacatggtctttctgaatccgattgtcaaactggggaaatccgttagcatatttcatgttcccccttcaagttcaacgcttggctccccggccacgtcacatttctaggcaaaaacctcccatgttcttttgtgcattgcttctattactactgccaatttgtgtggttggaatttttatccatggccaaaagattacttatttcttccgaccactttgggacaacccccctgcccccttcacaagtatacctcactattatgcagaaaatgtctctatggaacacctttgccgccttcatggctggtcccttcgttccaagcctcgtcgcatttttgatgctgttatcttcagcaatgagttagacatgctagagattagatggcacgaactttctccctatgtatcaaagtttgtgatccttgagtccaatactacgtttacgggcattccaaaacgtctcttcttcgccttaaaccgggaaagattttcctttgccaaacaaaagattgtccatgacatttatcctggcagaattgcagtccctggatcgcacgaggacccatttgtgcttgagtcaaaacagcgtggggcgatgaatgcattgttatgccgtgcaggcatttccaatggtgatattcttctcatgtcagatacagatgagatcccaagtcctcatactttgaaactgcttcagtggtgtgatgggattcctcccataatgcatcttgaactgaggcattacatgtactcatttgagttccccgtggactacagcagctggcgcgccactgcccacgtctatggtccccaaacacaataccggcactcgcgccagacggatgtaattttctcagatgcaggatggcactgcagcttttgctttcagtatatttcagagtttgtgttcaagatgactgcctatagccatgcagaccgcgtgaaaaggaaatattttctgagtcattcaagaattcaggacataatctgcaagggagatgatctttgtgatatgctccctgaagaatactctttccaggagttgattaaaaagatggggtcaataccccggtcagcttctgcggttcatcttcctgcctacttgatagagaatgcagataaattcaagttccttcttcctggaggctgcttaagacccccagaataaatgaccctttttgcgaagtaacacataacctagatttgcactttagctttagattttggtaggatacatgacatagcactaagtctcgtagttttatcattgttcttgaatatgaagcagcaggtataaattgcatggagaagcagaatatagcacagtcactatagcaatttgtagctgtagaaactcatcccgctcacatatctttttgttaagtataggagatagtggagagaactagtaatgcggtggcttaataaacaaagagcttcaactgacag

SEQ ID NO: 10333 - DNA, 1902 bp, Glycine max
  Clone ID: PAT_MRT3847_109341C.1
gctcgagctcaaactcctgttggggcaggtaattcatactcggggaggctcaccgatgcggtgcatgtggggatgaatcctccgagtttaggaggtagtaaggagcagggaactgcagcaggtggtggtggttatccgaacgcgcgcgtccggcggaaagaagtggcaagtgctgtcgagccagagcaaccagcttggtctagtgctggtgctgcttccaagttggctcacgccagtgcccttgagaaggtgtcttctggtagatggcagtctaaggctgtaaattatcagactgatgctgaggtggttagatctcctgaagtggagaatagaccacatgttaatgttatggcgttggtgcctataataggacggatgcagtgggtgaaaaggagtattatgatgcaatgctagctagacacgctgaaaggggcttaggcattgataatccgatgcaaggtggtaggaatgagttaccaaattatgaaaggtctggggtttcccgatattcagatgtacggccaacaagtgcacctcatcactctggtggggttcagctggctcgaaatgatggaaaaattgttgggtctgatttgcagcaccctatgccttctgaactaactgagcgacataaactgaagttgctaccaagggcaaagccagtggaaagttcagaacctgctgtcatggattatgcacagggtaatcgtcatgttaatgattctggccatgttgaaaccgtttatcaagcacatggccatgccaattttgtgaagcctgtatcagctggaaatgacaatgggaaagacgcaggacagcgtccgaagctgaatttgaagcctcggtctcagcccactgaaaagctggatggaaacagtgaaagagacaggaatgttttatttggtggagctcgcccacgtgaactagtattgaaggagcgagggattgatgatgtttcaatcaatgtggtggagcattcaaacagggttgaaaacaatattttgagggttcagaaacatcctgaccattcaacccagactcgatatggtgaaaagaccgaggatgctcatcttgatcaaaagacaggcagaaaacctgaaaggaaggagcaaagggcagatggtgatagggctcatgcgcagaggagaaattggcggggtgatactcggagaaatgggaaggagaccgataggcagccgcatgccccggagaggcaaccttcacctgagacatggcgtaagcctgtggagcagcagctaaaatcagctccaggtgctgctagcacacggtacagtagagcagcttcggcggttgaacttgcacaagcattctccagatctgtatcagatccaaaagtgaatgataggttttcaggtcaaaggggtctgaacactggcaacagcagcaggacacaagttccattttcacggcttgttggtcctacatcaaggcctcagatcaatggttattaaaatatttggtggataattggactcactcaagaccaatttctatgagatagcattggattcatgcaatgtggaattgcagagcacttcatgtagtggctgtggttttagttattttctcctcattcacaacaattgagtgagaaattaatgatttctcaagttacatagccttggttgtgacaataccttcttacaattaccatgctttattttgtttttatttattgccccatatcatttgctgccaaaacactaatttttttttctttctttgtggtggagctgaaaaggctgttacctaatgaaaacattgtagcatgattaacaccataaaattgttcgttttagtttcatcatcatgcggctatcttgggcaatttatggaccatgatcacggatttccaaattgaaaaaacttattgctatgtta

SEQ ID NO: 10334 - DNA, 328 bp, Glycine max
  Clone ID: PAT_MRT3847_109342C.1
gtcaagaaaaataatattaaaccatacaaatgttcccatactccatattatcacgacattaacaaaaatatgttcaaactgcaaggttccttagcttatacacctgtttgcagtggcacaaaccagtccaaccaattattaccatcgtagttgactcgttaaaaagcataaaacagaattagattccttcattacatacaacagaccttattacgtttctataaacagcattttttttctatccttcgccatggctcaaaatacataatttgaacaaagcaactgactgggatatcaagtggctactatcctaattttatacctattt

SEQ ID NO: 10335 - DNA, 781 bp, Glycine max
  unsure (1)..(781): unsure at all n locations
  Clone ID: PAT_MRT3847_109343C.1
gaaaaataatgacaagacactcttacaaatgttctccaaattggtatggggcaattacaaatcattttttttatatttcaaaacaatttgatcttacatacatactggatatgattcccgtttggcaaaagaaacccatgattaattttagtctatacctccaacatgcacatgaagaaggtgcaccaaagagcgagactaaatgttgcaatgaaatatgtccatatcatgataagagaacattcactctcaccattcccgagcatgtgggccacaatacctgcatttctggccggtggaagcgcatattgaagcataagaacaaattgatataacgaatacgatccaatgaatccccgataatatgctgctttaacaatcaaaatacccaagataggtgaaattatgaaccgcactaccataatccctataatcaagaaaatgcttattcctgacttctttaaaccccactaaagaagcagaactgataataacacgaaagggagcactatcaccaaccacgagctttttaattggagaaatcgctccgatggcaaatccaataatcactgcaattgttgatggtgtaaacactgtctccactttgacatatcccatgcattttgtaattgaacttgtaatnnnatccaagattgntgtctttctcccattgntnncatatggtaactcatgatccggttgaatggaaagnnnnnnnatgctcacagagtnngnngaagttagnaatgattctgtgatattnnnnngaaatctttctagg

SEQ ID NO: 10336 - DNA, 397 bp, Glycine max
  Clone ID: PAT_MRT3847_109344C.1
gacaaaagcattcattgtcatggctcacataggctaattgttccagatgtaccattctactaggctgacagattaattggatagatcgaatggtatcggcaaggatggagccttacacacatgcttgattcagtattggattcaccctgctacagagtttgtcacactacataatctggagacagcaaagatgctccggatactgtgcactgctatgtctagtatacatgtcagtcgtactagttgagcatgcgaggacttggcgactggatacaacgatgcacgacggcttgcctagttaatctcaacagcccgatgtggactctaacgctgagggacaagtcacagtactgacatcggtatgctagtctaggaccgtgatactgctgactgacac

SEQ ID NO: 10337 - DNA, 269 bp, Glycine max
  unsure (1)..(269): unsure at all n locations
  Clone ID: PAT_MRT3847_109345C.1
caaagcccttgtttcactttttccatccgtatggagtaacgancgccttgctccgctctctccgccgccgcgaccttccctcgtcttctctctccgctttttgtacgcttacgagtggtacaaagacagcatatgtagggaacaagtgggcaagtttgtctcggccgttcagttcgaagactgctggtaatgatgtcatgagaattgatctgggtactaccaaatcatgtgatgatgttatggaggaatagaatcccaaagttattgag

SEQ ID NO: 10338 - DNA, 506 bp, Glycine max
  Clone ID: PAT_MRT3847_109346C.1
gctcggaattcggctcgagctttatgattcatcgcctcccctttacacggcgccgttcttctctctcctcttcacatcgacggcggagacgcgattctcggaatctcggaagcggttgatactttgatcctcttcctcaacccttccctctttaaaagtttcacgtcacaatgcggagcatacctcatttcccaaacaccacactctcgcaaacgcgcttctgattctttctgtttcagattaatcaatcctctgaactcttcgcgcaaccgaaatttcaaaaacatgtcgtcgcggcaagtggtgaagcgtgccaaatacaaaaccactgtcaaagaccctggcacccccggcgtcctcaaattgactcaagataggttcgttttcaagccgaatgatcctacctcgaaaaccaagctcgatgtggagttcagatttattcagggtcataaagtcactaaagagggatcaaagcaaccaccattgcttaaccttatccgtgcaca

SEQ ID NO: 10339 - DNA, 362 bp, Glycine max
  Clone ID: PAT_MRT3847_109347C.1
ctctgtagagatctatgaaaaagttgggagggagtgtgcacacattgattacatgcaacctcattgcattgaagcctaacatgaagagatgacgaagagtacagggtgtacataatcgactgttatggagcttgattctttagtgtctacaatatcattttagcttgagagggtaaataaaaaatggacgatatacagtgtgcgggtataaccattgaattttggtattttacgtcgtagcatgccgggtaccatgatcgaatctatcttaacgcgtaatcgcgagaatgagatgggtacaactttaacattattgaatcacgcatactattagccgagctttagtcaaatagttattgacc

SEQ ID NO: 10340 - DNA, 370 bp, Glycine max
  unsure (1)..(370): unsure at all n locations
  Clone ID: PAT_MRT3847_109348C.1
agactcattggatcggttgatgttgttgtgtctgtgaaaacaggctcatctgttttccttccaggcttgcttgcagaagctcatagaggtgttttatatgttgatgaaattaatcttttggatgagggtatcagtaatttgctccttaatgtattgagtgaaggagttaatactgttgaatgtgaggggatcagtttcatgctcccttgcaggccccttctcatngnannttaacccagaagagggtgctgttcgtgaacatctgctggaccgcattgcgattaatttaagatcatcttggccagagagtatctaaaagatgttactctgaacagagatcaattaaaatacctggttattgaagctttac

SEQ ID NO: 10341 - DNA, 297 bp, Glycine max
  unsure (1)..(297): unsure at all n locations
  Clone ID: PAT_MRT3847_109349C.1
attgcaccaataatagtgtggtctctacttcggtcgctgccggacaccaaaatttttcggtcattaatttcggttgctaaatagcatttttcaatccttacaactagaaaaatattacttttaaatacatggctatttgtttcaccttttttatttatgcttatgatattaatgatcacattataggaaatagcatgattcaaattattatagtaaatctcatattttttaatttatattagtcaattntaaaatattatgttgatgatattaaataaatcaatattattattttca

SEQ ID NO: 10342 - DNA, 181 bp, Glycine max
  unsure (1)..(181): unsure at all n locations
  Clone ID: PAT_MRT3847_10934C.1
cttcgttgaaccttccaaatcataaacctttgcctctcttacctcgcaaatttcttctctttcatacaagttccttctttttattggtattattaccatcatcaatctccaaagttttccatcaaattttcacgcgattagtttcaattcagcacatcagtgttaagggaatgnttcattc

SEQ ID NO: 10343 - DNA, 455 bp, Glycine max
  Clone ID: PAT_MRT3847_109350C.1
gaccgaaaactttccctttttcttctagcttactgcgaaggtcagacacaaattgtttacaactatctggctatactccttaatcagatgaactatacccgtatatgactccattgacaaactacagatcctatcagctcaacacttaggggaactaccataaaaaaaaaaccacgatagggggaaatggaaagaagaattgcctttgtagattccatataaaaacccacttataaaacactgtacctaattcacaggggaaaaaaactggtacacgctgcgtcttggaatcaaaggttcttgcttagatgaaccgatgcgactgggccattcatgaggggtctggttccacttttgtgacgatggcatattcaaggtttaaatgggaaatccgaacagttccaataaccctgtcgggcaatccttcatgcgtatttccctgttcaagaaaaccc

SEQ ID NO: 10344 - DNA, 282 bp, Glycine max
  unsure (1)..(282): unsure at all n locations
  Clone ID: PAT_MRT3847_109351C.1
gaaaataacacgagcanaaaaaaaaggaagggatgaaatgtgaccattatggtacagggtgcaaagaggaacagacccagcccataagcgcacaggcacagaggaccaaccaagcaaactcattttcacgccccaatggacccaggcccaaggaaaaaacattcgggccgccaaacaataaatggcaccggctcataacagtgcaccaccatgcagctcacaaataggctaagaggacgcaaccctgagctggaacaccaccttgccacgcgagatgaactg

SEQ ID NO: 10345 - DNA, 364 bp, Glycine max
  Clone ID: PAT_MRT3847_109352C.1
actcttctttctctctatttctaaggtttgccctgagatcactttgagcaagggtgattgggggggcaattcttggcatcagcgagggcgtcacctggaactattttcttcactcaagagggaaatggccccaacaccgcaacggaatctttgctggcttaaccctggctccatggctttccatgtccatgccttgggggacactaccaatggttggctgtcaactggagcgcctcttaaatccttattacaaccagctcggggcccctgttgaccaaaatctatgctggtgatcttggaatgtaatgctgtgatgatggtccgttgcttcgttaccgacatcaaatcctttctggaccaactt

SEQ ID NO: 10346 - DNA, 277 bp, Glycine max
  Clone ID: PAT_MRT3847_109353C.1
agctatggatgataaaactctgctagtaatgaagattcaatccttatatcacagatttccaggaaaacaacgtaacccatctcattatgcttcttgcctataatcgaacccttaagattgatatcaaaacttgaagcttattatacacagaccatgaccgagaagcaggttttttgtatctgctagctcactcctctttttctcattcctgaccctaactgtccttcaccgtaccttgctcctcacattctccaccccaacacccgaagatgacaac

SEQ ID NO: 10347 - DNA, 254 bp, Glycine max
  Clone ID: PAT_MRT3847_109354C.1
aggcgtcagacggctacaagaagagaactgataggtgttgctgcggtattattacagaaggggacaccatccagtactcttcttttcagcagatcctcatgatctctgctaagctttcttttctttgaagtcatacgtcttcaatgtcatcacatttcacacttctgtggtcgtcggatttcatgctgtctgctgtcgacacttctcgagtctacgttctgtgtccttctcttcaccctcatgttttacgcctt

SEQ ID NO: 10348 - DNA, 664 bp, Glycine max
  Clone ID: PAT_MRT3847_109355C.1
gcacgcctacctaagctttttttcggctcgaatcattagctcctctgtccccacgatatttctcccctctttcactaggtcctttgtttccttgaaagccttttattttgtaagttcccttaaattttttttagtgccaaactcttagagcatcatttccttgctttttaagcattgccaccagtttcaaagcacccttctgcgctcctctcttactgctacacatctcaagcatccgtagtttccgtcttcccaatggctgcaactgcacctgcaacagaaacaagagttgaaattaaagaacctcctacagaagaacttttagaacctctcatgtgcaagagctgtgtgttgaaagtctccattcattgtcaaggctgcacaaggaaagttaaaaaaatcctacagagcatagacggtgttcattgtaaattaaaacctaacatctttcatttctattttcactcttccctttttatacatactttagtaactccatataatttctttaaatcttaacgctctattaaaatcattgttacaagtttcttaacaattgctagttatatttccatttgatgaaaggttcttgttttttatttttttcaaatcctaaggatgtcttaacattaatattcttaatcatgaattcctcgttaagtca

SEQ ID NO: 10349 - DNA, 518 bp, Glycine max
  unsure (1)..(518): unsure at all n locations
  Clone ID: PAT_MRT3847_109356C.1
gtgttcagcatgaattttcccaatcttgacctcaaattaggcattggtgagatggggcccatgaagaggatattanttgggatgatgtgggagccnnaaataaaataggggtgtgaggaagntnagatttctccctttcccttcatctatgaatatgtagatagccattgataagccaatatgtgtcccccaattgaatgtngataaaagccatatacaaccccacttcatattattgtgttcnncttcatatcacacnntgataataattcaagggctttccaaagtagaaggaccttaaaattgagtttggaatatcaatggcccaaggggaaggatttataaaatgggagagtngggattttggagaatttgatgcaaagacatnatacctcttttcctttccttgagttttaagttgattaagtgcccttcattggaattcatttcctcttttggatctctctctttttcctttccttctcacatacccaccaaatacccattttttcttcttc

SEQ ID NO: 10350 - DNA, 141 bp, Glycine max
  Clone ID: PAT_MRT3847_109357C.1
ctagctgctctgatgccaatgctgctgcgtcatgaactctgagcaatgcactgcagcattgactactcgtactcgtagtatgttagtggtatggatagcatatcatggagtgtagtagtcagtcgtatgggcgactcagtg

SEQ ID NO: 10351 - DNA, 533 bp, Glycine max
  Clone ID: PAT_MRT3847_109358C.1
gttcttgatggatagcgggcggcctatttgatggatgcatgcttacgcacgcgtgcgtgggcctagttagtttttagttggggctacctaaattaaattggcgggcggtttacaacgaagggactgattgaaaaatgccggtgctcacctaaataaactggctggacatccatctttctttagctggggggataactaagaagaaggccccgaccgaccttcctaacaaatggtcagcctgactgaagggtgaaaggaaccctccttgtgcgcgttaattaaggcgggtggggtgggtgcttacagccagatcgatacttttgttagcgagctaccgaccgcccgttcctttggctttcttcccttccttgccacccacgtcggctggttttccccagctatatttaagtgggtgccttccttgaggcgacctattgctggactgccgcgtcctcgccccaaactagcttgagtaggtggttgacttagggggtgatccacctgcttgacggacggttttcctccttcggtgg

SEQ ID NO: 10352 - DNA, 783 bp, Glycine max
  Clone ID: PAT_MRT3847_109359C.1
cggcaccagttaagaattcaacagcttgttcaccaattaagctttcaagagacaaactgctttgaaaaatgggatccaaggttgttgcatccgttgcccttctcctctccatcaacattcttttcatttccatggttagctccagcagccactacgatccacagccccaaccttctcacgtcactgctcttattacacgacctagttgtccggatctgagtatttgcctcaatattttaggcgggtctctaggaaccgtggatgattgttgtgccctcatcggtggtcttggtgacattgaagccattgtgtgcctttgcatccaactcagggccctcggaatattaaaccttaaccgtaatttgcagttaatattaaactcctgtggacgaagctacccgtcaaacgccacttgcccccgaacctaagaacagaatatgtatggcactaattaccatattacttcgtatcatggtgtttgtttgtttgtctgtgtttaaagttaaggatgttatacccttcgtgcctgctacatatatatagtgggcactataatattaccaataaattaacgtccatatataagaataataataaataaataaatatttctatacaaataaaggttacgtaatgttgttgttctcgtggatggggatcttatcttcctcctcgctatctttgtttatcgtatttcagtgaaagttgttcaataaaagtcctttgttcaacaagtgaaaaaaaaaaaaaaaaaaacgcgaatggcgccatataggaggcggt

SEQ ID NO: 10353 - DNA, 2260 bp, Glycine max
  Clone ID: PAT_MRT3847_10935C.1
gcaaaggatcatggaagttatgctctcttcttcacatcccttgccttatcagtaaggtacccttttgcatagtcaagggtgtcagaacccgcaggctggttcccagaaacgtagttgtaaatccaagataaagcagcaatggcagccacaccacagcccccagagaacaaaaagccagaagcaaccaggaacagcacaaacgcagcagggacaaggatggggctgagttcaatatcctagtataccttaataaataatttaagatactatgatgagagcacggttcccattactgttgctgggacttgttttcctggcttcagtttctgtctcatttggcattgcttactgggaaaaagagaaccccaaacacaacaagtgtctccagagttgcaatagcgagagagactcgtacaggaaccaagcatgccacgctcgttgcaacctccttaaggtggagaaagaagaatgtgaagaaggtgaaattccacgaccacgaccacgaccacaacacccggagagggaacctcagcaacccggtgagaaggaggaagacgaagatgagcaaccacgtccaatcccattcccacgcccacaacctcgtcaagaagaagagcacgagcagagagaggaacaggaatggcctcgcaaggaggaaaaacgcggagaaaagggaagtgaagaggaagatgaggatgaggatgaggaacaagatgaacgtcaattcccattcccacgcccacctcatcagaaggaagagcgaaagcaagaggaagatgaggatgaggagcagcagcgagagagcgaagaaagtgaagattctgagttacgaagacataagaataagaacccttttctcttcggctctaacaggttcgaaactctcttcaaaaaccaatatggtcgcattcgcgtcctccagaggttcaaccaacgctccccacaacttcagaatctccgagactaccgcattttggagttcaactccaaacccaacaccctccttctccccaaccatgctgacgctgattacctcatcgttatccttaacgggactgccattctttccttggtgaacaacgacgacagagactcctacagacttcaatctggtgatgccctgagagtcccctcaggaaccacatactatgtggtcaaccctgacaacaacgaaaatctcagattaataacactcgccatacccgttaacaagcctggtagatttgagagtttcttcctatctagcactgaagctcaacaatcctacttgcaaggattcagcaggaacattttagaggcctcctacgataccaaattcgaggagataaacaaggttctgtttagtagagaggaagggcagcagcaaggggagcagaggctgcaagagagcgtgattgtggaaatctcgaaggaacagattcgggcactgagcaaacgtgccaaatctagttcaaggaaaaccatttcttctgaagataaaccttttaacttgagaagccgcgaccccatctactccaacaagcttggcaagttctttgagatcaccccagagaaaaacccccagcttcgggacttggatatcttcctcagtattgtggatatgaacgagggagctcttcttctaccacacttcaattcaaaggcgatagtgatactggtaattaatgaaggagatgcaaacattgaacttgttggcctaaaagaacaacaacaggagcagcaacaggaagagcaacctttggaagtgcggaaatatagagccgaattgtctgaacaagatatatttgtaatcccagcaggttatccagttgtggtcaacgctacctcaaatctgaatttctttgctattggtattaatgccgagaacaaccagaggaacttcctcgcaggttcgcaagacaatgtgataagccagatacctagtcaagtgcaggagcttgcattccctgggtctgcacaagctgttgagaagctattaaagaaccaaagagaatcctactttgtggatgctcagcctaagaagaaagaggaggggaataagggaagaaagggtcctttgtcttcaattttgagggctttttactgaataagtatgtactaaaatgtatgctgtaatagctcatagtgagcgaggaaagtatcgggctatgtaactatgactagagcttcaactatgaataaataaatcgacagcatatgatgcttttgttttgtgttcaaaaaaaaaaaccagtatttaaaaaaaaaaaaaaaaaaaata

SEQ ID NO: 10354 - DNA, 633 bp, Glycine max
  Clone ID: PAT_MRT3847_109360C.1
gttcggctcgagagctttcaagagacaaactgttttgaaaaatgggatccaaggttgttgcatccgttgcccttctcctctccatcaacatccttttcatttccatggttagctccagcagccactacgatccaccgcccccaccttgttacgtccctgctcctttaacaccaccaccatcattgtcaccaccaccgtcattgtcaccaccaccaccgtcaggacctagttgtccggatctgagtgtttgcctcaatattttagacgggtctcccgcggatgattgttgtgccctcatcgctgatcttgttgaccttgaagcctctgtgtgcctttgcatccaactcagggtcctcggaatagtaaaccttgaccttaatttgcagttaatattaaacgcctgtggaccaagctacccgtcaaacgccacttgcccccgaacctaagaacagaatatgtatggcactaatcaccatattacttcgtatcatggagtttgtttgtctgtgtttaaagttaaggacgttataccccttcgtgcctgctacatatatatagtggggcactataatattaccaataaattaacctgcctgtgtaagaaatataataaataaataaatatttctatac

SEQ ID NO: 10355 - DNA, 281 bp, Glycine max
  Clone ID: PAT_MRT3847_109361C.1
aaattatgtacattctgtaggcgcagatccatacctctgctacaaagatgcagatcttggtcgagacacataaccggaaagaccattacccttgcggaggaaagctctgacaccatcgactaacggcaaggccaagatccaggacacggaaggaattctcacggatcagaaacgtatcatattcgccggaaagcaacttgaggactgacgtaccctggccgactacaacattcagaaggagtcaacccttcaccttgttcttcggctacgtggtggcatgc

SEQ ID NO: 10356 - DNA, 180 bp, Glycine max
  Clone ID: PAT_MRT3847_109362C.1
ctcgctctcagttatgtctctaattaattaattctaacctgcattttgcatttggagttcatgtttagtactttttacgacatgtcgtttaaccgaatccgaatctcaactcgtgtagtgtttttttaacaacttgctttcgtttcgctgctacttactaattactaacagttgaagaat

SEQ ID NO: 10357 - DNA, 419 bp, Glycine max
  Clone ID: PAT_MRT3847_109363C.1
cggtctcgtgggcggacgcgtgggaaagaaaacaggaaacaaaatcaaaaagcaaagcaagaggacaacactctaaaatactggaatacagtgggaggacaccttatttacggttggttctattagtttccgtgttgctggcaagtcatagggggcggtcttttttagggccccaagtttcttggcccggacaggctactgtttgggttttttttggggcccccaaataaaaatgaacctgcccgctttttaccactgtgggaggtgggaaaacccgggctggccaaaacaagttgcccgtaccggatccaaatctccgacccgtgcttgttttgcaaaccgggtcgaccctacacgtttttactacagttgcgccgccccgagtgggccccatctcgggcggggttcgcctctttcag

SEQ ID NO: 10358 - DNA, 467 bp, Glycine max
  Clone ID: PAT_MRT3847_109364C.1
tttttaaacattaaactcaatatcaatttgacgaaattattaaaaaaaatcaattaactattaggatacagtgggacttatatactaggtaaaatttaattaactacctaatttaccataaccatctaactactcacccctatagattacaaatatcaatgaaacagccaaatatcaatgagcaatctctacatactccagagaatggtcctttcactgtaatctgccaagtaaatatcaatgttgccctggagcttagacgtttctctgagatgttttggatgaacatgaaaagcacatcaacatgcatgttctgcaaaaatgaggaaaattgaatctaacaaattctaggaagaggtatcagagtcacttgggtaaacgtgtaacaatatatcgtcccttctcgaggtcgtataccgtcttcaattgtggctttctccattgcattacaaagaatgcagcaagta

SEQ ID NO: 10359 - DNA, 601 bp, Glycine max
  Clone ID: PAT_MRT3847_109365C.1
acgagataagctagtttatcgtgaggagaatatgaagttgtttgttttctttgttgctgcagtagttttggtagcatggccatgccatggcgcaggctaccaaaggttccctctccgaatgaaaactggctatggtgagcgttcttcggaggtaaaatgcgcaagttttaggcttgctgtggaagcacacaccttccaaccttttaaaccctttcttgagaatggcgtggacccaccaagggattcctttattggcaaccatttaaaatcaaattttaaaccagttacccaccagcctttttttattgttgtggaccccaaggtccttaccaccgactttttatttttcggcttgaatacaaccggcctttttattttccattcttatgaaaaccttggttttgggggggaggaattaatggaacccttatttaatgatggggttaccagggccaacccaccggctttgcagaaaattctaaaaattaccaccagcctgtggcttctgggcttcaagaatggattcttgccaggaagtattcttgacagaatggccgaacaaaagcctacccaagaaggctggtttcaagcttgggagcgt

SEQ ID NO: 10360 - DNA, 328 bp, Glycine max
  Clone ID: PAT_MRT3847_109366C.1
tggtcgggactgtgagtttgctgtgattgatgacgtttgtggattgaaatcttgttttattttttgttgcactcaagctgtatgatggaatgactgaaccactgccttcactattttttttatcagttaatgcatgtatgtgcagagcttctccgttttgtttgttcatataaatgcatttgtgttgatctgtcctttttgtgcttttataatatgaaaggtgttgttttcactgcttaaaaccatgttgttctgaagaatgtatgctagcataagtttactgcaaactcatgttttgatatggcaagttatgtctttctttgctcgc

SEQ ID NO: 10361 - DNA, 270 bp, Glycine max
  Clone ID: PAT_MRT3847_109367C.1
ggcagatacaggccatataacaccctttattgtagaagatgtttttctcaaacatgatagggagtcagtactgaatgagacacagggattcgaacagcaaagtaaggagctcacaatggagcaggattgtacaaacaaccaaaagggtgaaatcgaagagcaactgaagcctaaggacgaagagaacaccgaatagcaaagggaaaaaaggggacggaagggaagaggcactgcactggataatacataagctgcgctcgagtaagagga

SEQ ID NO: 10362 - DNA, 215 bp, Glycine max
  Clone ID: PAT_MRT3847_109368C.1
accacaaggctcagccacatgttgtgcataccaatacacatcctatcggcgttttgctggatgacgcgaatgcagcccaggttatgattctcggctggcccttaaatgctctatgacgattgcactaaaggactgacatggccaccggtattcttgtatatctttccacacagaatgcctacggattttatttcacacccaccagggatgtgtat

SEQ ID NO: 10363 - DNA, 160 bp, Glycine max
  Clone ID: PAT_MRT3847_109369C.1
ctctctctctctctctctctgaagatggcttcacgcaggctcgtatctctctgattcgatcctccctcgagatccaacggcctaattcagagacgacccgataacggtacgagaatggacgtcggagcacgcggtggacactctcgcgcggaagatgggg

SEQ ID NO: 10364 - DNA, 5642 bp, Glycine max
  Clone ID: PAT_MRT3847_10936C.1
gggtcatcgggaactagttcaatatcctagtataccttaataaataatttaagatatactagatgagagcgcggttcccattactgttgctgggagttgttttcctggcatcagtttctgtctcatttggcattgcttactgggaaaaacagaaccccaaacacaacaagtgtctccagagttgcaatagcgagagagactcgtacaggaaccaagcatgccacgctcgttgcaacctccttaaggtggagaaagaagaagaatgtgaagaaggtgaaattccacgaccacgaccacgaccacaacacccggagagggaacctcagcaacccggtgagaaggaggaagacgaagatgagcaaccacgtccaatcccattcccacgcccacgccaacctcgtcaagaagaagagcacgagcagagagaggaacaggaatggcctcgcaaggaggaaaaacgcggagaaaagggaagtgaagaggaacaagatggacgtgagcacccacgcccacaccaacctcatgatgaggatgaggaacaagatgaacgtcaattcccattcccacgcccacctcatcagaaggaaagtgaagagcgaaagcaagaggaagatgaggatgaggagcagcagcgagagagcgaagaaagtgaaagttctgagtctcaaagagaattacgaagacataagaataagaacccttttctcttcggctctaacaggttcgaaactctcttcaaaaaccaatatggtcgcattcgcgtcctccagaggttcaaccaacgctccccacaacttcagaatctccgagactaccgcattttggagttcaactccaaacccaacaccctccttctccccaaccatgctgacgctgattacctcatcgttatccttaacgggactgccattctttccttggtgaacaacgacgacagagactcctacagacttcaatctggtgatgccctgagagtcccctcaggaaccacatactatgtggtcaaccctgacaacaacgaaaatctcagattaataacactcgccatacccgttaacaagcctggtagatttgagagtttcttcctatctagcactgaagctcaacaatcctacttgcaaggattcagcaggaacattttagaggcctcctacgataccaaattcgaggagataaacaaggttctgtttagtagagaggaagggcagcagcaaggggagcagaggctgcaagagagcgtgattgtggaaatctcgaaggaacagattcgggcactgagcaaacgtgccaaatctagttcaaggaaaaccatttcttctgaagataaaccttttaacttgagaagccgcgaccccatctactccaacaagcttggcaagttctttgagatcaccccagagaaaaacccccagcttcgggacttggatatcttcctcagtattgtggatatgaacgagggagctcttcttctaccacacttcaattcaaaggcgatagtgatactggtaattaatgaaggagatgcaaacattgaacttgttggcctaaaagaacaacaacaggagcagcaacaggaagagcaacctttggaagtgcggaaatatagagccgaattgtctgaacaagatatatttgtaatcccagcaggttatccagttgtggtcaacgctacctcaaatctgaatttctttgctattggtattaatgccgagaacaaccagaggaacttcctcgcaggttcgcaagacaatgtgataagccagatacctagtcaagtgcaggagcttgcattccctgggtctgcacaagctgttgagaagctattaaagaaccaaagagaatcctactttgtggatgctcagcctaagaagaaagaggaggggaataagggaagaaagggtcctttgtcttcaattttgagggctttttactgaataagtatgtactaaaatgtatgctgtaatagctcatagtgagcgaggaaagtatcgggctatgtaactgaataagtatgtagtactaaaatgtatgctgtaatagctcatagtgagcgaggaaagtatcgggctatttaactatgacttgacgtccatctatgaataaataaatcagcatatgatgcttatgttttacacaaaacaaaagcatcatatgctgatttatttattcatagatggagctcaagtcatagttaaatagcccgatactttcctcgctcactatgagctattacagcatacattttagtactacatacttattcagtaaaaagccctcaaaattgaagacaaaggaccctttcttcccttgttcccctcctctttctgctgaggctgagcatccacaaagtaggactcactttggctctttattaggttctcaatatcttttgcagacccagggaacgcaagctcctgcacttgactaggtatctggcttatcacattgtctttcgaacctgcaaggaagttcctctggttgttctcggcattgataccaaaagcaaagaaattcagatctgaggtagcgttgaccacaactggataacctgctgggattacaaatatatcttgttcagacaattcagctctatatttccgcacttccaaaggttgctcttcctgttgctgcctctgttgttgttctttaatgccaacaagttcaatgtttgcttctccttcattaatcactagtaccactatggcctttgaattgaagtgtggcagaaaaagagctccctcgttcatatccacaacactgaggaagacaatccaagtcccgaagctgagggtttttctctggggtaatctcaaacaacttgccaagcttgttggaatagatggggtcgcggcttctcaagttgaaaggtttatcttcagaagaaatggttttccttgaactagatttggcatgtttgctcagttcccgaatttgtttctttgagatttccacaatcacactctcttgcagcctctcctccccttgttgctgcccctcctctctaccaaacagaaccttgtttatctcctcgaatttggtgtcgtatgaggcctctagaatattcttgctgaacccttgcaagtaggactgttgagcttgagtgctagataggaagaaactctcaaatctaccgggtttgttaacgggtatggcgagtgttatcattctgagattctcgtcgttgtcagggttaaccacatagtatgtggttcctgcagggactcttagggcatcgccagattgaaggttgtaagagtctcggtcgtcgttgttcaccaaggtaagaatggcagtcccgttaaggataacgatgaggtaatcagcgtcagcatggtgggggagaagaagggtgttgggtttggagttgaactccaaaatgcggtagtctcggagattctgaagctgttgggagcgtttgttgaacctctggaggacgcgaacgtggccatattggtttttgaagagagtttggaaccttttagagttgaagtgaaaagggttcttattcttatgtcttcgtggttctctttgagactcagaaccttcactttcttggctctctttgtcttgctcctcatcctcgtcttggtcttcttcttcttcttcactttcctttccttggtgcttttcctgcttgtgttgccattcgtgcttttcctcttccttttgatgaggttggtgtgggcgtgggtgttcacgttcatcttgttcctcttcacttccctttcctccgtgtttttcctccttgcgatgccattcgtgttcctccttctgctcgtgctcttcctcttgatgaggttggcgtgggcgtgggaatgggaatggacgtggctgctcaccttcgtcttcctccttctcaccgtgttgctgacgttccctctccgggtgttgtggtcgtggtcgtggaatttgaccttcttcgcattcttcttcttcctccaccttaaggaggttgcaacgagcgtggcatgcttggttcctgtaggagtctttctcgctattgcaacttcggaggcacttgttgtgactggggttctgcttttcccaatacgcaatgccaaatgagacagaaactgatgccaggaaaacaactcccagcaacagtaatgggaaccgcgctctcatcatagtatatcttaaattctttaatacggtgtactagggaaaaagctatttcagatggtgtggatgttcttgactgtcctgttcaaatgtcaaaggatggaataccattttgcttaagctctattgatcttatagagagcacagatgttgctctatcaagtttcagcaaacttggcaaaattatcccagagatcaaatctggcaatggaatatttacatttgacttggcttgggatgatataaaaagcttggccccctcaatgttgaacccgtattctacaagctctttgtataggaacccaaaatctaacaagaaggggcaatttttaacattgttagatttcttgaacttgacaaaagctcagacttccctattaggtgttgtgatcatcattgagaatgcagcctatcttgcaaggaaacaaaatttaagtgtgactgaagcagtgattgatactttgagcaaagcaggttatgacaaaccaggggctccaaaagttatgattcaatccactaatagttctgtactactgaaattcaaggagaaaaccaagtacgagcttgtctacaagattgatgagataattcgtgatgctgttgattcagctatttcggatatcaaaagatttgctcattctgtggttgtcaagaaggcctctgtatatcctgatcgtaaacagtttgtgactggctctacaaagattgtgccaaagttcaaatcttctaatctcactgtttatgtagaaacattcagcaatgagtttgtatctcaggcatgggatttcatgtcagatgcaactgtggagatcaacacatttgttaaggatgccggaatagatggtgtcatcacagacttcccaaaaacagctaatagatacagaaggaacagatgcttaaatttgggtgacagaaaacctccttacatgaaaccagttcaactgcccggccttttgtcaaaaatagacaatttttcgttgcccccggcattggctcctgtccctcccctgactgaagctgaggtgacagaacccccattgcctcctctttttaaaatagccccatctagccctattgctgggactgaaccaggagcacaagcgccgcgaaatgcacaggctaaggtccccgtcgtcttccttttgtccactctgactactgtgcttgtaggttctcttctgctttgagtggtgcaggcttcctaattcccattaaaaaggaaaaataaaaataaaaataaaactaagatagaaagggttggttatgctagttcccctacttctttctgggttaagcagaatgaagctttagtagtgcttgaataattcttattgcttacttgccgtagtaaattatttccataagctattgtagctaggtatattccccccctctccaaactcttcctgttgtagcagtagcatgtggagtaggaaacagctcttgggaagtaagaaatccaactatatagtttgcatatgtattttttttttttaatttgcagtaaatttacatgaaaa

SEQ ID NO: 10365 - DNA, 622 bp, Glycine max
  Clone ID: PAT_MRT3847_109370C.1
ttagcggctgcgagaagacgacagaagggggcggaactcatggcgccctaattgaagccccaggcggcggatttgtaaaagtggtgatgggttcatttgtccgcatagctcgaaaccttttatggtcttccttttgttcgcagtcattgtcgaagaatgtcagccaacaattatttacgtcttcggtgtctgtgttcaaaagttacaagttcaggtatgggagaacgccggttaggaagcatcgtgaggccaacgccacgcatactacagcggtcgagcttgcattcaattctgtagtcaaaattttcactgtttcctgcagtcccaactacttacttccttggcagaacaagtcccagcgggaaacaatgggttctgggtttgtaattctcggtagaaagattcttacaaatgctcatgtggtagctgatcattcttttgtacttgtaaggaagcatggttgtcccaccaaatatagagcagaagtcaaagctgttggtcatgaatgtgacttagctatattggttattgagaacaaagagttttgggatggtatgaatcccttggaacttggagatgtcccatttctaccagaagctgttgctgttgtgggatatcctca

SEQ ID NO: 10366 - DNA, 519 bp, Glycine max
  Clone ID: PAT_MRT3847_109371C.1
cccacgcgtgcgatcaaatcacaaacccgagaaaagaaagaacaaaccctagacctgacggcactttgcacacacagaaaccgtgacaagtatagtaatagcaattttcctcattcaatccccatttcccttttgcatgcacctgctcactcaactcacatggatgcctccgctttcatgcatcaccataacgctcctttttttcaagatcttcaatgacccattagccccaacaatctcaaaccccaggatctagctacacccacttgtcaaaatccttgctttttgcaccacccatatgccccaacaccaccacaaacttgacatttgtcactctcactgctgccaccgctactaatagctaccactattactattaatgggtgttgagagaaaatggctcttcaccctcttcactgcagcattcctctccttcatcattctcatgttctcttccttctcttgctttacatgccctatgccctgtgcctctattgtccactatggtccacaccaccc

SEQ ID NO: 10367 - DNA, 217 bp, Glycine max
  unsure (1)..(217): unsure at all n locations
  Clone ID: PAT_MRT3847_109372C.1
tacaattccnaatgattgtggttcnttggangttgccaaagttggaaatcncaaacaaattgtnggtttccatgttgctggaagcanaggaagactgggatatgcttcattgataccatncgttgagcnagttntgnaagctcanaagtgctgangtttactttncatncctccccngggagagnntnnacacnccacaccggnagntacacanntc

SEQ ID NO: 10368 - DNA, 337 bp, Glycine max
  Clone ID: PAT_MRT3847_109373C.1
cgccacctcgtcggtggaaagacacgaggggacctagctacttgcctagactattgataaaaactatagcattgattgctactcaacatgggttacagatatattctccctcacctgggggaacctttatccatgatcattgactaaaggtgcgaggccgtccctggcaatcagccttattgccttcaagttgatatacctactgtgtcctctccatggtggcaccactgccaaattgcctgtactctccccatgcctgaactcccgcatacctaagaccattcctaagaatagttaataacgccaataatccctgagacctagatcatccagcact

SEQ ID NO: 10369 - DNA, 187 bp, Glycine max
  Clone ID: PAT_MRT3847_109374C.1
gtgttttttttttttctctttgtactaggacaagttttaacatatatagcaattaaattaagtgccattctcaatgttcactctaacgaatcagacccaataatttatttctgtaggaaatttaatgaggagctagttaatgaaattatattttaggtgcagttttcttttataaacaaatgctggt

SEQ ID NO: 10370 - DNA, 406 bp, Glycine max
  Clone ID: PAT_MRT3847_109375C.1
attacaatctacgggaagatatgtgaatgggttatattgaaagccaatattcttcaatccgacatacagatgccccattaccctttttttattctcggggttattccccctttttccgtatataggaggggtttcctgaatataggggggccatttaaacccgccctttgaaaaggtgcatcctcttaatatatttcgcaaagatgatttgaaaaaataaatccatattttaaaatcgacctttcacaatattattatgggaaggcggaaactaaatgatcatggggaggagtgcttaaacgagtacgttattttggttttgaaccaaggctaaccttttataactgacgacccttaagtgggccttttaatttggggcatgcatttttcataaaccattatgtga

SEQ ID NO: 10371 - DNA, 297 bp, Glycine max
  Clone ID: PAT_MRT3847_109376C.1
agtatgaagagaatctctcgatgtttgcatacatatgtgtctcaatggacaagtgcagtgttctgattccaatgaagcttcccattaaaagaagcaataatctctcaattcgcgagactagtaccaaccatccgtatgtcgccgctaacattggtcatcagaacctgaagactcgagtaggaaaaacaactgcaaccctgactggaatgaaaaattgaccctttctgtacaggacgttaaatcctcaaaacatatgacggtatatgacaaacacactttctctgatgatgacaaaat

SEQ ID NO: 10372 - DNA, 321 bp, Glycine max
  Clone ID: PAT_MRT3847_109377C.1
cttattttctatctttctcgttgttcacttcagaatccttcgtcgttctctataaaagggaaaaaaagtctaaaaaagaataagaagttacgaagattctgtaccaagattcagttgtggcgttcaacgatgccgtctcgcagatgaagatcgccgatggacatgctggttggatacttgaagaccatactcactgagccgcctcacttccaaatctacattccaaatctaatcacgtttgatcctatcctgctttccaatccggcttactcccttgatagcacatggaccacgcctattcacgacactgttgttgtttac

SEQ ID NO: 10373 - DNA, 399 bp, Glycine max
  unsure (1)..(399): unsure at all n locations
  Clone ID: PAT_MRT3847_109378C.1
atcaacatgccccctactattcgagctttcatcatcaagtattgcatctccacgtacgcgcatggcgaaatcacatagcagcctgaggattgccctcatcgggcatcagacgcaccgtcatcaactctagagttcacctcagctcatccaccgtatggttagagcgttgcttgcgacccatggccgacgaatatgcgaccaagtcnagtgccaaacgtaagcacagtactacgtccgtgaccgacaagccatcacgcgtctctgctcaagacgttaatgaagcgctactacgatgcaacctaataactttgatatctctgcttgttagatgatcacttttgtttctcaagtcacagcacgacacacctagttgctcatgattctaagaatttttttttt

SEQ ID NO: 10374 - DNA, 491 bp, Glycine max
  Clone ID: PAT_MRT3847_109379C.1
gacaaagggatagctgatgatgaagataatcctgaaactaataacttagttgcttgagcaatgcctatcatacatgaactagaccatattctatactcatacgcctagcaactttttaaaggctgcaacgcacatcagcctatcctttgtgaatcatcacggcatatattttccagatctctttgcagatctaacaaacatacatgccttgcaataggagatgcacatacaacttctacctagacttatatagcacgaactagatcttatatggcaataactttgcctgtcattaaaaaaacctttcagcagacagatggtatccttgaaacaattacacatactatgaaaactatacacatcctcccagataatcataggacaaccgcgaatcctactcttacattttatgggataactatatagaacccagaagcttgcaggaaaacatacgtatcctatgaccttccatcaacggcatgacaataaac

SEQ ID NO: 10375 - DNA, 359 bp, Glycine max
  Clone ID: PAT_MRT3847_10937C.1
aaatggcattgctggggtggccaacagtagaaaaaactcctgtgtttaatactcccacccagttggcaataccagctgagaacaacccctaccgcaccattgagcctacatgaggcgcgggccaaaggacacccataaacgggctctacagcctaagccaggttctacaacccccccccaaaggccgtgactctagctaagcgcgtaaggctccaacgctcggaccaggtgtttccttggggcctgggaggcccacagggcccaccccactagaaaaaacgccactttaacactaggcactgatgggaaaccttgtgtcggccgatgccgatggccaaaacgcacggcaaaaccaaccc

SEQ ID NO: 10376 - DNA, 106 bp, Glycine max
  Clone ID: PAT_MRT3847_109380C.1
ccacgcgtccgaaccttgcaacttcaagaaatttcaaccacctgtgctctcccaaaatctcagagtgtgcatgcttcagtcgtctggtgatcaatagatggcaaca

SEQ ID NO: 10377 - DNA, 272 bp, Glycine max
  unsure (1)..(272): unsure at all n locations
  Clone ID: PAT_MRT3847_109381C.1
ggtcattctcaataaatgaaatcaattcaatccagttctcttacccctggcaaatgtacaacaggtgagaaccataaaaagaatatggaaaatattctgcgagaaaatgcaggttagtttctgactgcttatgagttatgaatatggattgctagaacttatttggaaaatcttcttcataaatagttataactggaaaaaaaaaaatgaaataagtttcttattgcaattcgtatanagcttggtcaatcttcaggcactaattgttttga

SEQ ID NO: 10378 - DNA, 311 bp, Glycine max
  Clone ID: PAT_MRT3847_109382C.1
gaaacaaaagggggcaattttttacaactggacgaaaaatttgatgcacaatgaattttgctgtatgcgtaaaacttgttgcatcacttcggattttgaatgggctttagaggtttttgagttggggcggattgcccctttctttccccaaaagaaaattggtacaccacttattatcttacaaacacaattgacaattggcctttttaaaaacaaacctttacctatggaaaaaaaacctttttttctattttaggggccagcttaacaaataaagcggccaatatacctgtaaaaaatgaaaatcccgg

SEQ ID NO: 10379 - DNA, 905 bp, Glycine max
  unsure (1)..(905): unsure at all n locations
  Clone ID: PAT_MRT3847_109383C.1
caacggtctggctcacttgcatcgctcgttccttggctcactcactctggtccggtcatccgctctctccctcgcgaaccaaaccctttttttctcacttttcttccttgcggcctctttctctgcgttgtgttgcgttcatccctgtttggtgcggtgggagtttttggtcttttcgctgccccccattatcacacggtccctctccatccacgtcatctacgtcttcttcgtatcgtaccctccccaccttcctttcttcctctccctcttctcactatataacaattttttcacccccttagggtttccaaaagccattgtccgatttcgcactgcgcaacccttttctcccaccatgtctccttccacttcctcctcttctccgcaattcattcttccacgcttcttctcacgcgtttgagggttttgattgatctttgttcgcggggggttcaagtttttcgaaattgggtccgtgaacgcgttttttttggcggcagtttgtggtgttatgtttcatggcaattgagaagaacagctttaaggtgtccaggcttgattccgagtgctctcctcgaagcagggaaattatgtccagtgacgaagaggtgattcggcggcgtaactctgctgcggaatccgacgacgatgatgagtttgatgatgctgattctggggcggggtctgatgattttgatttgctggaattgggggagaccagggcggagttttgccagattgggaaccagacttgcagcattccgttggaactgtacgatctttctgccttgaagatgtgctgtccgtggatgtgtgggatgactgcttgaggaggaggaaaagntttgaacttgctaagtatcttcctgacatggatcaagagaccttttgttcagaccttg

SEQ ID NO: 10380 - DNA, 328 bp, Glycine max
  unsure (1)..(328): unsure at all n locations
  Clone ID: PAT_MRT3847_109384C.1
attttaaaannaaaaacccgcccccccatttttaaaacacccatacacattcatacacaatctttaaaaaatttctaccccaatccttcactcttctcactccatacatatattacaaattctaatctcctttactcaatactcaaacttcacttctcttcaacaatctattactaatattctcactcattaactaacctaccaaatccaccttaaaattcccactaaattttatctcacactaactatcaatttattctttttttcaccccccagcatctctaacctttaaacataccttcaattccctaaactattctcttcaata

SEQ ID NO: 10381 - DNA, 141 bp, Glycine max
  Clone ID: PAT_MRT3847_109385C.1
ggagagaagtctgttttaatggctggcccctaatcatatacaaaatattgctaaaaaactgcgtccgctctagaggatacaggtttaagtacacgagctttccatatgctacactttctataccgcaacctaacttcactt

SEQ ID NO: 10382 - DNA, 1720 bp, Glycine max
  Clone ID: PAT_MRT3847_109386C.1
actagttctagatcgcgagcgccgccctttttttttttttttttttttgtggctctacaaatgttgaacaaactgtaattatcgtaatcgggtaaaaaatttcacaaatgtaatttataactatgacaagcagatttgtacaaatccaaagaagaagaaaaatatcatctgctagctgttagcagtgtccatgaacaaaagcaattcttggtgccttaaacgtcagccctgtagttctccggtttataccacaatgagaaatcaattcccttgttttttagtttctctgttgcaggtccaattctctccagaagctttgcatggagctgaccatttgaaaccaaaacagatctatcaaaaacacaaaactttcctccttcctccaaagaaaaaactagagtgaatctcaaaacatgtcaattgtcttctctgctgctgcaaccctttcccctcggtctcggttattattccctccacttagtttttctcacacttaccctacgaaatttcatcgaaatgggtggcatccaagtctctccaaatcgaggacgcagccccttattacaaactctttgctttctgataagtttccaacggtgggttcgctgtcaacgggacccattccatccactcacctcattgaagtggttaaaactgctgcacagactggtgctcaggttgtgatggaagctgttaataagcctcggaatattacatataaaggattaactgacttagtgactgagacagataaaatgagtgaagctgccatattagaagtggtgaaaaagaattttgaagatcatcttattcttggggaagaaggaggagttataggagatgcagcatctgattatctctggtgcattgatcctctagatggaacaacaaactttgctcatggttatcccagctttgctgtttctgttggagttctatatcgagggaatcctgcagctgctgcagtggttgagtttgttggaggttcaatgtgttggaatacccgccttttctctgcaactgcaggtggtggggcattctgcaatggccaaaggatccaagtgagtgcaactaatcaggtggaacgatctcttctagtgacaggctttgggtatgatcatgatgatgcatgggctacgaacatagacttattcaaagaatttacggatgtcagcaggggtgtaagacgacttggcgcagctgccgtggacatgtgtcatgttgcattgggaattgtagaagcttattgggaatatcgtctaaagccatgggatatggctgctggtgttttgatggttgaggaagctggtggcacagtttctcggatggatggaggaaagttttgtgtttttgatagatctgttttggtttcaaatggtcagctccatgcaaagcttctggagagaattggacctgcaacagagaaactaaaaaacaagggaattgatttctcattgtggtataaaccggagaactacagggctgacgtttaaggcaccaagaattgcttttgttcatggacactgctaacagctagcagatgatatttttcttcttctttggatttgtacaaatctgcttgtcatagttataaattacatttgtgaaattttttacccgattacgataattacagtttgttcaacatttgtgagagccacaaaatttggacattgaaatatttacaatatcttatacacgtgaggcgattttttaaagt

SEQ ID NO: 10383 - DNA, 204 bp, Glycine max
  Clone ID: PAT_MRT3847_109387C.1
gtatataacctttgccatgttgttgcctcttggtgcatatttgtatctattatcctcgtagttagaaataatttatgccattgaatcctggggcagacgacatgacatacttgttgtatctacatgggatttttctgtttgcttgatcggtagggttggttaattcttaggttgctccgtgcacacattacaccggacgcgtgg

SEQ ID NO: 10384 - DNA, 579 bp, Glycine max
  Clone ID: PAT_MRT3847_109388C.1
cccacgcgtccttaaaaagggacgcatgccgcttctttccatcggtcatcaatttttttttttcactttcgaaaggtacccaccatgtcaaggttcttcatttcgcgcctagtttctcacattttcaatcgaatactctcacgggaatcgttaaattcgattttcctcgacgttatctggtgtctctcttgattatcacctgaggattatgtgcatttaaatattcagaacttcacatttagcattttcaaccgcgaaaacctaaatcagatatggagataatttttctgcattaatttacagattcaatgttgccataccttggctcatgttatattcgacatttttaggttcaaacttaagagaattaggtacattggatgcagaattgatttattgcttatcataggaggggtatacacagagagggaattcataattattgataacttggcatgagaagtcatggcaaattggtcatggcaactgtcaagcaccatctttttttaggctttagcatatttgccaaacctaggctctgacaaattgcttacagcctacaatagtactttcaagccc

SEQ ID NO: 10385 - DNA, 247 bp, Glycine max
  Clone ID: PAT_MRT3847_109389C.1
cacaaccaaaaccctatattattcacttggtcttacactctttctctcgacaaacaaacactgtgtgtatttacaaaggatgcggggtactacaataatcaccatgtgccatcatttattagcatgatatttaatgataatcttcctttcactctatgctttgtatactgcaagacatgcttttttgttaatatatttatacttcgagtttgaatatttatatcttttttttactgttgtctattta

SEQ ID NO: 10386 - DNA, 688 bp, Glycine max
  Clone ID: PAT_MRT3847_10938C.1
gttgggtgctgaactagcagctgatgaaggaagaagtgctgctgctctagctgcatgtaggacattggctgaagaactgactgaataccgttttccagcacctcgaatccttgcatttaaggagggtagctcccaggctcgatattttgtctctcgtctcattcctgctcacaaggatcctccttatgagcaggaggcaagattcccacaactgaggtcgttgacatcagaacagcgaacaaagctgaaagccagttttgttcacttcgacgatcctagtttctgtgaatggatgcgaagtttgaaagtggtgccaccacaaccaagttgatgttggagaccacctaaagggtcttgggtgcatgttccaactcgttcgttattctttgttaagttggtgaagccaagtttgtttgcatgatttggggaacacaatgagatcttgcagatgtcccccgagactctcgcctcagtgcctccctcccattcattttgttcacttaaaacgtccaaaaaattgcaaggtgcaaaaaaagcttttttttggggggtggggtggggtggggggagggatgactgtgacaaagaaatttttcacaattttcggttaagatgttaccatagagcaataaaaggatttctcgttatttatatttataccacttgttggctgccaagtgttttattc

SEQ ID NO: 10387 - DNA, 214 bp, Glycine max
  Clone ID: PAT_MRT3847_109390C.1
gcaacctgcaaaaacaggaagacaccaagatagtcaccaaattaaaaatgatgagcaacatttgttctctctgcctcagtttttcattactcttctacgtggctctgggagccacagttactttcacatacaattgctaatacacggtgtggcgaggacgcctaaccggagaccacaatcctcagctgtcaacaaccgttttctctgttggctc

SEQ ID NO: 10388 - DNA, 630 bp, Glycine max
  Clone ID: PAT_MRT3847_109391C.1
aaaaaaaattgcaacatgaaatacagaaatacccgataaactcatgcatattgaagaacatgctaaataagttctaggattagcaagttaatgaagattcaaaattttatgtaatatattgaaaaacaactcttattgtacaaaaggaatcccgcattctggaccgcattgaatggtcggaaaaaatataaccactgaaatacatcttcccaggaaatccaattttcccgcattctgctgcaaattataattagtagaccaaggaattatgatttaggcttttttggggtatccgagcttgatggttcagctttcctcttaattcccagaaaatgctctacctttcgatcaccaagcataggtgtcaagcccccaggaagatccttctcaacagttgcaaaaccactttttgggtcactagtttgtcctggtttaacatgaccactaagaacaagatatggtgtctgcaaacgagcttgagcttccctcattctctcaacagacagtgatggtgtatctgagctcttcatttgcttcatcttcaattcttcgtgatattgcttcatacgcttttcttgcttcatttttccaggtcctttaccatggaacttatgagaaatcatccgaaag

SEQ ID NO: 10389 - DNA, 254 bp, Glycine max
  unsure (1)..(254): unsure at all n locations
  Clone ID: PAT_MRT3847_109392C.1
tggattctaaccatatccattcttccaaatcccatccaagtttccatcacttaaccgacanagtcaatgaactcaatgatacacaagttttgcttcagcactcaacctagatcagaatctagagttgaggatagtaactactaaccagtgtctagttaatctctctctcttgattggatataacttaatcaagctattgtatttattgaattcttcttcctgcaatgccaggnaccatcatggtttcngtactg

SEQ ID NO: 10390 - DNA, 2115 bp, Glycine max
  Clone ID: PAT_MRT3847_109393C.1
cagtttttgtagatgatgatgaggatcttcgtaagtccttagagaaagcgagaagattagctcttaaaaagaaggagggggaaggggcatctggtcctcaagctattgcgttgcttgccacctctaatcataataatgagactgatgatcaaaaccctacagctggagagtcacgagaaaacaaggtggtcttcacagagatggaagaatttgtctggggtctccacattgatgaagaagcacgtaaaccagaaagtgaagatgttttcatgcatgatgatgaagaggctaatgttcctgatgaagaaaagattaatgaggttggtggatggactgaagttcaagaaactagtgaagatgaacaacgcaatacagaagacaaagaagaaataattcctgatgaaactatccatgaagttgctgtagggaaaggattgtcaggtgctttgaaactgcttaaagagcgaggaacacttaaagaaagcattgaatggggtggcagaaacatggacaagaagaaaagtaaattggttgggatcgtagatgatgaagagaaggaagcacagaagacaagggaaattcgcattgaaaggacagatgaatttgggagaattttgactcctaaggaagcctttcggatgatctctcataagttccatggtaaaggacctggaaaaatgaagcaagaaaagcgtatgaagcaatattacgaagaattgaagatgaagcaaatgaagagctcagatacaccatcactgtctgtggagagaatgagggaagctcaagctcgtttgcagacaccctatcttgttcttagtggtcatgttaaaccaggacaaactagtgacccaaaaagtggttttgcaactgttgagaaggatcttcctgggggcttgacacctatgcttggtgatcgaaaggtagagcattttctgggaattaagaggaaagctgaaccatcaagctcggataccccaaaaaagcctaaatcataactcctcgatctactaatgttaagctaatatccctgcaagcttagaagtttgacccaaagtgttaatctattctgttgctgactgcagataatttgcagcataatttttcgtgttcaaatttcgttggtaaaactggatttcctgggaagatgtatttcagtggttatatttttccgagcattcgatgcggtccagaattcgggattccttttgtacaaataagagttgattttcaatatattacttaaaattatggatcttcattaccttgttccgcccggccaatttcaaaatgattgattttgctaatcctagaacttatttagcatgtttttccatatgcatgagtttatcgggtatttctgtatttcatgttgcaatttttttatagtgttttgacttagtgcaatttattttgatttaaagagataaacgagttggtaagtaaactgtaaaagtagagatgcaggatcgtgttcaggagaaataatccctgcatcatgactagcgtaccatgtgagattataaacagaatgacaaacggtaaaacatggtgactggtgagacattatttgtagatcaacatttgcggagttataataattgtattgttgatgttttactttgtcaataatattgacattgatttctaattggccaagcttcttgggtagcaactttttatggttaaaatatctatcgcttgcatgatattcttgatttattttatgttcacaaagacaaaaatggattgtgctcttagaatgagtttatggattaatcaatctcaaaaaaactggcttctaggattggcttagttttataaggattatattaactttatttctagttgagatcttaatatactacctcctttcttatgtataagattatttttactcaattgtttgtccttttttttataagattcttttctaaaagtctgatgcattaattatttttatcttataatatccttaattaattgagaaattgattgagagaaatgcttcaacagctgaagagttgattcagctaccaaatggaaaaatctcttttgattgtagaagaagcatacttatcatccagatcttttttctggaagagctagtgatgataa

SEQ ID NO: 10391 - DNA, 271 bp, Glycine max
  Clone ID: PAT_MRT3847_109394C.1
ttggagcttttttaactccacactccacaacaaagagcgggtgcaaaccgtttccattactttaacacccccctgaatatcatcacttaatttgaaggaaagattggaggcggcacctcattcgtctgtgactaaataatactactacttcttcactcaaaaacgagatagctggagacggaacaaaatggctataatagcacgacgatggtctctacttcaagcagatgacccacaggcacatcacaccacaggctcaaagaccaaatat

SEQ ID NO: 10392 - DNA, 667 bp, Glycine max
  Clone ID: PAT_MRT3847_109395C.1
gggaagtgaacttagcaaggagacctatcgtcgcactttcattaccatacacactcactctctcgtctctgaccgttcgctcaaacactcaaacctggcctaacctctcaacaagacaacttacctcattcagcccttgtgttgttgtgaccgaactgttatgctctcttttggacctttggtgttgtcattgaaagaattttgtagctgagaggtatagacatttaacagttacaaataagagttgttgaagggctatttattctgggtcctttttgtgttcaataaatggagacaaaatccaccagttcatttacaaacttagtagaccaatcagtgtgtcctggagatgtgaaatttgatctttctaaaatgataaaccagacaatagaatttggaggccgtatacgacaggattttgatgcaatttcaatggtgaaagctggcagactcgagcatgccagagttgataaatactgggtgggaatttctcgtggtgatggagtgctggcactgttgatagggaagggaagtgagtttggagaggatgttgagggcgcccaggatcttctgagcctcgaaagagagcatgccagattgttgcggttggtgtcgaaggtggaatagaactgctaaacgaatgcctttgcagacgcgtctggatcca

SEQ ID NO: 10393 - DNA, 137 bp, Glycine max
  unsure (1)..(137): unsure at all n locations
  Clone ID: PAT_MRT3847_109396C.1
taacccttngttgttggnccnngtttggttgggggtttcaattttcattttcaanntcgcgcgangaagaagagcnnaaanaaaggtggngntgggtatgctatggcgacacncaanaacaggcnacantaacaacg

SEQ ID NO: 10394 - DNA, 565 bp, Glycine max
  Clone ID: PAT_MRT3847_109397C.1
ggaagctgaaaaaattaagaattctcagcttttctggatctcgaattgaaaatttgccagctgagttaaagaacttggataaactacaattactagacatcagcaattgttcagtagtcaagaggattccgcctcagcttatgtcaaggttgacttcgttggaagagttgtatgtaagaaattgcttcatggaagtgtcggaggaaggagagagaaaccaatgtcaaatttcatttatttctgaactaaagcatttgcatcaattgcaagtggtggacttaagcattccatgtgctgaagtttttcccaaggaattgttctttgacaacttaagtgattacaagattgagattgggaacttcgaaatgctttcagctggagatttcagaatgcctaataagtatgaaaatttcaaatctttggcattggagctgaaggatgacactgacaatattcactctcagaaaggaataaagttgttgtttaaaagagttgaaaatttgttgttgggagagctgaatggtgttcaagatgttattaatgagttgaatttggatggatttcc

SEQ ID NO: 10395 - DNA, 805 bp, Glycine max
  Clone ID: PAT_MRT3847_109398C.1
ggagacgctacggctgcgagaagaaggcagaaggggactcacacctaccttgacacattttaaatgtagccactactaactttatcataccactcactcttacatcattgtccctaaatggcggaaaccctgatccaaatcggcgtggttgggtgcgccgacatagcccggaaggtctcccgcgccatcacgctcgcccccaacgccgccctctgcgccgtggcgagccgctctcacgacaaggcagccgcattcgccgccgccaacggcttccctctctcagccaaagtgtacggctcctacgagtcccttctggaggaccccgacgtggacgccgtctacatgccactccccaccagcctccatcttcactgggccgtgctcgcggcccagaacaagaaacacttgcttctggaaaagcccgtcgcgctcgacgtggcccagttcgaccgcattctcgaggcctgtgaatccagtggggtgcagttcatggataacaccatgtgggtccataacccaaggactgctgccatggcccacttcctcaacgatgctcaacgttttggtaacctcaaatcggttcgcacctgctttacatttgcagccgatcctgattatctaaacaccaacattcgcgtgaagtcggatcttgatgctcttggttctctgcgtgatgcaggatggtattgtattagggcgatcctgttggctgccaactacgaattgcctaaaacagtagttgcttcatatgaacctgtacttaacaaagatggggtgatattggactgtggggcatctctatact

SEQ ID NO: 10396 - DNA, 149 bp, Glycine max
  Clone ID: PAT_MRT3847_109399C.1
cggctcgagttttctatgttggtttgattcacctattggatatgtgtcaactaccttccgctacacacatgaatgggactaatggttgcaataaccctatattgaggagctgtaccagggcaatcccttagtcacacaaatgcccattc

SEQ ID NO: 10397 - DNA, 135 bp, Glycine max
  Clone ID: PAT_MRT3847_10939C.1
gcccacgcgtcgccacgcgtcgatttaccatctatactgttccttttgaaggttagaagtgctacaatacaaacaatggcgctactcagaagatgtgaactttgggtattggggaagccattggtgcaggccaga

SEQ ID NO: 10398 - DNA, 659 bp, Glycine max
  Clone ID: PAT_MRT3847_1093C.1
tcggctcgagctcgagccgctcgagccgtttcaggttaaattgtatgcaaagcatatggaaaaaacacgtgagcagattgaagctgatattcagcgtccaaagtattttagccctagcgaagctgttgagtatggcatcatagataaggttatatacaatgataggggcagtgaagatcgtggagttgtttctgaccttaaaaaggcacggcttatttgacagttggaatttaaattgccattttcttggagttcagaagtagatcagttaaaatggaagatcagcagccaaattgtacaaccatgccaagcatagcggacattggagtctcattgttaataccgtagactatatttccctccccctacagtaggctaaaggatctaccatttacttgttttctaatactttgtacacatgattggtttctggttcattctaattcaaaatgtttttttgtctgtattagtagaaggaaactcaaataccatcaatgacaatgtttagcaaatttgaaaaacagtatcacgaattttaaacagtgagcaattattgtattaaacggttgttgcaactacaaaattgatttaatgttatcttaggagagtatacgtcccccttttgggttgtttgtgatgctcagaaattaaatgcacat

SEQ ID NO: 10399 - DNA, 380 bp, Glycine max
  Clone ID: PAT_MRT3847_109400C.1
gtttttagctgcagttgcaatgcaagagttcattgagtattttgattgccatatttgcttggcctaacttctaaaaggagctgctgaataaataactcaaagggcattcattccacagaggaaggttcgcacctgctttacatttgcagccgatcctgattatctaaacaccaacattcgcgtgaagtcggatcttgatgctcttggttctctgggtgatgcaggatggtattgtattagggcaatcctgttggctgccaactacgaattgcctaaaacagtagttgcttcatatgaacctgtacttaacaaagatggggtgatattggactgtggggcatctctatactgggaagatgggaaagtagcaaccttccatt

SEQ ID NO: 10400 - DNA, 363 bp, Glycine max
  Clone ID: PAT_MRT3847_109401C.1
gagaaatcgaattcaccatccaaatgtgacacgtagattcagcaatgggaactccatcatcgaaccctctcttcatcttcttccttttctattcctctgtatcacttaatccttcagatttgactttcgaatcgacctacgctcgcctctgcaaccaccatgtccctgcaccgccctctcgttccgccgaaggaaccttccccggcgtcgccgacgagctccggttccaatttggctactttgccggcggccaccgattcttcaaccgatccgtctcgatgaagaaccgcgcgtcgtgacgcgtgacctccgttcgccgaagcgcgagcgacggcgtgttcgaattacacgggcgaatgcttc

SEQ ID NO: 10401 - DNA, 453 bp, Glycine max
  Clone ID: PAT_MRT3847_109402C.1
tgcttctggaaaagcccgtcgcgctcgacgtggcccagttcgaccgcattctcgaggcctgtgaatccagtggggtgcagttcatggataacaccatgtgggtccataacccaaggactgctgccatggcccacttcctcaacgatgctcaacgttttggtaacctcaaatcgttgcaatgcaagagttcattgagtattttgattgccatatttgcttggcctaacttctaaaaggagctgctgaataaataactcaaagggcattcattccacagaggaaggtatatatgttttcaaagattgattttatgatggtgtttattgatgagcggtgttgtgttctgggttgtacaggttcgcacctgctttacatttgcagccgatcctgattatctaaacaccaacattcgcgtgaagtcggatcttgatgctcttggttctttgggtgatg

SEQ ID NO: 10402 - DNA, 876 bp, Glycine max
  Clone ID: PAT_MRT3847_109403C.1
ggctcgaactaccctcccccccctctctctgtctctctctctcttcttcttcacaccaattcacaaataagcaaaagcaccactgctagatagaagagagagaattaaggaaccagaaagataacatcaaaatcaataaacctaagatgctgctcggaaagagacctcgtcctccaatgaagagaacaacaagcatgtccgaaatgaccttggatctgaacacagccgccgatgccgccgccgccgccgaccaacagagatcaggtgttggtccctcggcagcagcagatcagactacgaggatgttggcatcacccaaaatcctcagaagacattcttcgtatttcggcgacgcgcgtcacttccttcgtgcgtgttccctctgcaaacgccctctcgtgcccggtcgcgacatctacatgtacaggggtgatagtgctttctgcagcctggagtgtcgccaacagcagataaaccaggacgagagaaaggagaagtttgtcatggcgtcgaagaaaaaagttgtggctcctccgccgtctgggtctcaagtcgtggctaccgccaccaagggttaaaccaccgtggtggcgttgtagatttgaaatccaaaccaaacatgtcaaaaaacatgtttacatacctctctctctctctctctttttctagtacctttttcttatctttcttttttttttttttttagtttttaccgtggcgacattttggataataggagtgggtggttttccttgcttacatgggcaaactgggcaagtgttatttttggaacttggaagtaccttgttgtaatccccttgggattttgattccatagataattaaaatggaaaacaaaatttaaaattgtaattc

SEQ ID NO: 10403 - DNA, 417 bp, Glycine max
  unsure (1)..(417): unsure at all n locations
  Clone ID: PAT_MRT3847_109404C.1
gggcaagtggtaaggagaaacaacaactcaccagtgacgacgacgttggggtgatactccggcgaaaggcggcgacggagctgaggctacggttccacggcggcggcgggggaggttctttgaacctttaaaaggttcactttgcagctaaaagaaagtgttcagcggcagcgggggagtttcttcgaaagggcgcctcactttgctgacagcttagaagattagggtaaacaacaagacaacttagagtttcgaaaggtaagcaacaggacaacaagagagggttagagagacttcagcgcgaaaggggaaagaggaggaagcgcgcaatgtgttaataaatntaattgtaaaagcacattctaaggcggttttaataaccgtcttagatttaatatcgtaaaatcctattattat

SEQ ID NO: 10404 - DNA, 366 bp, Glycine max
  Clone ID: PAT_MRT3847_109405C.1
ttcatttcaatttcacgctggtgcactcctggattagggctgccactctcctatctggcctaggacttcgtggagagactcatctataactgtcctttctttcactctattattctcactgacccgcatcgccgatgaaagtgaacatatttgaaaaacacttgggcgggggggcaaatgcaagctctgttaatgttctgtggagacaacagggtcaccgagacaccagtctttaattgccgagattagctcctatcgggtgagcattatacaatagcatctgaggttagacaaatcctaccacattacaaaccgtgggatgtgaataccttgctgaactacattccacgatcttttcttactgat

SEQ ID NO: 10405 - DNA, 400 bp, Glycine max
  Clone ID: PAT_MRT3847_109406C.1
gacaaaagccactatggttgtgaagcaaatgagaggcatcgtgaagaaaccgcaagtcacaacaattcctggtgccttgccaaccagatctggaatatataggaacagtccgagaaaagaggttgccaccatagccaccccaaataatggtcgtggacaactaaccaaaaaagccagcagaaagaccatcatcattgccgtctcatatgcaatctcagtgagaaacccttgaaatgcctcgcctagactcaccggtgcttgtgttgcagcagggtagtttactgattccaaaaggaattgactgctcaactcttttgcaagatatttcatgatagcaacacaagcaaagagcaaaatgagtagagagtgaaggggaattctccttgcatttgacactaca

SEQ ID NO: 10406 - DNA, 513 bp, Glycine max
  Clone ID: PAT_MRT3847_109407C.1
aaaagggggaaaaataaacaattttaatttttttaaaaaataaagcaaatggggcccctcccaaaaccccgtttaaaatatgggtggcccttttacaccccaaaaaaaaaaggggtttggggggggggggggccacaataatccaattaaatggaacctcccttttcccggtggataaagtcccccttccaattttaaaattgggaaaacacaagccataacccaaggggaacatcccccttagctttaaaaattgagaaacttgctcgggggttttccaaccaaaaaggcccggcctaaaaatccagggctccccaaaaattttgcaaaaaattttagtttttaccaaaataaacactggggggcccccgggattaaagtttttttgcctcgttcagtttccaaaaagccttaaaaaaattttaagggataaaaaaatccccctctggaaaaattggtgccattccagtttttgggcaaacatttggaagatccgccccattaaatcccttt

SEQ ID NO: 10407 - DNA, 152 bp, Glycine max
  Clone ID: PAT_MRT3847_109408C.1
ttggcaacctggggcaaggtactgtgattgaaaaaataacgctctcgacacggagagcacaaagatacctgcttggtgaaggtggccgggtcgctccaactattctctctcggcatgatgagcatccgacaaaccaattgagttaggaataa

SEQ ID NO: 10408 - DNA, 995 bp, Glycine max
  Clone ID: PAT_MRT3847_109409C.1
gtcacaaactctttttcttcctttcacacgccaacgtgatacccactcttgatttcattacaccgtttaagaacccacccccacacacacactcactcgctccctcggaatcccaatggcggagaacggtgaaggcggcgaggagtacctgttcaagatagtgctgattggggactccgcggtggggaagtccaacctcctctcgcggttcgcgcggaacgagttcgatagcaactccaaggccaccattggggtcgagttccagacgcagctcgtcgagatcgacggcaaagagatcaaggcgcagatctgggacactgcgggacaagagaggtttcgagctgtcacctctgcttactacagaggcgctgttggtgcgctcgttgtttacgatatcagcaggaggggcaccttcgacagcatcaagcgatggctccaagaactcactactcaaaatgatagcaccgtagcaagaatgttggtgggaaataaatgtgacttggagaatattagagaggtgagcacagaagagggcaaaagtcttgcagaagaagaaggtttgttctttatggagacatctgcactcgatgctaccaatgtccaaacagcttttgagattgttatccgcgaaatttacaacaacatcagccgtaaagtcttgaactctgactcttataaggctgagttgtctgtgaatcgagtaagcctagttaatggtgcaggatcaaagcaaggtccttcttgttgttctcgatgagcttatacctaaactcagattggatacttctttggatctttcaagagtaaatttttgttttttactctctatcttcccatgttttgacggttactattttttttgttttcttttttatttcaacctctaaattgtaagggcttgggacccttatctcacctttcttggaaaagaaaaagaaaggggagatggtttagactcttgcatgaatgtttagtagtatgttccattatcacgt

SEQ ID NO: 10409 - DNA, 531 bp, Glycine max
  Clone ID: PAT_MRT3847_10940C.1
aattcggcaccaggtagctcccaggctcgatactttgtctctcgtctcattccagctcacaaggatcctccttatgagcaggaggcaagatttccacaactgaggtcgttgacatcagaacaacgaacaaagctgaaagccagttttgttcccttcgatgatcctagtttctgtgaatggatgcgaagtttgaaagtggtgccaccacaaccaagttgatgatggagaccatctaaagggtcttaggcgctgcatgttccaactcgttcgttattctttgttaagttggtgaagtcaagtttgcttgcatgatttggggaacacaatgagatagacttttgcctcatagcctcctcccattcattttgttcacttccaaaagatttttaggtgcaaaaaagagtttttttttttatattttttttggggggcggcggggggtaaggaatgactgtgacaaagaaaattttcacaatttacggttaagatgttaccgtagagcaataaaaggatttctcgttatttatattt

SEQ ID NO: 10410 - DNA, 1154 bp, Glycine max
  Clone ID: PAT_MRT3847_109410C.1
tccaaacccgcgcccacagacgctgatggcgcagtgggaatttgttaatgagtggccttaggatccttgttaaggaattataataaaaggtaaaagagcggtccagtgcccaaatgggatgtagggagggttgatatatgaagccttaccaggcatgcgaagaggctattttcaagtttgaacttgtgacctctatgtcacaaaggcaggaaccttacagttatacataatctcgccgtataatttaaaaagtcttgaatgaaaaagtagaagcatttaatatcttgtaaatctataaagccaacattattttcttctttaagctatcaggaggatttgtttattaaatgatattcttaatagagagtattattaaatgcttcttcaacaatgccctaagagcattggttaacaacacctttcattttttgctatgttgaattcagtcaattttagtcattttaacctagtgaacagttttcagcatggatctctgtcactgacactggactccaatgctgatcttgaacttttacagatgtggatgtcagttaagttcgtggtgttggttactatgataccttcttgaagaattaccaagaccttgcaaagacgcgtaattggaagcaacccttgcttgttgcactgtcgtattccgaacaaatactggatgaaggagtaataccaatgacttcatctgatcttccagttgatgctcttgtatctccagaaggtgtgattcccatcagtaaaactgccttaaacagcatggatctctgacactggcagtggacttcacagctgatcctgaacacttacaatagtgtatcttcaataaaattttgtggtttccattagtgtacagcactaaaggatttggatctggggttttgtgtaacaagtaaaggttaaccaattaatcaagtgacactggactgccttgaatgattgcgtccaccatccttgaccgattggatgttttgatactcaaatcattcatcttaagtacagtatgctttctgtaatgtttgaactgtgtgaagtttgaagttaaactttcctaaagcacatgtgtttcagcaagaaaaaaaaacccgaaacttcttgtacggctcgactttttagtgtttattgggctaaaaaaaaaaaaaaaa

SEQ ID NO: 10411 - DNA, 254 bp, Glycine max
  unsure (1)..(254): unsure at all n locations
  Clone ID: PAT_MRT3847_109411C.1
ggaaccacatactatgtggtcaaccctgacaacaacgaaaatctcagattaataacactcgccatacccgttaacaagcctggtagatttgagagtttcttcctatctagcactgaagctcaacaagtcctacttcaaggactcagcaggaacantttagaggccatcnacgaaccaaagtcgaggaganaaacaagggactgtgtatnatagaggaagggcagcagcaaggggagcagaggcagtaagagagc

SEQ ID NO: 10412 - DNA, 187 bp, Glycine max
  unsure (1)..(187): unsure at all n locations
  Clone ID: PAT_MRT3847_109412C.1
cncgnnnanngctcggacttcggctcgnccganttcatgtnnttgtngcngcnnaacgtntttgtnttgctnnttgccgtgnntgtgttttctttttgggggtgnatcagcaaccncttnttgttggtgatnnccatangctgcnggtggctccctataatncnttttntgcccanttggnggngcn

SEQ ID NO: 10413 - DNA, 273 bp, Glycine max
  Clone ID: PAT_MRT3847_109413C.1
aacccttctttcttttccaaagaaaacaagaactaccacaagtttactttattgggggaaaaaaccttaaacacaccccgtgggaaaaaccccctagtaaaaatacaagagggaatatttcaattcaatagaacaaaaaggcccccctttaaagccagacaaataataacaacatcctctcgagccaaccccccccccaacaggcaaaaaaacgctacgttaacaacttcctactcacacccccacattaataacagaaacttaagtaactag

SEQ ID NO: 10414 - DNA, 250 bp, Glycine max
  unsure (1)..(250): unsure at all n locations
  Clone ID: PAT_MRT3847_109414C.1
cgtttacacatctctccaacctttcactttcgtttctcagttttattcgaatccctctctcaatctcctttccaaatggccagcgttgaagttgcccagcaacaccaacaacagttccagaaatgaacaacngggtaanaagaccaggaaagacccntcatgggnctgacaganaccanagtgagtctncaanaaaaacaanggtggtctgccaaatacccggnccnaggagaacagngncacaanatga

SEQ ID NO: 10415 - DNA, 207 bp, Glycine max
  Clone ID: PAT_MRT3847_109415C.1
ccacgcgtccgcatcaaatgctcgagacagccccagatagagtgttagagtttcagacgtgcgaagagtactatatggatgagaacatcgatcaatttgatagaacgtatcccttacttgcgatattagatgtgtacccataactgcatgcatgggacttcggtgagctatctcaataactgccgtttgtatgtgggagagtttata

SEQ ID NO: 10416 - DNA, 549 bp, Glycine max
  Clone ID: PAT_MRT3847_109416C.1
cgcgcgcgtgggctctaggggcatgccctgaccttgtctcaccggaccaccctgtaggatacatactgtctttgtccctaatcctccctgttcttcgttcagtcttgcgactccattaccagaactgtattcctaactctactatgtggagctagggtaagagaggaccagggacgagcttaccttacacggtcgaactgactgactacaatacacttgttcactctatacaggtccatgacatgcgttactgccgttgtgcatctccttccttattgcactgaccagtatacatgcttcagaccttgttgccataacactcggtttgtgccatctttgctggatacgcggctcgccctgagctatgccagaacacggacctctctctgtagggctgaaaatctattgatggattcgaatggtagggacttgagcttagacattgatcacgaatatctggagcgttgggatgacgtcgcgcgacgatgggttcttggctcgcggagtgtgtgctggaacagaggcagctgaccctgacgctgaagaagc

SEQ ID NO: 10417 - DNA, 244 bp, Glycine max
  Clone ID: PAT_MRT3847_109417C.1
cacttcgtcggtgcattgtccttatatttttgaaagatcattgcaactcttagcccttgaagtcaaatttcaaggcttttgcgcggaaatccgtgtgtagactgcatataatgggataaatgtctatgtcaaggtagaaacacgcacatccacaaactgataatttatggatgaaagagcgcgaaaaatagggatttactaagaaagctctcttaatacgctatatgattggtcaggccaacat

SEQ ID NO: 10418 - DNA, 618 bp, Glycine max
  Clone ID: PAT_MRT3847_109418C.1
ccagcctcaacacaatgtcacagtttgcatcattttttaagaaaatcccaaccaagcttccatcatagcaataaaggcccagggtcccaaaagttcaggggggggggttatcccccgagctataggggtccactgtttgattatttcatgccataagcaataaaaggagacaccatgcaagttacattattggagggtccatgccaccgtagtaataaaatgaaatggggattccccaattgctccctcggggtatagccgggcttgttcttcctgactcccttcataaatggaccaccaacctaataatctgattgcatgaattgccaaaatttaaatggggttgcagcatagtacatgcataaaatcacaacttctttttttgaaaactttgacccaaattagatattggatttgcatctaaagtcatagggggggaaaaaataataccagataaaaatcagatttctccttgtacgtttgggtttgaaggaaaccttgggtagtgggtacacaacaaatacatacattgaatttgggaaacaaaccaataagaacatccagtttttctgcatattctacatgaaaggtcccaaattaaaaaatgcacataataca

SEQ ID NO: 10419 - DNA, 468 bp, Glycine max
  Clone ID: PAT_MRT3847_109419C.1
ggggatgcctatttttttttcgcatgaccgacactttaaacaccgaaattaccgggagaaacacaggcgaaccctggggaatacattttcgaagacgaatggaactttgagcaacggagagaataattagatatggccttcaacaaactcttttttatgggagcgcgtcgcgatcgctacaatgtgtctttgctcttaagaggcctggtctagaaatacttggaaatggctattcgaggccagacatgtacactagagataactgaagtgaccggggatttcactcttagggtaacgaattggcaggatatgctgatcctgcacaaggtagatattcggaggccacttttgtgagcactgtccaaggcattataggatctgtgcctttgataataaaaatggagggattgttacctaggataggcagtaccattccaaagggtttttagggacagagcctgtacttta

SEQ ID NO: 10420 - DNA, 301 bp, Glycine max
  Clone ID: PAT_MRT3847_10941C.1
gcctaccgtccctggaaaatgggataaaccgggagcacagtttgacgcaccttagagcttgaaacaaaagcaatcgatacttgattacaagaatctctcaataactccttacttcttagtgtacgatttcttaagggaaagaaaatcactctctgtgctggccacagacttcgtgaatcattttatattccactcttagtttatttgctgaacactctcctatatgatataggacttcgagtcagatttaaacctttcctgcctctctctcagttctctgtttaattctaagtttacgctg

SEQ ID NO: 10421 - DNA, 985 bp, Glycine max
  Clone ID: PAT_MRT3847_109420C.1
aaaaatcaggctcggacctctgcagtttaaagaaacctggcctgggatttactctactgtttctacctcagcctgctaagactccacttaagattgaactacaaagttgatcagtcctcagcaggtgcctaaacgacccatacttttagcttttaaaggaaataaatcgaataaaaccacctttaggtttcacctcaagagaaaattcctctacccctagaaacagcgaagaaacaccagaaaagagtaggaaagactagtgagtcactgaagagagtgagagccgtctctactgttgaaacctctccatgcaccttggatgtggactacaatgaagctgcagccaaacttgaaaatatatacaaacttagccctgcttctgataatgcagaatgcatagatggtaaaatcaaaagagtctctcggagagggaagaaggttgttgatgaaagtgaagaaaaggagttaaagggcgattgggtggtcagaaaccagaacaagaacaagaaacctaaacgattgaatcttgatcagagaatttcattaaagaataacaaaagtggggacgaagtcattccaactcgaaagaaaagaaatgttgggaacaaaattgagaagattgaagaacttattcgggaatattcagtatcaactgattttgtcagtatggattggaaaagaatgagaatacctcccgttctttcttcttcagagcatgcttggttgttcaaattgatgcaacctatgaaggcactgcttcaagtgaaagaagatttacagcaggagttgacaagagaacctgctggtgaactctgtgcaacaaacatgagataacactagcagatggtgaacctgctgatgcaactttcttgagcattacacccgtaagtgcagcaatagatgttggtcaagctgcaagaaataaactcataaagcacaatctccggcttgttttgttcgtgatcaacaatatatttacagattt

SEQ ID NO: 10422 - DNA, 461 bp, Glycine max
  Clone ID: PAT_MRT3847_109421C.1
cccacgatatctttcacgcggccggatatataacactgatacaagggaaggggcgagcaaaggacatgggtagattaaaccaaatgccatcaacaatagtgaaggagaaaccaaggatccaagccaaagtgacggaggagcaagcatggcggaactatgagaggatcaggctaacaaaaaggccatacacagccaagagatgaagtgcccctccgaggcaacctcaaacaaacctatgccacgaacgaaacggcgaaaaagctatggcgcctactgaagaaccacccagctaatggaacaaccttaaggactttaggagcacttgaacctgctcaggtaacccaaagggccaaacactgggatacgaactatgcatcagggtggcagcgttcagccacacacaccaccagcaacgagcccgggcctgaccctcgcggaacaccccaatgacactggaccaa

SEQ ID NO: 10423 - DNA, 662 bp, Glycine max
  Clone ID: PAT_MRT3847_109422C.1
caaaaccacaacctcaacgcgtgcgttctcagattttcgcggtggtcgaaaaatctgcgtgggttccgggacttggctcggacattgggctcgagggatctctgcattggaaatttgtttcaatttatatgttctaaacacggcttaggaaacctggcatgggagttgttactgtttctaccttagctgctaggacgccattaagattgaatacaaggttgaccagtcatcagcaggtgcataaaagacctttaattgtagcttttaaaggaaataaattgaataaagccgctttggtttcacctcaggagcaaattcctctacccatagaaacagcaaagaaagaccaaaaaagggtaggaaagactagtgagtctctgaagagagtgagagctgtctctattgttgaaacctctccatgcaccttggatatggactacaatgaagctgcagccaaacttgaaaatatatataaactcagccctgtatctgatacctgtaatatggaagatattgatagtaaagtcgcatgaactttgtggaggaggaggaaggtctggtaatgaacatgatgatgaacattgtgatattgtggttagaaaccagaatatgaaggccaaacgattgagtcttgattagaggattacattgaaaaataatgc

SEQ ID NO: 10424 - DNA, 622 bp, Glycine max
  Clone ID: PAT_MRT3847_109423C.1
ggctcgagctttggtcgaaaaatctggctcggacattgcagtttaagcacatgtgattgatattgaattgctctgctgttggatctctgcactggaaatttgtttcattttatatgttctaaacacggcttaggaaacctggcatgggagttattactgtttctacctcagctgctaggactccattaagattgaatacaaggttgatcagtcatcagcaggtgcataaacgacccataattttagcttttaaaggaaataaatcgaataaaaccactttggtttcacctcaggagaaaattcctctacccctagaaacagcgaagaaacaccagaaaagagtaggaaagactagtgagtcactgaagagagtgagagccgtctctactgttgaaacctctccatgcaccttggatgtggactacaatgaagctgcagccaaacttgaaaatatatataaactcagccctgtatctgataccttgaatggggaagatatagatagtaaaatcgagagagtcttgcggaggaggaagaaggttagtgaggaacgtgatgatggaaattgtgataatggtggttagaaaccagaataagaaggccaaacgattgagtcttgata

SEQ ID NO: 10425 - DNA, 2149 bp, Glycine max
  Clone ID: PAT_MRT3847_109424C.1
gtagttacatatggtggtatgtactaaacaaaagctttaaaggagaaactgaaacattatggagtagaaaaggctcgagatttgactttaatagaagatgataccaatgaggggatgaaccgaggatttgcatttttggagttttcttctcgttcagatgctaaggaagcctataagcgactgcagaagagagatgttgcatttggagttgataagcctgcaaaggtttcctttgctgactcttttattgatctgggtgatgaaattatggcacaggttaaaactgtatttattgattcgctgcctccttcatggaatgaagtttatgtccgagatcttctcaagaaatatggagagattgaaaaagttgagcttgctaaggacatgccagctgctcggaggaagaattatggatttgttacatttagtacacatgttgctgctgtggaatgtgctgatagcattactagtgcagggttaggtgaaggtgacaaaaaggcaaaagttagggctagattgtcacggcctctttcaaaacctcttcagagaggccgtggaaaacatgttaatcatggggacttccgctctggccgcaattctggaagattggtaaggtcttcacggagtcaacctgcaccacgtagtcttcctgcccatgtggtgagaggagttggaagtcgtgttccgccagttagacctattagtgtgagaaatagacgtcctgtcacacccatgctagtaagagccaggccagtggctcctccagctagaagctatgacaggagattggctgctcctgcatatcccaaaagtggcatgaaaagagattatagacgacgtgtgaatctaccacctccgagaaatagagttgctgcagattatggctctaggttagcctctcagaggcacacatctcatagggattatcctgcccgtggctctaactaccctgagctgcatagaagtacatctcgtggttctgcaccaaagagaggttatgttgatgatggccatggccaaagatttgagagggctcctcctcctcctcctcctcccccccatctaagttacgtgaaggacggccacgcgattatgacactctatctggctcaaaacgtccttatactgatatagatgatgttcctcctcggtatgataccagtgctcgccaatcaagatctcgtttaaattatgactatggaggtagtgcttcacagtatggagatgcttatggtgacagacttggaagatctagtcttggatatagtggcagcagaaattctatttctagtcaagacttacatggtacatatggcagtcgacaaggcatgagttatggcggaggttcttttggtggtagtgatggtggtatgtactcatcaagttatggtggcgattatgtatcccgtggaagtgatgttggtggccgttcatattcatctatgtattctggtagaggggtgggtgatagcagcaattatatgggtggtggtggatctgggtcatattattgagatctaaatacaataaagaggctgctgtaggatgtggaatttgaagcttatgctcattatgatgcctaccatgtggagctgaacattgctaattaattgcctggtttgggtatttatcaaagatcaagggttatgccaattcaagtcttctatcagatggacgaattttgagttcttcaatttgtgctgtaagtactgaagctgattagaaatggaaagagaagtgctgagcatgtgatgtataaataaacttcgtattattaagctcccttgtgggtgggtaatttgaaagatcactccatatcctgttcatttggaaagaaccaaggccacagattactttttgattacggattattggatttttttctcctgtcataaagttggtttttttcctaacaaaagtatattgttactctttggattcattatatttttgccggtgctaagatcatgaacaagagtacccagcactttgtggagctaccattggtagtagttatatgagcactacttcggcaataaataaaggaaagattttgatatagtaacatatcctaggaagcatcatgcactgattatgtgttccaagcaatacatgaatggcaaggaattgaattttttttcccctctag

SEQ ID NO: 10426 - DNA, 294 bp, Glycine max
  Clone ID: PAT_MRT3847_109425C.1
tggtgcacgacgactactgattccggacttacatcagtatgacagcataagtgggatgggttaataattaagtcgcttagtgacacggatcattcaccggattttcatgacccttcatgtatgaaggcacaattaagaagacctgcatttatagtgagcactcatactatagaatacagagaggaccaccattgcaaacactattattgagttctataagagaaaatgatgtttaacacaaattttcagagaaccatggtgtgcacaagccaaaacacatagaggggcttctag

SEQ ID NO: 10427 - DNA, 642 bp, Glycine max
  Clone ID: PAT_MRT3847_109426C.1
cccacgcgtccgggaagattggtaaggtcttcacggagtcaacctgcaccacgtagtcttcctgcccatgtggtgagaggagttggaagtcgtgttccgccagttagacctattagtgtgagaaatagacgtcctgtcacacccatgctagtaagagccaggccagtggctcctccagctagaagctatgacaggagattggctgctcctgcttatcccaaaagtggcatgaaaagagattatagtcgacgtgtggatctaccacctccaagaagtagagttgctacagattatggctctagagtagcctctcagaggcattcatcttacagggattatcctgcccgtggttctgactaccctgagctgcatagaagaagtacatctcgtggtgcaccaaagagaggttatgttgatgatggctatggccaaagatttgagagggctcctccttctcctcctcccccccatctaagttaccatgaaggacggccacgtgattatgattctctatctggctcaaaacgtccttatactgctatagatgatgttcctcctcggtatgatactggtgctcgccagtcaaggtctcgtttagattatgactatggaggtagtgcttcacagtatggagatgcttat

SEQ ID NO: 10428 - DNA, 749 bp, Glycine max
  Clone ID: PAT_MRT3847_109427C.1
tccgggtcgacccacgcgtccgcgaggcttaaaccctttcggcggcagcgaaaaaagtctccccgcccccaaacccaaacaatggtaagctctctctctctctctccttttctgttgagtgagtgacgaacacttcctctgcgttgtctaatttcaattatcgtttctgtgaatgaaacagaggaagaaaaaacaagggttcagaagacccgttgtcataaaaaagccgaagcaaccgcaagagcaacccagcgttgatcctattacgggaaagaaaatccccaaaagtttcgtgttttcgcgaggcaagttgccggctcctctcaaacagcttcagatggacctcagaaagttgatgcttccatacactgctctcagccttagggttagtttaatattcctctcttcttctttatttttgttattcatgtttgaatgaactttaaagtgaatcatatatatatatatatatattgttttagtgctaatttgttttttagttatgtgcctgcaacaggaaaaaaaaattcctgtgattcaccactctgagcgagtagaacaactaacgcagggttattgcagcttaatcagtctttgagtttgaatctttgagtttgtagctcatagtattgtttgcctgcttagcatgattaggattctctcctgtatagagaatacttgtggccttgtaccaaaagatgcccttagatccatctcgagtgagattatgtggtctaacattgactgta

SEQ ID NO: 10429 - DNA, 1335 bp, Glycine max
  unsure (1)..(1335): unsure at all n locations
  Clone ID: PAT_MRT3847_109428C.1
gtggccgttcatattcatctatgtattctggtagaggtgtgggtggtagcagcaattatatgggtagtggtggatctgggtcttattattgaggtaagtcttctaactctttgccattgcattttatgaagtacatggggaggcaccagtatatgtaaatctcgctttctctagaagatttctctaccctcaaacgacatctccatatttttccataagggatgactggcgaagattgatcacctggtcactagtgaatttgtctgtgaacagatctaattacaataaagaggctgctgtaggatgtggaatttgaagcttatgctcattttgatgcctaccatgtggagctgaacattgctaattaattgcctggtttgggtatttatcaaagatcaaggtttatgtcaattcaagtcttctctcaaatggacaaaaaaagagttcttgaatttgtgctgtaagtactgaagttgattagaaatggaatgagaagtgctgagcatgtgatgtataaataaacttcgtattataaagctcccttatgggtgggtaatttgaaagatcactccatatcctgttcatttggaaagaaccaaggcctcagatattactttttgatattggattttttctcctgtcataaagttggtttttcccctcacaaaagagatatattgttactctttggattcattatattttcgccaatggtatgatcatgaacaagagtacccagcactttgtggagctaccattggtagtagttatatgagcactacttcggcaataaataaaggaaagattttgatatagtaacatatcctaggaagcatcatgcactgattatgtgtggctagagtgtttctaacatggtattttgtactgagggggagtacaagatgcatatggagcattgcatatttttccttaagattgtttacttgcaccccttggaatttttctttgtgatgcaattatttttgcgcacttcattactatccaatccaattgcataatattggaagacatttgcccatgctatatcattggaaaatgcaactttgcgagattgtatagtagctggaatggattcaatatcatgtgttaccaacagattttgaatttcaagaatctatggaatttagcatttttgcaccaggttatataccctgcttggttttgcagaactcatgccccaatggcaaacatgaactaaccataatatcacactagaatgtctatgcgctcatggactaggtcttctcatttatttnaatccccattgggtagttagtttccaactcataccatttatcagcttaagcagcaaat

SEQ ID NO: 10430 - DNA, 249 bp, Glycine max
  Clone ID: PAT_MRT3847_109429C.1
tttggggtttttgtaaacagaatccatttatacaaggggggataggatgaaatgcccccaggtaatttttggggaaaaatgatttgcgccttgccatgaagaacaaggccaggcacaggatggggcaacctgtcaaacagcttccagattacaaaagtcggaaaacataattaccaccacgagctgaacgaaagcattcaaatgcagagcatgaattcacgcatgcaagacaacgtcaaagccgacata

SEQ ID NO: 10431 - DNA, 467 bp, Glycine max
  Clone ID: PAT_MRT3847_10942C.1
gagaacaaaaaaaattgcatttaatcagattaattgggacatgacaaaggggtactttataaaaccctattttcgcgcactaaatttccgcgaacgagggccccaagagggtggttctaactaagacaacctatgcccagactagttaaaacacaggcttttgacaacgtacgttctcgcacccatggaattatgacctatgtgcacattgggtacataccccatgtgaacctaattaaccgggtacgaatcaaaatggcaaaaatgtactacgcattaatgagcgatgcatgaatgtggcaaaccactgagaagtgaaccaatgtaaatgccatcaaggcacttgggtgggggccctgggaacctggactcatgcttacttgacttatacttaacatggttcaaaataacccacctgaaacttacccgcctaaagcgttttagggcttgggatgctaggccttgcc

SEQ ID NO: 10432 - DNA, 298 bp, Glycine max
  Clone ID: PAT_MRT3847_109430C.1
gacaccactgacggtccaattgttggtacaggacccatatgatggccgtattgagtttcctttcctccggttcgggctttttcagcccgtaaccggaagcactcagtgttggcttggcgtcctgccatgggaacaaacacaacacaaggctccttgtgaattgtgatgacgtgaccagtgaccaccattcatccatccatccatcctcaacacaacgatccaccatcactcctttctttttcccatcccaagaaacaaagaaaccagtcccactttaattatttttattaacccattc

SEQ ID NO: 10433 - DNA, 2018 bp, Glycine max
  Clone ID: PAT_MRT3847_109431C.1
ccgggccggaactcgagccgaatcggcccctccggcttgttctttcttctcttaggtttccgcaagatctgcaaaccatggcttccaggaaattcgacaaccctcactccggcgacggcgccagtccaggcaaaatcttcatcggagggttagccaaagacaccaccctagagacgttcgtgaagtactttgagaagtacggggagataacggactccgttataatgaaagaccgtcacacgggtcggccaaggggattcggcttcatcacctacgccgatccctccgtcgttgaccaagtcattcaggagaaccacgtcgtcaacggcaagcaggtcgagattaagaggaccattcccaagggctcttcgcaggctaatgacttcaaaaccaagaagattttcgtcggcggcattccaacttctgtgtctgaagatgagctcaagaacttcttctccaagtatgggaaagtggtggagcatgagataatacgggaccacaccacgaagcgatcccggggttttggctttatagtttttgacagtgaaaaggttgtggataatattttggcagatgggaacatgattgatatgggtggtactcaggttgagatcaagaaggctgaaccaaagaaatcctcaaacccagcttctcttcctccatttgctagtgactctagggcacgttcttacaatgatggttttggtggttttggcgattcttatggaagttttggtggtagcgggtatggtcctggttcttataggtcacttggaggttttgggggtaggcttggtgattatggtgggtatggggctggagatgaatttggtggtagttttgggggttatggtggtgctggtgctggtggctatgctggttttcgaggagaatcatcgtttggctactctagtcgctatggatcgtacatgggtggccttggtgctggttatggtggcagcgggttaggcgcatatggacggggtggtggggcttatggaacctatggtggtccaagcgctggtgggggttatgaatcaggtcccggtgctggttatggaggagcaggaggtggaatgtatcccagtaggggaagctatggtggcagtagtcgttaccatccttatgcaagatagttttattactaagctttgcagtagaatttgtatgcaggtttaagcattttctagacacaaggcacttactgcaggtggccactttctagaagtcagaagaaccactagcatgtctgttttatctattgcttagacaaccgaaggtagaaacatcatcagtctagagctttctgagcatcatcaatctagagcttcccatcagttatcagcctatatggattttagataggcacattctgctttaatgtgatattcagatgtttgcattagactgtcgctattctggattcgatatttagttagaaacatggtggagttgtgttaatgtgtattattgtaggtcatacttgctagaaatttgcttgaaatagtacttgttctccatctttcctttagttatgtttggttagcctatgttgaagatgttgacataaccttttcaggttaaactagttactacagttctgtgatttagttacatgcctagttagatcatatccatgcgatagatctgaattagtctcaacaggtttctgaagtcacttttcttcctaaagggctgttttgacggcatataatgtttagcagtggccagttggatcatgtagaaaggcagattattgatctgaactcttattctaagacttccttagattttggtgtttagcattcgaatggtagatattttctccatgcttagggtttttgtggaggagttaaattcagaaactaaatggtgatgccaattagacattttatatcctgtggtagtatgcaatttgttggacagtgtctagggagcgatgtttcatgaaattatatttaggtgctgtccgccaagcatctttaaatctaagtcatacaaacagcttgtttgtattt

SEQ ID NO: 10434 - DNA, 414 bp, Glycine max
  Clone ID: PAT_MRT3847_109432C.1
catttacagcgaaatcgcgttaaaagccagcaaatgacaaagtatatattggactgggcttcgaaagaacaaccccaaaccaagaaacaagaaatttccttgccccggtccacccggattgcccccccaactcccttattgggggttaatactcaccacatggacgctttttttgaaccaaaatttaaagggtgctttgcctacccctctggcaccacaggaaatgttttaccaaaaatgggccccaaatttgacacaacgaatgggggcaaaggtccccatcccgcaccaaatatctttgcctaaagaaccctcagaagggaaaaacccctataatttttcactgatggaggttcggtcttcttaaaaagaaactttggcaccagaggctcaaaatgccctctatggggaaaa

SEQ ID NO: 10435 - DNA, 655 bp, Glycine max
  Clone ID: PAT_MRT3847_109433C.1
tttttttttttttttttttttttttttttttttaaatagaagagagaaagagacacctgttattaatcagaagagttatgtttacatggatacagatttcaacagaggtctcttagaaatcaaattctcaccattcatgtttctttcttttccctaaacatcgaaggttctccctccctctctgttgtctctacccaaagaatttgtactagtggcttttctgtacctagaatgactttagagtgtatgattgctttcgaacccattcatcataatcttgcagcgtctgctgaagtagtagtggcaccagcttgtccaccaaagcttgcatcattatatttccaggaccctcaacagctgaagtaggcatcatggtaaatggttgtgtgtagatctgcaggcagagatctttcttttacagatgagagaggcaaatgcaaaaatccataatgtcaaactcaagtctgagattcaaattaacatcaacttctaaaaatgattcggcaccagcagctccccatcaacttctgaattctcatgaatgctgcaaatcgttagaaattgataacaaactttatcttcttaattcataaaacactgtaagtagccaaaaatgtcacatgaaacatgtattgcagataaacttgaattcagc

SEQ ID NO: 10436 - DNA, 2064 bp, Glycine max
  Clone ID: PAT_MRT3847_109434C.1
tcgaagtcgcctcgaaaaatttctccttgtttgtacggcacacaagtgagatcaaagatggaaaatatgccaccaggttatcgtttctaccccacagaagaggagctgatttcgttctatcttcacaacaagcttgaaggagaaagggaagacatgaatcgagttattccagtcgttgatatatacgactacaacccatctgaactcccacgtaaaaatcttatatatatatatatatatacatatatatttccctcatctccctctttctcttttcatttttctaatttttttttcctttcaatcaaaatcgagcttgacttgaaagctatggtacaagttgatttattgcatatatatagaagcaaagcacattctggataatttaaggttacatacttttcttttaatttttcttaatgactgtaataccgtaaatgctgttgatatattattattctgtgatcaagattggagaaaaggatatacagtccttttggcttcatgaagattgctcataaaattaatattgatagatatatagatatacactagttttgcgtaactgactggtatatttgatattaaacatgatttactgaaacaaagatatagatgcattgatatatttttatttggtgttgaattgcagaaatttcaggagaggcaagtatgagagacacggagcaatggttttttttcattccgaggcaagagagtgaagcgagaggagggagaccaaagcgtctcacaactacagggtactggaaggcaacagggtctcctaatcatgtttattcttcggataatcgcatcatcggaattaaaaggactatggttttctatagtggaagagctccaaacggaaccaaaaccgattggaagatgaatgagtacactgccatcaaaacatcatcctctagtcccacggtaccttatatttactatacgtgtgtctaagaattagggttggctacattttaattagttgcctattaatttaatttgttaaatcttcaaggtttatcttctctactctccatattctcttcttccttcttctcaaatatcagaatttgagcacccttctgaacaaaaaaataaaataaaaattgagcatttttatttcttacgaatgcattgacacagaggcatttcactgaattttatcaactaataaaataataaaaaccaaaataaattgtgctcgatcgtgatatttcataagtatttcgtacgaaactaactcgtacattaaaaaaattgatcatagtactcaatattattctcagtcgataattaacttacaattaatcaaccattcagtcagaacaattaggtttgaattatatagtatatactatatatatagcatggaatttcatggatgcagtgcaattttaaatatttgttacgtgacagtgcagttttatatatatatattgtatacagatcatatatagttgcacttcttaatataactaaccttctgattctactatatattaattgcagctaaggaaggaattcaatttatgcagagtgtacaaaaaatcaaagtgtttgacagcatttgatagacgaccaccgccaaggagggacacagaaagctattcgggtgctcaaaatgtagaagagcaacaaaagggttcaacatcatatgatgattatcatcataaaatggtggagagaagtgcaacgtgttcaccagcagagagctcttcctccggagaccatgaccaaccccctcttcacggtgaggaagctactcaaatggatgttgacaacaacgatgacccttttttggattgggagaaagtggatatgttcttgggatcagaaccatgaacacatccaatccaatctatctgtgctttgttggtatgctacaacaaagttgactctcaagtctcagctacaccgatgactgaataagtagtaggttatgttaattaattgtgtatgtcgcaccgcatgcagaacaactactttaaatatttgttagatttcttgctagctttataaagttgtgtatagtggctaatttgtctgataaattatcac

SEQ ID NO: 10437 - DNA, 325 bp, Glycine max
  Clone ID: PAT_MRT3847_109435C.1
ggggatctaccaagccgcaaagccctttaagggggacattcaaggcttacaaaatgtggggccaccaaacgttctaatccaaggactacgcaccaaacatgaaagtattacaggcgcaagaatggcgcaccgtaatgatacaggcgcgattgaatcaggtccctgcaatgctacaaacgggcaaagggagatgccaggacaagacccagcccttgagcaaaggatggaccgaggagacccgaccaaagggggactgaatacgcccttcaaccacagaagcttccctgaatcatgtgattgaaaccaggagcttttggaggaccct

SEQ ID NO: 10438 - DNA, 379 bp, Glycine max
  unsure (1)..(379): unsure at all n locations
  Clone ID: PAT_MRT3847_109436C.1
nagcggaactatacctgatcgcatcccaaaanttanaatgaaagggccnnacccgagnaggagncagcggccgncctttttttttttttttaaattcttctttttttctctaaacaccgcctcatcaaggactgggtttattactaaaactcaaaccatactcaccttaaaaacaataacctatacaacatactttctctcacacgagttcaatacatcattttaaaaacatactcactgccgcattttacccatacattcctatcgcaacccaatatgagacacttatacttccatctaatacattttctaactctttataaaccgtaatccactcagcaaccaccaccaatgctaacgacaatattcatagtggatt

SEQ ID NO: 10439 - DNA, 298 bp, Glycine max
  Clone ID: PAT_MRT3847_109437C.1
ggaatatagaagcataaaactgaaactaacatatacatgccattaaaatactaaaattttcatgttgtctctagcctcaaggatcagatagcaaatctacaatcagagaatgaatccctacggagtcaggcagcggctgctgctttagagcagaaagttcatccagaaaaaatagaaccagaccattcagcagctgctctagagcagcaactttctcggtccgggagttattgcacatgatacaactgcacaaatcaagacacgaagaataagcgggcatttaacaaaagtggcacag

SEQ ID NO: 10440 - DNA, 581 bp, Glycine max
  unsure (1)..(581): unsure at all n locations
  Clone ID: PAT_MRT3847_109438C.1
ccacgcgtccgggattattattattattattattattattattattattattatgtaggctgccaaggcgtagaccaaaccacaggaaatgaggaaggcagagaggaagttcagaggggtgctgcacatggtgcattttggttcgtttttcttgcgacccatttgaggatttggaaagaagaagaataaggacaccacccagaaaatggaatcgtgtaatgagtatcatctcaggtagctcaaggcaaaaataacaaatacgagttaaatgtggtcatggtaagcagggtgcctggcatggaactcatatttctgatattgttcagagttttacgggacagtctatgagggatttatgaggcctttgaattgagagatggggcagtttcttgccattcatgacgtttcttatctcaactggagcagtttaccacaaggctttattttcgggtcaacatcctcagcatatcagtatgaaaggtgttgcaagggaaggtgaaaaaagaccaagtatatgggatactttcgctcataaatacccagagtgtaactcagttgacaacaaagagtganacttgggg

SEQ ID NO: 10441 - DNA, 272 bp, Glycine max
  Clone ID: PAT_MRT3847_109439C.1
aacgccgaacgtaacagcggggatcaacatcaaacagagctagacaaatgcagcactaacagagaacaaagaactcaactagcggatccatccaacaatgacaccaacacagattgaagaaaccccgaaaacaaaagacaggctcaaaaaggagatacctagcggagcacagccaaaacgcgaccaacccacaacttcaaaacaatgacataagaattgagaatcaactatgactcctagacagacaaacaagaaccagcaactgaagcaca

SEQ ID NO: 10442 - DNA, 367 bp, Glycine max
  Clone ID: PAT_MRT3847_10943C.1
attcttactgttattgtttcgtgttgggggggtgcttgtctgtgtgttgacttgtttggccaaaaaagcccaacttttccagggggaccaaaaaaagggggatagcctcaggcgcaataagctcaagatcgaagagcatctgctgtcttaaaatgtcataaacacactgaaactggctccaaaacaaatcttctttgaaaacgcggatagatccccatgcctgtattctataaaagggaccaaaaggcccacctgtcgttaaaaaaaaccgaaatctaagcgcggcggaataaagctcctgtctggggccccgatcaataagatggggggggggcccgattggacaaaggttatccaatttcaacaa

SEQ ID NO: 10443 - DNA, 302 bp, Glycine max
  unsure (1)..(302): unsure at all n locations
  Clone ID: PAT_MRT3847_109440C.1
tgaaagagaatccgaggcgaagagaagagaaaaattaagatggaggggaaggagcaggatgtntcgctgggagcgaacaagttcccggagagacagccgattgggacggcggcgcanagccaagacgacggcaaggactaccaggagccggcgccggcgccactggttnacccgacggagtttacgtcatggtccttttacagagcngggntagcngagtttgtnggcacttttctggttctatacatcactgtctaaccggcatnggagttccccggggctnaatcnaaagtncngtaccc

SEQ ID NO: 10444 - DNA, 560 bp, Glycine max
  Clone ID: PAT_MRT3847_109441C.1
ctactacaaccacctctacacttcgatcctccacccaacaccaaaaaaacccacctcaacacattcacaatggcatcaatcgagcagacatggagccttgccggcaaggtcgccgttgttaccggctcaggccgtggtatcggaaaggcgatggccattgagctggccaagcgtggcgcaaaggtcgccgtcaactacgccaacgccgtcgagggagctgagcaggttgtcaaggagatcaaggcccttggtaacggctcagatgccgctgccttcaaggctaacgttggcaacgtcgaggagtctgagaagctgatggatgacgttgttgcccacttcggcaagctcgacatctgctgctcaaactctggtgtcgtctcattcggtcacttcaaggacgtcacacccgaggagttcgaccgtgtcttcaccatcaacacccctggtcagttcttcgtcgctaaggcggcgtacaagaagatggagattggtggtcgcatcatccttatgggatccatcactggtcaggccaagggtgtacccaagcacgctgtctactc

SEQ ID NO: 10445 - DNA, 203 bp, Glycine max
  unsure (1)..(203): unsure at all n locations
  Clone ID: PAT_MRT3847_109442C.1
gcctgcacgaagacgaccaaaggggactaactccatttaggtggtcttctgatccttctttcgactactcattggtatctctaactttgacgcgncgggagcttcttcttccggtgtcctgattaggatggaacaatggcggcgtacacctgcgatgaaacccaccatgccaggggtggaggagccccaggaacagatgcata

SEQ ID NO: 10446 - DNA, 549 bp, Glycine max
  unsure (1)..(549): unsure at all n locations
  Clone ID: PAT_MRT3847_109443C.1
ccacgcgtccgaaaatgggcctccaccagcaccttgaggatgctcctaagctgcattcctactcgtggagttaccactattggcgcaagtttgatgattctgtaatgcgacccgtctttggtggacgaggttttgtaccctacgttcccgggtcaccccttgaacaaagtgttcatcagtggcattgcacttaattagaagatatatatatatacacacacacacagatactgattgattatgtgatggatggtgttgttgtggtgtaaaattggcttggctttggttgtgtgcacttttgtcaatagttacaacatttcaacttcattacatgatactaaagagaagacaaggtgttaggggaagaatttatgtcaacgcagggcattttttttgtccccctcattttgttgacatagacagagggggttgcttgctttgctttttaggttacgttgaacttgatgctctgttaagtattcaattattttgtgtgatactgtatggtgggaaattcttgacagttaaaanaaaaaaaaaaaaanaaaa

SEQ ID NO: 10447 - DNA, 436 bp, Glycine max
  Clone ID: PAT_MRT3847_109444C.1
gcgaggtagggttgggtagagagatggtatttccaggagctttgatgatcattattgcctcaatgctagtgggttgttcctcggctttggattgaatcgggagtcatttacgtgggtggaaaagtgctctgccaggactgcaccaagggctggaacgaatgggtgtatggtggaaaccctatgaaaggagttaaagtgtccctaacatgcatggacaagagaagtagggttgtgtattacactagtgatacaacagatgagttggggcagtacgatctctctcggctatggtgtgtctgggcctaggaatcccctacgacagggtggccattgcggtgggtggcggcccctctcacttgtttaaatataaatgattattcttgtttctcattaacttttgcatgaatgagtatgtaaacctaaaatttgaggccag

SEQ ID NO: 10448 - DNA, 707 bp, Glycine max
  Clone ID: PAT_MRT3847_109445C.1
acatattccgtagcatctacccagtcagtactcaccaatggcaataggccaatagctataattgcccaaacccaactcataatttcaaattttgctcaatactttatctacaggtgtaacattgattaaacacaaacacaaatcacctcttgttggttcttaatttctttcttccactatgccttctctctcggaagcctttagaggtcaccccgtgtaccttcatcagaaacaccacgacttcaactcacttcaagaactccctgactcttacgcttggacacaacctgatgatgatgatcaccgtctcacaaattacccttccaacaataagactaagaccgttgtccccatcatcgatttgaacgacccaaatgctccaaacctcataggccatgcatgcaaaacatggggtgtgttccaagtggtgaaccatggcatccccacgagcctcttcagtgacattcagagggctagtcttgctctattctcccttcctcttcaccagaagctcaaagcagctcgctcccccgacggcgtctccggctacggccgcgctcgcatttcctccttttttcccaagctcatgtggtctgagtgcttcacaattctcgattcccctcttgatcttttcctcaaactctggccacaagactatgctaaatactgtgatattgtcgtggaatatgaagcagccatgaaaaagc

SEQ ID NO: 10449 - DNA, 1422 bp, Glycine max
  Clone ID: PAT_MRT3847_109446C.1
atgttccccccaattccgaaccaagtaaaattgattcgagagaaaataaaagcatcccaggataaacagaagagctattatgacagaaggagaaagccattagattttcaagaaggagaacatgtgtttttgaaggtttctcctgtaactggagtcgggagagctctcaaatctaggaagttgaggcccaagtatctgggtccgtatgaaattttgaagaaggttgggcctgtagcttatcaaatcgctttacctccgagcttatcgaatttgcaccctgtgtttcatgtctctcaactgagacaatacaacctggatccgtcacatgtactcgcactggacgaagtacaagtgaaggataacctcacctataaagcacaacctcagaagattactgatcgaagaatgaagtcgctaagaggaaaagagatcgcgttggtgaaagtgcagtggagacccaacgagggtgattcaacctgggagttaaaggataggggtctcattctgagcgttttgatatatatatattgcctactttcgaatacgggccccgacgggtgcagagaaacgcggggaactggaaccagagaggcagcatgcaaaccgaggcaggatttcagcattcaaaatgtcaaaattttcctccttgtggctgagtatgaagtcacatcaagagaaaaagcaaatttcagaaacttctccctccttcccacgttgcttttcttcttccttcttctccaccattgttgtccattgaagcttcaaaattgctcatcatttctgctccaaattgcaaggagaagccattttcggagtcttgaagcacacctctacttcgtggggcttcaaattccaggaacttccagtaaaaacttcaaggcgatccaacggttagcgaatcagaatgaagagaatgttattgaggtatgggttgatggggacccggtgctgagagaaacgaggataagggctacgtgggagtgcatcgcgatgacagcgcagttgatccatgatcgcgtggtgatggagtgcctagagggtgtttgggagaccctcaaaggcaatgagaggtgccaattccgtggcatgattcaactcactgctacttcattagtacatccagaggaacccgcacgcacacttcagcagcctgtggagtggatactacctacacctactccatatcgactagttgagcctgttcaagtgatagaggtgtcatcctctgaagaagatcttgaagaggacccagaggagttacctcctgaacctgctgtggatgcccttgacttcccagaggatgatgaggacccactccctgatgttgattctccagaggatgttatgtcaacatctgaggcagactctatagaggagagcggccctggagggacagcgaatagtgatgactcttcatcatag

SEQ ID NO: 10450 - DNA, 176 bp, Glycine max
  unsure (1)..(176): unsure at all n locations
  Clone ID: PAT_MRT3847_109447C.1
tagcttcactctcaagccgactctactcactctagtggacngctttaactcttcataattccatttcattgcacattngcgcccttctcagttctctcaatcanatccatggcnacaaacgcnnactgcgaaatgcccctcacacaccancctcattggttctctccaaaatccgg

SEQ ID NO: 10451 - DNA, 436 bp, Glycine max
  Clone ID: PAT_MRT3847_109448C.1
gggagggaaacctacttgcattgggagagcaaggaaacatctatccccggttatcacaaaaggggaaaatctatcccgggttcaggtaattgaacccgaaaacaactcatctttgatcctaaaaaataccagggggaaacccaaaccatgggggaccccccaacatggggggacccacaaaagggggggatttttctcttttctaccaggggttcccaacccctagaggggatgccaacccattgaaggccgacctggtaaattttggcttttggaccatttggctggttggacccttgcccccctgacccaaaccttaaaaaaagggccggtgaaagggaacctgatggccccaaaggccactaggaataaaatagccccaattgggggaatcccttggaaccaaaaccttaaaaatccctttctggaaaaaaga

SEQ ID NO: 10452 - DNA, 227 bp, Glycine max
  Clone ID: PAT_MRT3847_109449C.1
cttattgattattttacttatggatatggttttctttttttaggtcatttgttatttttatgtatttttgtctttatcaatacaaacgaaggcgagtgacttttcaagttgtatgtgataccgatactgtatgactagagagcagggtctaaatgaaaagaacaaaaggcttatgaatgaactctccgcggaggaccgcttgaaagtgatttgaactcgacagcttc

SEQ ID NO: 10453 - DNA, 545 bp, Glycine max
  Clone ID: PAT_MRT3847_10944C.1
aaaaaaactaaaggggttttttaatttcaaaaagcaaaattttccccccatacaatttcaaagactaactcccagggacctgcccctggggcttgataatggccccattttttggagcctttacaatcacaacttggcgaggccaataaatgaagccccgggtttcacgattatttactggagccttgcaagttacaatcacaacttgcctgggggcttttttcttcttcttcttcttcttcttcttcttcttcttctccccccatatggtcggtcaaaatagcctttcaaatatcaacaactatgatgggaagcgccttcattttattcttactagccattgattataactgcaacattttattagtctgccaaagcttgcccaacagggaccaggcccgtttcatgggagcttcaaccggtggtaacagcatgtgaattcaccaaaaaaaaatcccaaaaaaacatttcttttggttaattcagaggccccttttctttataatcaaatttttaaagggggagaaaaaaagagggcccctttt

SEQ ID NO: 10454 - DNA, 436 bp, Glycine max
  Clone ID: PAT_MRT3847_109450C.1
tccggtccgtcacctaacggcgacaccgacaagccgtacgcaacgccacacctgactaacagtgtggtaaggctttcaccagcgcccggatatggcgcaaatgctgcaagatgcggccggctggtagcgggaggtatctgcacactaccgatggctgctggcactgcacaagaaacacaacgtaatagggcagtcacagtcggggattggttacacggtggtgagccaggtattacagttgcgagcgataccgcacgtggggcacaaacatagctaccatgctgatacacagctgggtcgtagtggaacaatagcaggtaacaatgacaacacgcgtacctaggtcaaggatgcatcgtaatactgcagaccctgactgatggacgcattaactccctggacagtcgccttagcatggcgatttagctacggtgaa

SEQ ID NO: 10455 - DNA, 1448 bp, Glycine max
  Clone ID: PAT_MRT3847_109451C.1
ccgttagtaacattggcttcccttcactattcagagttcatctagattcacaagtactatcaaagcatatgaagaataaatcatcgtgcgattttatggttccttctaatcataactactctgttaggctgagtccaatatgttgtaagctatcagaaagtgggattgaggagaaccacacgagcacgagcacgggcgagaggccctctaagatcaaggacaggatggaggagtacaatatagctatgaagaaaatgatgaggaacccttatgagtatcaccatgatctgggtatgaattatactcttataacggacaacttgattgtgggctctcaaccacagaaacctgaagacatagatcacctcaaaaaggaagagggcgtggcatacattttaaacttacaacaagataaggatgttgagtattggggagtagacttgcagtcaataataagaaggtgtcgtgaacttgaaattagccacacgaggagaccggcaaaagactttgacccagattccttgcgaaatggactacctaaagcagtctcgtccttagactgggcattttctgagtgaaaaggaagagtttatgtacattgtacagctggacttggaagagctccagcggcggcaattgcttatttgttctggttttgtgacatgaatctaaataaagcatatgatatgctaacttcaaagagaccttgtggaccaaataaaagagcaatacgtggagctacttacgatttggctaagaatgatccgtggaaggagccatttgagaatcttccagaatatgcatttgaggatatagcagattgggaaaggaacttgattcaagatcgtgtccgctcccttcgtggaacttgataacttcggtttctacatattagagattcctacatagattaccacccttgctgggatggcgccagttgccatgatactgctcaagactggagattttttcaagcagattcatgctaatatgaacatatagtttataataacgtgtacgaaatattcagtatagtatatttcacacattggctgcctggctttctctttcataaatgggtcatttgtatgaaaatccaattcgcgtgccctgctttttcccacttgaacataaaaatgaaagggttaaaagggagacagtcaaatttggagggaaaaagaagtcctaaatttttgtataacacatcaggatcaggtatgcatttaattcgatttaatttatttcttatttagtgcagaaaccaaattgaattaatcttgtaaattatttagtgctagagtgaagttcagtcttgaatgacacatgttgagtactttgtttttgtctctactatctttccctcgaccttaagctcatacacagaagaacttgtgtgatgacaaagcgcgtttgtaatgtttattcttacacaatcacagttctgaaaa

SEQ ID NO: 10456 - DNA, 3392 bp, Glycine max
  Clone ID: PAT_MRT3847_109452C.1
gaattaacagaagaccaaagtacttgtgttacttctccttggttgcaccatgtcttgctatttgtatcatcttgtgtaccttcttaagctttgagcaattcccttttacttttatttgactccatgatcattattcacacatcaaacactactactatgtccttgtatgagtgcccttccttctagctaaatctctctcttttggggtatggaattcaacaagttcagaatgggaagcaaagagggacaatctaattgtgctgaaatggaatatctcgagagaagttgcgaggaagggccatcagaaagagtgtttttcttcacttacactacggccgaacccatttgtagtatccggaaaagtttcaggtacatgttgcaagtgtcagagttggacattgccttgttcggtttcatacgaccctctataaaactgaacacatttcatcgacaaactcgaaaggatttggctttgatggggttcttctttggcttaagggttttgtctgagctcttgagataagggattggctcaagccttgtgagaacaacttgaaaaatggttgaattcataagatgttgactatgcatacatggcaacagagaaagacaaccatgcctcagtgagtctcttcatggacaagtttggctacaccaagttcaggactccagctattcttgtcaaccctgtgaaccatcattgctttcaaatatcacccaacattgagatagcaaggttgaagattgaccaagctgagtacctctatagaagattcatggggtccacagagttcttccctaatgacatagggaatatacttaggaacaagctaagtttggggacatgggtggcatatttcaaaggagatattgcttggggtgattttgggtcagatggacaagtaccaaatagttgggctatgcttagtgtatggaatagtggggagatattcaagttaaggctagggaaagcacctttttcttgcttggtatgcactaagagttggtggttgattcataagatcttcccatgtttgaaattgccaaccatacctgatttcttcaacccatttgggttctatttcatgtatggggtgcaccatgaagggccattttcagggaagctagtgagggccttgtgccaatttgtgcacaacatgggtgctgagtccaaggatgagagtaattgcaggatcattgtgactgaagttggaggaagagatgagctcaaccaccatatcccacattggaaattgctctcatgcccggaggacttgtggtgcataaaggcgttgaaaaatgaagggacaaataacaagttccatgaattaacaaccaaaaccccaccaacaagagctctttttgtagacccaagagaggtttaaagcatgcatgatctcaccaaaaaaaaaaagaaaaaaaaagtaatgaaaggggacaagaaaaaagcttggaaaatatcttcaccttaattttttttttcctttccttagctttgtctcagagaaccaaagcccacctcatgtattgtgtgataagtccatccatctctcctggtgggggtttttctctagttcctttcacatcggtgacacaaaatctcaaaagatatccataatttaggtgccacactttggtgttcttctttgcaattccccatcctgtgcctcatgactctgactactcaatcaccatggtggtccaaactttgtcccttcccctctagtaaattttttagctggaccctcctccctcgctttgtcgcatcgcatcgggatatggtctctttaacatgtatgtatgttaatgttaatgtcatcactaaaaaaaaaaacagaggcttcgagccattttatatatagtgtgagatcatgaaagtaacccttagttattattctctattctatgatctattcaagccaagagttagacaacttctgttccaagataaagggggaaaagatagagaaaaaaaaaatgcaagtgagtctcaaggggttttggtttcttcttcattttgtgatcgagcattgtattgtctctaaccccatgaggaatgttgatgatggtgtaaagtttccttggctcgtgtgggaataaaaaaaaaactcaaaagagactttgcttcttcggttttctagctttcactttttaccattatggaaaatgttaagttaactagctagctatagggaccttgctctcggttagaactgtaataattcatggtcataacattttgaaattttgtaacgctcatcagttttgaaagccaaattgaatggctgttaatggatgataatggccaataatgaattgtaacagccaataatgagtggtaatggctggtaaatgcattcttgatggtagaatgcctatataagcacatgaatttggtccctgagctcatcccttcgaattcagtcttatacaccatctagagagtggaagagagagagcttggaagaaccaaaacaagaaactcttcatagcaatggctggaggtatgttttgatctgtaatttccgcattttgttaataacctgtgtttcttttgtagtttgtaatatcacaggttaaaatagatttgttctaacatttggtatcagagcaagaattgcctctgccttgtccattttcgattttcggtattttccgatttgatttcgtttatggtatgaagggccttgtttcttaaaaataaaattagaaatctgtatttcatttgatttccttaattttggcttttgaatcgtgaaaaatggtgtccaaatgaatgaaaaacgaacgggtctgcgtatgggtcgggtttgacccgctaaaggttgaagatgatggcccatattaggtttgaagccattattttgttaatatatatattaggctgctactaacaagctttggctcacgggtaagctgggctagctatgggggaattcaagcactttgtaattgttaagttcaaggaaggtgtggccgttgacgagctcacaaaagggatggaaaagttggtcacggagattggtgctgtcaagtcctttgaatggggacaagacattgaaagcctagatgtgttgagacaaggtttcactcatgcattcttgatgacattcaacaagaaagaagactttgttgcatttcagagccacccaaatcatgtcgagttctcgacaaaattttcggcagctattgagaatattgtgctgctggatttcccgtctactcttgtcaaggccccagcatgatcctaaagatattccaccaataaaaattccttctttaaatttgtttagtgtatgcttttgcttgtgttttctgtctgcagttttgttatgagtggttacaacccctctcgtgcaatttgaattcttagtatggattatgagtgttat

SEQ ID NO: 10457 - DNA, 143 bp, Glycine max
  Clone ID: PAT_MRT3847_109453C.1
gtcattcagacttgaaataattcccgaacattgcttgcacggaaacgactctcctccatccttcggcttcatgaaccattgacgtacatcaaggacagtatccagtatccagtgtgaaattatcatacactgagaattctaca

SEQ ID NO: 10458 - DNA, 512 bp, Glycine max
  Clone ID: PAT_MRT3847_109454C.1
tatgaaatcgctgagagcactgacaaggccgatatcactgttgatgcaaggagttttagttgggcagtggacagtgcgataaagagtgagactgcgtcattttggtaagtctgaatttgccatcttttcccgtttagaccataggaacttggttgggctggttgggtactgtgaaaacagagatgaaaggctgtcagtttacgagtatatgaagaatgggttgttgcgtgattgcttgcatgataagaacaatgtggacaaggatagcagtgtgttgaattcgtggaaaatgaggatcaagattgcttgggatgcttccttgggaatacaatatctgcataattatgcaaatccatctattattcacagggatatcaagtcttccaatattcttcttgatgccagttggacggctagagtatttgattttgaattgtcgttcatatgtccagaacctgacgatgaatacgatgagattataatgggaaccatgggatacatgtgccctgagt

SEQ ID NO: 10459 - DNA, 1590 bp, Glycine max
  Clone ID: PAT_MRT3847_109455C.1
tttgctcgtgaatggattctgaaatcgttgagagcactgacatggccgatatcactgttgatgcaaagagttttagttgggcagtggacagtgcgataaagagtgagactgcgtcaatttcgggagaatcccgaatccatagtttttgttccgtagtggacaatgccataaggagtaggactgcatcagatttgggaacatctccttctcctgtccatagtcttgcttcggcagtggccaatgcaatgagcagcagtagtgctgcaccattttcacaactggaagtggtgcccaacgccactggacttgttcctgcacgattattcacctggtctgagcttaaagaagccacctacaatttttcacctcacaaccggattcgtcattttggaacctttggctttgtgtacagaggcaaactcgttgatggtcgtgaggtcgcaatcgttaagggaacccagtttggtaagtctgaatttgccatcttttcccgtttagaccataggaacttggttgggcttgttgggcactgtgaaaacagagatgaaaggctgtcagtgtatgagtatatgaagaatgggtagctgccatgattgcttgcaagataagaacaatgtggacaaggatagcagtgtgttgaattcgtggaaaatgaggatcaagattgcttgggatgcttatttgggaatacaatatctgcataattatgcaaatccatctattattcacagggatatcaagtcttccaatattcttcttgatgccagttggacggctagagtatttgattttgaattgtcgttcatatgtccagaacctgacgatgaatacgatgagattataatgggaaccatgggatacatgtgccctgagtacatgactcgaggtgtgttgacagcaaagtgtgatgtgtacgggcttggagttgtattgcttgaacttttaacgggtaagagagctatactactcgagtctgaggaagatggacctccattttatttggtggactttgcagtgccttctattttggctggagatttggtcgaaattttggattcaagggttggaccacccgatttgaaagaagcagaggcactgaagatcctggcccatacagctatacgttgtgtggaagaggaaccgaggcaaagaccaaccatgaatgacattgtggtcgatttggatcgggcttttgctatttgtggtagtagcctatatgatgagaacttttcctattccattgcattaccatcacatgagtccaatcatatgactccggatcctcttgatacggactcatgtgatattccaatctacgaagagaatacgaactcatgatatttcaataaacgaagaggatgcggactcatgtgataacgtttcccacggtactatctcggacttggatgtttcagactattaagaaaatcaataataagaatctctcatattaacagaagttgttcagcaacactacatgaccgtgattgttccactgtttccagccgttgtcacccaaagttcacttggatggattttctatttttatgtaatacttgacttataagaaagcatgttatatgtgaaaaa

SEQ ID NO: 10460 - DNA, 279 bp, Glycine max
  Clone ID: PAT_MRT3847_109456C.1
gacttccaggatttcaatgtggaagctctagagaaatttgttgaggaatctagtacccctgttgttactgtctttaacaatgatccgagctgttcctcacatgggatatagacacaaagttacatgtgggctgcacacccttttgtatctcgttatcagaatttagtgaaccttaggtgctacctatcttcctttgatcttcttttcttttcggttttcttttatgtatggtttacttaataaaaacgggagcttttgcttggtgtagtagagtttagt

SEQ ID NO: 10461 - DNA, 697 bp, Glycine max
  Clone ID: PAT_MRT3847_109457C.1
cggattcggctcgaggcaaattaagcaatttacaaaccctagttctcgtatatattcttcttctttgcatcaatcctttgtctcaaattaaaatcatgggaattgtcactactgaatgcgagcaagtttgtgccgtggctcctgcaaggctatacaaagccatggccttcgattttaacaatgttatgccaaaagctatcccaaattttgttaagagtgctgaaatcattggagacggagggccgggatctattaagaagctcgttcttgttaacggatatgtgaatcaaaaggtggatgtggtggacgaagaaaattatgtgtaccactacacggtagatgaaggcagtgttttatcagatctattggagaaggtgtgttatgagtataaattggtggcaagtcttgatggaggaggatgcatcatcaaatctacagtcaaatattacaccaaagacgatacacaactctcagaagagtttttgaaggataacaaggaaaaatctgctgcgttcaccaaggctgttgtggattatcttctagctaatcccaattacaactaaaacatgttgattgtggtgcttacgttatgtgttctctcagttgtcatgcatgtagcttcaattactagtagctatttgtgtgtatacatcataatgaataatatcgatcaagacgcttatttgtgacatgataa

SEQ ID NO: 10462 - DNA, 2503 bp, Glycine max
  unsure (1)..(2503): unsure at all n locations
  Clone ID: PAT_MRT3847_109458C.1
tacggctgcgaaagacgacagaagggggaggagaggcggagacgaagaagtgaagagaagagaagagaagggatttggatctgaaaagagaagatggggggaggaatggaagcaaacaagaacaagttcatagaggattggggcactgccagagagaatctggagttcaatttccgttggactcgccgcaaccttgctcttgttggcatcttcggcatcgctattcccgtcctcgtctacaagggcatcgtccgtgaattccatatgcaagatgaagataatggtcggccgtacaggaagttcatgtgagagagtatggagagtcttttgtaataattcgtcaagttagaccttgatattatgaggctacaaaccatgtttttttttccttaattcgcaaaggcttgcttgcttttaagtactctagacctatcaaacctctccatgtttgcctgtcttcattcaaatttctgttatgctgtcaacttgttaccaccgtggttcaattaataatatttgtgcaaaaacatgttagtattatgtaaaaaaaaaaaaaaaaaactcgctcgtgccgaattcggctcgagtttcagaggaacaatggcgggtagggtttcgacgtgcttcttcttcgtgtttgctctttctctccttcttccttttcagatctccgctgaggaatcatcggagaaagagttcgtactcacattgtagatgccatgaggnaagaaaaaggatcactctaactttcacgacactgtcagcaagcacgatttcatcgtcgtcgagttctacgccccatggtgtggtcactgtaagaagcttgctccggagtatgagaaagctgcttctatcttgagtagtcatgatcctcctattgttttggctaaagtagatgccaatgaggagaagaacaaagaccttgcatcacaatatgatgttaagggattcccaacaattaatattctgagaaatgggggaaagaatgttcaggaatacaaaggtccccgtgaagcagatggcatcgttgactatttgaagaaacaaagtggtcctgcttcaactgaaattaaatctgctgatgaagctactgcttttattggtgaaaataaagttgctattgttggagttttcccgaaattttctggagaggagtttgacaacttttctgccttagcagagaagttgcgttctgattatgactttggtcacactctgaatgccaaactccttccaagaggagagtcatcagtttctgggcccgtagttaggctgttcaagccattcgatgaactttttgttgacttccaggatttcaatgtggaagctctagagaagtttgttgaggaatctagtacccctgttgttactgtctttaacaatgaaccgagcaatcaccctttcgttgtcaaattcttcaacagtcccaacgcaaaggcaatgttgttcatcaacttcactgccgaaggtgctgaagctatcaaatcaaaataccgtgaagctgctgagcaatataaacaacagggtgtcagctttttggtgggagatgttgagtctagtcaaggtgctttccagtattttggactgaaagaagagcaagtacctctaattatcattcaacataatgatgggaaaaagttttttaaacccaatttggaagctgatcacattccaacctggttgaaggcatacaaggatggtcatgttgcaccatttgttaagtctgaacccattcccgagactaacgatgaacctgttaaagtggtagttggggccagtcttgaggacattgttttcaaatctgggaagaatggtatgtactttacttctttttttatttggttttattccatggatatcagatagattttggcattcactgtgctctaacaaaaaatatcacattattggttgcaaactatatgaaggaacaaacgtgtttttaatgaaaagttatgtgatatccttctgatactctgttatgtatctgtgattatatccttcagacatcatttgtgttaattagtgatttgcctttatcattccactattataactgctaacccaaacaccttacagttctgctggagttttatgctccctggtgtggtcattgcaaacagttggctccaatattggacgaagttgctatctcatatcaaagtgatgctgatgttgttattgcaaaactggtaagaaatgcatctagtattcagcttcgattatatttgtttcaatcgatgcttcaagaagtatagccttgacagctgaaactgaaagctgtggtaaaaaagctgggagtgtatctgtgcagttaggaaatgcgttttaatgaaattatagtcctaggtttttttgtttgctaattatattctgcatgtcttatgtcactttccaggatgcaactgccaacgatatcccaagtgaaacctttgacgtccaaggttatccaaccgtgtacttcaggtcagcaagtggaaagttatcacaatacgaagggggt

SEQ ID NO: 10463 - DNA, 503 bp, Glycine max
  Clone ID: PAT_MRT3847_109459C.1
attttctgtttttttttaggtaaagactgacactgttgcatggactttgtatggcagtggacttcatgcaaaaagattagttatatctgtccttatggaacaaagttttctaaaagttgacaagaatgacaagcttcaaatgcatgatttgctgcattggccatacaaactctgtagttggttgaaaaacctaatcagaagctctacccacacttttatggccatgataagatgctggaggcaaggttgcatacaggttggaattgcctgaagacagttagttcactctatttttcatatctccttgctgaagaaagtggctactgctcaacaacaggcacaaccactgtcccttgcattgtcagatgcacacaaacagtagtacagtacttttaccacatgagggatgcaagattgcatttggggagatattatcttatggtccggaaacatacgtgttcattgttcccgtcaatgaacatgtatcatgtaattgagttttt

SEQ ID NO: 10464 - DNA, 1008 bp, Glycine max
  unsure (1)..(1008): unsure at all n locations
  Clone ID: PAT_MRT3847_10945C.1
atcagctccaggatttttacctaccatggagccatgtatatatatatatatatattctctatttgccctttgataaatcgtgtgacataatttatgaagacggtgattgcagtgaaattaaatttatattaaaaaggtattgttgctattcagtattcattggaaatagtgaggtgtgggtgtcgtttggtatgtaagcaagttgctgaagatatttattgaaatagtgtctaggttttatccttgtacttgtagttttggatacagttggtgcttgaaactatgtatgtcttggtattccaacactagtatcatttgttgtagggaagtctgtttattgattagtctgatattatttaattttagttgtgacatctgtgaactattttcctctataacaaaatctgcccaggtggtctgtccctccaaaatatgtagtcccacctgagatgcaccaacatgaagttgaatgctgcttgtttagacctaatggttgaacacaaacttgtcggacagaatgtgcttgtatgttggctgtggtgatcaacataaatattggttttcaaccacttgcttgaacgtcattttccaacccctcgctcgacagccactctgaactacacttaagatgcagttactcttaccggtttcccgctctccgtggcgtttttccctgctctttacgtaagacaggaggggcacagcttgctactgttgcctcaagttcgtgccttcgtgtatcctgttcctggaactgagttggtgcgtccccggggggggtttgcgactcctttctccagaactcggttcctccaaatgttacttcttcatatttcgtttattgtatattaagcattatagattaccaacttgtagaaataaagccagcagtttaaactaagctgaaaggaactggataacgccactcaggatctgcagtttaagatgcaacacttgtttanacaagattaacctacccttcatgcgaaagctctgaggatcttcaca

SEQ ID NO: 10465 - DNA, 194 bp, Glycine max
  Clone ID: PAT_MRT3847_109460C.1
gcttttcttgggaacatggcggatggggaaactgactgtccattattaaacttccccacggattgacataatgccgcttcacatacggggaggagcacaggcgaagaacgctctgatcacaactctgcggggcgctgttcacccagtgaggagaaatgtccatggagatcacgccgaataacctgataagatga

SEQ ID NO: 10466 - DNA, 385 bp, Glycine max
  Clone ID: PAT_MRT3847_109461C.1
tggaatttttggcatttgtgatgggcatggtggagatggggctgccaaatctgctagcaagttagtattttctgccttaggttactttatgttaatgcttgccaattctatacttccttttgttggtgactgtcgacagtgaacttgatgaatagaaataatttaaattatttaatattcatatgtttttttatggttgcaaaggtagatatccaaaatccattaatgtgcatgttagtattatcatactttcttacaggacttttttttggtgagggaaatttggacttatagtataaggaaaaaattactaaaagatattccataataattaatcagaattgcaacaacattctgtgcatattttagttatttatccatggtt

SEQ ID NO: 10467 - DNA, 485 bp, Glycine max
  Clone ID: PAT_MRT3847_109462C.1
ggctcgaggtttggcccagctgcctgcatgacattagagttagccgaatttgggaagccatttatcatttccattataaatggttatgacatagtgcctacattgtcagcttcttctgttcatgatttcgtttctgagggtcgcgatcggaataatgatcaaatcattccaattgccaaagccattgcaaaacatgcagtaacccactgcaccgagggtgtgaagaagtaccaacacagaactcacgcgttgcttccatggcaccgacgtgagaataaattagataacatggctgaattagcttctggatcatctcatgagacaaattttgaatctctcttgactgaagagcaattaatcatggagtctatgtcagatgatgaggaatataattcttctagtgaaggatctgatgttgatgacgacgaagatcaattgtggaatcaagtggggaagcttaaactaggaaaagaagcagccacaac

SEQ ID NO: 10468 - DNA, 434 bp, Glycine max
  Clone ID: PAT_MRT3847_109463C.1
tttgggggtattatttaaatgtttctccgtatgaccccaaaaaaatcacggaggccggatggccatattacatggccctagaaatataatgttggcgccagcaacgggggagtaaacttccaagcacagtaaatcatatagttatcataaacaccaaaataatacttaagaaagggaaaatggcccaactagaccaggtacaatgcaagaaaaaaaataatatgtgaaattcaaatgttctgtcccaaattgaacaaccttacttgctgctgctagatgccatgccagttctcttgacaatagccacaggccaagaggctaggggcatcacaaagttgcttacacttcccaatataattcattggattgagctgaggcctctttgtttccataaccaggggattcaactttaaatttttaattgcattcaaaag

SEQ ID NO: 10469 - DNA, 541 bp, Glycine max
  Clone ID: PAT_MRT3847_109464C.1
cagtgaagagcctcaagacattgctccaatcaagttcatggaaagaaacagaccttttatcactcataccagctgcaacagtggcttcactactgattgatatagtcgaattcacggaaaaaatagcagattcagttaataatcttgcaaccctcacacattttgaagttgtagatacagataaatcctcaacaaaagcgcaacaaccatcacaatcatctccacactgtgaatgtgttgaaccgggtcccaagactgatagcctccaactcgttattctaattgaggactcagcgctagctgtgtcagatagtgaaaaatcgaacagagtttgacaattgatagacgtaaaggattgtaataatattatatatcattgctaacaaaaaaataatattgtattacaccatattattgagtattcggaaggcatacccttatgttgtctagaccgtgaggggtatcataagtacattaataatgtcaaatttgtatttctgagtcaatttcaattgattagtgaggatcatttgtcatttta

SEQ ID NO: 10470 - DNA, 285 bp, Glycine max
  Clone ID: PAT_MRT3847_109465C.1
aagtttataagaacatcttgagcctaaaagctgctattttttttccaactctccagtagccatcttacgcagagaatcaatacaatttggggggggtagatttttaaacatcctcaactctacggtctctattatgtcattagaattttatcaacaagaaaatttgtccactattgaccttagacaacatgccaaaatgaccttatctgcattagaaaagccaaaacgtgtcaatattgatataaaatccatggaatttgattatgttcatcataccgaaaagct

SEQ ID NO: 10471 - DNA, 287 bp, Glycine max
  Clone ID: PAT_MRT3847_109466C.1
gcaccacatacacctgaggcctcctaagcaatggcttcccttgcagcatccactgctgctgcatcccttggcatggcagacaagcgtggacagcccatcaacttcagtggtgccacaaggcgagctccatctgcttctagtcctggctccttcaagactgtggctccggtctccaaaaagaaggctacaccagcacctccaaagaaagctgctgctgctgcgcctgccaatgatgagcttgccaagtggtatggtcctgacagaaggatcgtcttagcagacggtct

SEQ ID NO: 10472 - DNA, 500 bp, Glycine max
  Clone ID: PAT_MRT3847_109467C.1
gagagagaggactgaagttctagccagccaggtctcaatacattgtgttcagtgttttctgttcctttttctttctgcttcatcatcttcatggatccacagtaattcaccacaaatcttgctttcttcctcttcagcatctcctatttaattaacttcctgatggaaaactttcagaatttgattttgagactcaagtttcagtttctaaagagctcctttctcttcttattcttctgaagaactggtgcttgttttatgtttatgtcctagttgttaaattgataaatttctccccctagaaggtttagtttctgggtcttattcttctcattttttccaagcagaaaaaaagtcctttccttttctctttctttgcttttgaaatctgggtgttgttgtgaagagttgttattagtagtgctactgctgcaacatggcagtgatggatctttttcaaaacccatcttctctcaaatcaaacaaatttgaaacatccg

SEQ ID NO: 10473 - DNA, 249 bp, Glycine max
  Clone ID: PAT_MRT3847_109468C.1
ctcgattctgttcaaccatgcgttggtatttggagtgataactgttcatcaaggtctcgcataagatggacgttcattctggcaggatctcgaatgatatatctggctgtgatattaatcggatgttctgctgagaatggatatgtattacgtgatacacatgagtgttactgagcatttaaagggttccgaacaagggctgctcgtgtatgtatacttgggttctctatgcatgaccttgctaacaac

SEQ ID NO: 10474 - DNA, 219 bp, Glycine max
  Clone ID: PAT_MRT3847_109469C.1
aacgctttctcatccgctcacgcgtacgcccaagcgtccgaagaggcgtggatggagacattgatgggatggaaagccatcaaatggcaaataaaagctaccttcttgcaaagaaaagaaaaaaacagagcggaagaaggaagaataaaccaacaaataaagaaaaaacggccataccagaaaaacagaagcagaaaccaccatgaatggcaatagtgg

SEQ ID NO: 10475 - DNA, 2657 bp, Glycine max
  Clone ID: PAT_MRT3847_10946C.1
tttggctcttacttttgtccaactttttgaaagtttttatactttgaagttccattaagaaatatgtaaattgagaatcccattaaggaattcctcactctcttgctaataataatataaagtgtttaatgtaaaaagcatgttaaagagttttccattctcgatcaatcagaatttataataggtaagaattgtaaggtactagtagttcttattcttataggaagttaacaacttaccatatatgacaattgtaaatgcatatactattttctctaatgtaaatgtggtaaaaacattatagctgcatgatggcttctatttctttgtctacatcttttcaaaccttacaatgactttttttttttgttgaaattctacagtacactaaacttgtacctgtttcccttttccttgtctaaaaattccttggtcaaatttggcaactttcgtttttccaatgtgtccatgtgatttagaagaataatagcactcctagatgggcttgtctgatactgtgctaaactttgacatgtgatctctccacacccctctcatggcatcttcttctggtagtttagacacctctgcaagtgcaaactccttcaccaacttcaccttctccacacaccctttcatgaccacttctttctctgaccttcttgcttctcccacagacaacaacaaaccaccacatggtggtggtggtggtttgtctgagagaactggctctggtgtccccaaattcaagtccacaccaccaccttctctgcctctctctccccctcccatttctccttcttcctacttttctattcctcctggtttgagccctgctgagcttcttgactcacctgttctccttaactcttccaacattctgccatctccaacaactggagcatttgttgctcggagcttcaattggaagagcagttccggggggaaccagcgaattgtcaaagaagaagacaaaggcttctcaaatttctcttttcaaacccaataaggacctcctgcttcatccacagcaacatatcagtcttcaaatgtcacagttcaaacacaacagccatggagttatcaggagaccacaaagcaggataatttttcttcaggaaagagcatgatgaaaactgaaaaatcttcatccatgcaaagtttttcccctgagattgctagtgtccaaaataatcatagcaatgggtttcaatcggattatggcaattaccccccacaatctcagaccttaagcagaaggtcagatgatgggtacaattggaggaaatatggccaaaaacaagtgaagggaagtgaaaatccaagaagttattacaaatgcacataccccaaatgccctacaaagaagaaggtggagatctttagatggacaacatactgctatcgtttgtaaggttactcataaccatcctaaacctcaaaatactaggaaaaactcatcaaattcctcttctcttgcaatccctcaatcaaatcccattatagctgaaatccctgctcatccctaggccacacacaagtgcacacaaatggattctgccagcgagccagcaaactcatcaatatcaataggagatgatgattttgagcagagttctcaaaagtgtaaatcaggaggggatgaatatgatgaagatgaacctgatgccaaaagatggaaaattgaaggtgaaaatgagggtatgtctgcccctggaagtagaacagtaagagaacctagagttgtagttcagacaaccagtgacattgatatcctagatgatgggtataggtggagaaaatacgggcagaaagtagtgaagggcaatccaaatccaaggagttactacaagtgtacacacccaggatgtccagtgaggaagcatgtggaaagagcttcacatgacctaagggctgtgatcacaacctatgaggggaagcacaaccatgatgttcctgcagctcgtggcagtggcagccattctgttaacagaccaatgccaaacaatgcttcaaaccctaccaacactgcagccactgccataagtcccttgcaagtgatccaacacagtgacaattcccatcagaaccaaagatctcaagcaccaccagaggggcaatcacccttcaccctagagatgctacaaagtccaggaagttttggattctcagggtttgggaatccaatgcaatcttacatgaatcagcagcaacaacaactatctgacaatgttttctcttccagagccaaggaggagcctagagatgacatgttccttgagtctctactatgctgaaggaatttctttttggtagctatggaaggttggaaattttggaagggggggactaggatttattggacaaataaggttcattccatttattgcattttttggtttgtttttgttgtaaattttatacagccacacaggattggtatagtatatatttcataactgttgtatgtttttacacatggtgttggtgaaattttttgattactttggggtttctcttttagttgggaggagaaccttatgttaatcttttgtaagattctgttaattttttcctgtcttcacaattgttcactatcaaaatagtaaagtttcacaagaaatgtgaattatttttgctaaaaatgataaaaaaaa

SEQ ID NO: 10476 - DNA, 249 bp, Glycine max
  Clone ID: PAT_MRT3847_109470C.1
atcttttacacgacttcttgagtataaaaaatactctttgaatgaagagacggcctcctgagtatgttactgacacgtcctcaggaggccgtctcttcattcaaagagtatcttttacacgacttcttgagtataaaaacactcatttgtacaatcctacctgtctattgaattgtctttagaaaaaaaaaaaaaggggggggccgccgattattgacctcgtcaccccgggatttatttcgggccggg

SEQ ID NO: 10477 - DNA, 751 bp, Glycine max
  Clone ID: PAT_MRT3847_109471C.1
ctttttacggctgcgagaagacgacagaaggggatcaacacataaatttttcacctcttcacatctcaaagattctgtagcaccctcaaaaagatcgaaaatgacaccatcattttcaacaccaatgaaatccgtgttcctctcaatggttatgatattgatatccatcatcatttatcaaggtaatgctcaattacctcaacctatgcctaatcaaacaaccatggtgttctacctacaagacatagcaaaagggtctagtgccacagttaccccagtggctggcatcaagggaagcgattggacctacaccacatttggatccatatttgtggtggatgaccctgtcacgctgagcataagcccaacctccgagatggtgggccgggcccaaggcctgctaatagcctcggcccatgatggggctaatgtgaatgttgccctttcaattgtgttcaacaatttgcagtacagtggaagcaccttggagctccaaggcattagccgtcagcgtgagagttataaaaaggtttctgttgtgtctggcactggcaagttccgctttgcaaggggctatgctttgttgcaaactgtgctttatgatgccccaacttcacgctccataattcgcatcactattactattcaaactaattgagaaaattaagtcatgtagtatgcggataatggttggttgtatcagaataatgtgttaagccagctattttgatctttgagtttcatctctttt

SEQ ID NO: 10478 - DNA, 469 bp, Glycine max
  Clone ID: PAT_MRT3847_109472C.1
gtcgacccacgcgtccgcacaactctaatctagattcttcttgatcttgaatttcaatggcttcgctcgtgcttctcttttcagaactcgttcacaatcacgagtgggatgctgaagctctcttagcagcatacccttcttctaattttaccataacctcatcatcttgtgctgttgctgcgaaaaaaacattaaaagatgaaggtttcatgcagaagaacacccagaaaaccgaagatatagtggtggaaaatccattagagtcgagggtgtgtgtggatctcgtttggccttgaatctttggttactctcatgtctacattgtaaatattgtaacttctttttgttagaaaactgatttgctgtgttattgtaaatttttattggtctttacattacattataccttttaatttttctttgtaattttgttcgcctttattagatgatgaaagttgaactcgtccca

SEQ ID NO: 10479 - DNA, 521 bp, Glycine max
  Clone ID: PAT_MRT3847_109473C.1
gttgtttgtctttgtttttttctcttttttttttccgaccccttgcaaaatactatattgaaaaaaaagcggtggggggaaagggtggcacttggaaggggcccatatttgaagtatcttcgaaccactttcttgaaatggtgccttaaattattgaagccgttcaaattccccctaattggaaagagggctggagagcgtttcaaagatgctagggggggttcaaaacggagagcacctaagggctctcattggggaaaaaaataagtttttgggtgctatctgcaccccttaaaaacaattttactcccctggcccccactccctttaaggaaagggttttgggggtcccaaaaatgaagtacctatagactctggcccggggtgttccaaggataacaaaaccgtttggaaacttataactggcgaggacaaaaaaaaccctgagggcgagggctttccatgcatggacagggattcctcgccttcttaaaggccccctcgcgggcaaaagaagacag

SEQ ID NO: 10480 - DNA, 432 bp, Glycine max
  Clone ID: PAT_MRT3847_109474C.1
ggaacaaagtcatcaattatcatcatattagtaataaagtgaaatggttcccgctcaagatagcatggtaatttaaaaattaaacagaatagcttctagcatggtaattttttttcagtttttgtcaaacttttcaggttctagctagacctactgaattcataggtgaagaacttgacactattgtggtcattgattctgtccgaatagacaaattagtaatgtttgatatttttgcagatgctagttgttgaaccctacgcattgtctcattgtttttgccccacaaaaaggagtataatcccaccatgatcaaaaccatgtctagcaacgttccaacggttaatggttccccaagtatgatagcttctgaaaaggccacaaaaataagagccaggggattgaacattgggggataactaggtcctttga

SEQ ID NO: 10481 - DNA, 794 bp, Glycine max
  Clone ID: PAT_MRT3847_109475C.1
gcctgaacctgttaggaacaacccacctcacggtactcggcgctaccaggatcagatggtcccaagtattacttcttcccatgtgagagtggaagaggaagaaacatcttcagaccttcgaaactcggctgcagacagcagagccgaagtgcctataaatgtaaccacacaacaaaatgcaagagagacagtgaatcaaggggtgttactgaatacaaatagaaacactcgagtacagaataatcctacaacgtggctgagaaatgcagctgaagattccacagcagaatcttcaagtagtactaggagagaaagggatgggggtgtagttccagtatggtcccccccagcttctaatttctcagaacaatttgtagatgatgaaaatggtataggaaccggttcatcttacttgcaaaggcagcatcctcagtctcatcaattgatgaactggacacggctacctcagactgggtgagatttcccaaagcactgaaaagattaatatgtactttgtgctcatgctagtcaatttcattacaaatttactaggtcattctccaaccatttgaagatttttgaaacatagtatggctagcctgcttctgttcattaggcttctttaagacctataaaacactttccgtgtgcctgcttttttggtttttttcactcttctggttctcttcacaataattagataagttgtagaattttgttacatctacaaccactcatgctcatttgtaaaacatcgatcctgtcttttgatttaagatttatgttttaacttc

SEQ ID NO: 10482 - DNA, 1068 bp, Glycine max
  Clone ID: PAT_MRT3847_109476C.1
atagaaggagtatacccaagcaagacggccaggatatcttttgattttgatagaaaatcaacaccatcgtggaagaagcacaagtctgcagaaaaaatcaaaaagttaaagcaccaagtatagttgacaaagaatgcattatgcaaaatatagtctttgtcattggaagaaatggtcgtctatatccgtagaacgaaatgactgatctgtgggatgagcattaccaatctcaacatttgggtctatccaagtttctcgggaacatcatactttgacatagattacacttgcgcggctagatgtataaggtgaaaaattcatgtctttattctttcctactgcaaccggcactgtatttgagtatcaaattacaacatggtaacaacctataaagatgtaaaactggttagttcacctgggcatagctttgcaggcattccatgacatttaaatggttcagatggaaaagtatacctatgatacctagacaaagttgcatggacgtggaaggattgtagtttcccctctatgggaaataaaattgttgaaacacatagtggaggaatcaatgaggagaaaccagttcggatcgatgaaaattgtgcatctggcttaagtaaggaccaagataaccttgctgaccttaacttaaattgtgaaccaaaggtggcatccacaagaccaattccattttctgaaggttctgtcatatttgagctcagagatggcaggttggcagaattacaacttgtagaggagacagaatgggcttggtcacggatcattggcacaccaaacagtttatgcttggaaaattattggattgcactagcatcgtcataacattgtctgcaatctctcacatgccagaagcacttgatgtacagacacacattctagttaataacttacctcttccagaggctgaaataggtattagtgttcagctaaaatgcccggggagatgagccgtctgtaacaaacatgtaaaaaaatacaaaaatcaaatagataatatataaattgcatgtttagattaatttgttttagagaaataattatgttttt

SEQ ID NO: 10483 - DNA, 238 bp, Glycine max
  Clone ID: PAT_MRT3847_109477C.1
acactagagacacaggcttggcaggttcactgctggttgggacaatgttcagtgctgcaaccctgactcttatgaagtgacggtgttaatcatacaaaagcctgtggtctcatctgtacgaatgtgtggatggtatggttccattaacaattccagactcttcattcatgatcttcacacagggagcaagacagattgtgacgcaagaagcgtcgctcaagatgatagagaactgatg

SEQ ID NO: 10484 - DNA, 339 bp, Glycine max
  Clone ID: PAT_MRT3847_109478C.1
ccagatatatccataataatagcaccgttccgcattgacacgtttctttgctgtacaaacttttcttcattaataccctttttttgcaacctattgaaatagattcggctcaaaaacgactttccggtttcgggctttactgtttgaactacccctacccacagctgaaagtggggctcctatttatgctatcgactgttgagagctggaaattccctgatatgtcgtattgggatattcattgagttgagtctattgaagtgcagctagttgggttatcatgccagccttcgcattaattggtgaaaaaattgggtcaaaataattgagttgaccggc

SEQ ID NO: 10485 - DNA, 585 bp, Glycine max
  unsure (1)..(585): unsure at all n locations
  Clone ID: PAT_MRT3847_109479C.1
cacgcgtccgctaccgagcactcccatactactcgatgtgtgacttaggaaccctactaatacccaagtccctactcaaattctgcgcagttccgtctactttaagtggttacttcctgtatttcttttactactactttactattgtcatgaaatgcgttcactggactggagtttccaatatatctttagttttcatttactgttacaaacataatattacaatgttcgtacttatagtttcctctgtgtgggtgaagcctcaagtcattttctgttaagttgggatccttttggagaacttttggtcactgatttttcagtttggaaaggaaacatcaatcttttcatgtataatttatatatttcaatagnggtcagtaacattaaacgcactaacttttaagttggtttttacattagaatacncctttctccttttctcatatattcgatagaaacgaatgtttgataaatatgggtttaagaaaacattacaaactgatacaagcacttgaaatggacaaaagttaaaatttcttgttagggttaaaaagggttnctagtccatcaaaaaatttcaac

SEQ ID NO: 10486 - DNA, 585 bp, Glycine max
  Clone ID: PAT_MRT3847_10947C.1
tttgtctacatcttttcaaaccttacaatgactttttttggttgaaattctacagtacactaacttgtacctgtttcccttttccttgtccaaaaattccttggtcaaatttggcaactttcgtttttccaatgtgtccatgtgatttagaagaataatagcactcctagatgggcttgtctcgtgctgtgctaaacttgtgacatgtaggagttactacaagtgtacacacccaggatgtccagtgaggaagcatgtggaaagagcttcacatgacctaagggctgtgatcacaacctatgaggggaagcacaaccatgatgttcctgcagctcgtggcagtggcagccattctgttaacagaccaatgccaaacaatgcttcaaaccctaccaacactgcagccactgccataagtcccttgcaagtgatccaacacagtgacaattcccatcagaaccaaagatctcaagcaccaccagaggggcaatcacccttcaccctagagatgctacaaagtccaggaagttttggattctcagggtttgggaatccaatgcaatcttacatgaatcagcagcaaca

SEQ ID NO: 10487 - DNA, 696 bp, Glycine max
  unsure (1)..(696): unsure at all n locations
  Clone ID: PAT_MRT3847_109480C.1
cgcacatcgtcgtctcctctgtcggcgacaaagccggcgcgacaaggccagtactccacctccattctctttagcgaatgcactttatccgccatggtcgatctgccttgcagatccacactgttaccatcctactaaaggaacctgaagcaaacacgtcaaagccctgccgggaatttgtggagcttaaatttattcaggccattgctgaaaacacgtagatatcctgtggagatacggatgctaactttgatttgtcatggaggctgcttgggaacttacttcatgatgtttctagagggagaactacaacggccaaagcagatatctgaattattcttagatgtcagaggtctgagctcagatgactcaaaatgcattaccaatattttggaggagttatatcttcgtagttatctttacacaatgagaatgaaacaagtttacaaatttccttgtgtggggagcatgtagataataggtggtcccttttgatgtagtggaaactggaacactcattacacaatcagagatcaactgttacatctaggcataaaggacgcaacatatcagcttcttgttaagtcgttacattttcctcttatacgtattatatttgtaatggatttagataaaacgctatgcgttgaaaaattatttaccttcagatcnaaaaaattagaaacctcttaactt

SEQ ID NO: 10488 - DNA, 417 bp, Glycine max
  Clone ID: PAT_MRT3847_109481C.1
ggctgcaagaatatgacgagagctataaactatgtgatcgtgaggagaatatgaaaagctatgttttctttgttgctacaagaattttggtagcatggccatgccatggctcatgctaccaaaaggtccctctccgtatgaaaactggctatggtgagcgttcttcatgaagtaaaatgcgcaagttttatgcttgctgcggaagcacacaacattcgagcctttataaccattcctgaagaatgcgttgaaccaacaaaagactacattaatggcgaacaatttaaatcatactctttaacagctaaccaacaagatttcttttatgctaatgaacgcgacatccatcacaacatcctatttatattcggaataaataacaccgcactttctaatattctatactatgaaaaacat

SEQ ID NO: 10489 - DNA, 701 bp, Glycine max
  Clone ID: PAT_MRT3847_109482C.1
gattatgaatattttttatcagtgtagaaatgaatatattaaagatcattcagaagaaaaaattataaaaatggcgtaaggcaacttgaacgtaacggagcgtaggctacataaataatgctacgaatcatattccggttctagcacaactctttattatcaatacaatacaacagtaagttgcaaaatcgttcccattggatgcttctgctatgttgcatacgatgcgtatgagtagcgtgtctttatttacctctctctttttatgttgtggttggtgatggggggagactctcaattttcacaacgttttctgagaagtatcagttcttgagagctcactgtacatatcagatattgcttttgcgaaatattccttcgcttgaggcctcttaaccttgaatgtcggagtcaacaggccattttccaacgtaaatggttcgagcaccaaagtgaccgcttttacgaattcaaaacctctcagctgagcctctcgtccggcagcatccatctcagccaagacagctgcccttgcttttggatcattgcaaagttgtgctaaatcattatacattattccttctgaagcagcccatgctttcaagttatcatgatccacagagacaacagctaccaaagaagcatttaggctatcaccatatacaaagcattgcgccacaaatttgcatttggcatatacg

SEQ ID NO: 10490 - DNA, 2211 bp, Glycine max
  Clone ID: PAT_MRT3847_109483C.1
cactcagacggaagactcggctcgagcatattcaaagctacttaatcagggacgtagcaaccttcagcccttttgtccaccaaaacctgatgacattgcaaccatttgctacacaagtggtacaactggaaccccaaaaggtgctatcttgacccatggaaactttattgcaagtgttgctgggagtactatggacgagaaattcggtccttctgatgtttatatatcctatctccctttggcacacatttatgagcgagcaaaccaggtcatgacagtacattttggcattgcagtgggattctaccagggggatagtatgaaattaatggatgacatagctgctctaagacctactgtcttttgtagtgttcctcggctatataacagaatatatgctggtattactaatgctgttaaaacatctggtggtctgaaggagagactatttaatgctgcctacaatgctaaaaggcaggctttattgcatgggaagaacccatctccaatgtgggacagattagttttcaacaagataaaagaaaagcttggaggacaagttcggtttatggcatcaggtgcctcaccgtgatacctgatatcatggaatttttaatgatttgctttggttgtcgggtgactgaaggatatggaatgacagagagtacttgtattataagtttcattgatgagggtgacaaacttggtggtcatgttggctctcctaatctagcctgtgagataaaacttgtggatgttccagaaatgaactatacatctgatgatcagcccaatccccgtggtgaaatttgtgtcaggggtcccattgtttttcggggctatcacaaagatgaagcccagacgagagatgtcattgatgaagatggatggctacatactggagatattgggacgtggttacctggtggtcgtctcaaaattattgataggaagaagaatatctttaagttggcacaaggcgagtacattgctcctgagaagattgaaaatgtatacgccaaatgcaaatttgtggcgcagtgctttgtatatggtgatagcctaaattcttctttggtagctgttgtctcggtggatcatgataacttgaaagcatgggctgcttcagaaggaataatgtataatgatttggcacaactttgcaatgattcaaaagtaagggcagctgtcttggctgagatggatgctgctggacgagacgctcagcttagaggttttgaattcgtaaaagctgtcactttagtgctcgaaccatttacgttggaaaatggtctgttgactccgacattcaaggttaagaggcctcaagcgaaggaatattttgcaaaagcaatatctgatatgtacaatgagctctcaagaactgatgtttctcagaaaacgttgtgaaaattgagggtctccaccccatccccatttaccaaccacaacataaaagagagaggtaaacaaagactgtgactcatactcatcgtaagcaacatagcagaagcatccaatgggaacgatcttgcaacttattattttaaaaagcttacggtccgttaagttcaagttcacttatgccatttttataattttttctgctgaatgttactttagtttttaatttaatatattcatttctattagctgtcttggctgagatggatgctgccggacgagaggctcagctgagaggttttgaattcgtaaaagcggtcactttggtgctcgaaccatttacgttggaaaatggcctgttgactccgacattcaaggttaagaggcctcaagcgaaggaatatttcgcaaaagcaatatctgatatgtacagtgagctctcaagaactgatacttctcagaaaacgttgtgaaaattgagagtctccccccatcaccaaccacaacataaaaagagagaggtaaataaagacacgctactcatacgcatcgtatgcaacatagcagaagcatccaatgggaacgattttgcaacttactgttgtattgtattgataataaagagttgtgctagaaccggaatatgattcgtagcattatttatgtagcctacgctccgttacgttcaagttgccttacgccatttttataattttttcttctgaatgatctttaatatattcatttctacactgataaaaaatattcataatcaataattcaatagctacctattcaatagcaaaa

SEQ ID NO: 10491 - DNA, 345 bp, Glycine max
  Clone ID: PAT_MRT3847_109484C.1
aaagttataaagtacttttgtgagtttcaatataaaatagcgcgtttcaatgcataaattcagaaggaaagatttgttgcttctagagtcaaagtacttttgagttataccaacttcaatccaaacatgctatgcattgcttccgcagatttgaggagagattgttatagtttgggcatcatatcatgaaaattgttccattaactatgtcactctaaacacgagactttagaagccagaacacaaaaaaaaacaagaaaaattcattcttctcgggtagcaagatccattccggtagaagggctatcagcaaaatattcttgatgctttaaattcacgccatac

SEQ ID NO: 10492 - DNA, 1179 bp, Glycine max
  Clone ID: PAT_MRT3847_109485C.1
ggattggggcgggtggacgaggtgcgggtgagaaaatctctctacaccgtaatcgctatttggcatcgctgcaacaatctgcgatactctttcctctctccgcttcgaatttcttctcacactctctgcttcgccgcaaacagtgactcactgaacaactttccgaagcattgagtagtagtgattgggtggtaacaaagagagagagagagagaaaaggatgaaccagaacccgcaatcgagtgaaggaaggaacgatgacgattctgccctttctgatttcctcgcttccttaatggattatactcccactatacctgatgaattggtggagcattacttggccaagagcggtttccaatgtcccgatgttcgattgactagattggtagctgttgccactcagaagtttgttgctgaagttgcaggagatgcacttcagcactgcaaagcaagacaagcaacaattccaaaagacaaaagggacaagcagcagaaggataagcgcctagttttgacaatggaagacctttcaaaggcattgcgtgagtatggcgtgaatttaaagcatcaagaatattttgctgatagcccttctaccggaatggatcctgctacccgagaagaatgaatttttcttgtttttttttggtgttctggcttctaaagtctcgtgtttagtaagtatccttatgtacaaatgctgaattgaatatattctattgatatgttggatctctagtgatatgcactgtatcagaaggcatagcgcagtatgcccattttctgtagttgaatacacgtcattttactggcttgaatttgtgtaagagtacaagattttaactgattgccaaatatgtcttgtatgagggacatagttaatggatcaattttcatgttagcatgcccaaactataacaatctctccacaaatctgcgcaagcaatgcatagcatgtttggatctgaagttgggaaaactccaaagtactttttactctacaagcaacaaatctttccttctgaatttatgcattgaaacacgcaattttacattgaaattcgcgaaagtcctttataactttaaaccaaagaggctcgcaattggtcgccgctaacattaatggaatctgatatgaagaagtactcttttcagtaatgaactcatcttatgttt

SEQ ID NO: 10493 - DNA, 552 bp, Glycine max
  Clone ID: PAT_MRT3847_109486C.1
cttaaaaggccagggggagctagcaaaaaacggcagtagggggctctataaaaaaggaacaggtttctggctagggcttaaacaatccccacacaaaacgaggataggagcctggaacatattttaaactcataaaagacagcttttacagttaaaaacaaaaataggggaagctatctatgaaaaaaaaaagttcctaactaacactataaaaattttaaacatccaaattttttcctgcaacttcatgcttaaaatgggaaacctccaaggaaaaagcattttccccagtttttccaccagcacactgaaaagttaaaagaaaactattttttttatccaaatgggcacatgacaaaggggcggggaccccctgataaaacctatggctctgagtttaatctttataatctggaacaaaagctggggaaaaaaattcattggccctatcaggatcaaaaggaccaaaaccttcctgaatattaataaaaaagcccctcttcctaccattggaggccccctggttgaagcaaatacttccccattgaattt

SEQ ID NO: 10494 - DNA, 304 bp, Glycine max
  Clone ID: PAT_MRT3847_109487C.1
tttttattttaaaaaaacaggcaaatcatatactcgggtgaaaaggagagacagcgagaacatgttaatacttgattgacgacaggactaacactggtatccgcattggggacctgcctattatgatactaaatattggagcgtacatatctaaccagtgtagtttacgcctcttacaaggacttgagaaactgctactacagagttcgtcggtgcgctacttcaaactattgtaccctcgtctgtccatgctcttaataattgaccgtgttatacccctgaaagttgggctatccgtacattg

SEQ ID NO: 10495 - DNA, 394 bp, Glycine max
  Clone ID: PAT_MRT3847_109488C.1
gagaaacactgaatttccaattccggcgaacagcaaggaccggtggtggtggtggtgcaggcggtggaacgcgttcgttcgccgcttcagaagcaacgactacaagaagcactgctccttccgctacgatccgctcagttacgcgctcaacttcgacgatggaatcgccgccgaagaggacggttgcggatacaggcttctccgcgcgctttgcctccgctccgccggaaaacaaaacaaaatgattgagcatgttacctaatgcatggttaataggaaatgatgtttcttcgggcatttcaatctcatcattacattttccatgcatggcatacgcattccctatttcatagagtctttcatctctatgaaatgttgtcgaactattggcgat

SEQ ID NO: 10496 - DNA, 502 bp, Glycine max
  Clone ID: PAT_MRT3847_109489C.1
cgggatcaatgtattaagtactttggttattttgagcacactatcacacctgtgttgttaagtactgtgttaaggactgtgttgtgataaaaggctatcattgtttaacacagtgttaaataccttgaaaatatacaagtctgttggattttaaaaaattaatatatcttgaaaaataatgtcaaacttactgttgtttgtcatttggtccacggctaaactatcaacatatgtatcaattgataacttaaggtgtgcttaaaatgtttgataacttaagataatgtaagcaaacgtaatatatatcaattgataattgataagttaagatgtcatcaattggttgacaataaaatttgacaagaaggatccaatactttttattatagttggcaataatggcattgggtaaagaatgacctggcgtgatagtttaaatcaaattgatcagatggtactgattatatatggcaataacaactactggtttgataagtacaca

SEQ ID NO: 10497 - DNA, 621 bp, Glycine max
  Clone ID: PAT_MRT3847_10948C.1
ccacgcgtccgaaatttctctttccaaacccgatcaggacctcctgcttcatccacagcaacataccagtcttcaaatgtcacagttcaaacagtatgtgaccaatttcaatgcatagactcattttcattgaagcaaagcctttgccttttgtcttgttggtttttaacatagcaagttctctttttctaatattttcaatctgattccttgtaacagcaacagccatggagttatcaggagaccacaaagcaggataatttttcttcaggaaagagcatgatgaaaactgaaaaatcttcatccatgcaaagtttttcccctgagattgctagtgtccaaaataatcatagcaatgggtttcaatcggattatggcaattaccccccacaatctcagaccttaagcagaaggtcagatgatgggtacaattggaggaaatatggccaaaaacaagtgaagggaagtgaaaatccaagaagttattacaaatgcacataccccaattgccctacaaagaagaaggttgagaggactttagatggacaaattactgagatagtttataagggtactcataacccatcctaggctgataatactaggagaaacttatcgaac

SEQ ID NO: 10498 - DNA, 315 bp, Glycine max
  unsure (1)..(315): unsure at all n locations
  Clone ID: PAT_MRT3847_109490C.1
aattcggctcgagctgactcataagatcatcgtgtacctctcagacaccacactcatggacatcctgccccggatcatccatgatggcctgcttcccgtgctcagcttggtcacctccctcntcacnnngtaggcctctgccccagctgatgtatggggaccggcccatcggatgggctgcccaggagggggtgggaagctcatgggagaggacgtaacactggactgggtgtcaagagtcctggttttgatcccggctgtgtgaccctgagcaaaccacaccctttttctgtgcctcatttcctcatctggttt

SEQ ID NO: 10499 - DNA, 472 bp, Glycine max
  Clone ID: PAT_MRT3847_109491C.1
atttctctttatttattcaattataaaaaccttatcataaaactctatttatttacaaataacaactccttttaaattagtctacaaaaaatgggatgttacaagggtcattatgaattcttggtcatgccttttgggttgactaatgcatcatccacctttcaggcacttatgaatgaggtgcttcaacccttcttaaggcagtttgcatgagtattttttgatgatatacttgtatatagtagtagccttgaggaccaccacctgcatttgaaggcaatcttacaagttttgcagcaacataaattgtaggtgaacaagaaaaaaatgcaattttggtcggaattctttggaatattatgccccaaatattccaggaaaaggtgtggaagctgaccctagtaaattggcagcaatggctgagtggcctagacctaaggatgctaaaggattaagaggatttctggggtta

SEQ ID NO: 10500 - DNA, 276 bp, Glycine max
  Clone ID: PAT_MRT3847_109492C.1
tagaaatcttagtgcacctagcaccaacagattattatccacataatggggtctatacgaacctgaatgacacatttggtgacagggagcatgataaggttctgtaccaaacaaagaaaggcgctaatagtgaacaatccccgatcatataatcatttatttaaagatgcggggtggctctcaaacgaggagaaaccatctgtttaaaaacgattctggttacagaacctcgttttattctataaaactaccatgcgctctgtatgggctgcctga

SEQ ID NO: 10501 - DNA, 977 bp, Glycine max
  Clone ID: PAT_MRT3847_109493C.1
aattcggctcgagggaagagatacaattggaggaagacatgaggacttatgacatggaatgcatatctatgagaaagagggccaatcaattcgtgactttggaggttcccgggctagctgagagaagaccctcgctggttcatggggattttatctttgtcaagctcacatctgaacgtgataataacaccacacccgtttaccagggatatatccaccgagttgaagctgatgagatctatttgaagtttgatcctggatttcacttttaccacagggatgaaaatcgctatgatgttcacttcacatataacaggatcaatatgagaaggttatatcaagcagctgaggctgcagaaaagttggtaactgattttctttttccatctacatccagaaagagacacattaaaaccacttctctgcttcccatatctggtacttttaacgaggagcaaattagttcaatcaaaatgattcttggttgcaaaggtgcaccaccctatatgattcatgggcccccaggtacgggaaagacaaggacaatggtagaagcaattctccagctctacaaatatcacaagaatgctcgtattcttgtctgtgcaccctcaaatagtgcagcagactacatactagagaaactacttgctcaacaggatgttgaatttcgagagaatgaaatattcaggctcaatgcatctgccaggccatacgaggatgtcaaacctgaatttgtccgcttctgcttctttgatgaaatggtatttaagtgtcccccagtcaatgccctcattcattataggatcataatatccacatatatgagtgcctctcttctttatgctgaagatgtttcccatggtcacttctctcacatttttttggatgaggctggccaagcttctgaacctgaaaccatgatccctgtatcccacctctgcacaagcgatactgttgttgttctggctggagaa

SEQ ID NO: 10502 - DNA, 897 bp, Glycine max
  Clone ID: PAT_MRT3847_109494C.1
tgattttgatcgttcgctttcaatttacctccactatgtctacataatagaagccttcctgaacatacttgctagcaggtacagataccactgcagccacatcagtttgggctatgactgccctagtaaaaaaccctagagtaatgaagaaagttcaagaagaaattagaaatgtggggggaacaaaagatttcttagatgaagatgatgttcaaaaactttcctatttcaaggcaatgataaaagagacatttagattgcacccaccagccacactacttgtaccaagagaatcaactgaagagtgcattgtacatggctatcgaattccagccaagacaattgtgtatgtgaatgcttgggttattcaaagagatcctgaagtttggaaaaatcccgaagaattttgtcctgaaagattcttagatagtgctatagattttcgtggacaagatttcgaattaattccttttggtgcaggtcgtagaatttgcccaggtatacttatggcggctgtgatattagaacttgtccttgctaatcttctgcattcctttgattgggaattgccgcaagggatagtaaaggaagacattgattttgaagtattgccaggaattacccaacacaagaagaatcatctttgtctttgtgccaagaccaggagccatatataaatgctagaaggaaccagttgtgatgaaaataattagtaatgtatcttcttccatttaatttgctatttttttcttccacttagtggagttattagaaccttgacatgggttttaatgtctaaatcatgatgtttcttgatgatcttgtaattttacatcaatgttgatgaatgtgtacttataaaagcactttaacaagggagttttttttttttttttt

SEQ ID NO: 10503 - DNA, 235 bp, Glycine max
  Clone ID: PAT_MRT3847_109495C.1
aagcttggaggcattgacaagggtgttattgagaggtttgagaaggaagctgctgagatgaacaagaggtctttcaagtatgcctgggtgctggacaaacttaaggctgatcgtgaaaaaggattaacatttgttttggcttggggaaatttggaaccaccaaatattattggacaagtattgattccccttgacattaggatttcatttagaatatgatttctgggacattcca

SEQ ID NO: 10504 - DNA, 283 bp, Glycine max
  Clone ID: PAT_MRT3847_109496C.1
ttctttttttttttttgtttttttttattattcttttttttttttttgttttttttaaaacaatatttccacaattgctttaaagaaccccttttataaaaaaacattcgggagactaaaaaggtttgttggatcatacttaaaaaaaagtttttggttgtgctatttataaccctaaaggaggactgtgattcttgggttttcttaacagacttttgggattgtttttgaccctacaatggagcggattttcgtcggaaataaagaacttttgggctcccaa

SEQ ID NO: 10505 - DNA, 289 bp, Glycine max
  Clone ID: PAT_MRT3847_109497C.1
cccgacctgcgaacccgaaacaagtgcagacctgactcggggtaaagaccatgtcacttgtgctgctgggggcgcgacaccatatggcactgcaacgcactcgctgggctgtgctcagcccacaggcagcgggtcatttgccgcaccacgcggaagggatgagcacgacgctcttcgatataagacatgccgacagatagaaactgaggctggaaagttcccacctgagagctaaacttgatgtcaaaggagaggaggtgccgcctctgaggcacgactcgactgtggg

SEQ ID NO: 10506 - DNA, 658 bp, Glycine max
  unsure (1)..(658): unsure at all n locations
  Clone ID: PAT_MRT3847_109498C.1
tttataggattgattatctcggcgagtcgccggagatacctggttatgtgtcgtagcaggttaggcactttttggcaaagtgttttaagagggagcccggtgaaaggtggtcggtggaggagattattggacccggttttgttaaggagtgcgcggaattgaagttgttggtgttggattcggacactcccactggtgtgttggaacgaggtttttgggattcactggagacagctcagcatgaagcacttgattgtccctctcctagggacagaattcgtaggttgttttcggatgagcctgtttgggcatcgaacgatgacgaatgggtccctgtgagaggcaatgagatccatgtacatacatttggaggctgagggtttgttctttcgccaaaccaccagtactttttgtaatgtcgttagtgatgaagacaatgttttggtaactttttgtgatcctgaaattgtagaatcacctgcagctcgagccgctattagtgataatgattattatcttagaggcagaaactgtgattgttgcagcagagaatcattgttgtcatcttgtgtaagtctagtgattgttccccttggaaaatttgattctaatgagatgtgaatttttatcctgcnnaanaaaaaaaaaaaagggaaaa

SEQ ID NO: 10507 - DNA, 311 bp, Glycine max
  Clone ID: PAT_MRT3847_109499C.1
accgtacaagcccccacctgtgaaaccaccagcgtacgccccgcctcatggtaaagaccattgaatccaacaggcgagctcttagggagctgcttttcactgctcctggtgttcttcaatatctaagtggggtcatcctttttgaggaaaccttctaccagagcacagttgaaggcaagccctttgtgaatgccttgaaggaagctggtgtgcttcctggcatcaaggttgacaagggcccagccaagcttgctggaactaagggagaaaccaccagtcagggtctaaatggccttggtcaacgtggcccc

SEQ ID NO: 10508 - DNA, 547 bp, Glycine max
  Clone ID: PAT_MRT3847_10949C.1
gaccaatctcatctcttcttctttatgttctctttccttcttttgttttctgccatggaagacgagccatttctcactaccacttcccaacccatcgccgattgccttcttccatcttccaagtccttcaacgacgtcaccaccacacgcgcgcgtgacgtcgccgccgccgccgccgaggagattcaatccgaacaacaacaacctcccaagaagaaaaaactgagccgctgcaagacggcacctgcgatggtcaccatgcgagacctcaaacctaagacaccccaactccccaaacctcaatcaagttccataattcgacaaggcatgtggttactcgccgtgtacctctccataggagtagtcatatactccttcaacagggaccgtttttccggcatcgaaacacaccctgtggtcgacgcactctacttttgtatagtcaccatgtgtaccatagggtacggagacatagcgccgttcaccccattcaccaaaatcttcggttgcgcttttgtgatggaggggcttgggttcatagacatac

SEQ ID NO: 10509 - DNA, 406 bp, Glycine max
  unsure (1)..(406): unsure at all n locations
  Clone ID: PAT_MRT3847_1094C.1
cgggcagcacaaatggctcgatgagtttttctcaagttggaggggttgggcgtaatcatgatggtgggacaaaatggagggcagattgtgtgaagaattatgttaaagggagaacagatgagaataatgaggtgcttaagccagtttttaaacctaatcgagctgcactgncttatgtcctnccagaatatctagtataaagattgggttccaaagttctcttctncacgctgtcaatgatggtcatatttattcacgtgcattatttactacattgggatcagagacatcaggtggaacagtttatactcttgatcttgttgaaccattaaatcttggaccaggtatactgaacacatggagcggactggaggaaattgcatctttcaagggtaccaattggaca

SEQ ID NO: 10510 - DNA, 297 bp, Glycine max
  Clone ID: PAT_MRT3847_109500C.1
gtcgcacgcgtggtaagctcggaattcggctcgagtggatctagagatagttaatattgtccaaatacagtggtgctcaagggagggctatctaggctccggggggggtaacaaacacaccaagtacatctcccaggatgtcctaccactacctgactattacatgcaccagtcccttggtaggtctgcatactttcgactcaacacgctgacctgagggacacatgattgatgggtacgagatcgattctctctggcctcaaccacagacctgtggctctgggcttgcctgagagc

SEQ ID NO: 10511 - DNA, 254 bp, Glycine max
  Clone ID: PAT_MRT3847_109501C.1
tttttaaaatgaaaagcatgccctagggaaggggaatgaattgatatgtgaaagggatctgatgctagttttacatatacgaaagcataaattaacaattgactcatcaatagacattttcaaggctccaagtggataaaaaaggatgggcgctcttggacaagtcacatgggggtgcactctcaaaatggagggttggatgctgtaaacccatatacaaatgaaaattgagtgaaatagtgctggggacctac

SEQ ID NO: 10512 - DNA, 218 bp, Glycine max
  unsure (1)..(218): unsure at all n locations
  Clone ID: PAT_MRT3847_109502C.1
nngcncnngtacgnnanctcggnnttnggctcnaggtcgannctnaactcagaatngcatcanagttnctctgcaganttgcntcaaattcnangtttgncngancaanatnnngcatgccngattnnncagacgntcntanggnanngacccnnattggnaattccgcgtcgtctntnagnggcntncnagntgntgccggnatnatntctgatttg

SEQ ID NO: 10513 - DNA, 457 bp, Glycine max
  unsure (1)..(457): unsure at all n locations
  Clone ID: PAT_MRT3847_109503C.1
catctcccatccgttgatctattatatcaatcctaggccatgcccattccttaattgggcttttacataagctgcttcatggagttgctatctcaaatatgcatagtgattaagtcataactacaggattagccaaattcttgtgaattgtacgtgtactggattcaccctttcatttgnccattttctatctatctatatatatatatatataaaagagtcttgtaatataatcactagtggtacgggtacctatactgcatttctggttagtgaccatggcttattggccaactccgttgcattcttttattttctcatatgtatatatagaatttctgttgtagaggattcctcattctcttccaagttgtacttcaccttttctctcccttgataaatttcttttttttttacttcactcttcttaagataagtgattattctgtcttgttga

SEQ ID NO: 10514 - DNA, 293 bp, Glycine max
  Clone ID: PAT_MRT3847_109504C.1
ataggcatgaatggatcataactgcattaaaccatgttttgcagtgtgaagtagtgggaatggagtcaatggaatggaccacaaaaagcattccctggtaattggctgaggatggttaatacggggggcccccccaggaaaataaataaaaagggaaagaaaatggcatttatttacactttaccgtagaaatttaatgcgtgacttcaccccccatggacaccaggaattaatttgatcctaccctattaattatggtttttggcacctcacataacaagcacggttcacca

SEQ ID NO: 10515 - DNA, 249 bp, Glycine max
  Clone ID: PAT_MRT3847_109505C.1
actatacagaaaaaaaagtaaattttactcccacaacatagttattactcacaataaccatattatcactggtgggaatcagagagtccttacattatttatagataaacagcctagtgaatatgctctacagatcaatactcttgcatggcgagagactaaaaccccttgaagagacaagcccaatctaatgccctaaaatagatgtaagcagccttctgagtccactcatgatgcaagctgcacttg

SEQ ID NO: 10516 - DNA, 403 bp, Glycine max
  Clone ID: PAT_MRT3847_109506C.1
cccacgcgttcgtcgacgactgcaagtacaaggtggtccacgctggcggatggctctccagcgccaatgctcgctggaatgtgacgcaaaccgtcgccggcagaggtggaaagtccctgccgccgcggacttcggcccgtgacgatgagatcaatgacacaattgcgactatgggatctgtgactaacttgaggaacgggaagtctttgtactactgagagagggggatgattacttcacgggaatgaatcattatagccggagtgccttgccatggatggtgtgaagctatgccatcaataccagggagtacttatgaatccaagactaagtcatgcactgaattgagcacttatagatcgggctgccgtcggtctagctcatgcgtcgtacatttcatgtg

SEQ ID NO: 10517 - DNA, 1211 bp, Glycine max
  Clone ID: PAT_MRT3847_109507C.1
ctcttgtacctattcactattccttaaaaaactcgaggagatggcaacaccaagagaactaatcatcaattctcatcttttttgggcttgattttggagggatcagcctctcgtgatcaacatggcttgatctccacaagattatccctttgacacttcaagtactaccaacattgattaaatcagactagtgaaatgtcaaaagaaaaggactcagctgacaatcaagtggatacattttctgagccagtcatgttggagagatttcatacacttatggagattgacaatctgcatcttgaaccagattgggatccgattgctgaacttgatagcatcttatctgatagttataatatgtcttccatgtccactcactcagcaactgtttcagaaattgaagtccatggtccaaatgtggcagctatccttgaaaaattggagacccttttggagacctcccttgaaattctctcttctgatgatgaagtcaagcaacaattccatcatgttttggagcaacttagccaatttaaagatcaagtccctgtcaggcttcatgctgtgatttacaagttaaaaagttttattgaagatgttgatatcagatatgtgactgcccaaaagactatccaagattatgatcagctgctcgagtcaaggtctcttctatcaaagcaattggaaagtgccaaagctcaacaggaccaaattaatttgaaagtctcagaaggtaagacacaatttgaaaagatcaattctgagattgatgaactagagcacaagttatgtgctttggttgtgactagagacaagctaaagagggccttggactcttgtgatgctgaaaataacaagctaaagactcaggttgcaaaatgggtgccagaatgcaagagtatcatcacagctttgaaggagtctgagacttcttacaaagtggccctaaccgataagaggaaaaccgaagatgaatgggctgatctgaagaagacctttgtagctaataagatttgaatcatctcaatttatgcatatcttgacattaggtcttagccatatgctcttgtttcaccattttcattattttgtcacctttctaggctgacaatgaaaatttggtttctctgatgttgcattgcaattttccttgctatctgtcaatctgtttaagttcacatcaaattatttattttgccaattcactttca

SEQ ID NO: 10518 - DNA, 314 bp, Glycine max
  Clone ID: PAT_MRT3847_109508C.1
cttacataaaatttgtgactcaatttaaaggcgcgggtactctaaggggcggattcacttttactcattatttaaatttaacataatttttacaagctaaaacaacaccctatgtgctttctcaaaacttaaatccatctaaatgtaaactgaaaaacaaccaacctcccacccttggactctggaacccccatagcaataaaaccctagctccccgctgttacaaacgtcaataatggcaacgaccgttaaaaattcctagtcataaacaaaataggaagacccggggggggccattatacaacccaagctcc

SEQ ID NO: 10519 - DNA, 533 bp, Glycine max
  Clone ID: PAT_MRT3847_109509C.1
cggtcgcgtggggttaatagtgacttggataaatcagagtgctttgatcctcatttctttatcatgaatgtaccacatctatctgaaatagaagtatatgggcactccctccctactacctatgcaatctccacgaagaaagcgaataactctgcggctgcacttagatgaggacacttgttcattctacactggaaccctgtgatgttgcggatttctcttttactgactttttcagtttgaaagagtacacagtctatggatatcagaggccttatctccacgcattcttggagagagtctcacagatgttcgaggggaaacttcctactgccggccccagcgtatctgcaaggcacctacttgctatattggatcctgatggaggatttatttctcgtcgcatgtgtccggaatcatgccttttttcatgatgcggactacacaccggatcttactatattaggtgctgatcttgcgacgggttcgtattcgatccttcacctcaggctttccgattgcgggtgattaat

SEQ ID NO: 10520 - DNA, 522 bp, Glycine max
  Clone ID: PAT_MRT3847_10950C.1
ggggaagcaaaaaatggattttttttttttacctccaaagcaagttaaaaggactgaactttttatttcctttaggacccaactttttaactttttaactttaccccaaataacagaaaaaaaaaaaataaaataggggtttttttttttcccccttttattaaaactttttttaaaaccaaaacccggcagaaaacaaaccctcccaaattttggggaaaacatggacaatgtttttttggggggggtgcgaattcagggacaaaaaacactggaagaaattttccaaatccgggggcaaaaaaattttttttttgacaatttttttgagcattaaagtcctaaaatcactggagggggcgttggagcgtttaaccaccgggaacgtgttttttactttcccgggcggggggaaaacacccatgtgggagctccgttttttttcccgggggcccgtatttggccccgagagcgggaggaatccgaggaagggtttttggaggaaaaaaggggggccgtttt

SEQ ID NO: 10521 - DNA, 365 bp, Glycine max
  Clone ID: PAT_MRT3847_109510C.1
cctgtctctgaataaaacaactaaactcacagatcttcttcccaaccctcattttttttcccgaagcggcgtttttattggccataaatcacatgattcatttcattgcatttcttctctcatcttctcctcctggttagttagcacctaagaatacagactgaatgcgaataatggatgttgctgaggttgaagaaagtttttttgcagcaagcgatgccaagaagcagctaggcctaggagcaaatctggaattcaggcattatgttcattgcatgtagccttagaaaaggcaaagaatgttcttcagcactgctcagagtgtagtaaactttacttggctataactggggattctgttctgc

SEQ ID NO: 10522 - DNA, 785 bp, Glycine max
  Clone ID: PAT_MRT3847_109511C.1
agcgatttctctcacatttgctctttctttccctttttcccctctgcactcgtgcgcttcctgccaacaattcgctcttcggtttggacctcaatacctgtctctgaataaaacaactaaactcacagatcttcttcccaaccctcattttttttcccgaagcggcgtttttattggccataaatcacatgattcatttcattgcatttcttctctcatcttctcctcctggttatttagcacctaagaatacagactgaatgcgaataatggatgttgctgaggttgaagaaagtttttttgcagcaagcgatgccaagttacatggagaaatgtgcaagagtctgtctgcaatatattgcaagatattgtcattatttccttctttagaagcagctaggcctaggagcaaatctggaattcaggcattatgttcattgcatgtagcctttgaacttgataaatcagagattcagcactgctatgagtgtagtaaactttactaacagggaagaaagttgaatgactctaatgactttgatgagcttgaatcttttcaccaggctgctactagacttggaattgcatcttcaagagcagctcttgccgaaagaagagctctcaagaaactcatagtgagggctcgatctgaggaagacaagcggaaggaatcaattattgcatatcttttacatcttatgaggaaatactccctcctaaaatttgagaaagctaaatgtgctcttgaagatagtcttagacgggtggaagatattgttccacaa

SEQ ID NO: 10523 - DNA, 346 bp, Glycine max
  Clone ID: PAT_MRT3847_109512C.1
ctcttataataaaaaaaccttagcatcgactctactaactgtctctaattggcgaccccggcacttgtatgcgtctcaagcaaccatggcaatggcaacccaagcctatctcttaactacaaccctctcctgaatgaaatccaacgatcacgcctacctgacatgccaccagaaatccagcctgttcttctccagcaccaagcccctgaacttctccagaacaactcacataccatcacgtcgacgagaccacagaggcaccagcacaagatcacgctgcacccgtccggctcaccccaccagaacttgaaccaaacaccacttaacagatcttcgggggcaaaac

SEQ ID NO: 10524 - DNA, 559 bp, Glycine max
  Clone ID: PAT_MRT3847_109513C.1
ccggaggaggagcactacaatgtccccggttccttccatgatgctgttttcattcatttctttccttgccattctcaaatctgaagcccaggatcagctaaatttcgtgtaccatgaatgtaacaaccacttcggaaacttcacccctgcaggtgtctacggcagcaacctgaataccctcttgtccaaagtgtattcccacgaagaaatcgacaacggctactacaatttctcgtatggccaaaaccctaacaaagcttacgccatcggtttctgcagaggagatgttaagccagataagtgccgtcgctgcctggataagtccgcggtccttctcagagagcggtgcccattacagaaagaggccattgcatggtttgacgcgtgcatgctacgctacacaaaccactcaatatttggcgtcatggtaactcaacctaacaacatcttgtgcaacacaaataacgtgtcgacgaaggtgctggaacagtttgatcaagctgtggacgacttgttgagcaagttgagtaacatgacggtggacggcggtggctcccgc

SEQ ID NO: 10525 - DNA, 383 bp, Glycine max
  Clone ID: PAT_MRT3847_109514C.1
gacctggaaatccgttagaaagaggccagtccactgagagaagcgcattgccaacttctataagtttcagagttgcttggcaatgtcagttagcattcaatttgcacctcgaagaacgtaaagcagaaaaaaaactctccacacgcatttcacatgaaaaccaaaacggttaaaggaaatcggaggatgaacaagctcgacttgccttccgttttccttatttgcatcttcttcttcctcgctggattctctgcttccagtctcttctctcactctcagaaacatgaatatgacctgaggctgagaccgagaccgagaccgagagcgaggttacttgaaaaatcgacgcaggagaagacggagtatcatttgttgaaagccgg

SEQ ID NO: 10526 - DNA, 222 bp, Glycine max
  unsure (1)..(222): unsure at all n locations
  Clone ID: PAT_MRT3847_109515C.1
atcgcatctggagtttgcgacctcgtcttgtgatttccatggagggtgctgggatggaagagatgtatatcattaatgatgatgattataattacatgtcttangctctttggaactttgtcgctggttgtgtggattgtggaattcatgacacttgtgataatgcttgcagtatatgccttgaagctttctgtgatagtgatccttccacggtgactagct

SEQ ID NO: 10527 - DNA, 575 bp, Glycine max
  Clone ID: PAT_MRT3847_109516C.1
tgaggtctatacgatagatgttgatttatttggaatactgattggacttacacttggattcctgaaggtatattctgtccatatctgtccaaaggttgcaaccaataatgataaaaatctgatgcagtatttgagaaaaaatggatggatgcaaaattttgcacatttttaatataatgtcttgtatttttctgatcaaacaggattagatttgtgagcaaaagaatgaatcttagtgatgaaccctagttcccaatcctgctccaatgcgggtacaataccaagaacatgaaaccatacaaaaatagtgaattcctggatgtttgacagatccagggatctccccctccatttcctgaattacaacttctgtcgcttccctctctaaattccttccttatttcacaaattatttgttgactcctttttttgcgaagtctgtcaattttctaaaaaacaccatcgttcaactttttctcctaataatattaaaagtgttaaaccttttgatcttgttcatactgatgtgtggggtcttgtgtctattttcaatatctttggtgcaaaaaggtttg

SEQ ID NO: 10528 - DNA, 294 bp, Glycine max
  unsure (1)..(294): unsure at all n locations
  Clone ID: PAT_MRT3847_109517C.1
gccacacgcgcggtgnatatgaaaacagaaaaagtgggaggggtggaatgttgatgatggatgagaaagagcggcaggttaagacacagcataatttaggttctagggttagtttattaccaattctcaatggattggatgttaacattccctcatgtatatctggaaaggcatagaaacccataccttttacataccctctgtgtgctatctgctatacagccacagatgttatcaaacaggtaagctcccctggctcagggcatgtcgatgcactgttgggcataatcaaat

SEQ ID NO: 10529 - DNA, 377 bp, Glycine max
  Clone ID: PAT_MRT3847_109518C.1
aagaaagtaaaagttttctcccaaaaacaatatccctggggctgggttaaatcctaaagtctcatgttacactcattttatcgccactacttatagcatttcacatctgactctactaaatcaactagcggcagttagaacaccattgcattttctttctcacaaacagaactttgtaacctattttattaaacttctcgctggaggaatcttattcgactaaactggggatttgatcacacttatacaaaattcttcaattcataacttctttagagttgctgcttggaataaaagctgttttatggtcaagattgagatttctgggaattcaaccatcaaaacgaatgattggaccttatttgtacaagtgtttt

SEQ ID NO: 10530 - DNA, 291 bp, Glycine max
  Clone ID: PAT_MRT3847_109519C.1
gctggaccgggggagatgcagagcgtgtgagctctgtcttacatcgttcttcctctcttcctgtaggatccgcgtgggcgcgactctaaaggctgacatcagaggtagcttgtctcagtgtctgaaatactcggcatactactatcacctgtatccttcgctcctgatgtacttgctctatgcccgtgctgttatataccgtgctacccctgatcccaatagagcctacacattctgcgccttctcatcacagaggcttttaacatccccatccggctacgggggatatat

SEQ ID NO: 10531 - DNA, 243 bp, Glycine max
  Clone ID: PAT_MRT3847_10951C.1
aaaccctagcatctcccccgctcctaattctcatcctcattgatccattttttttctttctttcgttctctctctctctctccttttttttttttttaacctttacgtttgatcgatcaaaaaacgagtatcacccactatcaggatttgattctggcaacacttgggggcaaaaccccatgatgaaacatagacctcaaaagatagccaataaccctcgaaaactttgcagtaggggccacg

SEQ ID NO: 10532 - DNA, 444 bp, Glycine max
  Clone ID: PAT_MRT3847_109520C.1
gcgcagtggcatagccatagaacattctataagacttccgctgtataaaggatttatgtacactaaacgggttaactggaaatcctataagcgcgtatggttccccaaatgacctgtcagagtgagaagtgtggaggcttagaattaacctccacaacctatggtctaccccacatgagtgttcacaggatataaaagcataggcaggttctttctactcctgcacattgcctatcttatccaagtggaaagcccacaacattctcatcattagcgaagcatggaacatcctgacagaaagagaacatatgctggagccggtgtgttcattattcaggcaacaccactgaatcttggatctgctggcaaccaacaggacattttggtgccacttcacctcgaactgatatggcacaccctcgcctacacacaaaatatccacag

SEQ ID NO: 10533 - DNA, 283 bp, Glycine max
  Clone ID: PAT_MRT3847_109521C.1
ggaatctgtcctctattcaacaccgcagtggttggcaatggcttcattattgatatgctcatcagatctacattgaacatacagaggcgccaggctcaagcttcagccatgaactcaccctcctttgaaacatagctcgcatacggtgcaggaccgagatggacactacactcaatagctcatgatggtggcaagagctcactttagtgcggctaaagagacaggcgttctaaatcatgctaacatcgtcagttcctatggtattgtcgatgatatctcatct

SEQ ID NO: 10534 - DNA, 178 bp, Glycine max
  Clone ID: PAT_MRT3847_109522C.1
tggttagctgtgtgaagcagctcttcatgagactcttaaatctcaactcgacaaacaacctcccttataccatcgaggcttcgctcattagcggagatacacgaagtagttcgtcgaaaagagacagagaagagtgagtcttgaatttgcattagtgagcgaccctccaaaaaccttg

SEQ ID NO: 10535 - DNA, 410 bp, Glycine max
  Clone ID: PAT_MRT3847_109523C.1
cccacccgtccgaaaaaaaaaaaaaaatatttttaaaaaaataaataaaaaaaaaaaaaggggaaaaaaaaaaaaaaaaaagggggaaaaaaataaaaaaaaaaaaaaaaaaaaaaggggggggccgttttaggggtccaaagtttatttcccggggtttgcaacttttttttttttttttgggttccccaaaattaaattaattggccgtgttttaaaacacttttatcgggaaaacccttgggttacccaaatttattgctttggaataaaatcctctttcgcccggttggtttattacctaaagggccccccccattgcccttttccaaaaattggccaatctttatggcgtattggacctcccctttatccgttccattattcccggtggtttgtgtgtttccccc

SEQ ID NO: 10536 - DNA, 487 bp, Glycine max
  Clone ID: PAT_MRT3847_109524C.1
ccgtaaaatggcctttttgaagggaaaaaaaactagcccttaatcccataagaagggcctaaacaaaacccaaatggcaaattttaccatccccaaccccaaaatatttctgccaaaattaaaacccgaaaagggcaatcaacctgaaaaaagtcccgagagggggggaaattgcaaattctaatatcccatctaaaaaagagaagttcctttccccttcttggcccccccgatctcaaagggcttgccccttttgatagcgcgctgcaaaacatgcttgcatccttggccctggaccctcaacacaattttctggggggtcttcccctttttggggaaaacgggcttggtctggcccccctaaccggcctggtggggggcataacggggttttccctgagcggcgaggctggccttgccctttttggattgggtgaccttggggaccgggggcttcctgccctccttgcccttgccggacgcgtgg

SEQ ID NO: 10537 - DNA, 316 bp, Glycine max
  unsure (1)..(316): unsure at all n locations
  Clone ID: PAT_MRT3847_109525C.1
cntatntttgtntgtaagctngtgtattcggttcgatcttgatccgaatcggttttgttngngtttggtttntatttgtttnttcttngtgtttcttntttnttatnnttcttcnttnttnagatctcagntgnggnntcttcggananagagtttagtattnnnattnngatnantnntaatgnntggtncntannntttntannnttnnnannncaannattntnnanacnntnnangncaataanaanntnatnnnncanactaaagannannananananncannacnaccaanaagncancatnnannagt

SEQ ID NO: 10538 - DNA, 266 bp, Glycine max
  Clone ID: PAT_MRT3847_109526C.1
atgcgttttctgcgtttttatagagcaaaactgtttgagtctgagagaaaactggaccacattcttaatattttccctctttgtatacgaaccaacaacaccaaccttactctctttcacatcatcctacatcttcttctcttcagagaagagtcagcctattcaggccatccattattaaaataacatctcaatacattcctgaagaggcccggagctccttcctgaacatagtttcccattctttttaacttttattatttttc

SEQ ID NO: 10539 - DNA, 328 bp, Glycine max
  Clone ID: PAT_MRT3847_109527C.1
acacctgcacaggagcattgcctgtttccgcgatgagcttgatgccgtcctcgatgatgaagttgcttcgagcatggtggggaggtcattgaaggtaataaaccttgaagactatggtggaccaactgcaaatcgtgagcacgatccatggaagggggctagtcggggaggtaatgcagggcgaaaaggctgagcctgcatgagagattattggaaatgtataatagtttaccttatttcagttaatgcagtcaatgcaatatatacttaaccttttatattataaacatatgtacttttgaggtcgatgaagagtaaaataatttct

SEQ ID NO: 10540 - DNA, 278 bp, Glycine max
  Clone ID: PAT_MRT3847_109528C.1
tttttaaggaaaattggttaaatttaaaattttttttatttggttctcaaatggccagatgggggttcttccaagggggagtacctaatcattagaaaatgccaaacccacccattttaggttatgcatttcccttttcccaatctcccaatattttaacccggaaaaggaaaaaaaaaaaaggccgccatcctaataaattatgtgttatcactggataatgatctaccctttaacccccccaactacaatgggcctcctaatttgccgttggccat

SEQ ID NO: 10541 - DNA, 791 bp, Glycine max
  Clone ID: PAT_MRT3847_109529C.1
cggtccggattcccgggtccaaaaacaccatccctctttcttcctaaacacggggcactggtttcgaaccctcgttgtggttaggtcttcttcacctttcgaattttggaatccatgggtcagggaactccgggcggcatgaaccggcagggcgaccggaagccggacggcggcgacaagaaggagaagaagttcgagccgtcggctccgccggcgcgcgtggggcggaaacagcggaagcagaaaggtccggaggcggcggcgcggttgccgacagtgactccggtgacgaagtgcaaactgcggcttctgaagctggagcggatcaaggactaccttctgatggaggaggagttcgtggcgaatcaggagcgactcaagccgcaggaggagaaggccgaggaagacagatccaaggtcgatgatctccgaggctctcccatgagcgtcggaaacctcgaagagctcatcgacgagaatcacgctattgtctcctcctccgttgggcctgagtactatgtcggaatcctgtctttcgttgataaggatcagttggagcctggttgtgctattttgatgcataataaggttctttctgttgttgggcttcttcaagatgaagttgatccaatggtctctgtcatgaaggttgagaaggctcctctggaatcttatgctgacattggtggtttagatgcccaaatacaggaaattaaagaagcagttgagctacccctgacgcatcctgaactatatgaagacattggtatcaagccttctaagggggtcat

SEQ ID NO: 10542 - DNA, 316 bp, Glycine max
  unsure (1)..(316): unsure at all n locations
  Clone ID: PAT_MRT3847_10952C.1
tttttttttttatatcaaaacccataactagatagcctaaaccaacaaacactcaaatgatgaatgtaaggggtataaaacctaaggcttcacacagaaagtctgttgtcaataatctcccgccacaggctaccacacatcncgttgcttattttccctggaagacccaagcggaagtcacggagaattaaatcgagaaaagtaaaagaagcctagaaaaaaaaaaagacaaatcccaaaatactcaaaaccctctttgacaccccccaatcatggaccaggcttgatgcgaaaatattccgacactacgctggag

SEQ ID NO: 10543 - DNA, 503 bp, Glycine max
  Clone ID: PAT_MRT3847_109530C.1
tggaatgcgggtcgaggttattttatttgagtaatcatttggtaaatgaatgtctgtgtgtaagttattttgcctatgtagtcactctgctaaactagaatgtataagaagtccttaagtttcgtagttaatgatttcatgattgcatgtttgtcccttttccacttccacacctcaatgacaaaaacatttgcgttagcactaggaggagagatatatagtatgtaagatctgtatatagctggtaaatggagcttaagatttcacacttggaaatcaaaatgacgtattcattgttaacgatggaacgtacaaagacaaaagaaaggaggcttaaagtggccctgaaactgtcactgtctcttcaaaaactttagttttacacaaccagtaaactgaaaatataggggtctgtttggttgtaaaaagatttattgtttttattttcagttttcataaatagttataaaaatgctaccttattttcaatttatttagatttc

SEQ ID NO: 10544 - DNA, 335 bp, Glycine max
  Clone ID: PAT_MRT3847_109531C.1
actgcgttctaacattattgttttttaaaaacatgaatcatttgttgtcaagaagaacacgataaacaactgatctatttcatgctcaaggagaagcaacatgaagaatggcaatcgccctatcaaaaaccaataacttgggcacaaggcgaaaaataatcgaacaaaacagccggggtagggccaaaatctactatatgacagaacaaaagggcgggggttgcagcccccacaagaatcattcaaactattccggggggggaaggggggcaactgaacccgttcccccttgaccctcatttttgcccccaatcaaggaaaagccagaccaaaga

SEQ ID NO: 10545 - DNA, 358 bp, Glycine max
  Clone ID: PAT_MRT3847_109532C.1
tttatgttttttttttgctttttttttttttgttccattgagactttttttttttgttttggtgagagtttttttttttaggcggaggcaaaaaaaaattctttgtcaacccgaacctggggcatatttttttcaaaatgagaaggccccccccccccccccgaaaactttgctttcacaaatggcttgcgttcatgcgggtcggcccttttttttctgcgttgctgccgagggggactcctccagggatgtagatctcggccttgagccttaaaatctttttcatggccgctttgccatccctttttttttaaaaagtcaaatggaacggccctcctacaaaaccttcccctcctgg

SEQ ID NO: 10546 - DNA, 677 bp, Glycine max
  Clone ID: PAT_MRT3847_109533C.1
tcctctagagcggccgctttttttttttttttttttttttttttgggctactgtattcccagttgaatttgaatacttagttgctttaagttttagaggcttgaacttatttgattcctgatattgattgttgttattgacaacatgtgtcaaattctaattttttatcattcatcatgaatgtctttaattttaggcatttttttaaaaaaaaaatcagcatatatatgtttgtgtaatataaagtatataatgtgcgtctcaacttttgaattgcaaccatcccactacccattatcttactatagggttttcaggcttagccactctgtagtgctatttgggattgaataccatggatagtacaagagcttgtaagctcttttattctatgagggcttgttctattcctttatagtatcagttgtcactctgttgttaaaacataacgccgtcatcttttccattaatttcttgactgtaatttttttgtcttgtttttgggcaaccaaaattggctgattatagagaaaggaccccttagagactacattggacgcctattaatgaccgcaaccaatgattcctatccacggtggtcagatttcaagtaagctatatcatctattggagaaaaactttcaaggcctgaaattcttgcatccacaactaatgct

SEQ ID NO: 10547 - DNA, 281 bp, Glycine max
  unsure (1)..(281): unsure at all n locations
  Clone ID: PAT_MRT3847_109534C.1
ctcaagatagatgtcaatgggctttgtagaccccatcatagcaatnccttgcagtgtctgggcaagcatttcngcnacttccaanaaatttagagnncnttagggtgtgggnanggggntattcctcnnaaatangggncanttannctaccancccttttcactttnccgnagnccatcagaaccattgannntcnncaantaatctanccnatcttatcaccaaattaacatcataatanactcccatgtcatgtccagngactagaggatcatccagt

SEQ ID NO: 10548 - DNA, 608 bp, Glycine max
  Clone ID: PAT_MRT3847_109535C.1
agaagcgacagaagggggaaaaagttttgaagcaaagtctggtctatgcaggggctgagctacaattaaagccaaagaaggactttgatgcacaaagagaaaaggaattagaagagcaagaaaaattccggccaccttagggttcaggtcaccagaataacacaaatacagaagcaaactaccctaaaggcttacttatagccttcaaactaaagagcatttctgatcaagttcctttggatcaaaataacattgatcagcaagccaatgacagtaatgttgtgaaggataatgctgacaatgataaagaaaacaatggagtgagtgaaggaaaagacacagaaggtgaagaaaagagcaaagaaactgatggaaaaaattatgctgctgcttacaaggacaacaatgatgttgtctcacgtgaggatttaaagggtgtctttgataagtctggtactgtgaagtacattgatttcaagattggagaagagtctggatacattcatttgcgagaacctgaagctgttcagaaagctcgtgctgctgcagttctttctgtaaaggatggctcagttgtgaaaaattatattgctactctagatcctata

SEQ ID NO: 10549 - DNA, 256 bp, Glycine max
  Clone ID: PAT_MRT3847_109536C.1
cgaagaacaacccgggttgggtctacattcccccctttgatgaccccctcatctgggaaggccacgcttccatcgtgaaagagctgaaggagacactgtgggaaaagccgggggccatcgcgctgtcagtgggcggcgggggcctgctgtgtggagtggtccaggggctgcaggaggtgggctggggggacgtgcctgtcatcgccatggagacttttggtgcccacagcttccacgctgccaccaccgcaggcaa

SEQ ID NO: 10550 - DNA, 273 bp, Glycine max
  unsure (1)..(273): unsure at all n locations
  Clone ID: PAT_MRT3847_109537C.1
tcaggtctgatccttcngtttcncntcagnnatcagttgaagagntgggtcgtggagttagcagtggtggtggtcagagttcattgggttatntttttggcagtggataggcacctgccccgannccagtaatanatnatgnccnagnctancttggagtgcaggntgtanntaatgtgcntnntccataagctaanctcntantgnaacantagaccctancaaggctgctggtatcaanagtcattctatgatggccanaacanggcaatt

SEQ ID NO: 10551 - DNA, 335 bp, Glycine max
  Clone ID: PAT_MRT3847_109538C.1
aaaacacatacaaaaagaacataactgaaaaactcttacaaaatatcaaagagtatgggatcatgcaaaaaagattaagagcatcccagaaccagacaactactatgctgctactgcatcttatctgaactatgtccttgccaaacttgattaatgtgattaatttcttgctttcttgtgtaatgctataaccattattttctcaaacactttggtgactgatatcttaagactatcaaatgatgacggaaaatcttttatgacataaccgatagcccttcccaacattttcccaaccttattgtcaaatattacgctccctgtacttgttcatt

SEQ ID NO: 10552 - DNA, 526 bp, Glycine max
  Clone ID: PAT_MRT3847_109539C.1
ttccaggaaggtttcccgtcatcactgtatgacgtcctccttctttgggggggggggggggggggctgttagtagaagtagtatgggtgatacgagaaaaaactatagttattagaaagacctatctgtacggtttagtagtcgaaataggggtagcatcaaacgtgaaaagactatgttattaacagcgagccgatgcaggtaagcattaggaaaaaaaaatgcggaaagagtcgagacatgtgcaacgttagagaatgcaagggggaggcgcgttataacgggttggggcctaccagagggcagcgagaatgcaacgatttgtcacacggagtaacaaacaatacgttgcatgtggggggtaataggaaatgcgatcgttataacgttgcggaagattagtacgaaggcggggatttgtgggtatcccgttaatatttccccgaggattacggacgagcatagtgttggtaaataagcgtagcatacactggatcgactgaagtacaaaccgcagtggaaagag

SEQ ID NO: 10553 - DNA, 251 bp, Glycine max
  Clone ID: PAT_MRT3847_10953C.1
gactaccgcatcaaggaagcgtcacagctgcttaagtacctatgggacaactacgtggagctcagcgaatgcactcacgtataccttatgggcacgaacaccggccatggcgcgatcatcaatctcctcaagaacaatcaagagacgttcttgaagaagtataacgatcgcgaagaagagaacaagctgttgaaggtcatctcgttcgttgaggacgtcccgcttatgtcgtgtaagtcgctcgtcaacgg

SEQ ID NO: 10554 - DNA, 147 bp, Glycine max
  Clone ID: PAT_MRT3847_109540C.1
atcggctcgtaaaaaaggggtgaagagattgatacacaaaaacgaggaccccaaccactaattagacaaaacttccaagcgagaatctggtggtatccatgcaaaggtaaaaactcacccagcaggtggtggaatatctttagcaca

SEQ ID NO: 10555 - DNA, 1358 bp, Glycine max
  unsure (1)..(1358): unsure at all n locations
  Clone ID: PAT_MRT3847_109541C.1
tcggtggtttctcgcgttaagcaaaaaaccccctcaaacttcaaagtctctttgtttacctaggttcccccaatgctttgcccacactcactttcgaaagcctagagtgatgctcccgaacgaatgatagatgatttaattccggccgttcaaggatagatccaagggattccaatcccccctttccattttcagggattggccttcccgaaaagggatttaaccaaaaccgaagggtggaccaccgggtggggattgaccaaggatttaaagatagccttggattgcccgaagccttaagtaagattttaaaagagccagatttaaagaaaacttgacccctggtccctggcccaaggaaaggccttggttaaaggcctagaagcccttggaagaggtntccttaaagccataaaaccgaaattgtattgaaaaggccccagccgtgaccttgcctgtacaatcaagaccgttcaatctcgatccagttcaatttgctgctgagggcattaaaagcagctgcattgttatcgctttaaggggcatggttcgaggcggagctttgtctgtaccctgtttggaacctgctgcctacctcatgggaggtaggtcatgagatgacagctttgaagtctgccaacaaggagttgaagggaatgatgaaaactgtgaagatccaagacattgataacttgcaagatgagatgatggacctcatggatgtaagtaatgaaatccaagagactttgggtagaagctataatgtgcctgatgacattgatgaggatgaccttatgggtgaacttgatgcattggaattagacatggcaaatgagactgaggctgatggggtcccatcctacccaaaacctgataaagtaactaaattggattattttctgcgtttttgttttaaatgttctgtacctttcattcctgattgattactttgatgctgacagactgaggatgagctgggtttacctgctgtccctcaggcatccatacgtggttaaagaatgctttctatatcttggcgtagctagtgcagtcacgagcatgcccttgtaaagatgtgcagatctggagaacattgattgatacagtgatttaattggtctggtgttgacattatagacttagtgccgtttgttttcccttgtaataaaccatgtggaagcatctttgttatttgtatgaagcttatggcgcggaaaaaaaaaaggaaaaaatatcactggagtttgtcaaaagcttggaacctgcaagttacgttttaatgaaatttatatatacacatttgttatccaaactgtctccagtgatgatttagtagatttcttaatttatttgatatt

SEQ ID NO: 10556 - DNA, 341 bp, Glycine max
  Clone ID: PAT_MRT3847_109542C.1
tacgtaagctacggattctgtaaagcggccgatggggggcccaccaccgtgtgtgttcttcgaacatgaattttattcacaaacataacacattcccctctgcttatggaggctaagggcctatcgcttgttccctatcactgtgatatcatggaatccccagaatccgctgtggcaccattctatatctctgtcttgggggaagctgttaagtttaaaaatgatgtttccccagaaagtttttctcctttgcctaaggacataaaagaccctggatacgaaactacccggggtaatccagactattccgtcggtgtttttgatgtttacaatcataaagc

SEQ ID NO: 10557 - DNA, 346 bp, Glycine max
  Clone ID: PAT_MRT3847_109543C.1
acggctgcgagaagacgacagaaggggtacatataaaatcagatggaggcatatgaacacaggttagcaaaatcttattgggccaatagcaagcagaggaaagacacattggcatgtgcacgtaagggaatacacataaatatataagcactgaaaaaacatgtgtaagaaccaacaatgttaaatttacaagtaatgacaacagtaggctaataactaaaagaacaaatgaacctttaaaaaatcaaataattatgttagggtaaacagctcaattaagtgctcattgaataagtgtttaccatgtaagcactcgtgaataagttgtttatgtaatcaaagaaaa

SEQ ID NO: 10558 - DNA, 376 bp, Glycine max
  Clone ID: PAT_MRT3847_109544C.1
ctcaatttcttctggaatgaatcatcaaatgcttcagcaacttatgggagttgatcctggagctaaccctgtatgccattcccttggaagcaaggccattttatgggtacccaatttatctgtggacactgcatataagaccaacaactgtcgctgaagatgctatagatgtcatacctcgcctatcagggcatggtttcttggcactggacagataaccaggagtaaaacatatactgtagtggatgccctggctagacacactacacaggcagtatccaaaagtctggactactatatgggcgaatacgaatgagcaacgcatgtggaacttgaggtctgcaatatggcaaaggcaatatatcgagctacactt

SEQ ID NO: 10559 - DNA, 1469 bp, Glycine max
  Clone ID: PAT_MRT3847_109545C.1
caaatcgcgtccgacggctgcgagaagactacggacgggggaaaattgattaagtcacgcgcttcttccggaattagtcggtgtaatttacatttatccattttttgaaccttcccttcccaccccagaactttcaaatttcaacaaaatcgcagacatggcttctgcggtgcccgcgacggggcgagagttgtcgaatcctccattggacggcatcaccaatcttcgattctccaatcacagcgatcatctccttgtgtcctcatgggacaagagcgtgaggttgtatgatgccagtgccaatgtcttgagaggagagtttatgcacgctggtcccgtcctcgattgctgcttccacgatgattcctccggcttcagtgtcgccgccgacaacactgttagacggcttgtcttcagctctaacaaagaggatattctgggaaggcatgatgcccctgttcgttgtattgagtactcatatgccgcagggcaattgatcactggtagttgggacaagaccctgaaatgttgggaccctagaggtgcaagtggccaagagcgcacacttgttgggacatatccacaagccgagcgtgtctactctctctcactggttggacatcgtctggttgtagcaacagctggaagacatgttaatatctatgatttgagaaacatgtctcaacctgaacaaagaagagaatcttctttaaaatatcaaaccagatgtgtgcactgttaccctaatggaacaggatatgcacttagttctgttgagggccgggttgcaatggaattctttgacctctcagaggctagccaagcaaaaaaatatgctttcaagtgtcacaggaaatcagaagctggaagggacattgtctatcctgtaaatgcaattgcattccaccccatatatggtacatttgccacgggaggttgtgacgggtatgttaacgtatgggacggaaacaataagaagaggctataccagtactcaaaatatccaactagcgttgcagcactttcgtttagcagagatggacgcctgttggctgttgcatcaagttacacattcgaagatggacctaaaagccaagaacaagatgctatctttgttcgtagtgtaaacgagattgaggtcaagccgaaacccaaagtctatcccaatccaccagcttgattcctgatggccattttgaaaataggaatttcttcgtttgttcttttctactgttgcacttgctctttgtgaacaccaaaaactacttgtaaaatgttgtgagcgctaggtaaattgttggatacaggtatctgtcggaaatgactttcctattgtttgtctttattcccgtcaaaagtaaactgaaattggtagacattatttagctcaggtgcaaaatatgaattgagtgtgctggtttctaacaatgccctttgatttagttgtggtttccttcaaagaaaaataa

SEQ ID NO: 10560 - DNA, 316 bp, Glycine max
  Clone ID: PAT_MRT3847_109546C.1
agcacaaaaagcaaaaagcggtgcactatagattaatatcatctatgccgcggatactcaggacgtgtgatacactaccatgacgtgtcaagaccaaacaggcgagaccaatttaagtacagtttggctcccatcacgcaaaatacaagaggctgtttaaattaccattaaaccagcccaattcttcaagctaaaactgtcaaccaggattacttcaaaccctactcaatccgtggacagcatattatattcctcactttgaaaacgcaccaaatgttattgcgctgtaccctggtccataaccaataaatgcctg

SEQ ID NO: 10561 - DNA, 704 bp, Glycine max
  Clone ID: PAT_MRT3847_109547C.1
atcacgcgttcggtcaccccacgcgtccggtcacgcgcccttggggcatctatccatttttgaaccttcccttcccacccttcaactttcaaatttcaacaaaatcgcagacatggcatctgcagtgcccgcgacggggcgagagttgtcgaatcctccatcggacggcatcaccaatcttcgattctccaatcacagcgatcatctgttggtgtcctcatgggacaagagtgtccggttgtatgatgcgagtgcaaatgtgttgagaggagagtttatgcacgctggtcccgtcctcgattgttgcttccacgatgattcctccggcttcagtgtcgccgccgacaacactgttagaaggcttgtcttcagctctaacaaagaggatattctaggaaggcatgatgcacctgttcgttgtgttgagtactcatatgctgcagggcaattgatcactggtagttgggacaaaaccctgaaatgttgggaccctagaggtgcaagtggccaagagcgcacacttgttggaacatatgcacaggctgagcgtgtgtgctctctctgactgggtggacatcgggtgggtgtggcggcaggtgggggacgtgggggtgtgtgtggtgtggggagcatgggtgggcctgggcgagggaggagaaggtggttggggtgtggggcggggtgggcgggggtggggcggtggg

SEQ ID NO: 10562 - DNA, 540 bp, Glycine max
  Clone ID: PAT_MRT3847_109548C.1
aaaagatgctttaatttgattaattattgatgtaataatatataattatgaatgcttatataaagtttgataggtatatatatttattgaatgaagtttgccttttaaacttggctccgtccttgaaatcaccaatgtaggtacttaattttaatcttttataaatttagtgttctccttttcctctgctggttaaatttttcacatgttgtgaatccaaaagagtgaaggtaagtgagtcgtggtgataaaagtggtcccataacaaggaaaaaagaatgacgcgtgtgcatgcaaattaaatatcacttcaaacgtaatatggataatgttaaaaaaagacgagaaatataaaattttgggttaaatatcattttaaggtttctagaaatatgataatgttaatttggttttagttctcaaaacatatgattcattctaaattacatgtgaggaatatgaaatgatacagggtaaaaaaactacttaaaaagtactttaaaaaaaacttttttaataaacatatgagatttgcttctt

SEQ ID NO: 10563 - DNA, 403 bp, Glycine max
  Clone ID: PAT_MRT3847_109549C.1
gttatatttaagttgaaagtgattttcaatgcactgccttcccaacggcaaactttgctgttcagtgccacgctcacttcggccctcaaccgactcaatgcagtgtccgtgcggaagcctttcctttttgaggagaaagacacagtgaaaacggtggacaaactcgagcaacgttttgtgctttgtcctcgcagtgttaaggatgcttaccttgtgttcgttgtaaaagagtttaaccttcgtggggagacacttcattttggtggtcggaaaaacctggcggggatggcaagcattggcactgatggtcaaaccggtgggctttgagggcggttctcttcattctgaaattctccaaaaggggtcgggctggctcgttggcgaaagattcgtaccgggacgt

SEQ ID NO: 10564 - DNA, 231 bp, Glycine max
  Clone ID: PAT_MRT3847_10954C.1
tttcttggagaggaggcacctgccactgtagggggttgcactgaatgttcgataattaccacaatcataactgttgtccccgagggatacgacgccttccaggttgtttaccgaagggccatatattcgtgaaagaccaatccctttatgggctagccacataaggtgggggccattcccatgcgcgatcttaaggaatttcctcttcaatccatcattggatttaagctt

SEQ ID NO: 10565 - DNA, 587 bp, Glycine max
  Clone ID: PAT_MRT3847_109550C.1
atgaaaaaatgttgataaaatatagttatttatgacacatatttaataaaagaaattaaagttagtttggcgtatctgttcatacagcgacattttagtttttaggagtggcaatgtggtggtgcgccatattggaccgcaaaaacatctacgtataccgtccaggtgcagttcttgacatggatgactcttcttcagttgtcggcctcatttctatttctacctattaataaataaaaggaaaaaatcaaaactcaaaagttatcatctcttacgttattagaatatgagtttaaacatatcttttgagttggtgccaacagtcttaaaaattaatttaaggataaaattgttatttacttatatatttctagaaagggatgtctatgtccatgtccccatattgaacagctccaaatattgttgaggagggagggttgcaattaatttaacatcagtcttttggctaaaacgcagggcaaatgtaatttatggtcgcctgcacattttgtaaagcctaaagggtcttagagtcagagtcagccacctgtcgtcgcctaattattctgttaacccacttatcactc

SEQ ID NO: 10566 - DNA, 499 bp, Glycine max
  unsure (1)..(499): unsure at all n locations
  Clone ID: PAT_MRT3847_109551C.1
gtgtaccctgggggcgccaactcgggatctctattcttctgggcttagcgngganggtacttggggcacctattgagactcgcgaaagggggggagcatctgtgttctcactttttaatctcaaanaaaanaggccattttggggtgagggggtgatacacaatgagtttgaggagttaaaggtttcaagcgatgggaaactaagggcgtttaattataccaatgcggggaacattgcgtaactatctaaaggttgagggggggtggttccatccaccttccaggtcctatnaatttggggggaggggggttnaangggaggggtccatnaattcaaggttcttccanaaaaaattgaggggtgggtacaaaaattgagcatgggtttggacacactcggagtcggcatggagaaaggctaattccattttacaaaaccaacatggggaaaatgcggatgggaccaccttgctngggggaggcacataaattacaattt

SEQ ID NO: 10567 - DNA, 287 bp, Glycine max
  Clone ID: PAT_MRT3847_109552C.1
aacactcgttacgacacgcgtccggattccgcatcagagagtagaaaagatggcgcggttgatcacagtggtatggtgcgcggtggcggagctactgtgatccgagtagtgcccgtcacgtgtggaggaggctgtaaaccacataccaatggtgactgcagtgtaggcacgaagtagttcgactgataaggcagcgactgcacgcactgaacagtgctaggattatgatcaggatagcgaagagttaccgaagccaggaatagatgagggagaggtacgagatattc

SEQ ID NO: 10568 - DNA, 537 bp, Glycine max
  unsure (1)..(537): unsure at all n locations
  Clone ID: PAT_MRT3847_109553C.1
ctgagcatcgtctagctatctcgatcgaactgtccaaggtcctgtcacaggagcaacggcagctagatgtggtgctagcgtgtaaactgacgttggagctacggttggcgctaacattgacgccgggtttaactacttagcgtaggagattatgtctgtagatgaggcactagcaccacggtggccaacgacggtcgaggcacccgaagctagggtttttgcacagcgactggccctgcgcagagcgagtgaacgtantgcgctacgccaaggcagcaaaacgtaaggccaatccgctatagtggcgcgggctattgaggcagcaagtaggcgtacagcagctgtgtggatgcttggtgccgggttcgagtagattagcccagttgaaaatacagccggagcctggtaatgaccataggccatggactagtaatatgccaaataccagtgccgaagctttctgacagccgcaaacgcatgtcaagaatgataattggaccgtccgttgtataagggtaggttaagggattgggcaca

SEQ ID NO: 10569 - DNA, 156 bp, Glycine max
  unsure (1)..(156): unsure at all n locations
  Clone ID: PAT_MRT3847_109554C.1
gtttgtatactctattacttnacattatctaaacacaactttcttgtngatgaaaagaattttgttggtttccctaccagagaaaatgcaggtcttttggcttgacacgtgttggaagtagaagggtggtgcaaatctctgncggatttatgattt

SEQ ID NO: 10570 - DNA, 244 bp, Glycine max
  unsure (1)..(244): unsure at all n locations
  Clone ID: PAT_MRT3847_109555C.1
catggatggagctgatagtctcagctttggtcctcttgttcccacagaaactgaaagatctttgttggagcgtgtgaggcaggagctgaagcatgtttttaaacagggttacaaggtctttgtggggggcataaaatttttttttttncgnangagacgttcgggnnngccnccaggcggcggggggggccttnnnacccccccccccccgccncnttctgnatggccctgtccccccggngag

SEQ ID NO: 10571 - DNA, 1125 bp, Glycine max
  Clone ID: PAT_MRT3847_109556C.1
gaatctgatgaggaagacaatgatggtgtggatgtgagggaggatgctatagttaaaaggcaatatgcttgtcctcctggggatagattggcaagacgcaacagccttggtactggtggtttgtctgttgaagctgtatctgatagtcaagagttgagaagtgtggagtgcaatcatttgtcaaacagtgggcaagatgatttggatagaacagagtctcctgaagctgcttcaaattctagtgtgattacactctgttggttcttctgaagatattgtatctgtgtcagtggctggttgtgttgagaactccaggggtgttgaaatgatgaacaatggaaggtttgaggatactacttatgggaatgattctgtcacactggtgaaaaatatagtggccagtggaaatgaagtgtttcagcatgagctacagcagcagttgcagccgaatgcaatgctagggatggttcttgattctgcagaaaaggttctctcagaagctgtgcaagagccggtgataaggcatgttcttgtttattaattattgtttttagagctggtctatctgttggctttatgctgtctcttgtgctttttgatatatcacaggagattgagtctaccatcgacagtttagatatcagtggcaatgtctggaagtggcaattgttcaagtggagaaagaagagagccagcaatttgggtaagtactaatttaaatggctggctttcatttctctatttttttcaggcttgcttgatcgttcaagcatgcaaattggaactgatctgcatcaggctgaagagttggagctgagatttgtcagcctttgtacagtttgcatttttttgtgcatttgactcaactaactttactagaatctctgtttaggattcttcctaaacttagtggcatatttgaaaggctcttgctgtactttgctgttttgctttattttaggactagggagatcccgggagggtggtggagggtttgggtagtgttttatagcagcagagggggcttagttagcagcaacattattaatactgatattgttgtactgcctctgagaggttataaacttgacagtggtgatatgataaactgcgatctcaaccttc

SEQ ID NO: 10572 - DNA, 1753 bp, Glycine max
  Clone ID: PAT_MRT3847_109557C.1
ggctgctcgtgcacatttgaagaattttgcacatctactgttatattgtttcaattgttataacctttttgttagcttatcttacaatgttgtgtactgaccaatttacctttttttttcctggggctttattctgaagccgaatgcaacgctagggatggttcttgattctgcagaaaaggttatttcagaagttgtgcaagagccggtgataaggcatgttcttgtttaataattattggttttagagctggtctatctgtattttgtctttatgctgtctcttgtgctttttgatgtatcaggagattgagactatcatcgacagtgtgagatatcagtagcaatatctggaagtggcaatctttcagtggagaacttcaaggctgtgtgcacattgtgctttctttatgggtttgcagaggaaacagggaggtcaagaaggtcagcaatttgatatacgagggacagttgaagaatttcggagaaattccggcattctgttaatatgtacatgttctggaaaccggggatggagatttatgtttctcatgttcgtagaaggcaaattccatgctatgtgtttcctgatggttataaacgatctcggctatcaaggccaacatcacaatttgagaattgtaaatcatttcataataatgaggtttctgtgactgaacatgtggagagaatccgtaagaggaagaacaatgatggtgtggatgtgagggaggatgctatagttaaaaggcaatatgcttgtcctcctggggatagattggcaagacgcaacagccttggtactggtggtttgtctgttgaagctgtatctgatagtcaagagttgagaagtgtggagtgcaatcatttgtcaaacagtgggcaagatgatttggatagaacagagtctcctgaagctgcttcaaattctagtgtgattaccatctgttggttcttctgaagatattgtatctgtgtcagtggctggttgtgttgagaactccaggggtgttgaaatgatgaacaatggaaggtttgaggatactacttatgggaatgattctgtcacactggtgaaaaatatagtggccagtggaaatgaagtgtttcagcatgagctacagcagcagttgcagccgaatgcaatggggattgcttcttgattctgcagaaaaggttctctcagaagctgtgcaagagccggtgataaggagattgagtctaccatcgacagtttagatatcagtggcaatgtctggtaagtggcaattgttcaagtggagaaagaagagagccagcaatttgggtaagtactaatttaaatggctggctttcatttctctatttttttcaggcttgcttgatcgttcaagcatgcaaattggaactgatctgcatcaggctgaagagttggagctgagatttgtcagcctttgtacagtttgcatttttttgtgcatttgactcaactaactttactagaatctctgtttaggattcttcctaaacttagtggcatatttgaaaggctcttgctgtactttgctgttttgctttattttagggctagggagatcccgggagggtggtggagggtttgggtagtgttttatagcagcagagggggcttagttagcagcaacattattaatactgatattgttgtactgcctctgagaggttataaacttgacagtggtgatatgataaactgcgatctcccccttcaaaaaaaaaaaaaaaaaaaaaaaag

SEQ ID NO: 10573 - DNA, 362 bp, Glycine max
  Clone ID: PAT_MRT3847_109558C.1
gtgaaagtgttggaccttatttgtaaactttggatatagaaggggaggtgtttagaggaactgggtgtaaacaacaaaactatttaataaaagaggggtggatataaacgtgcaagagcctccctctattccttatttctttcttttatttttcttccttcctctatgtctcttttgcttgtgagtaggatatcataatttacatcacttttaaagcttgattccttattctttataacttccttaattgatttgaagttggtaagctcatatcctaaactctcttgatcctttgattccattttcttcttacaataagttcccatgggatgggtttcatgtaaaatcttgaaggattgatc

SEQ ID NO: 10574 - DNA, 203 bp, Glycine max
  Clone ID: PAT_MRT3847_109559C.1
ttctgggggttaaaatgagtaaccactatactctaaaaactgcaaaacacgccctgtcaataaatattaactaaggctctctttccttctttctagtattgacactgtacaacaaagtttaaagactaagcttaacccacactaggtaaacgccccaccctcgcaagaggggggggacctctaattaatctctattgataaac

SEQ ID NO: 10575 - DNA, 670 bp, Glycine max
  Clone ID: PAT_MRT3847_10955C.1
aaattttctgaccatgccttcatcaactgcttttcaatggctaagccttgttggcatcatttggctccaatccataaatggaacaaacaccaatttccctgcttactcctcccagctgaagcagctcctctccatttcccaatttcagctcaacaaccttgcttttgcctccgatgcaggcaaaatctttggctttttttctggcatggctgctttttacctccccctttggcttgtcctcatgattggttcaactcttggactaattggctatggtgttcaatatctcttgataacaaaccaaatctcctctctctcctattggcatgtgttcttgctaactgttctagcagggaacagcatttgctggatcaacactgtgtgctatgtgatcacaataaggaacttctcatacgatcatcgccaagttgctgtggggttaacaactagttaccaagggttgagtgctaagatttacaccagcattgttggaactgtttctggacaaaacaaggcttagacatttttctttctgaactcattcttgccactgatagtttccctaatagcaacttctgtggtcagagaaattgaagctgtcacaaggcctaaacacatgaatgttggatttgctgctatgtttggtattacaattgccactgggaatata

SEQ ID NO: 10576 - DNA, 116 bp, Glycine max
  Clone ID: PAT_MRT3847_109560C.1
agtatgatgaatggatgccaattaggaggtcaagacattccaggtccagcttaagagggctaacaaacagggtagaccttactgctgaagctgagcaatggaattttgtacccttc

SEQ ID NO: 10577 - DNA, 517 bp, Glycine max
  Clone ID: PAT_MRT3847_109561C.1
acgagatttaattggaaaggtctgagctccgatactgctccacaaagtagaaaaaccttccgtgtcttattgcatcataccgttcatcacgtcaccatccacttattagtcgagttaaatgaaggcgaacaatgagttaaatgcacaacagccactcccaataaatgatcttactattactcaatacagctatttccttaagaaaaaaagcatctgtctcttttttacgagtgcaatactgtttattatgatcattcaagcaataataacactcgtgacattgcattcttttgaagaactgagccagaatgcaaagaacaaacttactatttgttgcattttggttatggtgggatcatgttgtatgattgttcttcagtttatatttataagagtttcttcgcgcacagctggatcactgcagttctattcgtattggacctttttcattcaactggcttacacgatattttgtttggaaggagcaatcgttcctatgtatcgtctccagcatctg

SEQ ID NO: 10578 - DNA, 486 bp, Glycine max
  Clone ID: PAT_MRT3847_109562C.1
cggctgcgagaagacgacagaagggcaccagttccctgatgagtccttgagtgaagcattggagaggtttcggggtttgttgagaaagactcccacacatggattctctgagccaattcaattgaacatgtttatagatgggctgagaccataaaccaagcagttgttagaggcttcatcaggaggaaagataaagctgaagacccctaaggaggcaactgagttgattgaaaatatgtctgccagtgatcatgctattctaggtgatagagtgcatcaacccaccaagaggagcttattggagttatcatcgcaagacattgtgttggcacaaaataagttgctttctaagcaacttgagatcttaatagaaacaattggtaagttgccaactaaattgtctactggtcaaccttcacagtcttctgttttgcaggttataggttgtaccatttctggtggtgctcatgaatccggccattgtat

SEQ ID NO: 10579 - DNA, 725 bp, Glycine max
  Clone ID: PAT_MRT3847_109563C.1
gcacgagggaatacttgtttctcttcagtgacccaccagtatgtcatgtcggatcatctaaatgatcctttgaagactcccttggattggaggacaagattacagatagctaatggcgttgtggctgcactggaatacttgtttctcttcagtgacccaccagtatgtcatgtctctatcacctcaagcaatatcatgttagatgagaacttcacagccaaactatctgactttggccttcttacatctggtggaaattctgttatggtgccatattcagaagatttgaagcagaaaagttgtaagattatattccaacttggagtgctcatattggaactggtcaccggtcagtcatcagagatggaaggttcggatttaatcgaatggatccaagaatcccgtttttacaattccatagataagatgatagatcctgatcttggtaacaattatgactgtacggagctcaaaagtcttctagctgtggcaaaattatgtatcaaatcatgggacaagccttcatttacaattccacagttatttcggcatctccaaaagaagattgatattagcaattactaggattcttatatgttttgtttgaaaaccttgtggtttcttgggagagtatttagcactcccttgtgtgaatgctttcagttttcgtacctcttgaagagtcagttttgataactgcgataatgttcatttgaaattacatg

SEQ ID NO: 10580 - DNA, 317 bp, Glycine max
  Clone ID: PAT_MRT3847_109564C.1
aaacccagatagtttttaaagggagcaaaactcctaatggggttatatttacaccaacaaaattttatggggttctttaaatgcaattacttaccagattagtggcgcccatcactttcactcaagtctattacaaaggaaattgcttgtgggaaaaaatggatttcaaaggcgataactaattaagaaataaccttcatttaccaatcatacctaattttctttaatggccttcggccaaaaataagaattcacaactccttattttctaataggttttaccaattatgagaacaattatatatttacaacatttt

SEQ ID NO: 10581 - DNA, 233 bp, Glycine max
  Clone ID: PAT_MRT3847_109565C.1
taaaacctcgtttcttctcaatacaaaaaaaaaaaaatgctgaagaacctgtgtctaatagggttcacatggaagccatccggaatttgttttgaagaaggacttggcaatggtagggttcgctattaccaagggttgtaaccattaattgccttcccgtgtatggaacctagaattttccagttgtgggcctacccaaagtccatgggaggagtcttgcaagtccctaaaag

SEQ ID NO: 10582 - DNA, 565 bp, Glycine max
  Clone ID: PAT_MRT3847_109566C.1
atttctatcgcctgtctatgccgactcctttcgctgagaacactgtcccctgcatctgttgagcttctttcttctacttcctttcacgccgcacctcgtcccgctgcctccattgctcttcctcgatgctgtgtctgctggtggcggcagctctggccatgtgaggagatctgctaagtataaccgctgccttgtgcccggatgaccgcggtgagaagggacaagaacagggggagaaaggcactgttccaggacatactttgctgcaggcggctctcggatctccttcccaggcagcatctgcgtagcaccatccatcctcttctgatgctctccatcagcggctcctgtactttgccgactatcatgtcttcaccaatggctgaagccattctgatgctgacatgtgggttatgtgatcatgatgatacgcatggtgatcttgccgtactttaaggtcaaagtaagcgctggtgtctttactcctgcttcacgtcagcgctactgtgtccctagggcctctatcgagcgtcactacttgatccgtcaccctaatcctgctttt

SEQ ID NO: 10583 - DNA, 731 bp, Glycine max
  Clone ID: PAT_MRT3847_109567C.1
ctcttttttcacctatataccctctaatattctaattctctctcttgatccaacaaacaaacactaccattttgtttgttctgagtagtgatccatgatggaacctcaacaacaacaacaacaagcacaagggagccaacaacaacaacaaaacgaggatggtggcagtggaaaaggggggtttctgagcaggcaaagtagtacacggtggactccaacaaacgaccagataagaatattgaaggaactttactacaacaatggaattagatccccgagtgcagagcagattcagaggatctctgctaggctgaggcagtacggtaagattgaaggcaagaatgtcttttattggttccagaaccacaaagctcgagaaaggcagaagaaaaggttcacttctgatcataatcataataatgtccccatgcaaagacccccaactaatccttctgctgcttggaaacctgatctagctgatcccattcacaccaccaagtattgtaacatctcttctactgcagggatctcttcggcatcatcttctgttgagatggttactgtgggacagatggggaattatgggtatggttctgtgcccatggagaaaagttttagggactgctcgatatcagctgggggtagcagtggccatgttggattaataaaccacaaacttgggtgggttggtgtggacccatataatttctcaacctatgccaacttctttg

SEQ ID NO: 10584 - DNA, 463 bp, Glycine max
  Clone ID: PAT_MRT3847_109568C.1
ctttgggagctacttgcacaaggttattggctcaagggtccccaacaccaacatttgctctggaagctacgacattgttgctgtagaacagaagaaagacattgaagagacccatcagaccgacgatgacagatggaagggtctcgcctatgatatctcacactaccaacaggacatcacaagaggaaagggtggggttgactcccttctacaagcttcacatgatgctggagctcactatgctgtcatgagctactacgagtaccttagcactggacttcgccagtactcggaccacaacatggatggatcatacattgctccagcttgtatggacaaacttgttggacacattgaccaagactttatgaccctggccaacatcatcgttgctctcatttctcggatctgtggaggcaatggaacaggtaaatatcttcaatgtgagcatgtcttagtcaga

SEQ ID NO: 10585 - DNA, 2425 bp, Glycine max
  unsure (1)..(2425): unsure at all n locations
  Clone ID: PAT_MRT3847_109569C.1
tgagattcaacgtccaaaagccagtatagtaccaaagaaaaaggaggtatatatcttggtctttaatttctgaaacaggcacacacattatgtcccacgcgtccgcaaaaacaaaaaaagaaattaacataaagggtatctttttggtcttcaatttttgcaacgcagagacacatctcaccgacccaattgaagacccatttcagaattttcatttttgatcctctccgttcacaagaagctcaaaaactcaaaagggtagtggtggagtaacacaacacaacacgacattaacacagccatagaaacagagaatgagagagaataacaacgaggttgtaatcacggcgggggaagaagagaatcacgtatcgggagggcatcttcgtcattccagggacggaatctggtggtcagtcgtgaaatcattgccacgatccacggcggttctcatcttccccgtcatgctcatcatcggcgcgttgacttacacgcgcacgctagacacacattgtctgtttttcggagcatcttcaacaaaaatccataaccaacacttgcctcaccagtttactgctacaaaaactcaatacccttcatctggaagccatgatcagttaaaaccagaattatctttctctactgaacctaaaactccctacctttcttctaccaaaatcaatgatcaccacttgccacaacactccagtgcaagtgcaacaaatgctcaatatccttcagctagaagtcatgatcagtttctacctgaatattcaagtcaaaccaaaaccccaaaaacctatggagacaaccaaaccactcaaacaaggcatcaagaagagaacaaaggcaatgataaaccatcaacaatctctttagcaacagctgcaatagctgataaagccgtgtcagccaaaaacaccgaggcttcttcgcttggatatggatatgacgctgacactgaaacaactcaatcaagggaccacgatgagaacacccacggtgaaaaaccatcagcaatctcttctcaggcctctgcaatttatgataaagccgtctcagccaaaaacatagtgacttccaagctcggattaggcgacaaaactgaaacaactcaaacaagccgtcaagagagaacacaaccacaaacaatctcattggcaacagctgcaatagctgataaagccgtctcagcaaaaaacactgtagcttccaagctcggatacggcgacagcaactgaaacaactcaaacaagccatcaagaacagaacacaggcaatgaaaaaccatcaacaatctcatcagcaacctctgcaatcactgataaagctgtaactgccaaaaatgttgtagcttcaaagctcggatatggcgacaacactgaaacaactcaaaccactctagcaaggaatcaagaagagaacacaggcaacgagaaaccctcaacaatctcatcagaaacctctgcaatagctgataaagatgcctcggcaaaaaacagcgttgcctctaagcttggtttcggtgacacagcaagaacacatgaagagaagagaactaaccatgctgctgctccaacagaatatggaaaaagtgttgctcagtctctgacagagaaactagctccagtatctggaaaagtttctggtgcaggaagtggtgtgaagtccaaagtttcaggaactgaaaaaattagtaatgtgggtgtggaacaggacaagggtgtttctgtgaaggattatttggttgacaaactgaggcctggtgatgaagacagggctctctctaaagtgatatcagagactctacataagaaggaagtgcacccagtggaggttactgaggaaggtgtgaggaagatggtttctgatgcagtgcataagagagaggatgagccagagagaaaagtggaacatcaaaaaatactggggaaggtaacagagtcagaggaagtgaaaagaaggttaggaggtgaggatgtggagacagagaaaaagtaccaagagatgtatgtgaatagcccagggacaggtgtggttgataagcttacaggtatggttgggacgtggtttaccaacccagcagagaatcaatcctcacaagattcatctatgaatcatgaggcatcaagggcagaagtggaacatcaaggtgcagcaggtgcaagaaggctacaggagtcacctaattgaagaagtgggtgtgtgtgtatatttcttaagagctgtttctatagctgtgtctagttcttatttggaaaaaagtttggatgttcaagtcatagtaaaataaactttttatgtttttttttgtaatgtctataataatttttcaacgcttctaaatacggtcatagaagttgggtttgtattatgacatatatactattgtattatgacatatatacccttattanncctgttt

SEQ ID NO: 10586 - DNA, 590 bp, Glycine max
  Clone ID: PAT_MRT3847_10956C.1
ggctcgagaaatagctatccaaatactctttcttttttaagaaatatagttgtgtgacgatttctattgtcttcagacttctaattgagttgcaaaacacaggagtaaattagctaaattaaagttgttttttgtgaacatgaatttctgtgattgagattatgcacttaatcatatttcgatgtgatttcattttcttgtgaaaagtgcaaaacatattgagacattaattattgcctgcttatttgaatattatttgttttcaaattatttgcactaaattctttgtctttgttgatacaaagttgaatataataattatgtattgatttattgtgtctttttgcagctattgtatgcagggttctttctcatggcattaattagatgaggatatcgtggaaggcttaaacaatgttctcgacacatacaccaaaataaaaggaatatatgttttgcatctaagatttattaaataaagccgaatgttggttcttgtatcattaagatttttttttaattgcgaagactttatgttttcatattaccttgacttctacggtcaaattttcataagaggaataaagcac

SEQ ID NO: 10587 - DNA, 127 bp, Glycine max
  Clone ID: PAT_MRT3847_109570C.1
tataggactggaaagactatcttggaagcaaaattcgtaaaataattattctaaccaacaccgatacaaaaatctataagaggaaaaatacatttatagcaaggtccaaataacatgtatacaacat

SEQ ID NO: 10588 - DNA, 112 bp, Glycine max
  Clone ID: PAT_MRT3847_109571C.1
aaagacccagaatgtatttcccccacctcaggagggtgacaggaacctgctctgcttagaagtgtttttggaagcacattttaagaggggcgcactcgagatcgctatggaa

SEQ ID NO: 10589 - DNA, 421 bp, Glycine max
  Clone ID: PAT_MRT3847_109572C.1
aaccgacaaaaataacctgacaaaaaaatccaaaggccaatcccatcggaagaaaaacccccacgaaagacaagggagggggaaaacggggggaaggggggggggagaaaacagaagaacacaggggccaaaacaccccagggcggaggggaaaaacaaaagggagacagaacgaaaaggaagccgccccaggcaaaggccctcccaacaggcggaggcgaagaccacccgcctgagaggcctgagaacagccaaggggggggcagcgccaaagggacccaagggcacacgcgccccgggggggaagccccgggggccaaagcgggggagccgccaaagggagccaaaaaacaaacatggcccaaagcttacagagcgctcaggagggcagacacgggaggaggggaacacaaaggggggg

SEQ ID NO: 10590 - DNA, 1156 bp, Glycine max
  Clone ID: PAT_MRT3847_109573C.1
acaaaaaccgagagagggcattgaaaacatgttcggaaaaaatcgaccgcctggcattgttcccaccggaaccttatccgactccctccgtcgtccatgtctcccccgtcctccgcctccgtttccacgcaatctctccggcgacattgaacttcctctcctcgattttcccgccgccggaaatggctccggcgccggcggataacctaatgttgctggtatcagatagggagcctcacgcgctagatctctccgtttttttatttctaactaactaactaattaactgacgaatccgttgcgacgatcgtaactaaccgcggcagcggcggcggcggcgatggggaagggagggcaatgcttcttcgagaagcttcggaggtgcgttaggacggttttcttcgtggtggcattggtccggtcgctctcggtgacgtcgctgccggtggtcgtcgcggtggtggacgtgttggtgccgtgcgttttgatcccgaacttcacttgcgtcatgtgttacagcatcaaggatcattttcaccgttacgctttcaagagttccttcacggatattcctctcatttccgtcataagatcccttatcattctctgtgtttattccgtttgtgatggtcctgctctctcacatggtccttaccttggaactgtgactctgtgctcctttctgtcaattgttctcctttcggtcaaagcttgtgttttcaccgtaaattcccatattgaagcggaggcttcggtttccctcaggaagcatagactccatttgaagaagccatggggaatgcctgtcttgtttctttcatcagttgtgtttgcccttggtcatactgtggttgcttatagaaccagctgcagagcacgcagaaagctcttgtttcatcgagttgaccctgaagctgtcctattgtgcaaaaatgttttctctggctatccaaaggtcccacgctctccaactccttctgctgggagaacccccaaaagtgactgtgagatgaggcgaagaccttttgggacagctcgtgatgaagaactgcttgttagattgcttgcaaactcagacagcttattcattacatgccaaggacttacactccatcacaagctcagcttgcctggttcgcccccgcatacattgtcg

SEQ ID NO: 10591 - DNA, 356 bp, Glycine max
  unsure (1)..(356): unsure at all n locations
  Clone ID: PAT_MRT3847_109574C.1
cggcccgacccacgcgcccggggtggccacccctgcgggatctatctgtgccaggggnggcaaagatggggggactcttatgcgggaccaggcggacgggaacccgcaaactactgctctcgagagcgggctcaatcatacatgcactctgctacagcccccacaggtactggctctgagcccacaccgagcaaagcattaggagctgggactaggagagcaacaacatcgctgaggattggaaggtggaccacaagactgaggcgtgacgcacacctcctgtggaggtaacgccaaccacaacaaagagatctattgcacacgttcgaacaggagtgcggaaggaagcactctga

SEQ ID NO: 10592 - DNA, 242 bp, Glycine max
  Clone ID: PAT_MRT3847_109575C.1
attttcctttttaagggatgctagtaatggttgtgttgatgttggtaatgttgcttcagcattgactacatcaagtgtgctcgaggcgcaaagccgaaaacccaacagatatgaggtctctcaatataggtatcgcaatgtgccgataaagcgcagagcgtgggttgagggccaaatgtcttttgatcaatcagtggtagcaattatgtcaaaatgtaaagccagtatgagaatgggaaaca

SEQ ID NO: 10593 - DNA, 445 bp, Glycine max
  Clone ID: PAT_MRT3847_109576C.1
ggaaatactaacagtgaaccacttctcttgggacaccctgaacaaactagctgtagaggctgcacggggctcagctctcattaccacctcagcaaaagcaaattatatacatagattctaaagcctgcaatatactactcgatgaagtctgttattatacttacttcctctctgatactatagaagactgtattaattcggaccccccattatggtttaattgttaaccaaacttctgatagattttaattttatccacgaagagcttggacgaattatagttatgatgacacacgaaataatcctgggaaaactttcctttacagggcttttttaaacatgtgacacactttatatcaatccaaactttttctagagggttatgtggaaaacgcagaatataacggttttataccttcacatactgctcaaatgtcactggtaa

SEQ ID NO: 10594 - DNA, 295 bp, Glycine max
  Clone ID: PAT_MRT3847_109577C.1
cgctatggctccccctcatcccggtgggatggccgccatagtggctggaattatgaacctggctctagatgctgggaaagctacgcctgcttctccaccagtccctgctatagcgtccaccggtggctatattatggcagcctgcgaggattgcagcgctccaacgcgcgacctgcccagatatgtcactcttgtgcaagatccagactagcactatccctgctcctctcaaatatcgaagacccactctgcggcattgctcttcgtgagcgcacgccgagcggataagggtgca

SEQ ID NO: 10595 - DNA, 249 bp, Glycine max
  unsure (1)..(249): unsure at all n locations
  Clone ID: PAT_MRT3847_109578C.1
ttcaataattactaaaaacggacaacgantattctttttgtttgggccacgctngagcangtaaggaatagacatgggacgcttgcggttgaacagaactgacttaagcggcgaaccagaacgcagaatcggccgcagaaattgccaccagaatcacntcnaagacgggtataagcaaacacaaaatgccatccagcacttctcttttcaatccccaactcaaatctgtgagaaaaatctcaatttcta

SEQ ID NO: 10596 - DNA, 341 bp, Glycine max
  Clone ID: PAT_MRT3847_109579C.1
gggcaaagggggggagacacaagaaacaagaaccagagcggggcaggagcaaaaacgaaacaagatgggaacaagaacgcgaataacagagcacaagacgcagacaagaacgaaacaaggtataaacaaaaacgcggatgacagaacaggggagaaaacacgagcctgggcaaattaaaaagaaaataataggataggatagaacctgggtcaagagctgaggctctgataccagatgatggggaaccttacggggggggatcggttgatacaggctacgggtatttgggtgaggggggttccggggaaggaagataagtgaggggagacgccacttccgg

SEQ ID NO: 10597 - DNA, 161 bp, Glycine max
  unsure (1)..(161): unsure at all n locations
  Clone ID: PAT_MRT3847_10957C.1
tcgcgtgcgtggggagcgaaaagcatcctccaacagctgctactgttagatcaccgctcctcccgggcccatgaggncttccagacaccattttcaggaatgctgtggaaatggctctagcccgattccgagcgtcacggactcgaaaaccctaacgcgcg

SEQ ID NO: 10598 - DNA, 421 bp, Glycine max
  unsure (1)..(421): unsure at all n locations
  Clone ID: PAT_MRT3847_109580C.1
aagtaagatcataatttcagatcccccccccataagtcatatgtatagtgtggatataaaattttcttggctgtaataacattgtgtggtttcttttgtatcattataagatgattatgttttattctggtcatgagttattctttgatgaaccttaccatggttatctgactgaatctcgtgactatcaatggagttattctttgatgaaccttaccgttaccactatcaagtggagcaaacctctgcattcctattcaaatagtactgtgtaatttgttccagcagccatgatggcatgtagtatgtcaaagctttgttgagatatacaaaaaaaaaaaaaaattaatttaatcttatctatcttaatttanttaaaaaaaaaaccacaaccnnnnnnnnnnnnnnnnnnnnnnnnnnn

SEQ ID NO: 10599 - DNA, 238 bp, Glycine max
  Clone ID: PAT_MRT3847_109581C.1
agcgcgagccaatcaagcctcgcttcaagacacttatattggacgttttcttacaaacattgctttcatcgaatcgggggtagtttcaaaatagggaggggggggtaacaaccaacaactttaagtatctgtacacatctttgtgcggaaaacaataataaaactcaacccttgtcacgaacttaaacttctacagttcaccgactaaaaagtaacattgaaccacaccaacattatg

SEQ ID NO: 10600 - DNA, 261 bp, Glycine max
  Clone ID: PAT_MRT3847_109582C.1
cggtccggattccgggtcgacccacgcgtccgttcgtctaagatctgttcactccttcgactacgttccattccttcaaaatgggcaatgacccatctgcgcgtatcccgctcagtggggctgcagggacagatcgtggagtgctgctcgtccctatgatctgcgtacgggagggacggtcgccgacgctctgcacaaggtggctcctgatctctgcgcttccatctggactgctgtagctgtccctgcggccgggggcgt

SEQ ID NO: 10601 - DNA, 344 bp, Glycine max
  Clone ID: PAT_MRT3847_109583C.1
ggtaattttttttttggtttttggtattttttggttttttttttggtgtttaccctttatttaccccgatctattaagggtatgagggtttcttacatagtcacaacacacacaagcaacttggcaccgaagcttaagcagggagagggcgcgggcccctcctttaaaaaccaccaaatgggacgagggaggacaaaaaaagatagggggcggacctaatagggaaaaggggaaaaaaaaatggcaccacggaaccaggggggggaaacaaaactgcaaaaaaagaggggtgggaccggaaacaaccaaaagtatgaactggactaacgtgaagaggaattgcc

SEQ ID NO: 10602 - DNA, 586 bp, Glycine max
  Clone ID: PAT_MRT3847_109584C.1
acgaaagctcggaattcggctcgagaattattcaatttgaaactactattgtgtgggtatcatagattgcaaatcaaatactaatagctaggcaccattctcgtagcagaagtcctctatcgagatggcttctaaagtggaagtgaggttccacttgggcatgaagcttctaattgcatccaatatttacattgaaatagggcaattgcttagtgcacttcccgaattgcttcccataattcctgcgcctcccaccggaagcaataaggaaagtgcatgaagcaattccagaaatgaaaaacacccttgaattagataaaaggtcaacacaggctctgcctgttgctttgatgattcatgataactcgtcggatcgcacggcctttgtgccggcgacgcatcattcaaatttttcccctatcaactttcgatggtaagatagtggcctatcatggtggtgacgggtgacggagaattagggttcgatttcggagagggagcttgagaaacggctaccacatccaaggaaggcagcagggctctgtaactgcataccataaatcttgtgtatattgaaacctggtgg

SEQ ID NO: 10603 - DNA, 487 bp, Glycine max
  Clone ID: PAT_MRT3847_109585C.1
cccttttccctattcaagggacaagttagcctatctatcatgcacttacatcaatcaatacggccttgagtttctaaggctactcctgcggccactaaaacttatcttgggcatgtcacttccaccagaataatccccatcatcatccccatcatcgtacccacctgccacgtacacaggggcccgaactggaactctccttgggggggctgcaggccgctttcgtttcatatttgcagcgcaatgggaatagaccacagggccttccctcaaagcatgttaaaattcccgatatctttgaatcaatactcgcggacttgaaggcaaactgaactgcgaatcaccgatataaaaagcaatattctgcctggagataacctccccagggttcggctgtccggcaggagaataagcctgacaacgggcatcatcaagactatacatgacccccaggggcctcttgagctccaaaagaagccgcaaagca

SEQ ID NO: 10604 - DNA, 310 bp, Glycine max
  unsure (1)..(310): unsure at all n locations
  Clone ID: PAT_MRT3847_109586C.1
ccgattcaagaacaaccgcaagaagcgcggcaaagagagcgacgggcaaggaggcagcggaaagcacaggaagcacgccggcgggcggggaaacggcggggggaagcaggaccacaaggacctgagccacaagaacaaaccgagcctcctccggaaggtgggaacgaggcacgagcatattgtttgcaaaaaatacaactccgacagacggaacgnagaaaaaggagggtccgcgacagacgaagacgcgaaggagaaagcacgaaagacgaaggaaagagcgccgccgcggggagcgacaacggagggg

SEQ ID NO: 10605 - DNA, 569 bp, Glycine max
  Clone ID: PAT_MRT3847_109587C.1
acgagatacttaatttcatgaataaataatgtatgcacttacactctcattcaatcataaactgacatgtatgataagtttgttgatttttgtaataaatacaatatcttgtaagttattcctatgatgattttttattgtttggcaatataattttattacactgactgagagtgtatgtttattgaaactcttattttatttggtagtgtatagataagtttgttgatttttataatgactttcttgtgaaagtaaaacttttatgctgacagtaagtgtctattaaactcttattttattttgcagcaaatagaggaattaaccatacttgggtcattagacctatcatccgtgaagaacatggaggatcctaaggtggttaagaaagtgaatgactgagtaacatgtagggctgatgctattcctggggacccaccatgtcagcatgctggtccgcggtaagtcatgtgggccacaaagtaagaaaaaaaagctaatgaattcaaacttgaagttctaaaccaaaaaattcttgctgatgatgatgctttagaaagggagaaaaa

SEQ ID NO: 10606 - DNA, 350 bp, Glycine max
  Clone ID: PAT_MRT3847_109588C.1
cctattaatgttgttaaattaaaaacactctacactgggcatggtcttaattgtctatatcaacacaaccaaaaaccgaaccatactaaactagaattctacatttcacctctcttctacaaaaaaaaacaagctctattgaaaaactattttgcttaaaattacaaaacgtagaagttaaattaacttatagccaagaccaaaatattttaatatacattacaaacctcaaatttgatttcctatcttaaaatctatatcaatatatatatttttttggctttggtaattctttttaaaaaaattgaattttactttattttcccttatatatttatttctaaaatttt

SEQ ID NO: 10607 - DNA, 529 bp, Glycine max
  Clone ID: PAT_MRT3847_109589C.1
ccagggaagattacccattaaaaaaactggggatggtttaatttttccaggggccccaaacaacggttttttttttttcatggggggcggaaaattttcacaaggataggggggggccaaaattctttccaaaaaatccaatttgattaaaacgacttcataaaacaaaacttgggcaattgggaagtggacggcccttgaataaaaaaaagctgtataaaaaaaactctggcccactgggaggaaagttttcttgattttaaaataaagcccagtggaaaattttggggcccccaatggcacaagttcttgcatttttaactttttttttggggggaccatgctgttaacattcggcccggtggggctgctctaaagtcccttgccctttggggggcaacaaattttattgcaaaaattgttagggagttaaaggaaactttgatccaggggacccaacccttgttcctggaaaatccaatgccccccacataggtttattgtctgccccaaaagcggggctggccct

SEQ ID NO: 10608 - DNA, 2224 bp, Glycine max
  Clone ID: PAT_MRT3847_10958C.1
tgcattttcttcggttgatcccttctccgactataaaactgcaaatcccatcaaaatcccaatctttagggtttccatgtccaatccaagggattcgtttatgaagatttagcgaaaagggttgaaattgatcatggatttgggaagcgaatccgtggaagagaacgaagtgaatcatgatgggaatggaaacggtggttcttatgatgacgagaagattgggttgggtttggagggaaattcggatgtcaacggttcggatcaaaagggaacggttggcgaagttgaagtgggtagtgcggaaggtgtgaattccaaagggacaccaacaaaggggtttgggttgaagaaatggaagagaattcggaggaatgttgttaaggatccaaattcgagtgttgattcgggtaaagtcttgaagaggggcttgtctggcaatgccaatttgagtgaaagccagccttttctgcgcgatgttaaggagaagaatgaaggatcttcaaacatgtttgggaatgtagtgttctctgatggcaatgtgatccatggttcaagttcggattctagatatgcacttggatctggttttgttgttgggactgattctgagaatagcgaggatcggagtagcaagtcttctacagcggctagcgagcccaagttgaggcaagagaagccgtagcaagaatgtgaattccaagcatttagctaactcggctcaacgagttcaaccaggaaagggacgaactgaaggcagtaagaaaccaggaggaggtggaagagtgaaaattgagaaggaaaattctttttctagtttggaatctgattcaagaagctccaactttaagcaaggtgttttttcggttactagtaatggaaagcatactagtaggccaaatgtttacgatggagttaatagtggtgaagcacacactaatgaacatttcactgagggtgttgaggctggttatggtaacgaaaatgttgttgaggatgaatatcttttacaagatcttttacaagagaatttgggtacaaatttgtcttgggatgttgcagaagaaaaaagatcttcagccgttgaagatcctataattgaatcggttagttgccttcaggctgtccaggaggcccttcaagaagaactccagaaattcagggagattgggattgaagctatttcaccagatgatgactcagctaagtgtagcagtgcatctgctggtactactattgatcttggacttaataaatcaagccaatctggtcagtctggtgcagaagaaattagacaaactgcttcaagttcctcagatcctcaggtattgagcctgacacaaaatataaatattttggaaagcaagttggaaaatttactggaagatttacagggtgtgcttgctctgatggactccaggattgctgaactggaaacatcctcgagtagtgttaaggaatctgcaagcaccatagctttgtccgagaaaaaatgtgaaagggttgagtcggagctcgaggggcgtttcaagctaaggattgaagctgaattgaaatacctattcatctcaaaggtaatgcagaacatgaagggtggggcaggtatccaacagacattattggaagaacaagagaaactgtctgaaaatcaagcgcagattctcgacaaagttgtagatgcagagagtaaggcttcagtgctgaagaacaaaacagaagagttggaaaaatattgtggtgatagtgtagtagttgaggagtcttttgtgctgcagagaagggtatgtaagatgtcattttatcttttcatacagtttatgtttttagttttgatcttttggctttacatgtcacagttatcgcacaattctgggatggttgtgcccacttaggcctgcaaaattaggttcattttgtgcaatcttaatagttttttccttttctttttttctcttttcttttcctgatctttgaatgtaaaatttcgttgttatagaaaactgacccttctttctctgggtagggggagagcgtgtatttgctctcgttgttttaatatcattttgtgcacagccccttgtaatttgggcttggcaaaacaattgttattgttactttttttgttcttcttgagtttaattttaataacatagatttgtatattgtgaacaaaaaaaaaaaaaaaaaaaaaaaaaaaaaaaaaaaaaaaaaaaagggcggccgccga

SEQ ID NO: 10609 - DNA, 333 bp, Glycine max
  Clone ID: PAT_MRT3847_109590C.1
ggctcgagcggaacctctgcatctatttcttattctggtggttgtaacgttacatatgtgagggggcctttgtcgacacacttgggtcagtaaaatattttctactatcatatgtactccggagattggttctgtattggatactgcttttctccaagctgtgttcctaactcgaccgtcttcagcgggtttagacttactgagcggtgtagactactatgagttttcatattgagagacactaatttggaaagggaatccttattctgttttattagaacctttctagcacaactcattgcaccgggatgctcttgaacttcttcacacatt

SEQ ID NO: 10610 - DNA, 600 bp, Glycine max
  Clone ID: PAT_MRT3847_109591C.1
gccagctaccatacaaaaatcgcggccaccctatactaacagtgtacaggatcgtaagtgcacggatgctgcctaatgaatcatcattcaataggccgtacaagttccaccaacccccaagcaagaacatggaagaattaatacgccatatcggaactgagaagcacgtaaacaacccatgttcttggacaatatgatgtcacgccttgactaagatcatcaaaaagaaatgttgacgaaacactcaaggagcctaaaacataagatggcacagggtgcacatgttatgtacagatgctggaacagcgtgataccctaatgccttatcaagacgtaggataaggtcccttgctgcgctcttctaatagctcggacaagacagacaaggcatctttcacttcgcctggaagagagagtcgccgggggtgtacccttggaggacatgcatggcggtgcacagatatcttccaggaaatgggaactgcaagtgccagctgccgcttgacctgcccttacatggtcataaagaacgccccaaaaatgagacagctctgcacaagaacctgtggtgcagctggaaaacgtacaagcagtcccatg

SEQ ID NO: 10611 - DNA, 373 bp, Glycine max
  Clone ID: PAT_MRT3847_109592C.1
gcgttcgctcaatttatgataaagccgtttagtatgcacttgagcataacaattgggctctactatgaagctgtgggcaaggaataactcaaatatggatgattacaacacactatttatctgtgtaatggctggatgacccgatacagggtctaaacacaacggatgatatctacgatagttatactttggccgacgcagaacaaccatggaaccatacgcctgagattgatgccatactttgttgtcacaaacctttacgagcaatcccaacctagacccagtgacctagaggagttctactgctctctttgaccgtaagatgctaaggaccttatccaaacactggtgcgacacgcaaaagatacacgat

SEQ ID NO: 10612 - DNA, 243 bp, Glycine max
  Clone ID: PAT_MRT3847_109593C.1
ctaaatagttccaatcatagggggaacgggccaagttaaacatcataccaccctctaattaatgaaacccttaaaagtgtactaaatcacaggctcccccctcattcaagcccttgtccacatgatgcttaactacccaaaacaaaaaacactaccactgttctatttctttacggaatataacttcttactcaccatttattctatcagcataccccctttggtttatgaggtccactctca

SEQ ID NO: 10613 - DNA, 259 bp, Glycine max
  Clone ID: PAT_MRT3847_109594C.1
accatagccgctcctccttacgacctaactagccaacgttcaaaatttaaattaaaaactaaaacatagtaaagactgttctcaatcattgtataaaaactaccgcaattaagtagatttaataattttccatcttgctaccctagcatctgcatagcgcctaagaggaggcatgtcacatctgttaccagctcttataatgctcagccaagcttacatcctggaatctgtaccgaagtgtgggatcataagctgaacc

SEQ ID NO: 10614 - DNA, 666 bp, Glycine max
  Clone ID: PAT_MRT3847_109595C.1
cggctcgagattttgttaataatggcgtattgttctctcaaggttttgtttggtgttgtgctctatgcctttgcgttccaacattgctacgctgatgcaaactcaacactgattgtaaatgctgcttccaataatgcaactgcaaggcaaattcctaacacttttcttggagtattcgttgaggagattaatcatgctggcgcagggggactgtgggctgaacttgttatcaatagaggctttgaagctggaggcccaaacaatgccttaaatgtttataattggtctattattggagatgaatcatccatttcggtatcaattagccgtacctcttgctttgagcgcaataaagctgcattgcaaatggaggtgtattgtggtgctcacaaaccttgcccatatggtgttggtatctctaaccctggttattggggcatgaatattgagcaagggaagaggtataaggtggtctatcatgttaaatcagaaagaaagtttgattttcaactgtcattcacgggtgttgatgttataaaagtggcatctagtagaagacatgtttatggagatggaaaatggaaaagggtggagacaatagtggaagcaaaaactactaatcactattcaagtcttcaaatacccacaacaagagaagggagttac

SEQ ID NO: 10615 - DNA, 1388 bp, Glycine max
  Clone ID: PAT_MRT3847_109596C.1
gttctgccttcttctttcctccgtcgcctacagcggggtgcggcaggccccgtcttgcaatgttcttccatcttttatcctcagacacataaaatatggtgctttaagccaagtctttcagtaacgccaccgccacaacaacaacaacaacaacgaacctctcacgaagaaaaaccgaagccgataaccagtgtttcgaacccatttgtgaagcactgcctcaaacttcgcaattcctcttcttatcgtcgctctcatgcttctgctattgttgtgggtgctacccctataagagaaatctgcaggtttcgagagtcaatacaagatggaagtgttttaatggattgtttaattcttcctgataaagctgatattcctgatgggttggataaatccactgcttctgttgtgcgcgtgagctccgtagtgatgagaaagctttcagggctgcaaacaactgaatctcttgatgccattgcccttatgaaaattcctgccagttttttcagtgttgatgatcatcagaagaactgcctaaagtggtttccatctgttcatcgaattttagtccttgatgggattcaggatcctggtaatcttggtacattgctcagatcagccgtggccttcagatgggatggagttttccttctccccggctgctgtgatccattcaatgagaaagctcttcgggctagccggggtgcctcgtttcagctccctgttgtttctggcagttggaatcacctggagtcgctcaaaaaagaattccaaatgaggtttctggctggtcatccagagcatgaagggttggtcaagccagtgagttcactctctccaagcttctgtgattccttatcagatacaccattgtgcttggttttaggcagtgaaggaagtggcctttcagaaaaatccctgcagacatgtgagcttgtgagcattgcaatgactggagaatatgagtcactcaatgtttcagttgctggtggaattttcttgtacatgctccaaccaaagaatacatgattctgtatttgtaaggtctcatttaagctagtaaagctcctcttgtcatgccctaccaaatcgccaaaggaatatgaaacagttattgatttgcatgggagttgaatttgatgtttaaatatagaatgatatttcggttcactattcaagttgcttttgctgaacgttccccgttcaagtttgaatatgtaacctttaattttattttttcgttaacagtttgaatctaattaaactttgtatcatatacaatatgcaacaaatccattgaaatatatagtactcaacattaacaaattccaagtcaaataagaagactggtgaaattggtttgtaaataaaaaaaaaaataaaggaag

SEQ ID NO: 10616 - DNA, 479 bp, Glycine max
  Clone ID: PAT_MRT3847_109597C.1
atcaacaacgacgatctcaagtacgttcgacgactagtactactagcctgccgattgtgctagctgggacgcctcctccgacgttgtgcgtgacctaacctgcgaggagcactccgagttctaagacgagtatgccagcgagtaaatgctaatacgtgatgccactggttcggaaccggagacaggaaagatatacaatgaatcccagcctataggcttaattatgattaagacaaagaccgcgagaccagactgagccaattcttagactaccagaactggtgtctgctcgtcaaacctgcggaagatgtgtgtggaagtacataacggggagactttgtctgacattgatctacaataccactcttgactaatccactattgtgcactatcagcttctaaggcgacgtgaatgtgagcagcttgacatgacctaatattgtgccgacgaatttgctgtgggctacataagaccatga

SEQ ID NO: 10617 - DNA, 286 bp, Glycine max
  Clone ID: PAT_MRT3847_109598C.1
ctgctatttcaagttctcgtctttggggcaccatggcgaagaccacttcacaggtgaccgtgagtattcaaagggctactgtgagggcaccatagagttaagcttcttgcctgctgagctcatgaccgtttctgatggacctgacaagacgaggactcctagtggacataactagtgagcggatcacacttatacaaaatgatacaattagcaactggctgatagttgctgcttggctgataggctcatggctagtcaatagtgacatgtctaggattgcagcagt

SEQ ID NO: 10618 - DNA, 732 bp, Glycine max
  unsure (1)..(732): unsure at all n locations
  Clone ID: PAT_MRT3847_109599C.1
ttnnnnnaatgtgataaacgaagatatcaatatgtcattcgtactcttactgtaatatacaaaaaagaatacaattctatatgctccattcgttgaatcccatgacaaagattgcagagatccattcgttgggccaaaaaaaatttacagcacaaaattacttctaatagaaaaatactaataattaagcagccaaaaagttaaaatgatctcttaacattcttgtaatctgagtctatgcattccaattcagccctgtaaggattgagcaatttgagaagttcagttgctttctccttagtctcatcaccacatccaacttgcaacaccaacaagagcttctgaaaggcaccaacttgaagggcctcaacaagggttctcccttcatctttttctccaaacttgcacagtttccaaatcgcagaaacagaatagtctgttgtcaaaggtgaaactctcagaattttcttcaccaaaagaggaattgttagatcattcccacaagccttgttccttccttcttcagagctgcatagagagtccaaaatggtcacagccttctcacacatgctcttgtctgagtcaatgagaatgtcaagcaaagaagaaaccaaacccaattcaacaaatttcaacctcatcttatcacttgaattggaagaggatgaaaccaagtaccaaaccacactcaatgaggcctttgtgatggttggactaatcctcttgttgatg

SEQ ID NO: 10619 - DNA, 902 bp, Glycine max
  unsure (1)..(902): unsure at all n locations
  Clone ID: PAT_MRT3847_10959C.1
tacgtaagnnctcggnnaattcggncgtcgaggcctgacacaaaatataaatattttggaaagcaagttggaagatttacagggtgtgcttgctctgagggactccaggattgctgaacttgaaacatcctcgagtagtgttaagatttctagggaagagtctgctagaaccgtagattcgtcggatgaaaaatgtaaagtggttgagtcggagcttgaggacctttttaggctaaggattgaagctgaggttgaatgcctagccatctcaaaggcaatgcagaacttgaaggatggggcagttttccatcagacattattggaagaacaagagaaactgtccaaaagtcaagtgcaggctctcaacaagcttgtggatgccgtcagtgctgaatcagtacggcagaacagatggaaaaatatggtggaataagtgtagtagttgaggagtcttttgtgctgcagagaagagtatgtaagatgtcattttatcttttcatacagtttatgtttttagttttgatcttttggctttacatgtcacagttatcgcaaaattttgggatggttgtacccacgtaggtctgcaaaattaggttcattttgtgcaatcttagaagtttaagtttttttttttttctgatctttgaatgtaaaatttcgttgttatataaaactgacccttctttctctgggtagggggagagcatgtatccgctctcgttgttttaatatcattttgtgcacaaccccttgtaatttgggcttggcaagacaattgttattgttaaaaaaccccccaaaaaaaagggggggcccgccgggttaaataaacatggggtcccagaaattaagtagagaanaaaaaaannncccccgggggccagctttccctatagtga

SEQ ID NO: 10620 - DNA, 481 bp, Glycine max
  Clone ID: PAT_MRT3847_1095C.1
cctttgcgttctttgacgcgagggcggacacgaggggaaattttgatattccattaacacaagttgtctgatctaaacaatggaaacatatacaatttttacttgatgtgaataaactcattaatttttgctactattatgactctaattgcttgaaggaaagaaaaatcactattttgataatctcacaaataaaagaagaattattgttgccaatgttacataaaatcatgaacactgattgaattgatataggaaaatttgtgccagagaaaattgtctttatcctatagttggactggtaacaaattgcttattcaatctactgaaaaccatatgttaatgattgaacgatgcattgtgatatactaactattgcagtagatattctcatatttttatttatggattattatcatgttttaatttaatctatttgttttttatagaaatattatttaaatagcacatacatttttga

SEQ ID NO: 10621 - DNA, 267 bp, Glycine max
  Clone ID: PAT_MRT3847_109600C.1
caaacaaagggagggttgcctttgaaaagccgcatgaaactaagcgggagggttaacatggctcaggtagctgatataaaagaggtgtaaggatgctaacagtcaccatgctcaagaggctctgcgcagggccaaatataagttcacccggccgacatatgaacattcgttagcatataatggagatttacaaatttcaatctaagtgagcacacaaagttgaaacatgataacagaagtgtgccggatgggatcagtgccaaagat

SEQ ID NO: 10622 - DNA, 263 bp, Glycine max
  unsure (1)..(263): unsure at all n locations
  Clone ID: PAT_MRT3847_109601C.1
gtcgggtctatttttttttttattcttttctttaaagaacacttctcttcccccccagatttctttctttactcaccctcaatttcccttctattttncttcctgctaccttattatctatatgaancaactgcctggcgtttggaaatacctttactcaataaacaattggagcctcccaaatctaatggcatcaatgttatcccttaagctgttataaatcccttcaatccaacaaatcaccttctttattacccaaatca

SEQ ID NO: 10623 - DNA, 268 bp, Glycine max
  unsure (1)..(268): unsure at all n locations
  Clone ID: PAT_MRT3847_109602C.1
caaattacaaactcataaattctttaattccctctccatcaccaagccatggagctcctatgggagcttgccttcaccatagctctttctcttttgcttccattggttttcctcaaactcctctctgtgaccccaaacttggaagccatgagaaagtggctcttcttgggcgtgatcatgatcatggaattaaatctgattccaagagttgggaaacggataaagntgttcgaattggtgggganattgatgnattcagagacaagcc

SEQ ID NO: 10624 - DNA, 211 bp, Glycine max
  Clone ID: PAT_MRT3847_109603C.1
ggcagcacacacacacacatataaaatagaaaagattctcttccacgggaaatcacaataccgagagcttcttgtatttgagacttctagacaaggcaagggtgcaattctcgatgggcatatccagctgacagaaaaagatgaatttgcttacaaagagacgcgcactcacctcgcactctggtcccatacaaaaaaaaagaaagtgctg

SEQ ID NO: 10625 - DNA, 274 bp, Glycine max
  Clone ID: PAT_MRT3847_109604C.1
ggccgcttttttttttttttttttttttttttttttcgcgcatggaagacccgtacgcttgccatcagctttttttgtacaatcgctacatcactatttgaactcagtagggagagagatacaatgggagattctctaggtattttggacatcgccacttattcactcgtgagcataagaaaattaacgccgctttatcacgtgtatcacacactaagtctgggatggcaatctgagttaacaaatgacgatgctgattcatctaaacaagcca

SEQ ID NO: 10626 - DNA, 660 bp, Glycine max
  Clone ID: PAT_MRT3847_109605C.1
ctttctaatgttacgatttgattaatgtcttaacatgttcaggaagcatctatctagcaaccttttcttcttgtacatttttggtatggctgtaacacgatcactcttctttccggtaattgatttgcttggggattgatgtttgtttgagtatttgttattttgttttttccgcaacaggaaagcttgttgaagaagacgaagggaactttgctttatggctttcttacattctaacaggtgtaggagcaaatcttgtttcttggttggttttaccaagaaatacagtttcggttggagcttctggtgctgtttttgggttatttactatcagtgtccttgtaaagatgtcttgggattggaggaagatccttgaattgcttatattgggtcagtttgttatagagaaggtcatggaagcagcccaagcttcaacatcattatcaggtcgcggtggccacacattgtcttgttatgaacgcttactataggctatgttacagaaaacttggtattcagaaggattctgtttaaacccagaagtttattgaatccctatggaattgtatatagcgaggaataatgttacataaattttataccaactgtttctgctattctatattttaaaaaataaatgtaatctcagttcagttgtgc

SEQ ID NO: 10627 - DNA, 377 bp, Glycine max
  Clone ID: PAT_MRT3847_109606C.1
taaaaacttttttatttatttaacaactctaaggtcaatgacagatgctgaaggtaatgagatactgccaccagatggatttaactatcgaatgtcgagatatactgaaacctgccaagttctttcatgatgctgtttctccagaatatgttttgtactaaattatgagttctgtgttacctgaacctacgaacattcaatgtcgaggatgacccatgctttttaaggggcgagaactattaggaattgtataaactggatcatgaaatacactcgcttactctatgccaatatgtcatacatcgttcatggccatgctcaatctatcataaatccataacatggaccatttgtgttagatatgattccaacttatg

SEQ ID NO: 10628 - DNA, 321 bp, Glycine max
  unsure (1)..(321): unsure at all n locations
  Clone ID: PAT_MRT3847_109607C.1
caagagnnntnncggaggatgcagcccggcgtcaggnnctaatagattgccaacggacgaatattgaatccttgaccatgatgaaatacagattacatagtgggagctcttaagtggataatgagtatggtgccccaatttattgagttaagaccatttgatatttaaaatttctgttactttgtgccattcaaggctctcacatgatatgttcattaatatgcattgacacggatatcatgttcatttcttcgaaatttaatgcagaatttatgattttggttcgagtcagaaacaacaaacttattttatcaaaagctt

SEQ ID NO: 10629 - DNA, 223 bp, Glycine max
  Clone ID: PAT_MRT3847_109608C.1
cggattaaaaaaaaaaactttactaataataacttgtggcgtaccaaaatctgtacggcaaccactcatactttcatttaatggcatacaaaacggcttttctatattacttcaaaataatgcaaaatatccataatagccctcaaatatttcctctcctttgtaccaacaggagaacgttattagcttcccttaggagtaccattgctgctagaccttgtgt

SEQ ID NO: 10630 - DNA, 343 bp, Glycine max
  Clone ID: PAT_MRT3847_109609C.1
gggaacaattcccttatttgccctccaagaaaaatttcaaaggggccaaaacctaaaaatcctggactggccctttttttggtaacttttagggggacaattcaattttttaccttccaaacaaaaacaaaaagtgccttgggggaatccggttaaccttgggtaaaaccctccaaaccaattatttcaggcccaaagccttttttttccgtaaaaccccggggcccaaattggcaaaatcccctccccttttttatttaaaggggtggcccaatcccgggaaatggatttttttttattttgggttaaccccccaggagggggctcacaataacttttttta

SEQ ID NO: 10631 - DNA, 278 bp, Glycine max
  Clone ID: PAT_MRT3847_10960C.1
attacaacaaaatatttcaaatacactcgactacttttaaaaccgaaataccccacatactcacactcatcttcaaaacccctcttaaaaaactcctcatcatcctccctctaaaatctacaatcactcttcaacttccctctcccatcttccacctttcactaccacattcatctttcatctcccttctatcctctacatcatttccaatctccatctactcaccctctaaccccccataatcaaccacacccaccaaatcctcatttccaaacaca

SEQ ID NO: 10632 - DNA, 738 bp, Glycine max
  Clone ID: PAT_MRT3847_109610C.1
tcgaagggccggcccgggcccgggatcatattaacaaaactattattttcttatccacggtactcttccaaatgtcttcctcatcgctctgtcccacttctcttttctcactaaacttaactctccttctcctgacatcttctgcaccctgccctgtcgtccatttctggtcacattctgacaacttcacattcatcacgtgcctatgaatcctagcttgagaacactcgtctcctctctcatctacaacacccctgcaactgccgtagttagttcggatacggtggatcaataccaaaacactgaatgcatatgcgctggtcctttggcccggctgcttggcaacctcagaatgcatctcttgcgactctgatgcacccctagaatgcctcccacgctgatcgtacgacctcggagacctcaattgttactactattgctggccctggtacttgtgcactgacttcctggtctactttgacatcacctcctagttctgcgtgagaaacttgatcactgcgacagaccctgctgcgggtagctatcacgctatatactaattgaaccagcttgctcagaaagcttatgggaataatgacttgtatgcaactgcctacgccagatttgacaattcagagacactttatgggttgactcagtgcactatagatctttctagcagagattgcactacgagtcttgatgatgcactcatgactcccgacttgatgtgatggc

SEQ ID NO: 10633 - DNA, 170 bp, Glycine max
  Clone ID: PAT_MRT3847_109611C.1
cggccggattccggtcgccccgcgcccgcctgctgcgagatgacagcagaaagagagagcgacctggtgtcatggccaaaaacactcaccatgctgttaaacggcaggtagcagatatcgctcataagatgaaaaatactgccatgtagacgcgcattctctgactaaaa

SEQ ID NO: 10634 - DNA, 193 bp, Glycine max
  unsure (1)..(193): unsure at all n locations
  Clone ID: PAT_MRT3847_109612C.1
gatcccataaaaaacacacgcgcnaaaaaaagggggaaaaaaaaaaaaaaagcgggcgcccaaagaagaaaccggtttcaaggtcgcgtcaaagccggtctccaattatcccgtcggaagaataatccgttattttaagaaaagaagatgctctcatcgtgtcggtaccgccgctcccgtatacttggctgca

SEQ ID NO: 10635 - DNA, 415 bp, Glycine max
  Clone ID: PAT_MRT3847_109613C.1
ctccgcttccgccgatcggcttgccccgtctatttctccaacccctcaacccgatcggctccattgatcgtacctcgtcgtccggtgatcctctcgaccgattttcccccaaaaatagctgccggagctcgcgagaattcggcgggttttactacagtttagtttgtctctgatgctatccttggatcgatctcatctttgtcgttgacttgcgcaggttgtcgatggccaggacgtctttcaaaatggagcacgacctcgagaaaaggcagtccgaatctgccaggatcagggataagtatcccgacagaattcctgtgattgttgagaaagctggcaaaactgatgtccccgagattgataagaagaagtaccttgtccctgctgatctcactgtcggccagtttgtctatgt

SEQ ID NO: 10636 - DNA, 1488 bp, Glycine max
  Clone ID: PAT_MRT3847_109614C.1
gggtttgggatggtcttcaagggaaccttgtctgatggaactgtggtgggggttaaaaggatcttggaatctgattttcaaggggatgctgagttttgtaatgaggtggagatcattagcaacctcaagcaccggaatctggtgccccttaggggctgttgtgtggctgaggagaatgagaattatgatgaaaggggaagccaaaggtatcttgtgtatgattacatgccaaatgggaacctggaggaccatctctttttatcaacggactctcagaaagcaaaagggtcattgacttggcctcagaggaaaagcataatcttggatgtggcaaaggggttggcctatttgcactatggagttaaacctgctatttttcacagagatatcaaggccaccaatatactacttgatgcagatatgagggcaagagttgctgattttggacttgccaaacaaagtagggagggccagtctcatctcacaactagagtggctggaactcatggatatctagcaccagaatatgcactctatggtcaactcactgagaagagtgatgtgtatagttttggtgtggttgctttggagataatgtgtgggaggaaggctcttgacttgtcttcatcaggatcaccaagggcattcttgatcacagattgggcttggtcattggtgaaggctggcgagatagaagaggctcttgatgctttcctggtgaaggatgagaactttcctagttcaaatccaaagagcataatggagaggtttttgctggtgggaattctgtgctcccatgtgatggttgctttgaggccaacaattgctgatgctttgaagatgttggaaggtgacattgaggttccacaaatccctgatcgccctatgccacttggccatccttcgttttataataataataataatgatggcagcacttttagcatatccccagcattaagcggccccaaattgcaaactggagacatgctcacgtaatgaagaatttatcttatattgcttaaaaatgtagaagaaaaagtggaagctatttctattctaaagtttgacaaggattcattcaaatcatgtttggtaagaccacttcatttgaggttaataaactgatgagtgtcatggtacaaataaattctcaagatcgaagctagcaatgactgtgggacaggtcttgtttgcctcaacaaattctatgaatggccaaccatgaagaaacttagcaattagcagggcatgattataaccagctaccaaggaagctagggtcatttaaatagctgaggataggtatattatagttataggaatttaggacataataggacgaatgtcttgtaaaaagaaggttgcattttccactttcatttgttttcttctcaattttcttgtgaaacgaataaaggctcatgtatataaaggaaaatgttaagttggccggaaccttaaagtgacgttgggttgtattctcaa

SEQ ID NO: 10637 - DNA, 575 bp, Glycine max
  Clone ID: PAT_MRT3847_109615C.1
atttaaacgttaatttgagattgatataaaattatttttatattgttattaaatagatattaaacttttaataaaaataattgaatttctcctttatttattataaaaataaaaaagtaaaaatactgtgaaagaaaaatatttaagactctttttaagagagagaagacttgatgaaacaagagagaaatatttatgtttataatttatataagtttagatggaaaagagagagaaagatggattatataacatagtaatgttacttaattagaatatatattttcccccttatcccagggttattgtactgcattcaaacttctatttattcattttagataatgacatagtaatgttagttaattagtcactgattgcagctattgtttgttaacatagagtatcatattcttctattatatcttggcatttcaagtactttgttggaatgcattatttgtcagagtatattataatgctcttatttcatacatattttacataaatgaactttgtttatggattcttatatcattgtagccaaatctggcattgatccttccaactgtgaa

SEQ ID NO: 10638 - DNA, 420 bp, Glycine max
  unsure (1)..(420): unsure at all n locations
  Clone ID: PAT_MRT3847_109616C.1
cgcaggacgacaccagaaacccacaagacngtacccaccccttgaatagcacacccaagagagcacaaagagccgagggaaaataagaaccccccgagcgggggaacacaccccacagcagcgaaagcccccacaaacccagcaaccaacccgacccgcaccgcaccaaagccagcaaaaccacaagcaccaacaaaccccaacagaacgcagccaccaacaacaaaggggaaagaggcaaaccagacccagcaaggcgacacgcggaaagcacaagccgaaccaagaaaccagcccacagcagcaacaccagaggagacaaagagaacacccccaccaacagaaacaccggagacaacagccaccccaccaaacggcagaagcacaaaccccacccccccagaaccccgggcagaacca

SEQ ID NO: 10639 - DNA, 178 bp, Glycine max
  Clone ID: PAT_MRT3847_109617C.1
ccggggggacccagcgtgcccgcaacccaagagattatgtgtggcggggaacatgggtcactctgtgcatcattttccttgcctctggtgcgacacccatcttctcattaacagagtccgcaaatcaactctgcacaaactttctagaaacggcccgcaaacctgaattatttgattg

SEQ ID NO: 10640 - DNA, 297 bp, Glycine max
  Clone ID: PAT_MRT3847_109618C.1
aaaagacatgctaaggcccaaagaagaaacgatatattattctcgaatggaaattaaagaactatagtagataaagttaagagtatcaagtgatagaatatatgtaattattgtaaatcttttatattctatcatcaagttcttgtgtttcctctacaaacgatagttacataattctcatcattttgggtcttggtacatgtaactcattctgctatcagcagatgtgtgtcccccatcaataagaagattgtgtgctgtaatgaagccagactcatcactagccaagaacaaagc

SEQ ID NO: 10641 - DNA, 154 bp, Glycine max
  Clone ID: PAT_MRT3847_109619C.1
gtcgaggagaaaggttaaagagccaaaggaggaaaacgtgactctgggcccagctgttatagatggtgaacatgtatttggagtcgctcgcatctttgcctccttcagtgacaccttcgttcatgtcactgatctgactgggagggaaacactt

SEQ ID NO: 10642 - DNA, 282 bp, Glycine max
  Clone ID: PAT_MRT3847_10961C.1
aattcggctcgaggtgggagcgcatgggacctggtctcacttttattatgctggcacagccatatctcaatgctgttcctatgcccattggccttgagggtctctgctttaaggcctgcacgcactatcccactcttttcgaccattttcagagagagcttcgccaagttctccgagacctgcagcagagtaactccttcattcaggactggcgtgacaccaagtcttggaaactacttaaggacctcgccaattcagctcagcatagggccagcataagaa

SEQ ID NO: 10643 - DNA, 872 bp, Glycine max
  Clone ID: PAT_MRT3847_109620C.1
aatttaatttgggggccccaaaaaaaaaattttatcttgccaacccccggaagtaaaacttggtcccttaaaacggccccccccctttttttttttttttttttttttttttttttttttttttttttttttttttttgtttttttttttttttttttttttttttttttttttttttttttttttttttttttttgaaaataattttttaccctttataacatctaagaatagttggattaattagccaaattttcccttagtgatgtgccagaaaatgtcatccataccataaaacttacacatgcgagataattgcaacctacctcatcaagtatattatgatgttatcagtaggggaaaaagaaagggggtgacaacaccagttagtttttattgtcataagcagctatattctggggctcacattcaggactaaacaaacgaaccagcaaagccgtgcctgagctcgcagttacagctccacatgctgcccaacgaagactcctaggatttgtaattcgaggaccatagtgcattcggcaaaggacccaaaatcctaatgctccaccaacactaaagattgcagctgtgtgcctcattagcctggaacaaggttttgcatcagacctcatgacctcaccatcagaatagcctaagaaacgcctcagcgacattgtgttatctacctcaaaatacaaagagaccggagctagagagcgttggtgcctcgccgcctttgcaaagaagaagcagctttccttgtgccggagtcaagtgacccaggccgggttagtattataacagggggacgacatttgtataatttacgttccccttttgtcgtcttctcgcagccgtcggacgcgtgg

SEQ ID NO: 10644 - DNA, 1067 bp, Glycine max
  unsure (1)..(1067): unsure at all n locations
  Clone ID: PAT_MRT3847_109621C.1
cccacggctccgaaggggggggtggccctgtagttgaatttggttgttgttcccaaatccaaatccaaatcctggatcaaagctgaaacatttagcgtcctcaggaaatgctcgtgatctcggttttgcagtccctcacatcgctctgcagattctagatccgtcacagattgcaccaagcagaaagcaaatctgataagaagaagaagaagatgtatatggcatatgggtggcctcaggtcatccctctggagcaaggactgtgtccctctgcacagaagattgtgtacctcaaaatcatcaatcgcacgttgctcgttgtctcccccactcactttgaactctggagcacttcccagcatagagtgagattggggaagtacaagagagattcagattcattgcagagggaaggagaaaacttgcaggccgcgtggagccctgatgccaaattaatcgctattcttacatctgcattctttcttcacattttcaaggtccagctctcagataaaagaatacatactggtgggaaacaaccctctgctttgtgcctagctactgtttctcttctgcttacagaacaagttccttttgcagtaaaggatttgtcagtgagcaatattgttagtgataacaaacatatgctacttggactttctgatggaactttatacagtatgtcttggaaaggggagttctatggtgcttttcaatttgatccacaacctacctctagctttgacaattctcaaatgccacttactctagagaatggcctttctcctaaaagtcacccaaaggttcttatgtccaatcacattattcctagaaagtctgaaatcaaccaactggagctttgccttccgttgaggttgctatttgtcttgtattctgacgggcaacttgtctcatgctctgtgagtaaaaaaggcctaaagcaagttgactgtatcaaagcagaaaagagtttggcttgtggtgatgctgtctgtgcttcagtagctctagagcagcanattcttgctgntggtaccaaagaggaatagtggagtgtatgatttggc

SEQ ID NO: 10645 - DNA, 290 bp, Glycine max
  Clone ID: PAT_MRT3847_109622C.1
aggggaaacaatcaaaatgacatttaaagagaatgccgataggaactaaggaataatatttctatctaaatggtgaaccgcatctcatactaggttcatctcatcatcaatttgattgttttggtaacatggcaaaggcaaatggaaggatataaatgtttgagcagatatcggtttatgtgatgaacatgtcacctcgaatgactgtgattttagatctcaatcccattatcatgatggaaacgggcactgtgataacatgatgatctgtaactgtattcagcactgtg

SEQ ID NO: 10646 - DNA, 408 bp, Glycine max
  Clone ID: PAT_MRT3847_109623C.1
aaaagagataacaatcacatttttatttaaaagattaatggttcccagttgctttccttttcacaaataaaggggggctacccttgacaggagtaatgggaacactggcttttctctgaccaaggggaacaaaggactagcatacacttgtttgaataaaactgccctgactcggggacgggaggtatacaatctatgttgaaccttaccccctttttgaaaaacgtagagtctggggggacccaaatcagggaataggtgccacccattaacgtgaagaagttaccttgggaaaactcaaaacggccgtgaggtaacatgagagttttttccccagtaggattcacaacctccaaattaaggccaacatccatattcttttgggcttggaccaaggaaaaagcccac

SEQ ID NO: 10647 - DNA, 388 bp, Glycine max
  unsure (1)..(388): unsure at all n locations
  Clone ID: PAT_MRT3847_109624C.1
cccacacgttcataaatcatatcttcaccctatcttttaanttngaanatttcncanaccggtccgtttcaaaaatactntcctacaccactcttacatatatattctatcctttctctttttttccaaatcctttcattcctcctccttaatccaacactatnttacattactttctcccctctaatttttcctctatcatctccccttcttcttcctatcctccctttctctctattaannatctctatctctatctctcctatcttcccaccatcatctatcaanttataaatacttttcatattcaaatacttacttttaacaatttttacatcctttccactaaatatcttaacattatattnctttacactactcatttatt

SEQ ID NO: 10648 - DNA, 622 bp, Glycine max
  Clone ID: PAT_MRT3847_109625C.1
attcggctcgagctttcttcttcccacttcccatttcaaaccttctataattacaatgcatatttctctctcgctttaagctcggggacacccaagaggagattgatcgatcgaattaatcgggcaagggaaatgatgcatcattgttgtggaagctcccaggggcacgtgatgggcacgtgcacatgcggcatgtatcacagcgaaaccagcgcttatggctcgatgctgttttccgtgcccaacaacagcgaatatgacatgtattcgtccttcacgccctctccttcctccgtggactgcacgctctccctcggaacaccctccacgcgtttaacccaagacgacgaccatgacaacgacaacaaacgacacccccaccaacgtcgttctggagtcgccaatttttgctgggacctgctccattccaaacacaacaacaacaacacgcaatctcaaagcaagtctagtagcagaggaagcagcagcaacaacaacaacaacaacgaccctctcctcgctcgtcgttgcgccaactgcgacaccacttccacacccttatggaggaacggtcctcgtggtcctaagtcactatgcaatgcttgcgggatcagattcaaga

SEQ ID NO: 10649 - DNA, 454 bp, Glycine max
  Clone ID: PAT_MRT3847_109626C.1
atcgtgtcagccataggtaacattactacgccttcctcgttgatttttccagttaatgatttattcttaaattattaattttgttgttgctccagttaattttcgatgcattataaagatttctatactttgaattaataaaagatcatccagaacattacttttatgatattgattataaaagcaactaatttatcatacatcaacgtatattattaattagagtgaaattaagtttaaatctgttaggtaaaatctcaaattgtggtaaatattttacatcaataatataatgatccaaaatacatctcgtatgatataaaatgaaagtattttttgggtcattataatatttctttaggagtttactttacttaacacactatggagatcttctcaattcttcaggggttcacggtttcttctcgatgcgtctccgctggtagagttggag

SEQ ID NO: 10650 - DNA, 458 bp, Glycine max
  Clone ID: PAT_MRT3847_109627C.1
ctgtatgagtcctccttctttgggggggggggggggccagaccagaagtacgaagggtaaaagtactctacggggcggtgtggagtgcagcagagccgaagcataacgacaagatgtagctagtttgcgtgtaaaggagtacgaataaataacgaaaataaaagggccggcaaaggcctagaaaatgaagaaaatcggtatatgaaccagcgttgagcctagtatttgaaaccacagtcattaatacgtaaaacgtcgatagtggcaaggcgattaatggttaccaatgaacgttaaagacaacggtagaaaatatgaaaaggaagtactatttgggtttggtggttgtgccacgggtggtagcgaaaatgttagtgttggattggttacaagcgatttagtactttgcttatagcggttaccatacaacaaagatacgttaataagtccctattatt

SEQ ID NO: 10651 - DNA, 214 bp, Glycine max
  Clone ID: PAT_MRT3847_109628C.1
cataacatcactcatcatatcattctcaaatctaacatgaccaatgttaatcatctcttataacctccacattccacaaccaaatcttctatttttaaagcttatcttactcaatattcaatctttaattaatcccctaaacttttcacctattttactcatatatcaactcctcataaattcttacttcaataacacttatacaaaaattatc

SEQ ID NO: 10652 - DNA, 875 bp, Glycine max
  Clone ID: PAT_MRT3847_109629C.1
gcagtaacaacacatcatattagacaattgttctccaacaccaaaggtggaaggaaagaagcaaaaaaatcggtgctaacttcaccgatctctctctctctcccctctcattctcaattcacaaccttgcaattaagtctcacttctccattttcagacacccccacatttccaagtttcaacattgaatccgcaaactctttgaagaacaaactttggtccttggcaaatgctttaacaatccaactagttctctgatccccaacaagtgactgatctgatgagaacaaaccctttcccaccaacaattgtctatagtagtcattgtcaaacactgatgctgttgagtccaggaactggccagcactgaagtttgtgtttggttttggacacttctttttgaggtctagtgcaaactcagtgttcaaactagggtcaatgtcatgcaacaaactgaagttgtgaattctagcttggaaagaagaacagtgtgaaaagccaagagtgtggccaccagagagagtcaccatgtctttgacacctaaacctctctttgcaaagctctgaatgagttggttcacatttagggttggagctggtaggttgactgtttcagatgcctttgagacccttccatcttttcttccttttagcacattccaatatggtcctccagactgggaaaagttatgagttattaatatatatattgatcaatgatcattacaacataaaacaagttgtatcctccctaatttaacatcctttgacaaagttgatgattcatggaagaatcattattcaactatagaaagcaatatgtactatactactaacattatcttgggtaattatactctgcattaattagtctt

SEQ ID NO: 10653 - DNA, 371 bp, Glycine max
  Clone ID: PAT_MRT3847_10962C.1
gcgcccgccccttattttttctttttattccagcttttggtttattaccgttttcaaaataaaaaccactcttccacggttatttgcggggatatttgacagggagcgcgtgaatgtaattatacacagtgtatatatccacttggaaggtgtgcaaatgatatctcaagccaacgggtgtattgaattattataaaccacaacaactgactgggacgaatgagctgatttaccctcaaaaatgggccctcactatagtccaacttaattgtgggcttacccaaaagaaaaaaaaaaattaggcactgtatactcttacaacaggaggggggtcttctatatattaaggaaagttcacaacacttaccact

SEQ ID NO: 10654 - DNA, 138 bp, Glycine max
  unsure (1)..(138): unsure at all n locations
  Clone ID: PAT_MRT3847_109630C.1
attggnancacaacaaccttagcntgtncccncatctctttagccntngttgcnggaactgccatngttgntggnggctttattttgtataggagancttgcaagggtgancgagtnggcgtntggcgctcggngtac

SEQ ID NO: 10655 - DNA, 512 bp, Glycine max
  Clone ID: PAT_MRT3847_109631C.1
tggttttctctagcacggccgctcggggggtgctttttttttttttttttttgcgttgcgggggatcccttttctcatccgctcgagggggcctcttcataggaccctagaccggaagtgattctgttcccaacccccacttaatagtaaaagccttctgtactcccattatttgctgctggtggggggggggattttccaatgccttgtacagagtttgattactccctagaagaatctgagacggcctagagtagaaattggcgctaatcaaaggaaacttcccctgccccgtgagagaacttatgttcatcctcgaacgttccggaatgctcactgcctctaggttattagcacagacatacaaattaaggctgcctcccgcgtctctgacccaggctgctaatctgagattgttggatgagacagaagcttatgtcaggaacaaaccccttctgccggcttctcgccgccgtacggacccgtgggcggacgcgtggtcttacccgtgg

SEQ ID NO: 10656 - DNA, 302 bp, Glycine max
  Clone ID: PAT_MRT3847_109632C.1
ccacgcgtccgcccacacatgcgtaaaggtgcgaaaagaccacacaaggggagaatacaatgaaacgccgtggtatcttcaaaatgaacagggcaaatacgtgaaaatagattgagtgctatacagggcctgactttctagaaccccctttcaatccacggggagggaccaaccctatgcataaactccagtcacacatacacggttacacccttaaattaacgatcgacggtatggcaaatccctataccatttaacactcaaagagctcaaccgaaacgattaaggtcaaaaaaaattca

SEQ ID NO: 10657 - DNA, 245 bp, Glycine max
  unsure (1)..(245): unsure at all n locations
  Clone ID: PAT_MRT3847_109633C.1
gggacttgaacactctctttttgatattgatattaagagacacattggtagggcgtacctacaaacagagagtgcctgtttttagttgatcacgtnaaaaattaccaaagaacataccaataacaaaataggagggagaggagagaacacacggggggagagacctggaaaggtatggatattaaacatattataagggcgacgctcaaaaaacttccaccataaagcaggggaatgaattactt

SEQ ID NO: 10658 - DNA, 376 bp, Glycine max
  Clone ID: PAT_MRT3847_109634C.1
ggctcgagctgatacaatcgaccggatcatggaacgcgttgaagaaaaggagggaattccacctgggccgcagagacttatatatgcaggtaaacagcttgctgatgaccaaacaggttaagagtacaacattgggggtggctctgtactttacttggtgcttgcattggggggggggacttaatagtggagatgccatatcagaacccaaaggcctggaagggagctttatttctggcccggcttttttgaagacataatggttctttaatgggctgggtttttgtaattgtggctactattggtggtcaggaactcagtatctttttagtggtatgctatttaaaaccctaaggtggcctttataatgaatttc

SEQ ID NO: 10659 - DNA, 721 bp, Glycine max
  unsure (1)..(721): unsure at all n locations
  Clone ID: PAT_MRT3847_109635C.1
ccacgcgtccgcgaaagagaagccttcagcttcctgaccttgacttttctcctcttcttccccatgtccatcgcacgatccgcgttcacattaaaccctctcatcacacactaatcctctcacaccgtgctttgttccttcattcacaaaacttcatcccctttctcacaattaattcagcttcaaataatctaatctaaaaccgaaacccttatattatcaccaatgcatttgctttcgcaatatttgcgatcggtataattggagatcaccgtacggaaaaaaggaacacacgcggtaggtgaagcgaaagcgaaagaggtaagttagtttgttagggtttcgacgagatggaatcgtcaccgtcgtcttcgtcatcgtcgatgtcgtcgtcgtctggaagcgataccagcggtggtggtggtggtggcgctgtcacgtggttcgggatgagtttcccattccgttctccgctatctctcgtcatggattactgcgcgcgcgaggattccgcggagcctgtgattatcattccccgcacgcgccctcggtttcaggcgcatgccgaatccgcctctgcttcgtcctctgattccgatgagaatgcctgcaacggcgctgctgaggaggttgcgatacgcataattggggccggcgagcaggagagcggntcgtcgccatcgtcgtcgtcgaggggcccgggaggggagccgggntgtga

SEQ ID NO: 10660 - DNA, 460 bp, Glycine max
  Clone ID: PAT_MRT3847_109636C.1
ttttccttcacgctgaaaccagctacagaaacacctgtttcaaaggaaacaactcccgggttaaaggaaaccacaacaacacttgtttggtttggtgggtcggtttcaagttttgattttgttcaccttttctgagcttcattggcaaggtagagagaaaggaagaggtggggctgattggtggaaaggttatggctttttggttttgttgcggaaaagtttccactcgcagaagacgagggaaagaacaacctaaatggcgggtgttttctttgaaggaattacactctgccacaaataatttcaactatgataacaagcttggagaaggtagcttcggcagtgtgtactggggccaactttgggatggatcacaaattgcagtgaaaagattgaaagtttggagcaacagagcagagactgaatttactgttgaacttgaaatattggcaagaatacg

SEQ ID NO: 10661 - DNA, 304 bp, Glycine max
  unsure (1)..(304): unsure at all n locations
  Clone ID: PAT_MRT3847_109637C.1
gacgngtangnagcncggaattnggctngnncncganncgattnggctngagcatcnttctcaggttttataaaatannntgtctgtnnannagacnttnntattacntngtattanncatanaacncncnnnnatgcaaaatacccttcaggaacagngatggaaanaatttcacatntngtgggttnnantnngcatgaanncgaagggntngatnctagggtnacttatgaaggtntggggaatttnggctnagtngagntctactgatgaaacgggtttggaaaattttttgatcngagg

SEQ ID NO: 10662 - DNA, 248 bp, Glycine max
  Clone ID: PAT_MRT3847_109638C.1
cccacgcgtccggtcttatggtggttacctatgcacccagagacgaggaagggcagagtgggcgacgaaatgcttcggggagttcaaaataaacgtagatccggggattccctatatatgtcaacctttcgaactgctgctgaatccaccggcagtcaatatacaacctttcgaactgaaacatcttaatagccatatgaaaagaaagcaagcccatttagtttttcagtttttattagaatttccaa

SEQ ID NO: 10663 - DNA, 194 bp, Glycine max
  Clone ID: PAT_MRT3847_109639C.1
cgtcggaaggggactaaaccaaggatggtttgatagataacccccgttaaagaattttaaagggaatttttacaaattggcaacttgcccaaactatgaaaaacaaattttgcccctttcaattttaaatagggcttatcttcttatactgaaaagcattataatttgcacaagaaccataccggggccattgg

SEQ ID NO: 10664 - DNA, 453 bp, Glycine max
  Clone ID: PAT_MRT3847_10963C.1
aggagaaggatttgggatgtgtgattgtaatgaagtgtagggacctggaagaagagttagaaagaaaatctgcagaggttgacatactagaagcagagcttgataagaaaaaggatttgtcaagtgaaattgcattgaagtttagggacctggagaaagacttagaaagaaaatctgcaaaggttaacatactagaagcagagcttgataagaaggacatgccaaatgaaattgcaatgaagtgtaaggacttgaaggaagagctagaaagcaaatccacaaaggttgacttgttagaagcattgctcaggtcaaaaagggactcatatggagaaaagacaaaaaagcaggaggacttagcactggcagcccaaaagcttgccgagagccagaaaacattatcatctttgggaaatcagctgaggtcccttgtcggattaatattgcaaaaag

SEQ ID NO: 10665 - DNA, 451 bp, Glycine max
  Clone ID: PAT_MRT3847_109640C.1
ggctcgagctggtggagctcgagccgatcgagccgtgccaagaaaatctggagctatggccctgagaccctggtacccaacatggggcttgatatgggcaagggactgcatattttgaatgaaatgaacagatgattgtggctgaatgaatcccagtgtgcatcaaaagaaggtgctttggcttaagaacacatgagagccatctgctatgaaatatgtgatgtagcgctgtacgctgatgctatgcacagaggaggtggccaattcattcctactgccatgagagcctactatgctttccagattactgacaaacccaggcttattgagtctgtctacctggaccaaatatagggtactgaacaagctcttggaggaatctacagcctatgttaaccagaagcgagggcacatgttggaggaaatgcagaggtcacgatccccactctac

SEQ ID NO: 10666 - DNA, 1384 bp, Glycine max
  unsure (1)..(1384): unsure at all n locations
  Clone ID: PAT_MRT3847_109641C.1
ccacgcgtccggcattatatggacaaccacactggtggtggctatactgacaacaatgatggtgggttggagaccagaaaattctttttgaattgtttatgcttactgctgggacgtctggacagcaagagatttgaaagcatggtgtcagaatttgggatgaatatttcatgcattctagtaccacagcttaattgcactgatgaagatgtgantagttggggtagtttcaatattcaaggctatcattctgaggccagattactcacaagaagatgcacttactgacaataggcaggcaaatagtgtgataccttttctgcttcaccttctagatgagcaggatggtacagctaaagctgttgttatgctgatagcagaatactgctcaatgagcgaaggtgatcagtgccttatggaagttctaaagcgccttgcttctggaaacatttcacagagaagaaatgctatggatgttatatcagaagtcttgcatatatcatcaaagtcacaaaatttaatgccttcttctgcttggcaagatatggccaacaaattgctagagcggcttggagatgaagaaactaagattcgtgagcaggcatccaaattacttccaatgatagaccctccattgtacttgcctgcactggttggtcttgtctactctccagatgagagccaatcatctgctagtgatgccatcattggggtcctcaaacatcacaaccagagaattgaaataatattcttgcttcttgactgtcttagcaacatgagtaaaagcctataccttacacagtctactggagataaagggtcaaagttggatgctgaccaagtactcaaactggttccagtatggtctaaaagtgttcaagactggaacttattaattggaccactggttgacaagatgtttggagatccatcaaatgcaactattgtcaaatttttgagttatataagtgaaaacctggcaaatgttgctgatcttgtattgcatcatgttctgctacacgttaaagaacagaagaagattgatgaaagtttcttatcaagatgggagcaaagaacctacacctgtgatgagtttgaagaaatgcagcagtctctgtttgagcatttatgccctttgctcataattaagattcttcccctgaaaactttcaatgacctcaattcatcaattatgcatggacatctcaccccaaatattatccagtatgcaagaagcaggcacactgatattgattatgattggatcgctgctttacttctaaacaggcccttttgtgagtttgaatttgaacaacttacgaagctttctgctgagctgtgtggacgcattcgtccacgagtgtctactcccatttgtttgctc

SEQ ID NO: 10667 - DNA, 395 bp, Glycine max
  Clone ID: PAT_MRT3847_109642C.1
gttcaaacatgaaatcaagcccctggtcgagggtcttgcctacgacgacaaatatcagctgaacactcaatctgggactcagtgggacggcttccgtcatatgtcctggatcgaaactgccactttctataacaataccaagggacctgatattatgacgtccgacggtgccaatgcaagccacaagtgcagcatacaccactgggccgagcatggaatcgccggacgcggcgttctcctcgactatagaggctacgcgaagaagaagggcatttcgtatgacccgtacgatcattaccccatcagcttcgaggagctctaccaatgcggcaaagatcagggcatcgacattcgccccgcagcacaaggcggcgacatcaagatcggcgacatgc

SEQ ID NO: 10668 - DNA, 673 bp, Glycine max
  Clone ID: PAT_MRT3847_109643C.1
ggttttgcagtctcagcccttcaatgttggagttcgttccctcatctctgcagaaagttactatattcagaatcgcttagtctgcataacatcaccaggcatagttaaatgttttagttcttcaatccatcagagactgcctcgagttacaggtgattgcagaagtaaaactaaggtttttgcattgaggcggagaagaagggcaaatgagagaactgaaacgtatgtgctactagaaccagggcaggatgagagatttgtttctgaggaagagttaaaggcaacgttgaaagagttgttggaaaattggcctggcaaggttcttccccctgatctttcaagatatgagaacattgatgatgctgtttctttcctagtgagatccgtttgtgaacttgaaattgatggagatgttggctcaatccaatggtatgaagttcgtttggagtgatagttccattagccatttcatttgtgcaatgttagcttggttaattatgacctaccattctcttgttgtaacggacacaacacatgttaatttaatgctagagcagcaccctcataagatatataattttttcatataaaaaaaaaaaaaaaaaaaaaaaaaaaaaaagaaaaaaaaaaaaaaaaaaaaaaaaaaaaaaaaaaaaaaaaaacaaaaaaaaaa

SEQ ID NO: 10669 - DNA, 396 bp, Glycine max
  Clone ID: PAT_MRT3847_109644C.1
atgaacatggattctctcaattctcattacacttgctatacaaacaggcatatattttgggtgtccaggatattctggccagaagatactaatctctcgaagtagaagattgattcaaggaactgacctttccgaacagatattcttcaataaacatagacttgcggattaagctcctgactacatattaaggagcatttatatgccaactacatctcaccatgttgatattaaacttactatatataaaacatgcttatgcatatctcctcttctggcaggcaagtcaaactagctgacttgcttgcttaatttactaatttcttgacaattattatcaactctaaatcaattgatccgtagtgctgcacagccgaggctgtgatactgcagaca

SEQ ID NO: 10670 - DNA, 529 bp, Glycine max
  Clone ID: PAT_MRT3847_109645C.1
gttatgtatcctggatgattctcctgcacctagcttatggactaacttccttctgccggcgaccgatgacaaacatcacctcctgcatatcatgatgccagaccctgatgacgatcttgatgaggagcaaacatccatgtcatgcacgacgattttggctgccccatttggggccgctgctcccaagatacagaacaaagacgctgctggttcccctgcctcttacaacctctataatgacaaaaaaaccgatgtcgccaacgcttatggctggactgcggccctgcatggaggccactatcctccactcgctaaagccgatattggaaatgtacttgtcaaactctctacgagatccatgctcgcacctcatgtgaatccactctcaaatgactataccataccgctgagcggatatggccaactgcataatacggtatccaaagctaagaaatgcagagttgcattgatctttcgaggggacgtggctgttgagccttaagccttccccttctgttcagtatcatct

SEQ ID NO: 10671 - DNA, 470 bp, Glycine max
  Clone ID: PAT_MRT3847_109646C.1
gcatactctagttggaagcggtggattacttgataccagggatggggagtcgaagagaaacaggatgcctgacctagaagagaaacaacacaatcgtgagctccattgtgcatgcgaggctcttggcgtaaccttggtagactcgcccgatctgtctggtttggatctagtgctggtcaaggttgaccgactgattgaactgacttcacagaccgagcacatgactacttcactaaaggtgcacaatacaggatgtgatgttgtgcttgagagtctgctgtgctcatctgagaaccaggcaagtgacttgacatacttgaatgcaacacttgacgatgggaagggagcatcaaagccatcttatggagcaggcatacctgtcaaatgaggccggtctaaacatgagcgatcatccttgacagatgattccgagtatgtacctaacgcgctagagaagggatatagactga

SEQ ID NO: 10672 - DNA, 352 bp, Glycine max
  Clone ID: PAT_MRT3847_109647C.1
gggactaaaaaacccggttaaattcccaaaacaatattaaaggggggttggccccccgcccattaaaaattacccacccccaacatgggaaaaaggaaaaggctagggctttgggtttttaccccaaaaaaataaaggctaaccctttttttttttaacaaaaaattacccaatccctttttaaatggcaaaaaaaataccgggggggggggggggcctaattcaggggcaaacccgggggcctttcataaggatattaacgggcccaaagaaaacaacgggctttgcctcttggggggggggccccccgaaccccatttggtcttgggggcctttttggggggggtttttt

SEQ ID NO: 10673 - DNA, 761 bp, Glycine max
  unsure (1)..(761): unsure at all n locations
  Clone ID: PAT_MRT3847_109648C.1
ggtccggnaatcccgggtcgacccacgcgtccgctgatacacacccgactaatatttcatctgcaatgagtcgtcttcctgatgaagcaatagcattggctgctgcatcacacatcgagagggaactgcagattactccttggaacttgagttgcaattttgttgcctgtacaagccagggtaaggaaaatattgaacgaatggaaattactggtgttggtgatccttctggtcgtggcatgggttttagctatgctcgggcacctccaaaggcaccagtgtctagtgcaatggtgaaaaagaaagcagctgctaaccgtggaggttctactgttaccggtacagatgctgatctacgtagattaagcatggatgctgcacgagaggtggcatcgcattgctatgatacggaaactttcaagtgaacaagctacatctggggttaaggttgatccaacaactatcagcaaatatgctcgtggccagcgaatgtcctttcttcagttacagcagcagaccagagagaaatgccaggagatttgggatcgacaagttcaaagtctgtcagctgtaaatggtgatgaaaatgagagtgattcagaagggaatagtgatttggattcttttgctggagatctggaaaatttacttgatgctgaaggagtgtgaagagggagaagagggtaccaatgacttanaacgtgatagggagatggcgtnaagggtcttaaatgagaagacgccccactttagctcaggca

SEQ ID NO: 10674 - DNA, 1304 bp, Glycine max
  Clone ID: PAT_MRT3847_109649C.1
gaatatgccaatttgcagaggggaacaaatggacagtcaattttggttaaaaagcgaaattttcgcatttggtcagaggatgaattgagaaaaatggttacaccagagcttgtttgtgcttacgaaagcatgcaagctgacctctaccgtctaaaacatttaggaataactgaaacacaccccactaatatttcatctgcaatgagtcgtcttcctgatgaagcaatagcattggctgctgcatcacacatcgagagggaactgcagattactccttggaacttgagtagcaattttgttgcttgtacaagccagggtaaggaaaatattgaacgaatggaaattactggtgttggtgatccatctggtcgtggcatgggttttagctatgctcgggcacctccaaaggcaccagtgtcaagtgcaatggtgaaaaagaaagcagctgctaaccgcggaggttctactgttaccggtacagatgctgatctacgtagattaagcatggatgctgcacgagaggttcttcttaagttcaatgttcctgacgaagtcattgcaaaacaaactaggtggcatcgcattgctatgatacgtaaactttcaagtgagcaagcaacatctggggttaaggttgatccaacaactatcagcaaatatgctcgtggccagcgaatgtcctttcttcagttacagcagcagaccagagagaaatgccaggagatttgggatcgacaagttcaaagtctgtcagctgtaaatggtgatgaaaatgagagcgatttagaagggaatagtgatctagattctttcgcgggagatcttgaaaatttacttgatgctgaggagtgtgaagagggagaagagagtaccaatgacttaaaacgtgataagggagatggtgttaagggtcttaaaatgagaagacacccaactttggctcaggcagaggaggaaatagaagatggcgcagctgaggctgctgaattatgcaggctgcttatggatgatgatgaagctgacaaaaagaaaaagaagaaagctaaagttattgtgggagaagctagattggtaccaaagatgcaatccaagttttcctttgacaatgctgaacaagttaagcaaataacaaatactttacaattagatggaactaatcactggaaagaggatgcaatcacagatcttagggaggaggaaaactttcccactaaaaaaagcaaatcactgaaggtcaataaagtcaagaagaatgatattacacctattagtatacccaataaaaaaatcaaattgaatatggg

SEQ ID NO: 10675 - DNA, 564 bp, Glycine max
  Clone ID: PAT_MRT3847_10964C.1
aaagagaaaataacaggcgactgactttttttttttttatgtacccttcttcaaagttaaaaaagagaaacagacacgaattttaggggggaattgcaatttgcaaagcacaaagaaagcaaaatgagactacaattttgttacagccttgtaggaaccgttttcgctagtcacctccctcaacggaattcacagaactagcttctccgtataactaaagtaaattaacgtaagaataatgtcagcaagtggcatttttttattaaccgtgttcttctattgttccttccttccttcaagggtggtactctcacttttatggcttcaatttaacccactcgtatcgtccttccaatgacacgtccttcacaatatcataattatacctgcagatttattaatcaacaatatcatatactccatttttcagttttaatttcccattttttgaaatggaaatttgttattactactactattatattacttgtctgagaagcgtttccgaatatctttctcagcagcggcgaagaattcatcgagctccaactccgtcggcatttt

SEQ ID NO: 10676 - DNA, 278 bp, Glycine max
  Clone ID: PAT_MRT3847_109650C.1
gtggacttttttttacttttccttacattttgattttctacattttaccacacttcacatcttcaatgttctctgtgggttggctcaagcacaaaaaagggaaatttttttttttcttcccagcttggggccgggggaaattttaaaccccctacaccgggcggttttaaatgacccccacccagggggtgggggatactttttttttttattttcgggagaacccctttacttgggtagcctccgaaggtatatagcctggggtcttcccagcccca

SEQ ID NO: 10677 - DNA, 266 bp, Glycine max
  Clone ID: PAT_MRT3847_109651C.1
atagtttgggacctgaaaatatcttttattacagctagtccaccttaccaagcctaagaattgagaagccttttgcaccatatcccacaagtaacacaccatgggtcagccttttcttgctacatatgagagggcctgagacaccaccattgtatgggggggggaaaattgcattcacccccatagcaaggggaccattttttactaaatgtgcgggagggggggcctcattaccagggatatgggggaaatttgggatcttaact

SEQ ID NO: 10678 - DNA, 351 bp, Glycine max
  Clone ID: PAT_MRT3847_109652C.1
gggcggggcccaatttcggggtttacgtccccggggatggaaagtaatattttttttttgggggcccctaaattaatttcacgggccgtgttttaaaaacggggggaggggaaaaacccgggggttccccaattaaatcgcttggaaaaaaacccccttttcccaagtgggggtaaaaaaaaaaaggccccaaccgagcgcctttccaaaaagtggcccaccctaattgggaaaggggcccccccctgtaggggtccattaaggggggggggggggggggttccccccagggggacccttacctttggcagggccctagcccccgctcttttcgtttttttcctttttttt

SEQ ID NO: 10679 - DNA, 298 bp, Glycine max
  unsure (1)..(298): unsure at all n locations
  Clone ID: PAT_MRT3847_109653C.1
aattttgggtcacaaaaactcaacttcctcctttctccanaaancacaagactgaaggggaattctctcaacagtggattcaagtttccatatctaatgatccggacccattatcccttaaaaaagaaatattgttctcttaaacaaaaagcaccctgcttccttggaactattttggagagtttacttccctcctgggtgccattttgaggaacttaaaacaaatcccctcggggaggaaaaaactaacccaaatggtggccccggggggggaaccccttttttttttaagcccccc

SEQ ID NO: 10680 - DNA, 300 bp, Glycine max
  Clone ID: PAT_MRT3847_109654C.1
aggaccacagaaattgactactaatctctggagatcggcgagatagtgtgactaacatggctcacacgacagtcatctatagtcgacacataaatgcttctcaagccttttatacctgctcgagactattctgagcatattattaaagcctactcactgaggtggacttactagttgccaactgggttaatcttgcctcatatgagtgctcatcagaggaagctgatcagatgaccttatgctctcacgtatggatcatatcttgctgaggactctgtccatgaacttacttaatatttt

SEQ ID NO: 10681 - DNA, 567 bp, Glycine max
  Clone ID: PAT_MRT3847_109655C.1
agaccattcagaaactattaactgaaatactggggaacataagattttgttcatctccgacttgtgtttctctagcttttcacttcacacgtgttgatcgaaaacagcattcttcaaactaattaaggatgagtcatagcaatgatcaaaattgccagcctcaaggttggaattctagtttagcatatgagccgaaggacattgcaccgggtcctaattatcaagctccgccacctccacctgctattattactcacgaggagaaggttcctccaaacggagaaactaaattcaagggtgacggattctggagaggatgttgcgctggaatgtgttgctactgttgtttggacatttgcttctgagatttcaggaatactgtgaatatatagtattggtgtgtactgatcctgatctactacatgttacatagattgggtgaaagaaaggtataatgtaatttttttatcattaagtataatgtgttagagtataaatttgaggccaaattttatgtatcgtgtaagaataaaaagtttttaagtgttatataagtaaaaataagat

SEQ ID NO: 10682 - DNA, 295 bp, Glycine max
  unsure (1)..(295): unsure at all n locations
  Clone ID: PAT_MRT3847_109656C.1
gangcacnagtacgtaagctcggaattcggctcgaggttctagatcgcgagctgccgcctcactgctcactgtggagccttgaacctgatcctgtctgcagccacgtttttacggtcatgtcctgctacccagaggccttccttttccctatgctggtacccagcttcccagtcggcagccagagctcaacgtgccccagcttgctgcaccctgagttcccctggctctgagacaagctagcttgctntgccgaagtgtcaccccaccccagcacacccagtccgcaccctctgt

SEQ ID NO: 10683 - DNA, 538 bp, Glycine max
  Clone ID: PAT_MRT3847_109657C.1
ccgaatctactatgttggattttggagacgagctgactttagatggtttcaggatcccatggctcatatggattcaacttttagtgttccttcttctccttgcccttctcttttgcctctccgtcattgctctagatccctctcaccacaccacgtctccttcagcctctgccactgccactgattctgatcttcacactcaacaaccctccaaccaccattccactgctgtgaccaaccgtcttcagagcacccggggggtagagaacacaagtactaaaggtgagatagcaacgagcgcaagcacaggaattgtgagagaagagtttgcagagggggaggcttcaacttcttcattgtatttccttcacccttgctattatttcaacttagccaaagaagcattcctcaaatgtcttggccttgataatgatgttccttcaacccaaaacaataggaaaacaaaagaaagctagctgattatgaaaatcatgttctcatttatttatttatgaaatgtttctcatcattttgaact

SEQ ID NO: 10684 - DNA, 448 bp, Glycine max
  unsure (1)..(448): unsure at all n locations
  Clone ID: PAT_MRT3847_109658C.1
ttnnnnnnnnnnnnnnnnnnnnnnnnnnttatcttccaaaaagaagagtggataacgttaaaatatgtattcgtatatatctaaacgtaactgcccagaacaaacaaatacaaaaagcatccgcaggtgcagagccttcaaagatagtatggacaactgtaattcaaaagatacagtaattctacttaaggaatttatggcagcaatccaacaatctttttgcatctgtctcactaacaagaacttcagcattcccattattcttggcattctccttttcagcagtccactgattcagaatactgatgatccttccaagagatgtatctctagcatttgctgttgagccaggataagacaagctttcctgttcatgaccagattcaacttgttggttgagaagctcatcttcaatcagatcaagttttctgacaagaacagaaacata

SEQ ID NO: 10685 - DNA, 407 bp, Glycine max
  Clone ID: PAT_MRT3847_109659C.1
cggaattcccgcgtcgacccacgcgtccgggaattgaagaaaatgggatattccttattgagggtgggaagtgggatatctgtactcaatgctgataccttacctggatcagtgattcttccatgtggatcttgttcgttaaaagctcgtctgctaatcaatatggatgccaattgaaattaaattatcactgatttttggcatgaataatgatgactggtatttctaacattttttgtatgaagatagttacaactgcctgtcattgggaaaattcctggggcagaaatctggagtgtcattttgattttggaaaatggaatgcagtgatattagtttcagctatgtgcctcacttgttcaaataaatccatggtgcttattgtatattaaaaaaaaaaaaacaag

SEQ ID NO: 10686 - DNA, 326 bp, Glycine max
  unsure (1)..(326): unsure at all n locations
  Clone ID: PAT_MRT3847_10965C.1
agtaatgctccaagaaagaaaaatcaggccgctttatctatatgtgaaagcaacacaaaattttttgcataaaacattacattggtctaataaacattgacaacactgcccatgaacacaaccatttaacaaacactttataatgtcaaggaaaaaataaatgcccaagttttgtttgctttgaaatcaaaattacaagagattgtattaaaaataaaataactcataaaatttctaccatccacgtgagctgagagtactttatcaaaggttcaaatgtctgatccacacntttgttccatatcccgcaaatctgattttacacc

SEQ ID NO: 10687 - DNA, 991 bp, Glycine max
  Clone ID: PAT_MRT3847_109660C.1
gtttttgtcatcacttgatttagcgatggtaagaaaccattgtccgaaatggcgaataaccaaaggatgtggcctacatgcacaatggaggatcaagtgggtccattccatgcatctcaaacagtggcgaatgagcatctgcatcgttaagggtagtgtcaagtttcacgaataggaaggtgataaggatgaggtggtggtggtagtcagccattgcgtgtgtttaagaagcagctgaatccaacgttaacgaactataacataagtagttgctttgatatttgcacatagaaacatgtaatttttctgtttaacgtgattttcatcactaaattgaaacagagattacgacaactaggaataccattagcaacaaattaacgatgatgatgcggtgggttgagacttgagatgatgaagtgtcatgatcagagaaggggatgttgtgaacagtacggacgtgggtcccaatggatgcgatgatgatgagcatggctcttttgtgaacgtgtgggcaggtactgaggttccagaccattaaagcccatgtggaagtgggcctcacacatgcacgtgcatatgtgcttttcttttttcgcaacctggtcctgccccggctcctcttcccttttctcccagatttatttattttaattaattaaaaagtaaaaatagccaacatgtatgtagccaagtggggaaagccatgatccaatagaggataacaatatgatggtgactagtaccgtagcccgctacagcaccagaaattaatcatcaatctaaaattattcatctcggtttcttgaatatataagtccacgctctcatgatgtaatatatgtatttatcctgctacctattttgtgatgctattattgtagctagagaaccatcccatatcaattagaaataggcagttgcattaatcaagtgggtttgcttttggaaaatattttatgaacacctaagatagatattcagcatatag

SEQ ID NO: 10688 - DNA, 420 bp, Glycine max
  Clone ID: PAT_MRT3847_109661C.1
atgtaatccaaaaaatcccacaacaattacacccttctttattctttggccatctacatttttggactacatataatcattggctatacacgacactgctactatactgagtctgaataaggccttcttatactatacaggacactactgcatgacggagcagaagtgaccatcactcaaaaaagaacttccacctgaaactctcaacagtcctagcgaaaaaaaaactcatgaacaaaaacctaacatctacaacaaaattatctaaccaaacaaagtgggaagacgaaaggcttatattatactgataccctataatccaacaaacatacatgtgcgaattaggagataatcgaattcatgtgccgcatttagaggcacaagctagagccaccccctgcgcccccactttgagccccg

SEQ ID NO: 10689 - DNA, 461 bp, Glycine max
  Clone ID: PAT_MRT3847_109662C.1
cgagaagacgacagaaggggaattatgatagattttaaagccaatgaagaaaaccaagtttctccttattttgaagtcatatgatattctaagataacataagagatacagaaatttttaaattataggtatatctaaagagcaaaacactttgtatataaatatgattgggaggaactatttcatagtgcatatgcaacttttgttagatatgaaaattgacaattttctaccatctcttgagactactaatgaaaagagagatacaaattgaaaaggaggtttgcttataaaagttttcaatctagcttagcaaattgataaatattggctgatgttatgaatgttaaccatgttgtctgatgatgttcttagttgcttgcatatgtttcatgcccctttttttttatcttatgataccacgacaaacgatatttagcaactataagatgagcattttt

SEQ ID NO: 10690 - DNA, 276 bp, Glycine max
  Clone ID: PAT_MRT3847_109663C.1
cgaaataaaagtgccggctaatcagggcctatggtaatccatatgcttcatgacgaaactggaatgattaacattggttccaaaccttgcttaaaattaaccttctttcccaaaaaggttggactattgtttgccaaactgattacacaattcttccgtggacttaattttacttaaccattggccgggacctggtaaggaacacctccttaaatttcaactggaaaccctttattacaatcctctttgggacccgggggctaaattccaaccggg

SEQ ID NO: 10691 - DNA, 824 bp, Glycine max
  unsure (1)..(824): unsure at all n locations
  Clone ID: PAT_MRT3847_109664C.1
ccacgcgtccgattcttctccctcctctccctcttttaattcaatgtgtccgcttcttctcctgacccgtcgttttcagagtcactctgctgtataaactctcattcctatttatactataatcttcttcttcctcttcccttctcactacactctttttctgtttttcttattctcaccatgctgtggtcttatgcctcgcactatgtccctccacaacaccgcactaacagcttccaaaccttaaccgatgattcaaccagccgtggtggcgctagaccacgtgacggtggccgcggtggttccggcagccgtgggttttctcgtccccgcattccttctaaccggttacccgtggaggaaccacaagacggcagcgacgctattaacttcgacgcgtacgagtcggtaccggtggaggcgagtgggaaggacgtgccaccgccggtgaacaccttcaatgaagcggacttggacgaaggtttaaagaggaacatcgaccgatgcaagtatgtgaaacccacgccggttcagcgccacgcgattcccatcgcgagtgcgggacgcgacctaatggcgtgcgcacagaccggttcgggcaaaacggcagcgttttgttttcccattatatctgggattntgaagggtcgttctctttctgggttttcatcaatgcncgctcgtggtgccgctgttgcataccccactgcacttattctgtctcctaccanggagttatcatgccagatacgcgatgaagcgaataaatatgcgcatcaaactgnagtgaagngtgttgttgcctaccgtggggctcctattac

SEQ ID NO: 10692 - DNA, 980 bp, Glycine max
  Clone ID: PAT_MRT3847_109665C.1
ccacgcgtccgtaaccttcctccaaaccaatccaaatattttcccccaaattcacacctccctttgcgccaatcaacgaccccacactcaaattccccccacctcccacatccactcacttctctccttcttcccatgccaccttccccttctttcccttcagagaaccgaacaaaatggaggaagaggcggaagagagaatcctacaaacgcaaccagaagcgtcacggcgacgacgacgactccgacgatgacaacgagcccgacgacgatgactccgacgaccaattccgcagccctagcgcccaaatcgcggacccgcggcgcgtggatatcgaggtcgtgtcgcccgagggggtccagatttcgcggttcccgccggcgatcaggcgcgaggtgacccgcccccacgcggtggtcgtggcaatcgcagcgctggaggtcggcgacgacaaatcacatcacaacaacgttccggttctggagaatgtgtcgcacggccagctccaggtgctgtcggcggtgtccaccgattgcctcggcggcggctcgagcttcgtcgttgctccaccgccagtttcgaaaggctccggcgtggttaagcggttcgggagtagggttcttgttgttcctatgcattcagattggttttctccagcctcagtgcatcgacttgagagacaagcagtgcctcatttcttctcaggaaagttgccagatcatacaccagataagtatgtggaatgtaggaactacattgttgcaagatacatggaagagccagggaagaggattacagtctctagttgccagggattgttggttggtgttggtaatgaagatttaactcgaattgtcaggttccttgatcactggggaattatcaattactgtgctcagggcccaagttgtgagaattcggacaatgagacttaccttgaggaggacacaagtggtgcaatatgtgtgccatcaacagc

SEQ ID NO: 10693 - DNA, 723 bp, Glycine max
  unsure (1)..(723): unsure at all n locations
  Clone ID: PAT_MRT3847_109666C.1
tttgtgccttcaggccttaccgagggttctctttccccccatatgattgttattccatttacgctgtagtttttttagcataactctgataaaaggacaagcatatagtttcttataatttgctgaaactacagtaggaaactggggatgatagagaatagttatttatgtatgtgcttattaggttattttatattaaaggcctgggcttatctttcttgcgctgagacagtttgagagagagttatcttgtgatttgagaggaaattggggcctttgggcattgggaggcacagaccctctaagtgtgctctctgttcagtgatttggggagttcttccctcatgatgtgctctatatccttaatagcctcctacctttcttttagggtttaagtctatccatctttaaagggatattggttgtattcttgtatctttccaaggcatatataatccactattttatatcccaaaaccatcttaaccacaaatacctctatatggtccagcactcagacattctccttaatgttttttatctatcctggtatgctcactcctttatccgcttaagcattcactggttaactttaggcctagcagataatcttagtttgtggatccaacatgtttaggctttcccatgggaaaaagaacagatacaaattggaacgtgagagatattgntttttgtttgcatctaagattttgactaaatact

SEQ ID NO: 10694 - DNA, 293 bp, Glycine max
  Clone ID: PAT_MRT3847_109667C.1
aaaacaacatcagttctattattcctttgcgttttggaaataaaaaaattcccatttgggaatggggggggcttcccccctgccctttaatacccataattacccagattgccgggcctcttttttcatggtaaaaccaaacggggaatccctcccaagagctggaaggatttttctgtttcttccaaacaggggtcctttttttcccgactccaaggttcaacaactttattaaacttggctttcacattttggaacaatgggggaagggcatcctcccctttgtgaaaccc

SEQ ID NO: 10695 - DNA, 328 bp, Glycine max
  Clone ID: PAT_MRT3847_109668C.1
gccggagaacccggggttacccacacgcggttgcacccccgcgagaagacgacaaaaggggggggggttaggaaaaaaaccccgaaaaaacccacgggcgcacgggcgagaggacccaggcccacgcacgcgcgcaagcgacgcgacagaaaggccaaagagccacccaaagacacagaacgggccagcgcaacacaccacacagacaggacggaccggagccccacccaacgaaaacaccacgcagcccaaccaccccacaccacgacgcccaaaagggaaagggcaccaacagacagggaaacaaaaagccgcgccaacagagagg

SEQ ID NO: 10696 - DNA, 463 bp, Glycine max
  unsure (1)..(463): unsure at all n locations
  Clone ID: PAT_MRT3847_109669C.1
agtttccgatcatcactgtatgacgtcctccttctttgggggngggggggggggcactagaggagcaaatggtaagtagcggcgaaaagccaggatagcagtgaagcagggcgtagggggtgagccaaagagtaaaagggttaagataaaaacaaaaacaaaaaaccgagtgaaaggattaattttgaggaatatgggccaaccaggcactaacaaatataaacaagttgagaagccttgtagaaaacgaagagaaggcggattaaccgggaaccgtgtttataccgttagtacgttaaggtaccagtggtgttttgcgcgggtaacaatatccgcggcgatgcaccgtagtggatgcgtacggttagggaaaatggcagccaatgtcgtgttccggcactacatgccccaaaagtagcgtggctggtagccaaccggactacgtaagtgtgcgggttggaag

SEQ ID NO: 10697 - DNA, 505 bp, Glycine max
  Clone ID: PAT_MRT3847_10966C.1
cccacgcgataattaataaccggtcatagaatggaaccaccttgtttttcccgacctaggtagcgcttttttgaagtcggagaagaaacgttgatgctgttgcgtaaccctgcgttgacagcgtcgctgctatcagccaccacaaagaagctctacaaccaccgttattctacacctgctgcattcatggcgtcttcaggtgtcgcgtgcagtttgctggttttgtgtggcaaatcactggcagagaatgaaactgctaaagctataaagaccaataacacactgaagctccctgaggatgaaaaactctcactcgttttgcattcggagatggataaatcagttatgcaagggtttttccaagttcattcctatatggattctctttccaccaatcaatttggcaggcttctcgtttggtctccagacttaacttcaacacacgatgttgtttcgcacaacttttgtgagctccccattggtacagtttgcattgctgatgttc

SEQ ID NO: 10698 - DNA, 220 bp, Glycine max
  Clone ID: PAT_MRT3847_109670C.1
aatgtatatgttatatttgatataaaatttttattaaatggcaagatagttttttgttgaggggttttttaaagatcgagggaatcgatatttctattagtaatatagtacgttttttaaaatatttcgtactttttaacggttagactatgagatttattttaaataaaaacttttaatttttatatggttaaaaagatattgctattttaaaatttta

SEQ ID NO: 10699 - DNA, 441 bp, Glycine max
  Clone ID: PAT_MRT3847_109671C.1
ttttgtttttattcctattggttttatcctattaaatcatacatttgttccacatatatgggtgggtcaatggcgctactctgtttcacttggtacttacctgaatctgcttcataattgtagacaatttcaaccgcgtgagatttcacaaaaggggcaacttcaacattggcattgctaatttgaaaacctaaggttgggcaataagagccatcatataaaattggacccaagtaattcatatccaaaaggtaagcaagggaccaagtcctaggaaggctcatcattttctgatcaacatcttgatttgcagctgccacattagcaatttggactgtacgctgagcctctttgtgctccaatgcctttaccatgctcttcttttatagatccctcatggatcccaatattctgctaaatggaattgttgattcacccaat

SEQ ID NO: 10700 - DNA, 330 bp, Glycine max
  Clone ID: PAT_MRT3847_109672C.1
ggctcgagagcatatactcatctcaccacataagatattattaaccctaccatgtgcaaactcgtgctacaaactgcctttaacacttgacttggaccattacctaacgatccagtcgtgggtgacatggtatattctgaacttctaaacggtgggaaacaacacgcagctacagtccatcaattatgacatggcttgactcaagcttcagacaatggagcacagagatacgaggtaactggtggccaatgttgccatgagtgtggccaggagactgcgctagttatttcaagatcgtattgagaacgggtgatatggatcagttttact

SEQ ID NO: 10701 - DNA, 234 bp, Glycine max
  unsure (1)..(234): unsure at all n locations
  Clone ID: PAT_MRT3847_109673C.1
gacacacactatanaatagctatgacatgcgctggtgcgtaagctcggacatcctctcacggctatcttatacaccatcaacaccaccacactttcacccaggtggggggccatcatttaatctgagttacaatctgccacggcgcgtgcaaggcagactggatgtggtaacgccactcatcatctattgtttgccagccagttcatgagccacgcggacgggaatgataattc

SEQ ID NO: 10702 - DNA, 337 bp, Glycine max
  Clone ID: PAT_MRT3847_109674C.1
cacagaattattcaccactatctacttattgctcactctgaccttttgatttgagggacgatgagcctcttttggcatggcggacacatttaacggggtgaagccaacttcacaattgctccctgcaaataactaacgccctattcgccaacctctaccttctcaccttaactacctttctttgtacccttccttactttctcggcctctggcgccactaccctaccaccaacgacaatgtcattgtctctttctcagatatactattgcctattctttcaccccaacactatagactcaacccattcatataccaatcttgacttggccatccacc

SEQ ID NO: 10703 - DNA, 243 bp, Glycine max
  Clone ID: PAT_MRT3847_109675C.1
atctatttggagttgacggcgatggataccaattgacataaagctatcatttattaacacatgatgtggctgaacttaaacgatcagatgttactgagagtgtccaccaaaccgaaaggtcgtgggcattacctatacgccagctgcatcttcaatgattgctgggtgagggtgcatcgctcgatgcacggggaactgctggaggaggtcttggacctatttggcctctcctagatgtggggc

SEQ ID NO: 10704 - DNA, 356 bp, Glycine max
  Clone ID: PAT_MRT3847_109676C.1
gtcattacacttcaaactataaagtcaggagtgccccatagaatgttaacatacatggtcacgatagaagactaatgcaacgatgacaaaaatataacatgaagtttataaaaggagaagaatacgggccaagatgattgctgcatgaatcgacatcaccaaggaggacaactaatgaacataagactacaaactggagaggggtagaataataaggaacccaaacggcatatcaacgtactaaagcggaaccgaaaaaaacaaaggactaccttatgatcttaaccaaagctagtacaaatgaagtcgacagaacatactgaggctagacccccacctaagggggagctcccagc

SEQ ID NO: 10705 - DNA, 407 bp, Glycine max
  unsure (1)..(407): unsure at all n locations
  Clone ID: PAT_MRT3847_109677C.1
agcaaccagnaagtaagnaacnancaagtggtacngaacacangaganncagccacangnacgcaannnccancanacgntncacgganngcgnngncagancaagatanaannnggtnggntngaaggncaanancagaagaggaaanaggcacancacgacgaacaaanangncacanagaggaacanngncgagaacgcagaagcacacnnagcacaagaaacanacnaccaagnacgagnanancnagcagagaagcagnacanaccaccgancnnangangaganacnangaagagccaacnagncagncanagcgagaacgacgcanagancagagcanacgaagcacngagnnggancanaganggnacgacatcanaangacagagnanacaanananc

SEQ ID NO: 10706 - DNA, 1457 bp, Glycine max
  Clone ID: PAT_MRT3847_109678C.1
attgggggacgagttaagttggcgccaaatttgcaactggagccacgggggaaggctggcaccgtccagccatgacgtggttgtgcagcgcagttgcgggatttcagtcgaaacaactgtcgcctgcgacttagctgtttttgaggatatattgaagaaggatccaacatgtagtgacaccttagcaaaacttatcaagatgcaccaaaatggagactatagtcttgtatctctgctggaaatgattgctttacatttagatgctacagatgcagagtacaatacgtggaaggtgttctcttcatgtttcttgagactgtcttcctacgaagaagactgcatgtcttcatgccccattcaaaatgaagatggacataagcaacattttccccttaacaaaacccctaaaatatttacggatggtatatcaggaaaatcttggaggcttcgctgtaggtggtggctaactaaacatttcagcaatagcaagcttgaatccgagattaatactggtgacttgcagttactcacatacaaagcggcatgtgcatcgtatatgtatggacgggaattcagctatgttgcgaaggcttactctcatttagaaaaagaagatgataaggagttgctattgttcttggatgagcacaggggaaattcatttggaatttatcaaaaatttcaaaagaaatttacacacataatatgatatttatctaaatcactaatcattatttgcttaaaatcttcatattaatttggacgacttttatggttttaactttattcactctgttatttgtaggaattcatatgcaatgctgaggatgcataccagcttgctctatgccttgggcaagaaaaaggtgatattggtcctatgtcaaagatgatgatgggtttgacattctatgagttgtggtattcttctatccccaaagaattccagtggagaaattcagatcagtttgacttgcaagagaactcagatatggagggaacttcattcaacaatgaaactgtacagtcagagaggtataattcagttgaatcccacatggctgactcccagtcccagcgtgattcagatgcctctgtcatgaatgatatgaagatatctggggatgttgtcttcaatgaagacatggaggttgatgctaataaaagagaaaaaccacatcaaaacgttcagccagaaggtttttacttaaattctgaagagcataaaggatttggagatcctttttctaacaatggaggtcttacacaggatatcttgtatggccttggggaacttgatttgtggttgctacccctgcgtttatctgatgaccacagttttgaggagttcatgtatttgcaaggaaatcagcctaatgactattacaaaaatgcagtgaaatatttacaacttgcacttgactcagaaccttctgcttcagcagcattacttccat

SEQ ID NO: 10707 - DNA, 641 bp, Glycine max
  unsure (1)..(641): unsure at all n locations
  Clone ID: PAT_MRT3847_109679C.1
ggatcccaacatgtagtgatgccttagcaaancttatcaagatgcaccaaaatggagactatagtcttgaatctctgttggaaatgattgctttcatttagatgctacacatgcagagtacaatacgtggaaggtgttctcttcatgtttcttgagactgtcttcctacgaagaagactgcatgtcttcatgccccgttcaaaatgaagatggacataagcaacacttttcccttaacaaaacccctaaaatatttacggatggtatatcaggaaaatcttggaggcttcgctgtaggtggtggttaacaagacatttcagcaatagcaagcttgaatcagagattgaagctggtgatttgcagttactcacatacaaagcggcatgtgcatcgtacatgtatggacgggaattcagctatgttgcgaaggcttattctcatttagaacaagaaaatgataaggagttgctattgttcttggatgagcacaggggaaattcatttggattttataaaaaaatacaaaagaaatttacacacataacataataatgacatttattactcagatagtaatcactcatctttatgtgcttacattcttgatattaatttggacgacttctatggtttcaacttt

SEQ ID NO: 10708 - DNA, 1338 bp, Glycine max
  Clone ID: PAT_MRT3847_10967C.1
gcattcccctcccaactaaccgtgacagcatccttttgcgttttcaacaccctctcaaccgtcacctcccgccacgtctcactccctcattcgccctcctccggcgcctgtgatcaccgcttccctccgctccccacaccacccaaccgtgacagcatcaatttccgtttccgacaccccctcaaccgtcacttcccgccacgtgtcactccctcattcgccctcctttcggcgcctgtgatcaacgctatcaaaaccctcaacacctcaaccttttcgagtttgtaacctctttgtcacgttttcctcgtcgcacaaacaccacactacacttttgaacactgaaaattgagatcgcagaagaagaatattaatggagatggctcaggttaaggcacgagctcgaactgcattggccatggccgcttccgcaagttcacggaagagaagaaaaatctcgatcaacaacaacttcgttcaaatcaaaagtttgagcaacgcaaccgtgccggcgacgggggaacgaatctccggggaatctccggcgtcttgctgctccagcaacggatccgtcgacgatgaaaaccgaatcatcaaattctcagatctagagtttgagagtcagggagttggtgcgtaagcgtgcgactgcggtgaacaacaacaacaaataaggagagagatgagtctcacgagcgagcttcgaatcacgaattcttcttcgcaagaggtggattcagcggaggagcagatcacccaaaccaaatctttgccgccgcagaaaatgccgacggagttggagctcgatgaattcttcgccgctgctgagaaagatattcggaaacgcttctcagacaagtaatataatagtagtagtaataacaaatttccatttcaaaaaatgggaaattaaaactgaaaaatggagtatatgatattgttgattaataaatctgcaggtataattatgatattgtgaaggacgtgtcattggaaggacgatacgagtgggttaaattgaagccataaaagtgagagtaccaaccttgaaggaaggaaggaacaatagaagaacacggttaataaaaaaatgccacttgctgacattattcttacgttaatttactttaggtacttggattttcaacttcaattttccgtctttcacagtagtactacgctttgtttggtgtacagttaaatattatttttcttctatggttatttgtgtacggtttatgatatagttatacggagaagctagttctgtgaattccgttgagggaggtgactagcgaaaacggttcctacaaggctgtaacaaaattgtagtctcat

SEQ ID NO: 10709 - DNA, 311 bp, Glycine max
  Clone ID: PAT_MRT3847_109680C.1
tcgcttacgcgtgggttttacagatctgtgagtgtaacagaccacaaagaggcgatcctgattttggggcattttgacaagtataagaatgacctatcccatgctgagagcaatatatgatgggaccacaccacccgaaggaccggaagggacaagacttacaaacaatactgcattgcttggacttgttggaagaaaggtggataccatctagtgttgatatttgaagatcaaagaactcgcgggcagatgtgcaatatttgcggcttgtctgctctatagagaagccacctagaggctgatgtagcatt

SEQ ID NO: 10710 - DNA, 143 bp, Glycine max
  Clone ID: PAT_MRT3847_109681C.1
aattcggtcggctcgaggtgaaaaacccgttgccagaaaagtattccttaatctttcgaggcctatgtttcttttaaaactatttgataaaaccaggaaatcgttgtggtttgggggatagtaaactcaagtttaagtcttat

SEQ ID NO: 10711 - DNA, 247 bp, Glycine max
  Clone ID: PAT_MRT3847_109682C.1
gaggaaactaacctaagcaacacgcatccacactgattccaaaccttgcagttgcagagcagaggttccaatggctactgcgcataacactctttcctctctcctcgcgcctcaagctaccggacgaaccactcttcgtattccaatttcttcaaaacgccacaggaaaaaccatttgcgacccaaaattctgaaaatccttactaaaccctaccccctcgcacttcctcttctaccgtcactgccg

SEQ ID NO: 10712 - DNA, 226 bp, Glycine max
  Clone ID: PAT_MRT3847_109683C.1
cttactcattcactatagaggtagatgtcacccgctagggaaagatgcccggtgtacctaggagatggctcgtagggtgcagaaaacaatggaggtggccagaaaagaagacattatccgaatccttgcctactgaaactctgccaagagaacctgccttggcaagagctcccgcttacgctgaggcaggctaaagcccggactgtaaactggatgatgacagtat

SEQ ID NO: 10713 - DNA, 769 bp, Glycine max
  unsure (1)..(769): unsure at all n locations
  Clone ID: PAT_MRT3847_109684C.1
ttttttttttttttttttttttttacaaattgaacttctgagctatatattcatctgcaacatagttgttaagttgaaatacaaattcgtaaccaataatatagcaacacttattatgcattccaacatgcacgttctttccccaaccatccagtttcgggatactcgggaagaatataatggcattaaaatttcaagttaacgtccaacaaatgaagaaataaggtccaagaatatatgcaaagagcctaatacatatagggtaatattaatcaacacttgtcacaattaagcaggttcactgaactcaccatctctacatacagccacttctatcttcaagattcctgtcttgttcgacttcatcactctgcaacagtttctccttggggctctatcccatagatgcgggtcctgcttcttgggcacctctattttgtcaagagcagaaggatcagccatattccatcgacattctggaggaggaatcggatctctttcatattcagtcactgtttgttgcaaggtggaattgagttttgccttggaaaagtaaaacacgaaaggtttctgacaccgggttctgctaaacgggcgtgtgttgaaggcatatgcagtgtaatctgctcttctataccaattgagaaatgttcttgaannnatttcnatctcccgctgcntaaaatatccgcgaaatatctgaacagcaaaaccnnatgnnactgaaatgngccatcnnntatttctnnnnnnnncaangnnattgttg

SEQ ID NO: 10714 - DNA, 401 bp, Glycine max
  Clone ID: PAT_MRT3847_109685C.1
gggactggaaatcttttgggaaaccaaacatgctttaaaagcatcacggcatataccaatcttggggtttaaaagaacttttgggtacgaacttgataccctacccaatttggaaattttgaattgctttacaacttttcaaggttaaagaaaaaacctatccatcccaagtccctatcctccaagggattttggattaaaatggaacttggttcaggctactggtggacactcattaagggaagggaatattggattcatcccaattccaaattcctcaaaactacctggttctggaagcttcacccttcccaaggggctaatctgacgcaaaagccttgataaaaaggtattgtggcatataagagagcttgggcaaaccaaagcttaacgtttgcccg

SEQ ID NO: 10715 - DNA, 1058 bp, Glycine max
  Clone ID: PAT_MRT3847_109686C.1
cctcggcccgattcggctcgagcattgtttggtttggtttggttacttgaaaatctcgaatcgcttaattctgattcagcaaaaataagacattgtttggtttggttacttgctcgaatttcctcgaatcgcttaatttgtatttgattagttaaaccgcaacgcggaatctcttttctcgaactggctaactctcaggcaagtggttcggacgctgattccagcaacaagcggctggtgctcgcactgtatgacgccctaaactccggcgactccgacgccgtcgtcaagatcgtcgccgccgacctcgagtggtggttccatggtccgccctcacaccagtttttgatgcgcatgctcaccggcgactccgctgccgacaactccttccgcttccttccgcagtccatcgccgccttcggctccaccgtcatcgtcgagggctgcgacaccgcccgcaacattgcctgggtccacgcctgcaccgtcacggatgggataattactcagatcagagagtacttcaacaccgccctcaccgtcacccgcatccacgattccggcgagattgttccggctagctccggcgccggccgtttgccctgtgtctgggaaagcagcgtctccggtcgggtcgggaaatccgtacccggtttggttcttgcaatataaaataattattaacaagtaattagggaagaacgcggtcacgtgtgaataataattaaataaggaggttgtgcacgtggcggtgactgggtcgaacggtttcagggaacattgatatattttcgtagtattggtgtgttctagaggttagagagatgtgagaccctattggtggggtttcttatttctttaattttctcaggtttggtttgtttttgttttgtttgcttgtgtgttttgggaaccactatgggcctatccaggtggctgtatctttcttttgtaatgcggtttgttgatgatgatgatgatgcaataagaatatctatggattatggttttaaaaaaaaaaaaaaaaaaagggcggccactcgcgatctagaacctag

SEQ ID NO: 10716 - DNA, 924 bp, Glycine max
  Clone ID: PAT_MRT3847_109687C.1
ctcgaggacaactggctcgaggcattgtttggtttggtttggttacttgaaaatctcgaatcgcttaattttgatttagttttccaccgcaacgcggaacctctttctcgaactggctaactctcaggcaagtggctcggacgctgattccagcaacacgcggctggtggttgcactgtatgacgccctaaactccggcgactccaacgccgtcgtcaagatcgtcgccgccgatctcgagtggtggttccatggtccgccctctcaccagtttttgatgcgcatgctcaccggcgactccgccgccgacaactccttccgattcgttccgcagtccatcgccgccttcggctccaccgtcatcgtcgagggctgcgactccgcccgcaacattgcctgggtccacgcctggaccgtcactgatgggatgatcactcaaatcagagagtacttcaacaccgccctcaccgtcactcgcatccacgattccggcgagattgttccggccagatccggcgccggccgtttgccctgcgtctgggagagcagcgtctccggtcgggtcgggaaatccgtccccggtttggttctcgcaatataaaatataaaataagtaattagggaaggacgaggtcacgtgttgccgttgctataataattaaataagggacttgtgcacgtggcggtgactggatcgatcggtttcagggaacattgatactttgtgttagtattggaggttagggagatgtgagagctttgttgttattggtgtggtttgttttgtttgcttgtgtgtttttcaccactatgggcgtattcaggtggttgtatctttcttttgttatttggagtgttgatgatgatgcaataagaatatctatggactattgcttttaaaaaaaacacacccccccccccccc

SEQ ID NO: 10717 - DNA, 356 bp, Glycine max
  unsure (1)..(356): unsure at all n locations
  Clone ID: PAT_MRT3847_109688C.1
gatcgttttacaggaacacgacctagaagctgcacagnctatatcacagattataattacacatccatagaccaacttcttgatatatttctagttgatcctccaccccctgcatctggtgatttcgcataattaaagccctttcaagtttgctaaaatgaagttagagaacttccaaataccaggtgactgaagcataatggtatctatctttgaggataagatttgttagagcaatctaagcttagctatgccctctaaataagatcggtctatgatactcatgtaccatatgaagaacaagcttgcataagatttcgatagtgtatcttgagactaagaattactccgattaa

SEQ ID NO: 10718 - DNA, 402 bp, Glycine max
  Clone ID: PAT_MRT3847_109689C.1
cctaaaaaaaaaaaatttttttttctttggaaaccggtttaaccggggtggccggcccttggggggaaaggacccgaaggaaaaaaatggtttttgtttttcgggggaaaaaaattatttttattattttccaaccccaaggggccaaaaccttaccccccgtccccgggaaaaatcacggggggggcggccccctcccaaaatccgaaggcttccgggaccgtttcggccaaaacgaccccgtttgggttttgggggggcccccactcccccccagttcggggcccaccccttttttatgaaagctccaaggacggttgggccctgcccaacccaagggcctcaaacaaacccccttcctggggagtccttttcgggggggccccatccggaatcgccggg

SEQ ID NO: 10719 - DNA, 466 bp, Glycine max
  Clone ID: PAT_MRT3847_10968C.1
ctcggggtcgcttgggcggacgcgtgggatttcttaagggaaagaaaatcactctctgcgctggccacagacttcgggaatcattttcttttccagtctgagtttattcgctgaacactctcctatttgatataggacttcgcgtcacatttaaactgatgatgtttctgtctcagttctctgcttgattgcacgaccaagctggtgaaatcttggattagtgctgccactctcctatctggtataggacttcgaggtgagactggactatgtttgacctttctttcactctgttcttctcactgatccgacattgccggtcaaagtggtcttatttgaaaaacactagggcgttggtgcaaatgtttgcttcgttaattatctctggggacaacaggctgactgagaaaacactttttacttgccgagagttggacatctttgatgtatatcatacaatagcgac

SEQ ID NO: 10720 - DNA, 144 bp, Glycine max
  unsure (1)..(144): unsure at all n locations
  Clone ID: PAT_MRT3847_109690C.1
attaattngaagaatggcattcgttgcttggtgatggncctttctgntctcttcaatcntggnnntggcgaaangaagccatgncaganncggagcnttttgggangctggttgggcaaacanttccnatnccaggtcnatgcg

SEQ ID NO: 10721 - DNA, 987 bp, Glycine max
  Clone ID: PAT_MRT3847_109691C.1
agcgacagctccagtgcctacaccacgctcctccgcaccgcgctcttcggccccgacttcgcgccgccgcccacgccggagaaaacggcctcgccggcgatgacgctccccagccgaaatattttccggtacaagacagagacgcgccagtccatgcactcgctctcgccattcatgtgcgaggattcggtgcccggcgttgttcacggtccggtcaaggctccgaggaaggttccgaggtcgccttttaaggttctggatgcgcctgcgctgcaagacgatttctacctgaatcttgtggattggtcttcgcataatgtgttggctgttggtctgggaaactgtgtttatctttggaatgcttgtagcagcaaggttactaaattatgtgacttggggattgatgaccttgtttgttcggttggctgggctcagcgtggtacacaccttgctgttggaacaagcaatggtaaagttcagatttgggatgcatctcgatgcaagaagataagatctctggagggtcatcggttacgtgttggggccttggcttggagttcatctcttttgtcttctggtggcagggataagaatatttatcaaagagatatccgtgcacaagaagattttgtcagtaaattatcagggcacaaatcagaggtttgtggactgaagtggtcttatgataaccgtgagttggcatctggaggaaatgacaacagattgtttgtttggaatcaacactcaactcagcctgtcctaaagtactgtgagcatacagcagctgttaaagctattgcatggtctcctcatcttcatggacttcttgcatctgggggaggaactgcagaccgatgcatacgtttctggaatacaaccacaaactcacacttaagctgcatggacactggaagccaggtttgcaatcttgtctggtccaaaaatgtcaatgaactagtaagtacacatggctattcccaaaatcag

SEQ ID NO: 10722 - DNA, 1105 bp, Glycine max
  Clone ID: PAT_MRT3847_109692C.1
ccaacttccattacaaaaccaaaacactcaagttaacttcaacacctttaattttctgaacgaaattcagccacagaatatcaaagggagcgaagatgagtcaggagcagccaaggcgcccccaaggccaagaccccatcaaatacggcgacgtttttgacgtctacggtgaccttgcacagatgcccattgcaccggaagatgctgccatgatgcaaagcgcggaagctcgagtactcggaaaaacccaacccggcggagcttcttccgtcatgcaatccgccgccacaaggaatgaacaggctggtcttgtcggtcaccaggacgtcaccgacatcaccggcgaccatggcgtcacagtcacagaaactacattccatggaagacgcataataaccgaggctgttggtggccaggtagtggaacagtatgtggagccaaatccagttgaggctggacgaaccagtgcaattaaggagagtgctataacaataggagaggcattggaggccacggcacagacggtgggtcacaagccggtggatcagagtgatgcctcagcgattcaggcggcggaggttagagcaacgggaagtaacgttataacgccgggaggacttgcggctatggctcaatcagctgctgcttataatgctgactgcaagcatgaccaggacaaggtcaagcttgccgacgttctgaccggagcaaccgccaaattgcccgcggacaaggccgcgacgctgcaagatgctgaaggggtggcgagtgctgaggccaggaacaaccccgatgccaccgccactcccggtggggtagccgcttctgttgcggctgctgctaggctcaatgaaaatgttaagtaaaaagtagtgttatgtatgttgataatcatacctgtgtttcatgatgtgtgaggagtggcctgttgatatatgtgttgtataactgtaagtggtgctgcaacatgttgtttctttcttttaagcttgtgagatatgttactacttttctggtatcttttaaggactctacttaaaggtgatgtatactatgctatggatgatgtctgtgccgcctgttgttaataatgtgtgttctagct

SEQ ID NO: 10723 - DNA, 145 bp, Glycine max
  Clone ID: PAT_MRT3847_109693C.1
gaagagctttgtagacctttcttaatattattggtgggacgggggttatatcaaatgttgggagcctgcgccatttcttggccttggttcaccttggccttggtttggctccttccggttccggcattcaataacaggtttaagg

SEQ ID NO: 10724 - DNA, 328 bp, Glycine max
  Clone ID: PAT_MRT3847_109694C.1
tctataacaccacatattgggatactaaacaagttaaaaaaacaacgtcactgttctatctaaacagcgcctacgtcaaaattaattttaatcacctaaaccatcttctccatcatatcatacctagtactactcctcctccatcttttttacacctttcataccaccttccaacatatcatctattaaaattaaactaatcactttgatctaatataatgatcatacatttatcttcatttttttcaaatgtatcttctttacatctactatatttccacttccataaaagtttattccttcctaattcaccattcatatcctaaca

SEQ ID NO: 10725 - DNA, 473 bp, Glycine max
  Clone ID: PAT_MRT3847_109695C.1
gctgcgagaagacgacagaagggatgtaggttccaatctcactacctatgtgaggacctttcatgccctggctcttataaatcccaagtgcacaactcacctaaacttttcattaccaaaaaacatggggtatattctatctcatatacaagtaaacatattatttttccttaacctgcaatcctatcagcataagtacaagaatcccacacaactatatgaacatcattaggctaacagtctaacaccctacattctcttcatgcattccatgggttgagattcattgactattcatacaaagagaatgaaaagttctttatccttctagacaaccatgaccaagatctaaattaatcatatcaaacacaaaatctgtagtaggaatttcatgattgaatacaacactatctctatgcagccgaagataccaaacaacagcaaaccaaacaatccaccattgatgtgttgaa

SEQ ID NO: 10726 - DNA, 653 bp, Glycine max
  Clone ID: PAT_MRT3847_109696C.1
ggaactcagcttcctaatcttgaatcaaagtttttccaaattggttcagtgcatcctgctgtatttgaggttggactgcgttattcagcaggagatatatcagggggtaatgctcgttgtattgcaatgctaagagcatttcaagatgccattagagattactgcacaccacatgaaaaggtccttgttagggatttagcttcaaaaatcagtagttatgtatctttctttactgaatgtagaccactttctatgagcatgggaaatgcaattaggtttgtaaagagtcgtattgtcaatctgactttaaatcattcggagtttgaggcaaaaacaaccctgtgttctgatattgaccggttcataaatgaaaaaataattcttgctgataaggtgattgtccgacatgcttttacaaaggttaaggatggggatgttcttctcacatatggattgtcatgtgttgttgagatgattcttttatatgcctatgagcaaggtaaaaagttccgtgtggtggtggtagattcacgacctaggcttgaaggtcaggccttacttcgtaggctagtggctaagggcctgagttgcacatatactcatataaatgctgattcttatatcatgcatgaggtcacacgggttcttctggg

SEQ ID NO: 10727 - DNA, 185 bp, Glycine max
  Clone ID: PAT_MRT3847_109697C.1
caattcccattcgacccacgcgtacgcccacacttacacctactcatgagacttacccagtttattctaacatcataccattaataggcaacggtgcactatccacaacagaaggactgataacaattatccttttaattactcacatgtgttatcgacttatccataacaaaacatgcatttta

SEQ ID NO: 10728 - DNA, 394 bp, Glycine max
  Clone ID: PAT_MRT3847_109698C.1
aataactcctacaggaaaacccaaactttggttacgatatatttaatgcatcaacgcatcaaatattaggttaccacttctctaccagaccaataaatcatgaagtgtagtaatagtaagtcagcactgccaacaatgagccccaatgaatgtcctgcaccaacacatcaaatcaaaataaataataataataatagtaaaaattaaaatgtgcataatttgtgagacttatttagtgagttttcaaaaaaactatgccactaagaaaggaagttacttaaattgtataaataaagtgtgatcatgacatccataacaaataataaacaatcatttaaataacttatagtgatttcacctataaagatactcttgttttgtccaaaatttaaaa

SEQ ID NO: 10729 - DNA, 292 bp, Glycine max
  Clone ID: PAT_MRT3847_109699C.1
ttctttttgcgtacgcttgtgaagacaatgaatctgacacgaagtgttggtggagatcttaaacttctaactgaagggaagttgtgtgaaggtaagcacattcctgtggctaatatttgtgcaggggagagctacgttgttcaaatacccctaatggcctccgaggaaattgtgagttttagtgcatgagattgaacaacggcaaagttgaggaaaaatagcaaggctgacgctactgcatcgcatgtgggagctatccaaataaacatatgttgtttcgcaagtcctgact

SEQ ID NO: 10730 - DNA, 200 bp, Glycine max
  unsure (1)..(200): unsure at all n locations
  Clone ID: PAT_MRT3847_10969C.1
cctccatatattgaagcntcgatgaggccctattaataatacgcgcaaaacaaattgaagaaattnaaaattatnacatatnacacacatcgattctcannaaacanataatgncatccctcanttcncttttcgntctcnccaatttcccgaaacccnaatttccncaatccnggttttggaattcgacaatggagcag

SEQ ID NO: 10731 - DNA, 431 bp, Glycine max
  Clone ID: PAT_MRT3847_1096C.1
agccaaatagttgcaacaacaaatattcataacaggttaaaaaaaattggtctcaattttcaactacccattggggagggaatcaattcccaaccattttttttataaacagccaaaataccctttaatcaaaaaaatcctttttgataaaaaaagagcctcatcccttcaattccttgggtggggaaagttaaacaagggatttccccccacaaatgacccatgggttttccttttttccagggttttttattttttgaaccccgaaagaagaattgccaaattttgggggccggttttaaaaccaaaaaccttgccctatgggaaagggccctttttttaaggggggtttttactggcccctgtttctttgagctttttccccaatgctaatgctaaaggaggaggcccagctttcccaatttgccggg

SEQ ID NO: 10732 - DNA, 389 bp, Glycine max
  Clone ID: PAT_MRT3847_109700C.1
aacaagccacttgtgagaaggtactttcctttcttttattcaagcagcagcaaaccctacattaggtgggcatttttttaaattagggggtggcacccacaaataaagtgctaataaaattcttacggtcctcagcatccccaaaccaatgcataaccattttgtttcataacaccaagcactcaagataccatggagatgatttgatgacatataagagtgatgtacatagcttcccatccacagctataaggctatcattcttcttttgatgccacaatgaataatgcaaacactgtttatttgagccccaaaatattggaagtggacactgacagtggcaagccaaattcaatgtctcccatgatcaacacctcaatgtcatattt

SEQ ID NO: 10733 - DNA, 332 bp, Glycine max
  unsure (1)..(332): unsure at all n locations
  Clone ID: PAT_MRT3847_109701C.1
cgtcagattgcatttcttcttgttcaattacttatttaattgcgcctcttcttgttgggaattctcatttgttggattactccttcgattctcctgctcaagctgcttcaatgggtgctgacaaaaaaaaaaaagctgctccaatgatgtgtacctctgactgaaatcttgaaactacctctgatgggacaaaagcatggctgccgcttctctagtgtgacttcaatngctgtcttctcaagtgccatttttgttgtaacctttgattttggttcgtctcctttatgtcatgtattggagcagcagatccttgagcaaaaaggttttaaaac

SEQ ID NO: 10734 - DNA, 159 bp, Glycine max
  Clone ID: PAT_MRT3847_109702C.1
acgggtccgtaaagatgacagaaagggaaagtggggaaatttgttgtgatctcaaagctagtttatcctgaggagaacatcaaagttgcttgtattccctgtagctacactaattatggtaacatggacatgcgaattggcatgctatcaatggctcac

SEQ ID NO: 10735 - DNA, 489 bp, Glycine max
  unsure (1)..(489): unsure at all n locations
  Clone ID: PAT_MRT3847_109703C.1
cttgaacgatgtctatttaaagagctttgttgggacgtacttcaatttgcttgcaaggaagagttgcttcaccagggaggttcttacacacatggcgactgggctgaccatggtatacatcatcaccgtaaacgccaccatcatcgctgtctccggaagaactctgctcctcgaagattgctcgtctccgacaagagcctactgtaaggtgaagcccgacgttgggtacaagagttgtctttcaaagacgaagagtgacctggttgtggccaccactgtttatcgccttattgggtctcttgccatgggcctgatcgccaacctccctttgagcctggcccctggcatggggcccaacacatacttcgctnttaacttggatggttttcatggtactgagccgctctcttaccagactgcactggctgtgattagtgttgagggaatagattttcttttggtctctgctgttgcgctgacggggaagct

SEQ ID NO: 10736 - DNA, 391 bp, Glycine max
  Clone ID: PAT_MRT3847_109704C.1
gcgacgcgtgaccgtccacgactgttcgtataatacgactcattcaaagttaggagcttcagtccttatgccggatcacggcatggggcgacgagacctcaaccttcgacgtaatccgaagcctgtacgctttacgatcagcgtctgtgcagcgcgggtgcaacaaccaccactgttatacaggatagtccgacggctgaaacacagcagcaaagtcatactgcttctaaaaccatcggctgatgcaaatgctgatgacttgcgagctggagctcaggagactgcgcatataagaagtcagcagtcgactgcaaggaaaagcctgacaaccgaccacggcttgcgccccgagcacaactacaacaggatactcttagacgccatcaatgag

SEQ ID NO: 10737 - DNA, 427 bp, Glycine max
  Clone ID: PAT_MRT3847_109705C.1
ttcaagtcacgaggaggtgacccttttgggagctactgtaagcccatttgtatgcagggttcatattaccctcaagttgaagggagttcaatacaaatatgtcgaataaaatttgaagaacaacactaaactgcttctcaaatccaacccacttcacaacaatgttccattttttattcacaataacaaccccatagcagactctcttataattattaaatacattaattagacataaaagaacaaccccatcttaccttctgatccttaccaaacagccttaactcatttctgatccaaattcattcataataaagtttttaatactgcatacaaatccattttcacagctgatgagaaagagcataataagaatgttaaagaagcaattcatactcgtcactttcttaacaatcagataaataac

SEQ ID NO: 10738 - DNA, 233 bp, Glycine max
  Clone ID: PAT_MRT3847_109706C.1
tcttccggctcctcgctcaattaacccctgcgctccgtccttccgcttccgggaaccgtatcaactcaatcaaaaggggttataacggtaaccacaaaatcaagggataacgcacggaagaacatgtgtgcaaaaagcgcaaaaaaagcgaagaaccctgtaaaggccccgtttctggggttttttcacatgcgctccgcccctgagaagcatcacacaaatctacactcaca

SEQ ID NO: 10739 - DNA, 430 bp, Glycine max
  Clone ID: PAT_MRT3847_109707C.1
gattatcttaaccaaggaagaaatatctttgcttattttaaagggaacaaattaatgctccctaatttatttccaagccttttacgtttcatggcacaactaaacctaacggatgggtctaaccaaatggcataaagtgttgctgcaacaacattggaccagagcttccaaccaaaaaaagacaaactgcattggaaacaaaaactccctactttccatttttcagggaatttcaaagtcgaaaggcagcaatcttttattttcagcaccttcgggggtcctcgtttttttttaaaaaccgggtcctttgggattggggcaaaattcaaaagcctgggcccagaaggaatcctgacatccctaaaagcactgcctgtgagtaaaggcaaagggtggtctgttaacaggcctttcttgaaacgcttttcgg

SEQ ID NO: 10740 - DNA, 394 bp, Glycine max
  Clone ID: PAT_MRT3847_109708C.1
cccacgcgtccgctgagtactggttcgggaacttctcccaagtgtgaggagcatagtgaaaaatggcattgcccatggggttttacagttgttgatgatgtggctccaacattcaaaacaattttagaagaaaactacttgtcaacaaaatctccttttgaagatacaacacaaaataggatgttatggtggaagcggagaaagaaccttgatcactgtcttgataaattactgaggaaccttgaagagtcgtggtttggttcatggaaatgcttgcttcttggagaatggttgaactgcaaaaattttgacttggtgcttaagaatcttgggaatgatttaagatctaaatgcaaattggatgtaaatgaaggtcttcttaaaaattattctt

SEQ ID NO: 10741 - DNA, 155 bp, Glycine max
  Clone ID: PAT_MRT3847_109709C.1
gcagacagatacgccgcttttgtcaaaacctcacaaccttacggaaacatggggctaccctggtaatgctgaccggttactggaggcgtaccatcataagcttatagcgatgcttctataaaaacattggcgaaatcatggctatagagagtgga

SEQ ID NO: 10742 - DNA, 369 bp, Glycine max
  unsure (1)..(369): unsure at all n locations
  Clone ID: PAT_MRT3847_10970C.1
ttcccggggtgacccacgcgtgcgcttccttaggatggcatccttctctcctgccgggggggggctaatacaccatgttnacttcantatcatcatcctccatcttctccttcacccccaaaaccctaaccacacccccacatcaatctggtttcaccgtgcgggcccactccaaaccccccattttccccaacctcaaaaccctgggttgcaggggaatcttcncctccctcncactccaattccccaccagcgggggacgcgcgtaccctactgggggggggctttcttaacattctcctgtgccgctagcccgggcggggggccaccctgggcggctggccttagcgctccctataaagggggggg

SEQ ID NO: 10743 - DNA, 1401 bp, Glycine max
  Clone ID: PAT_MRT3847_109710C.1
ggagagagagaactagttctctctctcctgcaaggaagaacttgaagcatcaatctcttacacaaggtggtgataaaatcaactatgggtttgatactccacttgtgcagaagtcacctgtttctcctcctagccctgttcgattctcatggataaaacgatgcacagagctaattttcagaaattctcctgagaagccacttgagagaaacgaggattctcttatgggttctgatacaggtaatgtttgtaatggaaaacagtactcggaaaatgacgaatctcttggtaatattggcaagggacagcaaataggatttgcttttgaagaaccaaaagtaatagttgaagtaccttctctagatgatgctagaagaagtgagattgaatctgaggctaaagatgtgaatggaaaaagtgctctcctgcttccagatggacatcatgcaggcagacggaaaagagggagggggaacgtgactgataaaggtggcgatccgcaaatgggcgcgccgcattccaggtggccacgggccgaacaatccaatgaaaaggtccaatcaggtgtgtctaaggtccagcaggtgttaacgtcatcaaatcaaacacaagggaacacggaagaaactcgtgtagtaatggttgataaggttattcatgtatcagaagtgacttccgagaaacttgatgctctccctatcctcagtcaagaaccaagagataatatgcagagtcctacattcggagcagatcaatgtattcttcatggagaaacaattgatcgatcaaattctaaaactagacaggaagatattttaccttgtgcttccagtgtattgggaagcacagaagaaatatcaaaaggaaacaatgaacaagtttctgagcactgttagtgttaggtgttgtttgtggacagggactgcagatgatgggtatgagtattggtacttataattggtgtggttaagacaagtatatattaggagtgtatgaggatgtcataggaatggacttttcatttgttagtgacttggagctgggtaatgtatgtagaactaacttggagatgtctgctgtgtgtacacacttaatggatacagttgcaaattgcaatttagggtggggtagaatgttgatatcatagttcgtaaaatagggatgttatgtactccaaaacgagggaaagaaaaagagataagcaaagttagatgcacagccaagggtacgttgctctaccaaaatgtgttggttttctgattcagtgaattattctagcatggttttgtttgtggtgtttaaaccctccagatttgagttttggacacaacgctgaatatcatcgtgtagccatcaatagtgattttgcttgcgtcttcaataacacacgatggtggtcag

SEQ ID NO: 10744 - DNA, 749 bp, Glycine max
  Clone ID: PAT_MRT3847_109711C.1
ggggaacatgactgataaagttggcaatccatttgtagatgtggggcaaaataagaaatcgagagcagaagaacaaaccaatgaaaaggtccaatcaggtgtgtctaaggtccagcaggtgttaacgtcatcaaatcaaacacaagggaacacggaagaaactcgtgtagtaataatggttgataaggttattcatgtatcaaaagtgacttccgagaaacttgatgttctccctatcctcagtcaagaaccaagagataatttcccgagtcctacattgggagcagatcaatgtaatcttcatggagaaacaattgatcaatcaaattataaaactagacaggaagatgttttgccttgtgcttccagtgtattgggaagcacagaagaaatatccaaaggaaacaatgaacaggtttttgagcactgttagtgttaggtagtggcttacaatcaatttttttcccctcaatttagtttggttcttatccagtctagtcttttcaatgtactgcttttttttgtttccttttgtgcataagttttgcttatatattcatgcaggtgttgtttgtggacagggactgcagatgatgggtatgagtattggtacttataattggtgtggttaagacaagtatatattaggagtgtatgaggtgcgtcaattaaaacatgtttagctgtacattcctctcaactatatcttctgttcattttcattagataatgtcacaatgaatttttct

SEQ ID NO: 10745 - DNA, 316 bp, Glycine max
  Clone ID: PAT_MRT3847_109712C.1
cggagagttcgagaagaagtacattgcgacgctcggagtcgaggtccaccctctcggcttcactacaaacctcggccccatccagttcgacgtctgggacaccgcaggtcaggagaagtttggtggtctccgtgatggctactacatcaacggccagtgcggtattatcatgttcgacgtcacctcgcgtatcacatacaagaacgtccccaactggcaccgtgacttggtccgtgtctgtgagaacatccccatcgttctgaccggcaacaaggtcgacgtgaaggagcgcaaggttaaggcgaaatcaatcacc

SEQ ID NO: 10746 - DNA, 163 bp, Glycine max
  Clone ID: PAT_MRT3847_109713C.1
tccaagcttcctggcacactttgataagttttttgtgcagctccaatggcagcctctcaaatcacttcatcattgaggaacgtggctgcatttgaaaggtttgaaccttcaacgcttcgatttccttctgctgggcacgtcagtagtgggacactgacacaaa

SEQ ID NO: 10747 - DNA, 489 bp, Glycine max
  Clone ID: PAT_MRT3847_109714C.1
cttaatagattcttttttaatgatataaaacttcagacaaattggcttacgcacagactttccccgcccccgccccactttttgttaacctatgtttttagtacctaaaattacctccaaagaactgcagaaaaataagacttgcgtttttttgttttcttgtgcactaccctgttgaattcatgatgtttatagtagttgcttgttgcctctgtcaataagctgttggcttagtttgtgtcatggcatttataatggacatccttgtatgtttccaatctgttgaatttataatgtttatgcagaaatttcataatgtttagagtagatgcttattattctctatcaataatatgttgaataagtttgtgtcgtgacataattattaaaggaatccttgtatctcgtaagtcaattactggatttgcagtttatttcaactgaatttgagaggcatctgttagctttttggtggcaaattgtggtgga

SEQ ID NO: 10748 - DNA, 197 bp, Glycine max
  Clone ID: PAT_MRT3847_109715C.1
ttaaacaatctgagtaataatctattaggcaaatttaaagacagagggaaattttaagagcaagtgttgatttgcagggggctcatcgtattagagggatccttaccctggtggtcacagtctgggtattcctggggatagaggtctatccttggcctgtgctatgaatagttcttttagggggcgcgccagtcctg

SEQ ID NO: 10749 - DNA, 265 bp, Glycine max
  Clone ID: PAT_MRT3847_109716C.1
gggaaagggacccaaagcggttaatctcttttttcggaaaacaaaaaaacaccaaaggcttaccctctggggacctgggaaccaaaattaagaggggcccccttaaaacagagggggtcaaaccacgggcgccccccaggtctgatttttaaaatccaacccccccccaaaaaataatgggggggggaaaaatttttttgccttcaaaaggaaacaggggggggggcacccatttcgggcacctttttgacggggttttgggggg

SEQ ID NO: 10750 - DNA, 247 bp, Glycine max
  Clone ID: PAT_MRT3847_109717C.1
aaaattggcgtaattggctttggttccttccagcaattgctggtgaaaactatctaccaaacaaagccatcactctcagggcaacttctcgtactaactactaccctcttatgcctcccaatgggtatccgcttattcagggatggtgctggattccttggaggctgacaacgatgtcctactggcatgtgcgggcctcctatctctgtgaaaatactcaagtgtgtgcacctggctagaacttatc

SEQ ID NO: 10751 - DNA, 467 bp, Glycine max
  Clone ID: PAT_MRT3847_109718C.1
acatgcatgcaccttttataatcatcattgttaaagtcatagttgtaatgagtcaatttcatcgaaatggtcctaattaagatctgttgtttttcttccctatttttgaacctatcaattaactgcaactaattaaaagcttgttaatatatgcatgcataatgttctattggatgacaagctgtattatgctaaaatcagacaataaatatccaccacctagaaggaaagggtgtaattaagatgcattagtatttttaccggtgaaattaaaattttaaaaaaggagtaacatgcagatgtcagtgaagaaaataacacttttgacactagagttgtcactactcttgagttagttacccctaataaaggtttgtgactgacccttaaattccattcacatggatctgtttgcgcggattcaatgtgcaatttaagaccatagtgttgtgtagttcatttcattg

SEQ ID NO: 10752 - DNA, 497 bp, Glycine max
  Clone ID: PAT_MRT3847_109719C.1
attaatgtgttaatataaacatccttttaagtcttgcatattcaaaatgcaactataaggagttgacaaaataattcctgaaaacaaaagagactaggccccctaactacaaaacccaacctcaacaaaaaacaatagggcccccctaaatcgacggacaaaaacacacggggggaaaccagcgcgcggaaccccaaccaagaatcttccacggaacccaccccaaccggagacgaaggccggaatgttaacttcgggcggccataacggcgcacccaaaaaagcccaaggtgccagggagagcttggtccaaacacccagcacaccaggaaacaacaaacgacctcctgggggattaaagcaaaccgttttgccaataacaaacttactcaaggagtcggaaattagcagccctctgcaagatttgatagaccatttcggacaggcgaaagggggggaacaaggccatgccccctaagattggagcatgttacacc

SEQ ID NO: 10753 - DNA, 811 bp, Glycine max
  Clone ID: PAT_MRT3847_10971C.1
tgcatgcctgcagtagagagatgactggatgaatgcttgtttacgtaagcttcttgactttatcgttctctcccccgccccccaaataccactaaaattccgaacgctgtcatattgcaatctaattgtttaatacccaaatccttccctagctcttttccagtatcttgagcttgtaatcttccatcttaaaagcatactgactgatgcaatcttctgattaatttagacctgcatcagttacttgcttgcaagttgtagaatctcttattttccttttcacttcactggtttgcatgtccatacaattcgaactattttttatctttcaaagattggaatgacattaacttggtttttgatcctaatagataagtcatatcaatttagttcttgaaagttggagactgaatgtcctctaaataaattgacatcaatgtagatcctcaataatagaaagatgacatcaatttactccctaaatcttgcggtttgtgcatagaaggatggttttttggttactttccacggttgaggtactaaattgatgcaatatctcttagggagttagaggacaaagtgatgtctaccgaaccttccaaggaccaaaatgaattttcactctaaaatttatgtgcactcctgactgcttttacatttagtgtcttcatttcattgggtttcatctatcagaattcagtgataagaaacagtgcttcaacaataggttgtggaacatgtttttctgagaggtaaggtagtcacaatgaaaaaaaggacaaaacttagatccaaagctatgttgcattga

SEQ ID NO: 10754 - DNA, 382 bp, Glycine max
  Clone ID: PAT_MRT3847_109720C.1
tttttttttttttttttttttttttttttttggggagagaacaaatgatttgttagttgcgcccgggctcgattcaagggccggtcctatcataaaagcaaaatgaaagggaccctctttccctacagaaaagaactttacttaaaaaaaaagggatgggctttggctttacaaaacaaaagattggggcctcccatctaaaactaaacttgagcccaaacccaatgctaacttaccctgcccgggatggaatagctttttttttttgttgggtaacctcaatttaatggcctgggggttgcaataccacgacttggaagggccaagccttgccctacccaattttattggaatgcaggaccttttcctttaatggggttat

SEQ ID NO: 10755 - DNA, 492 bp, Glycine max
  Clone ID: PAT_MRT3847_109721C.1
ttagatttctagcaatcctcgtgcataattatctatcaattatatatgggtaaaaactttcattattcttaaacaaaaccaccgaacttacaatcataaacgttagtttaattaggcgtaaatgatcacatttgtgtattttaaataaacttaaagatcaaattaattttttttaaaaatttagaatcaaattaaatcttttaaaataatttaagaattaaattgatgattaaaaaaatttctaacttgttttagggataatatatacagtaatttaagggtaacttgatttttttttataaaaaaaaacttggttctctctcatctttcatttttacacttatcattgcatcttttttttcttgttttggcctactatcgtcaagccatgtccatgccacggacagcacaataacaattcaaacccaatgattgtgatttacattaaagagaatgtataacaaaattagtaaaaagaaatgatgaatcatg

SEQ ID NO: 10756 - DNA, 458 bp, Glycine max
  Clone ID: PAT_MRT3847_109722C.1
gagagaactagtctcgagttttttccagttttttaatgtagtcattgtagtggttcacccaaatgtttcaatttagacaactaagagttgagcaaacaaataagaataattttcaaatatacttataatatcacttttcattatacttacaaatcaaactagtacgttaaattagaaatttaactcctctaatttatatttttaaatttagataaaactaaagttctcttccataggataaatatttattttatacccttaaaatttataattcataaatatctttaaagataaaaaaatatagttataataatgttattttaaattattgatatatagttatagattaccttttttataagttataataataaataattactagtgacgtggtaacaagtataacagcagaaacaggaaaaggagagagatagagagggtttgttttgttcttattg

SEQ ID NO: 10757 - DNA, 301 bp, Glycine max
  Clone ID: PAT_MRT3847_109723C.1
acaaaattaaccgcccaaattttttatttgggggtcaaaaaattccatacccaggtggtcaaacaccccccccccaaatggtaggagatgccttcaaaaaaagtttaaacttctgggaggggcaaacccaaagggcctcttttccatttaactctcaaaccttttttcccccatatttcgacccaaaaacccttttttttttaaaaaaggccattcaaaaaaacaatgggggccccttttctcccttgtggcccaacaaaaaatttaaaccagggcaccccgggtgtttttaaacggcccc

SEQ ID NO: 10758 - DNA, 394 bp, Glycine max
  Clone ID: PAT_MRT3847_109724C.1
ctgctataacctagattatcgcgaggagtttataaacgcgatcgtctctcttccttgcttgaggcattttagtagcatgggcatgccatggcacatgctaccaaacgttacctatccgaatgaaaactggctatcgtgagcgttcttctgaagtaaaatgcgcatgtttaatgcttgctgtttaagcacacaacatcctaacctttaaaaccattcctgaatagttcgtttaaccaacaaaagactacattaatggctaacaacttacatcagactctaaaacacttaaccaacaagctatctatcatgctactgaacgcaatgtccatcacaactacatatttactttcggcataaatcacaccgtactttctaatatcccatacttattaaa

SEQ ID NO: 10759 - DNA, 842 bp, Glycine max
  unsure (1)..(842): unsure at all n locations
  Clone ID: PAT_MRT3847_109725C.1
cgtgactgaccctctgactgacaaccagcccattctggaggccagctacgtgaacatccccatcattgccttcgctgacactgatgcccctctgcgtcacattgatgtctccattccctgcaacaacaagggcaagcagtccatcgctctgatgtactggctgctggcccgcgaggtgcagcgcatgcgcggactgctgcagcgcgcgcagccgtggaacgtcatggtcgatctgttcatgtaccgcgacctggaggaggtcgagaaggagcaggctgaccaggccgctctgctggccgcccagcaggaggctgccgctgcccctgaggccgctgctcccgctgccgctgctcccgaggagcaaggaggcaaggtcgagtggggtgccactgacgccgccgagtatgctcagtaaaaggagcgtgctcgaccacactcagtcctcagcagctgcttgcactcacccaggagtgctcagcccccttcttcacacatcttccccatcactcatcacacacacaattccttttctggcctccgagggccgattcagcctaacatcaatggctgggagggtgaatagaatactaccaggcgagggagacgggcggcgcctcacggtgctgcctgtctctctggtctgcagctaggttttcaccttgatccagcagctgtttccacccccctcggccgaacacaagccccaaacaggatcgggcggcggcgcggtccgctgcacttctcccggcgagccctctcgaggatttgctaagaggaaagcagcggctgcacgcatccactgtcgaagttgattttgcacacgnatatcacacgcacgtgcg

SEQ ID NO: 10760 - DNA, 400 bp, Glycine max
  Clone ID: PAT_MRT3847_109726C.1
cccacgcttccggtttggccttcatccaaagggaagaccaaccttccaatcaatggcggttggaaagcttaaagcttaatggaataacccagttgggcctaaaaccattaacttttgggcacctacctttaaggggggcttaagctttgccaacattgctgttttttaaaaaccacctgagaaactttcctttcctaagcaattagcggccacagttcctggatttttctggtctggttccagaactgtattaaccccaaaaattgggaccctgtttagggtaaactttgcattggcggggccaggcttttcccaactttaacgcaattggcggcttgatttttcctaagaggcggaggtgaaggccgcaccaaaagaatgaggttaaattttttaaaat

SEQ ID NO: 10761 - DNA, 225 bp, Glycine max
  Clone ID: PAT_MRT3847_109727C.1
gaaggtcacggcaagacgagccgtttctaattagggatagttgtcaagtagaagtgcttttatcaattcatgtgagtcatcttcacataccagaacgacccagaaactctactgctataacctagattcaatgacttactgactcaccaagacgaccaacggttacatttgctagattactagccacagttacagattccaaaacatgacagttttgccactatg

SEQ ID NO: 10762 - DNA, 285 bp, Glycine max
  unsure (1)..(285): unsure at all n locations
  Clone ID: PAT_MRT3847_109728C.1
ccccncctactctttttgtttccccaaaagtagatctttcaaaacaaattatgcccctttaaatttccacaaaattcttttttaattttaaaacaaaactttaaatttttttttcccctaaaaaccacaattctaaaataacaaatatgccttttaagccccttcaaaccccaactacttcaaaggcttccttatccattgttttaaaaaagaggcttccaccttggcaccaacatcctccaaaaaacccccattttccttcttttgttttccaaaatcaaactt

SEQ ID NO: 10763 - DNA, 350 bp, Glycine max
  Clone ID: PAT_MRT3847_109729C.1
ggaaaaaaatgggggagatttttcattcccattatttaatttcaatacaattagcatttagcaggccgagaatcatggaaaggaaaacttgaatagacgaaaacaggggggggagtagttgtccttgtagatccttgggataaccagaagccaaatggggtaaattttttatccccattaataaaacaccgcaggccgtttaagaatcctgcaagggggaaaccttgcgtcggtggggtgaacgatgtccccgcgtcgggggggtggtgtggaagcgcgggggggaaacccgcccgggggtgggggggccggcgcgggggccggggggggggcggggggggggggggggg

SEQ ID NO: 10764 - DNA, 418 bp, Glycine max
  Clone ID: PAT_MRT3847_10972C.1
tggaaccttgggctgatttaggtgcttgcatggtcgtgagaagatcatagacgggggcaccgtactagcgaaacggtcggcctaaccggaagtggagggaatataagtatgggcgcggagcggtatgcgtgattcttaaatttcaagaactttactgctcctcctgacgctattactggcaatacctttgttggctgaactaagacggaatctcctgttgacaccgtttttaaaatcgttgagaaccctaggtagcctcgtatcggggaacataggaaagtaggatcgttcgccggccataagggccgctaaccctacagagccaccaaagaccccacgacctatgtcggcgaacccgcaaagggagacggcagcggacgcgcccttactcacggatctaagcccgacgacgaaaatc

SEQ ID NO: 10765 - DNA, 512 bp, Glycine max
  unsure (1)..(512): unsure at all n locations
  Clone ID: PAT_MRT3847_109730C.1
catcaattacaagcccttcagcagcaactcgaggacctgcttccacaggaggcttcttacgagcttcaactgcagcatcagcttcagccaactgtcttttcagtttttccaaaacaggactttgccgagctggatctataaagacaaccctcaatattctttccactgtcactagttccttttgttcatcaaactgcatgacagaaggccaaagaccaaatttaattatttacttttatcattcacgggtaaccttgaaaatattgcctaaagcatgaatagatgaaacaagctattatcaatataacaagctgacgctaccatgaaaatagcctatctacaaatatctgttaataaatcaatcctatccagaagttgaagttcagtttttggcatatgttaatgttgtagggcctatagctaacccaaacaaactagtatcctacatatggagtaatattatagaataccaggagtngaaaaccactagctggctaaatcatctaatcaaa

SEQ ID NO: 10766 - DNA, 453 bp, Glycine max
  Clone ID: PAT_MRT3847_109731C.1
gagaattggtgaccgattgatggctgaagctgaaaccaaccttgccataaatgtgcttccaggcttatcagaatcatttgaaggtctgcggcgcggggagctacagctgggtattttaattgagaatatgagacgtgaaggatttgagttatctgtctctccacctaaagtaatgtataaaactgaaagcggtcagaagcttgagcctgtagaagaagttacaattgaggtaaatgatgagcatgttggtttgataatggaggccttgtctcatagacgagcagaggttacggacatgggtcctgtttcaggaactgttggtcgaactagattgtgtttgacttgtccatcaaggcgcctggttcggctctggagtgggttcactgtagatgcatggttttaaagaaatcacattcataagttttttgtttcttattatcctttacccatttt

SEQ ID NO: 10767 - DNA, 502 bp, Glycine max
  Clone ID: PAT_MRT3847_109732C.1
atgcttcccattcatgtccgactgcccaaaacacaacccttatggtgggaatccctgtactggataaactacttgggagctcttgccagccaatgcgaagtagcacttcattcaacatccaaatgggttacttgggaagatacatttcaatagatggaaagattggtgggttgccttgaatctcacaattaggcgacacagacatcagctcattttctccaatgaaccattcattggcagtacgctgatggaggaagcagagtttttagtatggtcctggttcagacagatggagaaaggcttcacagagcattataattgttggtctatcaacctatcaactgctttctgtaactaggatagatgggctggttataaatattgcatttatacacctagcttagctttaatggtggactaaacaccatctctgtctctataaatattattagtacccctaggactcaccttatatatatataaatattaccttatgccgatc

SEQ ID NO: 10768 - DNA, 581 bp, Glycine max
  Clone ID: PAT_MRT3847_109733C.1
cactattatacaactataataataacggctgcatagatagcacacttagccattagtatgcaacgaaaaccgcaacactttgatttttctcttatctccttttctcttctataaatatggctcatctgagccacaagaccttggtttatcttccagaaatgaggcctgaacatgaagctgaggaaggccaacccagaaaaagtcttggttctttttcttcttggcctcatcgtttggagaatgttttccccgtttatgccatgggaacttccaaccctgcagtcttggattcttcacttcacacttctgattgtcttgatcctatttgggatgctgtcagagaagaagccaagttagaggcagaaaaggagccaattttgagtagcttcttctatgccactattctgtctcatgattgcttggagcaagcattggcttttgctcttgccaaccgactccaaaaccctactcttttggcaactcagctgatggatatattatcgtatgtgatgaagcatgataaaagtatccagcaatgcattcgcttgtatattcaagcatgtaaagatcaggatgctgct

SEQ ID NO: 10769 - DNA, 122 bp, Glycine max
  Clone ID: PAT_MRT3847_109734C.1
gtaaaatcctggatggcctttttattcctactgatgagtttcctgaggaacgtaggggttcctaaaattgcttctcccgcataggggttggaacaattcgtctgtgctaggttccaatatca

SEQ ID NO: 10770 - DNA, 1064 bp, Glycine max
  Clone ID: PAT_MRT3847_109735C.1
catttgttcaaatggaggtccgcatcggcaacaacaacaaccctccttcttcttctgctccttctgcttcactcccccttgggcttctcctcacccttgtgcttgtctctctctgtctgtatctctctctctctctctctatatatatatgtttagtgttttaccttttagactcacacttgtctctctctagaaatcacgcaattctcatataaccggatttttctttccattcatcacccaccaaactaccaactctctctatctcttaccacaactcaatgtttctttttgccaagagagaaatacaaacaaactgtgctattgagagttgagacataagaaaagaccatttgggaaattcaacaaactcctgaaatcaggcaacaaaataagtgcctggagttgagtgaatctgcacccttccgataatcaaagggcttatttagagccacacatcatccttgaaaatttcttcccagccaatttggcgccaaatgttggacctttctacatgactatgcaaccacgttgaaggaagccacagttgtctcatattttcatcatctgctgggtgtggttttgcaaggaagggtaagagagagggtgttgagacctagttcagtgttctgcttttgaaactgcaaaaagctaaacaagggcctcctgatttggaccgtgatatatcagagcatgaaaaaggcctttctatcactacccaaccaaagcagtctctgaatcatcatcatcatcaatgcaaaggacttagtagacaaccccacacacttgcactcttttttctctctctctctacacaagtgtaacataacatacataacatacataacataaagagagagacaaaaaaagtgtgtgttttgtgcaaggcatgattgtgatatggaggaggaggatgagattcttcaagcacgggcgtgtaagttgccaagaagaagaggcagtgatggggagagcacgaacagcaggttccacagcagcagctggcaccaccacaactcttcgaggatcattaggggagctcgagcatctgggggcaaagacag

SEQ ID NO: 10771 - DNA, 721 bp, Glycine max
  Clone ID: PAT_MRT3847_109736C.1
acgcgtcgcccgtcattgttcgaatggggaacaacaacaacaatccttcttcttcttctacttcttcttgacaaccagtttgagttcaactcacccttgtgcttttcttcttctctctctgtttagtgttttagtctttacctttcgcacacaaaaacacatatacacacttgtctctctctagaaatcacgcaattatcatataccccgatttttctttcactttctttccatttatcacccaccaaactaccaacttaatgtttctttttgctaagagagaagcacaaacaaactgtgctcttgagagttgagacataagaaaagaccatttgggaaattcaacaatctcctgaaatcaggcagcgaaataagtgcctgatgttgagagaatctgcacccttccaataatcaaagggcttatttagagccacatatcatccttgaaaatttcccagccaatttggcgccaaatgttggacctttctacatgactttgcaaccacgttgaaggaagccacaattgtctcatagtttcatcctctggaagggtgagtgagagggtgctgagtctgaaacctagttcagtgttctgcttttgaaactgcaaaaagctaaacaagggcctcctgatttggaccgtgatatatcagagcatgaaaaaggcctttctatcactacccaaccaaagcagtctctgaattatcatcatcatcaatgc

SEQ ID NO: 10772 - DNA, 1769 bp, Glycine max
  Clone ID: PAT_MRT3847_109737C.1
ccacgcgtccggtttgttgttcctcactgacctcaccatggcgaccagagccaagctttctttagctatcttccttttctttcttttagccttgatttcaaacctagccttgggcaaacttaaagaaaccgaggtcgaagaagatcccgagctcgtaacatgcaaacaccagtgccaacagcaacggcaatacactgagagtgacaagcgaacatgcttgcaacaatgtgacagtatgaagcaagagcgagagaaacaagtcgaagaggaaactcgcgagaaggaagaagaacatcaagagcagcatgaggaggaggaagaccaaaatccctacgtttttgaagaagataaggatttttcgaccagagtcgaaacagaaggtggcagcattcgggttctcaagaagttcactgagaaatccaagcttcttcaaggcattgagaatttccgtttggccatcttagaagctagagcacacacgttcgtgtccccacgccactttgattccgaggttgtcttgttcaacattaaggggagagccgtacttgggttggtgagggaaagtgaaacagaaaaaatcaccctagaacctggagacatgatacacataccagcaggcacaccactgtacatcgttaacagagatgagaatgagaagctcctccttgccatgctccatatacctgtctctactcctggaaaatttgaggaatttttcgggcctggaggacgagacccagaatcggtcctctcagcattcagctggaatgtgctgcaagctgcgctccaaaccccaaaaggaaagttagaaaggctttttaatcaacagaacgagggaagtattttcaaaataagcagagaacgggtgcgtgcgttggcccccaccaagaaaagctcttggtggccattcggcggcgaatccaaggctcaattcaatattttcagcaagcgtcccactttctccaacggatatggccgtttaactgaagttggtcctgatgatgaaaagagttggcttcaaagactcaacctcatgcttacctttaccaacatcacccagagatctatgagtactattcactacaactcacatgcaacgaagatagcactggtgatggatggtagagggcatcttcaaatatcatgtccacacatgtcatcaaggtcagactcaaagcatgataagagtagcccctcataccatagaatcagtgcggacttgaagcctggaatggtgtttgttgtccctcctggtcatcccttcgtcactatagcttccaataaagagaatctcctcataatttgcttcgaggttaacgttcgagacaacaagaagtttacgtttgcagggaaggacaacattgtgagctctctggacaacgtagctaaggagctggcctttaactatccttctgagatggtgaacggagtcttcgaaagaaaggagagtctctttttccccttcgagttgccgagcgaggagcgtggtcgtcgcgctgttgcgtgagaagcagtgtggaggtggctgataacggggaatgtatttagctttgagagtctttaaattttctgtatttgttgtaatgttagtagttccttaaattggccagatggagtttatgtgtttgtaaatgcagggatgctaacggaataaaatggccacttgtattgctaaccaaaaaacaaaaataatagaaagggttgaatcgagctaatccgagttcacatcagtttaactgtacattttttttgctactgctattgatcct

SEQ ID NO: 10773 - DNA, 1918 bp, Glycine max
  Clone ID: PAT_MRT3847_109738C.1
ctcgagccgctcgagccgcacaaactagtccgtaagtttgttgttcctcactgacctcaccatggcgaccagagcgttttttttgttcctcactgaccaagccatggcgatgagaaccaaactttctttagctatctttttcttttttcttttagccttattttcaaacctagcctttggcaaatgtaaagaaaccgaggtagaagaagaagaccctgagctcgtaacatgcaaacaccaatgccaacagccacagcaatacactgagggtgacaagcgggtatgcttgcaaagatgtgacaggtatcatcgtatgaagcaagagcgagagaaacaaatccaagaggaaactcgtgagaagaaagaggaggaaagccgtgaaagggaagaagaacaacaagagcagcatgaggaacaagatgaaaatccctacatttttgaggaagataaggattttgagaccagagtcgaaactgaaggtggcagaattcgggttctcaagaagttcactgaaaaatccaagcttcttcagggcattgagaacttccgtttggccattttggaagctagagcacacacgttcgtgtctcctcgccactttgattccgaggttgtttttttcaacatcaaggggcgagccgtacttgggttggtgagtgaaagtgaaacagaaaaaatcacccttgaacctggggacatgatacacataccagctggcaccccactgtacatcgttaacagagatgagaatgataagctcttccttgccatgctccatatacctgtctctgtctctactcctggaaaatttgaggaatttttcgggcctggaggacgagacccagaatcggtcctctcagcattcagctggaatgtgctgcaagctgcgctccaaaccccaaaaggaaagttagaaaagctttttgatcaacagaacgagggaagtattttcgcaataagcagagaacaggtgcgtgcgttggcccctaccaagaaaagctcttggtggccattcggtggcgaatccaagcctcaattcaatattttcagcaagcgtcccactatctccaacggatatggtcgtttaactgaagttggtcctgacgatgatgaaaagagttggcttcaaagactcaatctcatgcttacctttaccaacatcacccagagatctatgagtactattcactacaactcacatgcaacgaagatagcactggtgatcgatggcagagggcatcttcaaatatcatgtccacacatgtcatcaaggtcgtcacactcgaagcatgataagagtagcccttcataccatagaatcagttccgatttgaagcctggaatggtgtttgttgtccctcccggtcatcccttcgtcaccatagcttccaataaagagaatctcctcatgatttgcttcgaggttaacgctcgagacaacaagaagtttacatttgcagggaaggacaacattgtgagttctctggacaacgttgctaaggagcttgcctttaactatccttctgagatggtgaacggagtattcgaccgaaaggagagtttctttttcccttttgagttgccgagagaggagcgtggtcgtcgcgctgatgcgtgagaggtttagaacaatcaagaaaaggtgtgcatgtggctgaagatcacggggaatgtattaagcttcagagactctttaaattaaattttctgtattttgtgttatatgttactagttctttaaattagccagatggagtttatgtgtatctaaatgcagggatgctaatggaataaaatggccacttgtattgttagctatctcttatggtagcagaataagacgtaaactggttctttgctccaaaaaattactttcatcaacgctaaaaaaaaaaaaaaaaaaaaaaaaaaaaaaaaa

SEQ ID NO: 10774 - DNA, 271 bp, Glycine max
  Clone ID: PAT_MRT3847_109739C.1
tgccacccatgtgcttgccattaaccctgaaccttacgtcgagaaccgcgagctggccatgatccactactcttgtgccatgctcatagccttgaagagcacatttgcggagcacatgactcgcaacgatgcgatgttagctgatcctatgatgttgaacgccggccttcatactgagattaacgctggactcgactactaggccgaccctgacgtgaagcacgcctaaatcatcctagtcatgagcatcactcaagtcatgatacatggc

SEQ ID NO: 10775 - DNA, 293 bp, Glycine max
  unsure (1)..(293): unsure at all n locations
  Clone ID: PAT_MRT3847_10973C.1
aactccccagcanagnngagaagtggggggttcccctctctccacggaatgcacggggaaggccaaagagagactgtgcaagggcgacaagctacagggtggcgatgatactgattctgagggaccgattcctcatcaggcactgatcacgatggcatataatgaataacatgcttttgtggcgctgaggaacaattgggccatgaggggtcacacctgccgtaggggtggcgacaaacgctaccgattcgttagtaacatggcctgagactgacactgggaaagggtaaccc

SEQ ID NO: 10776 - DNA, 466 bp, Glycine max
  Clone ID: PAT_MRT3847_109740C.1
cggacgcgtgggtgggacagccacattagcccaaagaattcaaaatggcttcaggagaaccttacagacatggatgccaaagtaaaagcaatgatcaagcttattgaagaggatgcagactcatttgcaagaagggcagagatgtactataagaagcggccagaactcatgaaattagttgaggaattctaccgagcatatcgtgcattagcagagaggtacgatcatgcgacaggggagctccgccaagcccataaaaccatggcagaagcatttcccaacttgctgactgatgattcaccatgtaattcttcagacactggagctgagccaccgcacacaccagaaatgccacatggcccacatccaattcgtgcattattggactcagttaacctacagaaagattcatttgggttttctttaatccaaaatactttaaaaatgaatggagagagtttagaag

SEQ ID NO: 10777 - DNA, 430 bp, Glycine max
  Clone ID: PAT_MRT3847_109741C.1
tattgctttaagcgacatactagctaaaataaacaatcgattgctagcatggcgggtacttaaggaccccaagcctgaaaagtcatgaccaagccttaaatacagcgtgtaatttataccacgcttatgcctgtgcagtattcgcactaaagcagggcatcactacagatgatccacctgacagggattcctgtcccacagcatcgggataagacatcctggcatgatcattctctcaggggaatcctccgaactcccaaatgacctcaaggcaactattcttctatgctgagagaaaagcgctacactgttcttgtgagagtgctgcgcatcctttgatactttcccaccaagtccccaagctacaacttcagaaatcagaccctccacaggaatgaaaccctgatctgaaaagagagatccactgcgg

SEQ ID NO: 10778 - DNA, 273 bp, Glycine max
  unsure (1)..(273): unsure at all n locations
  Clone ID: PAT_MRT3847_109742C.1
gtaacccaatcacatgggagccttcaaagaacaacgcccaatcgaaagaagacgacaccgtgggcgctgaggaggaagcgggcgcggcgcgtgagtttcgcggacaaacgaaatcacntcgtccaacgtctttccgccgnnnnnnnnnnnnnnnttccanttccnctccctccgaacccccttcttcctccgatcccnccatcctagggtttttccgcgacctcgcctccgacagcgacgatgacgaacaaccgaaactcgaagacgaagccg

SEQ ID NO: 10779 - DNA, 1219 bp, Glycine max
  Clone ID: PAT_MRT3847_109743C.1
tacggctgcgagaagacgacagaagggggatcttcacccccaacttttcgcaagagtactttagaagcagaaaaaagtgcatgaacccatttttccttacgcaagaatgagatgtgaaaatgtgtactatgaaagggtagccaagttggaaagcaagttggtaaagacctccaattttgacacttccacctcccgagttctgccacctactatataaccacctcaaactcattacacatttcgctcactctcttaataattgaaagctatggtttcctttcacaaagctttggcagagatcccaataacagaagttccaccagaatttgaagctccaccaaagaagagaaagtgggaaggggagacgctcactgaagaattcttcatgcatgatccaacagatgagaagagaaaatccatctttggtatagagctacatctagagacaccattgccttcacataaattgcaacaatacctcactattcagtcagggcagatacacttgtgcaacacaggagacttattggagagaaactcttacactgaagcaccatcacttggccaaaggagcctagaccttgagctgtcactgaagaaaaaggaagatggttatgacataaatgagaagaagaattatggttctagtgggagtgcgtttggtgaacgtgatttgtttttggaatcgacaagcaagtccaaaaaggatgattcgtgtgttttaactcgatctccaccatcgtggctatcatcagagggagatgatcacaaagagatgattacaacggtttgtatgaggtgtcacatgttggtaatgttgtgcaagtcttccccagcttgtcctaattgcaaattcatgcacccacctgatcagaacccttcaaaattcttgaagaggaagaaggtccagcctctcttgtgctaattaactaggaatgcacgtggtgcagatacacggtttaattgaaaattctcaggtgtatgtagcacatggtccaagcttgtattatctgtttaattaccccttgaatatatggtccaagtttctttatagtttagttgtgttcattaaaaacaaggggtacggtggtaattaacctacttctacgtagtggtgaatttaactgttaggatgagtaatgggtgattcatgagaaactaacctaatgttatcataatcatatctatgtacatatatataagtgttaatgatcatctt

SEQ ID NO: 10780 - DNA, 2102 bp, Glycine max
  Clone ID: PAT_MRT3847_109744C.1
gtaattcatttgatagtgtagtttgcgatgagtgaagcaatgaggcgttgatttgatatcagtatcggtgatgaagcaacacgagttatctctgttactgtgtctcctatgggcactaacccttctctatggtgagatgttcgcttactgggttccacccctcttcacctgttcctggccccatcttctccgcagttcttcttcttcttcttcaacgggttcaaacagacagtgggaattatcagggtgattatgttaaagtggctgttattgcagatccacagctcatggataaaacttctctccgtcttcctgcaagatcacttgcactggaacttgcagaattctacactgatttaaacatgcgtagatcattctttgcatctgtcctgcctttcaaacctgatgtcatattgtttttaggtgattactttgatggaggtccttctttatcagatgaagagtggcaggagtctttcagtcgcttaaaacatatatttggtttgaatgcacaaggaaaatacagagacatgccagtttactacattccgggaaaccatgatattgggtatgaaagtcttcattctctaaagccagaggttatccaacgctatgaggaagcatttgggactaggaactacaaatttacagttggaaaagtggattttattgctgttgatgcacaaactctggatggacacccacaaaatcatctgacttctcaaacttgggattttgtgaagaatatctctgttggtgatgtggttcatccaagagtcttattgtcacatattcctttatatcgacgtgatgatacgtactgtggtcctcatcgtagttccccaattatcaatcagaggatacatcatgccataaatggtaatactaatgagatatcgtaccaaaattacgtttctgagaagtcttcaaagtacttattggatacaatcaaacctaagcttattttatctggtcatgatcacgatctatgcactgtcacccatcaatctaaatctgggtctgtaaatgagcacaccctaggtactataagttggcaacaaggaaacttgtatccttctttcatgctgttatcagttgataactcaactcttcaaaaagcttccattccagaagaggcattgttgactcatctatgttaccttccaatgcaaacacacatttacatatggtatattgtcctatttattctgacccttcttgctaccttattttggccaacaagtggcacgagtttgtggcatcagtgttgtggcttagttggctattgtaaacaactaatagcttgcaccttttctagaagtgaaacaaaagaaaaggatgaggatgctaactatgaatatgagatgatgtgggatgcggaaggaacaatgcatcttgtaaagaaacccttgaatccatctactgtaaattcaaatgaccggggcttaggggaaaggggtaatgttgtaatgcgggcagctgctagaaaaaatactcctcaggaaggagatcactctgtgaatgtggatattgcttcaggcattggtgttgatcctgtagcaagaatgcctctcagaactggcaaatcaaagacaaaaattataatccagagattgatacgcacactgcgaatgctcactgtcattgcagcagtgaatgttcctctttacatgatgttgctattcaaggattggattgacaaataaagaagaaattcctatcagagtgaatatcattcaggttttacactcacttttttttaaaatgataatttctagatccaattagatgttcaagaaggtaattactatcaacatgatgtaattaatcatatgttgatgcttttgtatgtttacttggtagcttgaaactcatctttaaattattcatcgcatggccacgatcatacggaacatcaagtataacataaattttgtgagtcgagttattctattactgttgagatttcctctgaagtctgaacacttgttaattgtaaagtttgtttgctctaagtttacatagcatagtagtcatttaatttcaatgccttttttcaaaaaaaaaaaaaaaaaaaaataaaataatactataactgaaaa

SEQ ID NO: 10781 - DNA, 144 bp, Glycine max
  Clone ID: PAT_MRT3847_109745C.1
tgccacgcgttcgtccacgccttcgcggacgccttggttcttaatttcaagttgaatttggccaaaattcccgattttcatacccttggtaatgattttctgaattagctttaaaaacctaaaatttaaagttcttaagccaca

SEQ ID NO: 10782 - DNA, 748 bp, Glycine max
  Clone ID: PAT_MRT3847_109746C.1
gaagacgacagaaggggaatccaaaccaagtatgtggacaagtggcaggaaatatgatgagaacctcaggctttttagtgaaccaaggatggccattgtttattagtgagtttggtggagacttgagaggtaccaacgtgaatgacaaccgctaccttaactgcttcttggcagtggcagctgagcttgacttggattgggccttgtggacacttgttggtagctactactttagacaaggagttataggaatggaagagttttatgggattcttagttgggactggacccaagttagaaataccactttcttaaacagaatctctgccctccaacttccatttcgaggtccaggaataacaagaggcaatccatacaaattgatattccatcctttgaccggtttgtgtgtcataagaaagtcattactagacccattgacattgggtccttgctatttatctgatggctggaaatacacaccccagaaaattctatcaataaaaggaacttacttctgcatacaagcagagaatgaagggatgcctgcaaaacttgggataatatgctcagatcctaactctagatgggaaatgatctcagattcgaagttgcatctctcatctaaactcagcgatgattctaatgtatgcttagatgtagacgataacaacaacattgtgaccaatgcttgcaaatgcttgagcagagatcgtacatgtgaccctagtagccaatggttcaaact

SEQ ID NO: 10783 - DNA, 1156 bp, Glycine max
  Clone ID: PAT_MRT3847_109747C.1
cacaatatacaagagtccggatcctttagaggagcagcgccggaaggagttgcagcagggtgaaacagggactggtggaatttttggctaagaatggtgcttactaaagctgtctcaactctcaataatcattctaacacactctgctgggtttagtgtatgaggtgagggtatgcactgaatggaagttggaagcattgtttgttagacgatcactcgtgctgttttttagcaggaacttgttggtttggtggagatgtattcttttacctcctgggaaccagattatttcaggttaacattcttgatgcttgatcattatatagaaatgcatctggggcaaggcttgctgctcaaggtgtggcattattggcttaggaattgtcagtgtcagctgaaactttgtaacatatccattggcatattgtataaacaatttaaactggttttgagtattaatgcaacatgcattttctcatagttatgagttcttttgcttttttaatgttcatatcatgcttgcaagagctcgatgtcacatgaacgggaagagtgcattctgtccatttagttgaagaaaatgacagtaactttttaattccaaggtaatgcatttctttgatatcttggatattaaggaatgatgattatatttgccagtctgagagatgatgtctataagccagtgtcactctgtaacatggtctgatgtttaacgtgtatacaaatggctattgcttcaaggaacctattcttttttttatgcaaaattaattgtttaactgtaatttatttatttgcagtaattagtgtatgttgaagttcttacatttaaatctaactggaatttaatgattttggaagaatgccatggattcttgtggttaaaaattagcaccattcaagagggttagtccttgagtgcaggtttctttgttcataagttgacttttggttggagctttaaattgtgaccagtgaagcatcaatacatatgggaatgggaattttttttttctttatgcctaatgttctgaaattttttcaatctttcgtagatttttgtaattgaaacaatttttgcacctttattttgttattcctttctcatgaaaagaaatgcgcaatttcagcatgttaaaaaaaaaaaaaaaaa

SEQ ID NO: 10784 - DNA, 360 bp, Glycine max
  Clone ID: PAT_MRT3847_109748C.1
ggctcgaggtttgttatggctcactgtgttgtactatttatttctcatcttgcttgctgctgatcgggtggttctgctataaatctacggtgcacctgctcgataatacgatttcgttgagccggggaatggggctcacagggatggatggggctgtggggtaactctgcaatgtctcttgagagagtatgaccatgcgccttattggagcgctgaactccgtctgcgatgtggtgctctactggaactacgggaagaaccaactgcgtgtcctttcgagaagaataaggtctatctgcttcagtactacttgtctttagcaatgattacattgatgggaagattatttttggaccaatg

SEQ ID NO: 10785 - DNA, 457 bp, Glycine max
  Clone ID: PAT_MRT3847_109749C.1
gttttggggttttgggggttttttttttttgggggggagaaaatgggtgcagtcacaataacaaagagcgggggacatcagcgagtgtataataatccaaaaactccatcccctacacagaggagacaacaaaaaaaaggttaatgggcctaacaggggaacaacggggggggccgaaaccgatttattcatacttctcatttgtgcgccgagcaagaagacacctaaatcggaggtagacaccagcacataatgggtaaacaaggtacttttttttagggcaaccttaaaaagagtttttggcgacgaatacaatcaaggcaatgggcgcgggagctatatccccactcggggggataccaatagacaagcgtcacaggggtcttattgaatggaattccaggctttggatcaaaaatacttgacctggtatcggccacaaagggcgggggggacc

SEQ ID NO: 10786 - DNA, 1093 bp, Glycine max
  Clone ID: PAT_MRT3847_10974C.1
ttttcggattttataaaggacagaagaaacgcgaatgccaggagaactccaattaccacccgggttcagattccaccccactgacgatgagcttgtgaatcactacttgtgtagaaagtgtgctgcgcaaaccattgctgttcccatcatcaaagaaatcgatttgtacaagtttgatccatggcagcttccagagatggctctttacggtgagaaagagtggtactttttctctcctcgagaccgaaaatacccaaacggttcgagaccgaaccgggctgccggaagcgggtactggaaggctaccggagctgacaaaccgatcggaaaaccgaaagcccttggaatcaagaaggccctcgtgttctacgcgggcaaagccccaaagggagtgaagaccaattggatcatgcacgaatatcgcttagccaacgtcgacagatccgcctcaaaaaaaaacaccaccaccaacaacttgaggcttgatgattgggttttgtgccgaatttacaacaagaaagggaagattgagaagtacaatggtgttgcggtggtggatcagaaagtggccaagttatcagaagaggaggttcagttccagcacgagaccaagcctcagatcaagatgtacggccacgatgatttcaggaacgaccaattgtacatggacacgtcggattcggggcccaggttgcacacggactccagctgctccgagcacgtggtttcgcccgatggcacgtgcgagaaggaggtgcagagcgagcccaagtggaatgatcttgagttgggccccgacccagccttgggcttcgattttaatttcatggacctgacctcagatgacgcttttgcccctcaggttcaataccaaatcaaccatctctcaccgtggcaagaaatgttcacgtacctaccaaagacattttgatttttttagggtcaatgggaccccaagaaggaaatacgggtctcacatttatttttaaaattcgtaaaaaaaaaaaaaaaaaaaaaaaaaaaaaggcggccgttttaaaggatccaacctaccttccccttccttccaacgtattactttttttttagggca

SEQ ID NO: 10787 - DNA, 329 bp, Glycine max
  Clone ID: PAT_MRT3847_109750C.1
attcacaagattgaggagaccctctatgtgggaggccacaagaaggaggaggagcccaagggcgagcagcccccatggtggagaatacaaagggggagctttttggtgaaccacagttctgaatacaaagggcatcttttttgtttggtgagcacacgccggaccaccttggaggagacgaacacaaggggggtttcttagacaagatcaggcacaagacccacggagaggagggtgccccccctccgggcgcgaatagaaaagaagaggagggtgaagaagaagcatgaacatggccatgacagcagcagcagcagtgacagtgatta

SEQ ID NO: 10788 - DNA, 361 bp, Glycine max
  Clone ID: PAT_MRT3847_109751C.1
atctgcattgctcaatttacaaagcatacacaactaactaacaatgactcagactggtgatcggtctcttactaaacacacatatgtacacactagactagttcaagtcttaaatattaaaatgacctccgtgatcgtgacctactgcaagcgcgtactcggtctcataaagatcaacgggttccccatttacctcgttgagcctgaaatcctccgcttcaaagccttcgagcctatcctcctgatgcgtaagatccgcttagacggcgtcgacatgcgcattcgcgtcaaggagtggccgccacaccttccacatctacaccatctgccagagcatcaccaaggcgctcgtcgcgttcta

SEQ ID NO: 10789 - DNA, 406 bp, Glycine max
  Clone ID: PAT_MRT3847_109752C.1
taacaggatctttgtgatttattaattcttacactaggatttcaatgaagaagtcatggtttcatattgtacgtttgtttaattttgggatgcattgtttgccaaaacctttcagactaatttctatagattaacatgatgggagttcaaattccagatgtctatcctgtgtatattttaatttagctttggccaattaaacaaatttctgcattgactatcaaaattatttctgattcatattactatgatttctttgagagtaaattacatgaatcttttgtatttgcaaaatatgctaccattaacttcaaagtactgtttggcccagatttggcaattgatatgtcaagttaatggatgttctgtgatcaaatggcattccttaattctatcatttttcagt

SEQ ID NO: 10790 - DNA, 363 bp, Glycine max
  Clone ID: PAT_MRT3847_109753C.1
ctgagctcttatgatttaatgattttttctttcttttatatcaagaaaaactaaatctgaagctttttttcctaaattggaattactatgcaatatgtgaataacaagataacaattgaagctttttctttgggatggaattttgtaaattcacatgtgagttgagtatctcttcatgctaagggttaagatgagctgctatacagtggatcatttgatgtttgatagcccggtaacccaatagatatgcttgtttctttcaaaacattgaggttttgtttattaaaatttaaaaaagtgatttctgttcttatatacatgtttgtagttgatacttgatactgtatgcataattcatttttg

SEQ ID NO: 10791 - DNA, 1881 bp, Glycine max
  Clone ID: PAT_MRT3847_109754C.1
ggatactgcatactcgctggatctcccaatctggcttcaaactcaacaatggcatacgccgcacctccgctggacccgccaggaataggcacgaactcgccttcgtctcagaagaagagagtggcttatttctatgacagcgacgtcgggaactatgcctaccagtcgggacatctgatgaaaccccatcgaattcggatggcgcattcgcttgttatgaactatggactgtacaacaagatggagatttaccgggccaaaccagcgtcaaaatacgagatgacacagttccatacggacgaatacgtggactttttgcagcgtgtcactcccgacaatgaacatcttctggctaaagagtgcgccaagcacaatgttggggaagattgtcctccgttcgacggcgtctttgagttctgcgcgattagtgccggtggcagtatggaaggagcggcaagactcaatcgtgccaaatgtgatatggcgatcaattgggcgggcggactgcatcatgcgaagaaaaacgaggcatctggcttctgctatattaatgatattgtcctcgcaatccttgagctgctccgcttccatgcacgagtattgtatatcgacatcgatgtgcatcatggcgacggtgtcgaagaagccttctataccactgacagggtaatgtgtgtctcgttgcataaatacggcgaattctttccaggaactggcgaccttcgcgatattggaatcgggcaagggaaacattactcagtcaacgtaccactgcgagatggtatcgacgacgccagctataaagacgtcttcgaatcggtgacgacgtgggctgtggagttctttcaacctggggcgatcgtcttacaatgcggagctgactctctgtctggggatcgccttggtgcgttcaacttgagcctggctgggcatgcgaactgcgtcaacttcgtgaagaaattcaacctgccgacgcttttcctgggaggtggtggctatacaatacgaaatgtcgctcgagcatgggcatatgagactggacagatagttggtgttgagctgtctcgctcgatgccatttacagactattacgagtactactcgccagacttcgaactagacgtcaagccgagcaatatggacaaccggaacagtgctgaatacctggcgaagatcaagtcatttgtttataccaatcttcgtcaagcacaaccggtcccctctgtgcagcttcaagacgtgccgcggtatccagtcggcatgagcgaacatattgacgatatggacgacagactggatgatgaagatgctgacgaggagacctccaaagatcaacggctcacggaacgggtggaagatcggatgattgaggatgatatggatatgtctggcttggaagacgcgagaggagtggactcgggagcagatgctgatcacggaagcccgtccatagtgggtgagggtggcagcgggtgtaaggttttgtcaagcgatcatgatacagaccagataactgagccggtcccatcgattgacccaggcaacgatcctgaacctgacagaacgacaatgatgctgcaggaagcgattcgtgacgagagcaacgaagtttcccagcccacgaacgttgaacaaacagtagtccagagggacgcccctgcggaacatgtcgagatcatcgcacagccgtcaatcgttctggaatcagcgccaatgcagcccgagccgcctatcgtccaatgtatgaacagagtagacagtcacacgcttgggcttagtgacgctgcagaagctgtggaagctatggagaacaatcacaaaggcggaaacgagaatatcggtctttcatagaggtacaaatatacacttgaagcatttttg

SEQ ID NO: 10792 - DNA, 246 bp, Glycine max
  Clone ID: PAT_MRT3847_109755C.1
atcaaagttacacgttcggtacgtgttcccttttccttgggctcttattctgattatgctgattgcgatgttattcctatggaagcatgctctttgttacttggtagaccgtggaaatatgatactgatagtttacatcatggtcgttcgaatcattattctttcatgtttaagggtcagaaaataattatccatcccatgaccactgaccaaattataaaagatgatcttgctcgggctacaaaa

SEQ ID NO: 10793 - DNA, 779 bp, Glycine max
  unsure (1)..(779): unsure at all n locations
  Clone ID: PAT_MRT3847_109756C.1
aactaaagcctcaaattcaagttttattgaataggttaagagagatggagccctcccttattataaatcccatctttctttcctttctgctctttcaaaaataagcacatcatatatttgccatggggggaataccaggctcaaaattagagatagatatccaaagcgtcattctttggggacaaaattctgcaaagggcataaaacttcaaaactgagagctggatgtatcaaaagactggatggaattatatcaattttccaccggtttcagcaacctgacaatattgatacatggacaatcctgttatgttctcaaatggatatatactatggaggaggagaaatagatatgataaaatgatataacttatacctaaaatcagtatacttttgtcaattttctctgaatttctacatcactatcactgtcagtaatcatcgcaggtgagaatatggcagaatagcttgtaatcctgatccatgttttaagaggaatttaggatgtgcttcgctcttttaggaccaagtcggacaggacctgatgttaccatgccgtccagtttaaaagaattcacagcaggataacttccaggattttgattttgtgcctcatgctgacaacacctactcctagcactgcccatgtgcggatccagttcgcgggctcctgcgtgtcgggccactcctgccggtctctttctggtatttnngnacagctgatggtcatcgaacttcaatctgtcagcgannttatttatgctggtgccgnnnncctg

SEQ ID NO: 10794 - DNA, 394 bp, Glycine max
  Clone ID: PAT_MRT3847_109757C.1
gggggggtctattttattttttcccccttttccccccctggggtttttttttttttttttttttttttttcccccccttgaaaaaaaaaattttttcttcccccataaaacaagggaacggggccaatttttttaatcttaaaataaaaaatttaaaaaagggggggggggaaccttttttgttgggaccccgaaggcctttttggggggggaagaaataaggggatttaatgggtaaagcctgttgtaaacttgccccctgttcttggaacccccgtgcccccattaatgaagccctaaactgggaaaaacctggggggggaggcatcctttattccatgatacccgggccacctgccccttggagccagggttgacccaggcccttattttt

SEQ ID NO: 10795 - DNA, 317 bp, Glycine max
  Clone ID: PAT_MRT3847_109758C.1
gccgccctttatcttatttttttatttttttgggcttttggtccacccaaaaaccttttgtggaactttttgctttttggttttttttctagaaaggcagagcccttggccctaaaaagggcctttaaccccgaacgggggggaacaacgggaaatttcagacaagccccgggagaaggcccagtttcccctattgagtgagggttgacagaactccttaatcaagccaaaccctgttccccgcgggaaattgcttccccctgggcgcaccccaaaaaatttaaaggggggcgcttaaggggataaacttggggggg

SEQ ID NO: 10796 - DNA, 898 bp, Glycine max
  Clone ID: PAT_MRT3847_109759C.1
ccgcggcccacgcgtccgtgcgtctgcgaggagacgaaagaaggctgtgactgtggactgagaaaaacgacgacgaattgcgattcttcgccggcaccgctaacaaccaagggcgcccaggaacgaaggtgttgcatgcaatgctgcaaagagaatgaataggtgaagtgtcttgctttgtaaaacattgattgatttggattgggtgtttgtaaaggcaattcaaaattcagcgaccgggttcagggggtgacttgccccaaggaggtgagtacaacccttcttcttcttttcctgtggcacggagagtgaattcctcccattctataatgatggaggatgacatggagaccggtactttgggggcttaccaggacaagctaagaaccttccccaacatgcgcactaaaccttacaccccactgatatttcgtattctattgggtatcaatgttcgtgtcctcttcattcttttgctcttcggcttgggagctatcttttacgtcggagcttctacttctccaatcatcgtctttgtcatctctgtttgtattctcagcttccttgtggccatatatcttacaaagtgggtcctcgcaaaagatgagggccctcctgaaatggttcagatcgctatacgagacggagctgaaggatttttcaggacccagtatgggagtatatctaagatggccatgttgcttgcacttgtcattctttgcatatatttgtttcgcagtacaaatcctcaacaggaatcttctggcctgggaaggacaacttctgcatacatcactgtagcttctttccttttaggtgccctttgttcgggtgttgctggatatgtagggatgtgggtgtcagttcgtgccaatgtcagagtctctagtgctgcaag

SEQ ID NO: 10797 - DNA, 1893 bp, Glycine max
  Clone ID: PAT_MRT3847_10975C.1
ttttcttttgggcggacgcgtgggcaaagtaacactagaactcacaaaggacagaagaaacgcgaatgccaggagaactccaattaccacccgggttcagattccaccccactgacgatgagcttgtgaatcactacttgtgtagaaagtgtgctgcacaaaccattgctgttcccatcatcaaagaaatcgatttgtacaagtttgatccatggcagcttccaggtacctttttttcttttctcactctagtctctgtattcttttgccttttttaatttcattagggtcttaattctactacattttttttctctccaccttaaagtcctattatttatgtttttatgtacagagatggctctttacggtgagaaagagtggtactttttctctcctcgagaccgaaaatacccaaacggttcgagaccgaaccgggctgccggaagcgggtactggaaggctaccggagctgacaaaccgatcggaaaaccgaaagcccttggaatcaagaaggccctcgtgttctacgcgggcaaagccccaaagggagtgaagaccaattggatcatgcacgaatatcgcttagccaacgtcgacagatccgcctcaaaaaaaaaacaccaccaccaacaacttgagggtatgtcccgataacaatcttattaataataattataagattcttgctaatcaatatcgttaggtgttagttgaggaataaaaagaatatttaatgtgagatagcgttaaaaagtcattaatacataattttatgtattttaataaatacataaacaaaattctttttttaattttttaactaagattaagaacagggattaataatgtttcaaagtttggttaggtagaaataatatgtgatttggacaatttttttaactgttgtgcttattggaatggcagcttgatgattgggttttgtgccgaatttacaacaagaaagggaagattgagaagtacaatggtgttgcggtggtggatcagaaagtggccaagttatcagaagaggaggttcagttccagcacgagaccaagcctcagatcaagatgtacggccacgatgatttcaggaacgaccaattgtacatggacacgtcggattcggggcccaggttgcacacggactccagctgctccgagcacgtggtttcgcccgatggcacgtgcgagaaggaggtgcagagcgagcccaagtggaatgatcttgagttgggccccgacccagccttgggcttcgattttaatttcatggacctgacctcagatgacgcttttgcccctcaggttcaataccaaatcaaccatctctcaccgtggcaagaaatgttcacgtacctaccaaagacattttgatttttttagggtcaatgggaccccaagaaggaaatacgggtctcacatttatttttaaaattcgttaaaaaaaaaaacaacaaaaaaatcacattcaagcgtacctactatactactgtacctaactactactcatgccggctttggtctgcacgtgtggtgactattatctgttcttgggattgttgaatttgactgccattgatcactaggaaaaaatgagatcataggtacctaaaaataagaaaaatgatctcaactgggtgaagaatgaagatccattagctatgttaggaattgtgtcgacatgtaaggactaaggacccctagtagaaaattcttgtttcattgctattgtagtaggatttttttgtatgtctgtgaaatattatattatattatattatatatatatatatatatatttttttttaattttcaaagtaagcagcaattgaaatgaaaatgtaagggtttcatttttgtgaaaaaaaaaaaaaaaaaaaaaaaaaaaaa

SEQ ID NO: 10798 - DNA, 770 bp, Glycine max
  unsure (1)..(770): unsure at all n locations
  Clone ID: PAT_MRT3847_109760C.1
ccacgcgtccgaatttacgtgctggatctattaaaaaggggagatctacttcttacgcttaatttgatttcttcttttcttggctagtctcggagcatgcaatgcaaagacaagtgaagaattcagcgacctggttcaggggcgcccagagtcaatgatggatcatgacttggagaccgctgctttgggggcttaccaggacaagcctagaaccttccccaacatgcgcactaaaccttacacccctctgatatttcgtattttacttggtatcaatgttcgtgtcctcttcattcttttgctcctcggcttgggagctatcttttacgtcggagcttctacttctcctatcattgtctttgttatctctgtttgtattctcagcttccttgtggccatatatcttacaaagtgggtcctcgcaaaagatgaggggcctcctgaaatggttcagatatcagatgctatacgagacggagctgaaggatttttcaggacccagtatgggagtatatctaagatggccatgttgcttgcccttgttattctttgcatatatttgtttcgcagtacaactcctcaacaggaatcttctggcctgggaaggacaacttctgcatacatcaccgtagcttctttccttttaggcgccctttgttccggtgttgctggatatgagggtttnggggtggtcagtttcgtgccaatgtcagagtctctagtgctgcaagacggtctgcaagagagcattgcaggtagctactcgtgca

SEQ ID NO: 10799 - DNA, 1627 bp, Glycine max
  Clone ID: PAT_MRT3847_109761C.1
tacggctgcgagaagacgacagaagggggagagcagcaacaaacaaacgcagaactgcccaatcttcaagctaacataaacaccatggaagccgtccaagtcatatccaccactacaatcaaggcaccaccgagtcacaataaccatgactcagttcagaaaatcgatttaactccctgggatcttcagttcctcccaattgaaaccattcagaaaggccttctttttcgcaacaaaaaacacacagaaaaccaaatcgagcacctccaacactccctttcatccactctcgccttctttccacccctcgcaggtcgtcttgtcattctccaacaccacgacaacactgtctcgtcccacatcgtatgcaacaacgcaggagcactctttgtccacgccgttgcagacaacaccactgtcgttgatattcttcaacccaaatacgttcctcccattgtttgctccttctttccgctcaacggagttaaaaaccacgaaggcacgtcacagccagtgttggcagtgcaagtgacggagctacttgacggcgtcttcatcgccttcacaatcaaccacgtggttgcagacggcaagtcattttggcatttcgtgaattcctgggctgaaatctcacgcggtatccctaaaatatcaaaaatcccttttttcgaacgtttctttcccgttggcattgaccgcgccatacggtttccgttcacaaaggtggaagaaaaagaagaaggagaacactcacaaaaccttgaaccaaaaactctctctgagagggtcttccatttcaccaagcgaaaaatctcggaactgaaatcaaaagcaaacgcagaggccaacacggacaaaatatcttctctgcaggcggttttaactctactttggcgcactgtgagtcgttgcaaacatatggggccacaagaagaggttcattttgttcttctgattggagctagaccaaggcttattccaccactcgcagatgattatttcggaaacgcagcactggttggtcgtgctaccatgaaagcagaagaactattacagaagggtggattcggaaagggtgcttcggagataaacaaggtgatttcttcgcactctcatgagaaggtgaggagctactacgagtattgggtgagaaccccaaggcttttcacgataggtagcctcgctaagaaccccaaggcttttcacgataggtagcctcgctaacagtaactcattggccactagcagttctccaaggttcaacgtttacggcaatgattttgggtggggaaagcccctggcagtaagaagtggcggcgcaaataaaagtagcggaaaaattactctgtttgctggcgctgaagaaggttctattgacattgaagtgtgccttccttatgagattctcgaggcaattggaaatgactctgagctcatggatgccatttccaactagcatggtttggtttatgtatagttgatttcaaattcatgatattgtagtattgagtaacgaataattatgtatgtcttaggcaaagatcatgtgatgttgactagtattttaatgaatgtttattttatataactaaaatttataatttataataaataaatccttatatat

SEQ ID NO: 10800 - DNA, 154 bp, Glycine max
  Clone ID: PAT_MRT3847_109762C.1
cactgagcatcgtctagctatctcgatcgaactgtccaaggtcctgtcactgataagaattggtgcttacacgtagtctacattggtccagtgctaattgaacatgcaactagctgcgttgataatgcatcttacatgtgttagctggaaccac

SEQ ID NO: 10801 - DNA, 425 bp, Glycine max
  Clone ID: PAT_MRT3847_109763C.1
aagtgggtatcaattatcaaatgcattaggatttcaaagcggaattgggttgactggttgaagaaaacaatcaccatccatggcagaaagctgggctttgtttcaagcaattcagtgggtaacacattggctatgacaaggtcatttttttagagtgattgcaagatggttgctgactatatcaatcatgtaactactggtatctatagccttcatatatataatatatgttgtattctagcaaaatgtagaggaagccttttacactttttaaactccataagttttattaggaaacaagttaatcatgttgtccattgtaaggatttcacgattttatgctcgtaactaagtctttgattatgctcccaattgtatttgataattgatttcgaatgaaatttcataatcgcatttttcattaa

SEQ ID NO: 10802 - DNA, 510 bp, Glycine max
  Clone ID: PAT_MRT3847_109764C.1
tactgttgataaattatattgtgcttctgacagataagagatacagtatggcacatattgataaaatgagaagctcaaaattatggaactttgaaccccatttccacttgaccaacaaataattatgctccttattgtctggctgtctaaggccaaaaagtaaaataacattgaggatagccaacctcagttttccttttctgcaacatttttttatttgaagcaggaaattcagggcaagttgagaaatgatttgtactttaagaatgagaactgagaaccattaaagttaatgttttaaaatggattataagcaggtttgcttttcattattttaccccaaaaaggaaaattaggccaaaatctcctctctctctagaacattttgattataagctttttaaaaaaacagaagctaatccaagcacacatcattatatgggggatttgaatatcattttataaagtgatttgagactgctggatgttttatcaacgtcaagttgttct

SEQ ID NO: 10803 - DNA, 315 bp, Glycine max
  Clone ID: PAT_MRT3847_109765C.1
tttttttttttttttttttttttttttttttactttttttttttttttttaatacttgtttgttacctggagacagtccgggctttccctagaagacatcccagaaaccttgagggaaacagggtcaaaccttgggccagaccgaaaaagactgccctcccaaggaaaaaaaatatccccgccggaagcaaaaaatgttacgcccggggcacataaagagaaaccccagggacaaaaaatgagtggcccaaaccacaaaaatggcagcgcgcaaactcccctttccaaaggcaaaaaacaagcggccaacgcgcg

SEQ ID NO: 10804 - DNA, 539 bp, Glycine max
  Clone ID: PAT_MRT3847_109766C.1
cccacgcgtccgcccacgcgtacgccagcatggcctccgtagacaaattttgggctgtcgcccttgctcttctactccttgcctgccctctacgtccaagttagataggtgtgcaaggcatgactgccgaagaagtagaggaggctgctgaagaatcaaatgatctcgacattggtggtgatgacgtccaatgactttggagaagggacctcaccttctgctccaggaattgaaacaacaagagtgattccaaaaaataaagcgagatagatgacagctggagaagagacagagctgcatgctggcgtgaaaaatgatggggacacaagcttgaatgacattgcgatcaaggctagtgtgcaccttccttatgatcaccggatgctggttcacaatgttactgcacaaggctctaacaatggttctgtaccatcctcagcacaagctactatgccatatgtatcagcagctgtgagctctggcaggctgaactttcgaccttgagggcactattatatacgagatctatgatcatgcat

SEQ ID NO: 10805 - DNA, 301 bp, Glycine max
  Clone ID: PAT_MRT3847_109767C.1
gccgtcccggaatgacccacgcgaccacgtctccggtcttatacactctgctccactagtgtccccatggggggtaatcctgaggttcgccagaagtttttagattatgtgagggtcattgtgaagaaaaagggccagcttaggtgttaagttggaatcaacccatactccatggaatggactggattggccaataaattactgggtaagggcaacgatattctgtgttgcgactatgctagttttgatggcttgattaccaaccaagttatgagcaagatggcagaaattgataatagtc

SEQ ID NO: 10806 - DNA, 290 bp, Glycine max
  Clone ID: PAT_MRT3847_109768C.1
gcataaagaaaatggatggcagaagggaggagaacaaccacgcagaactcgatctagatgcacttgacaacaaaagggcacttgacttaatttatagaacaaggacagattataatgcaagcgtgacaaccgggactacgggacactcctatgcactaatgaagacttgcacactctttgcggacgctcacattatatgctgctcaagcctgagatcctaaaaacgagctcatggatctgcctctagtggaggcactcaccacacgtagctagatattgactgctatgga

SEQ ID NO: 10807 - DNA, 1651 bp, Glycine max
  Clone ID: PAT_MRT3847_109769C.1
catgcgtccgaacaatccttccttcttccttctaattcttttcctttctcttctcacttctcacacaccacatatcttcttttttttttttctttcccctcaaaatcaaaatcaatggaaggatcaggatccggtgtggttacagtgtacggcaacggtgcaatcaccgagaccaagaagtcccccttctccgttaaagtgggcctggcccagatgctccgcggcggcgtcatcatggacgtcgtcaacgcggaacaggcccgcatcgcggaggaggccggtgcctgcgcggtcatggcccttgagcgtgtccccgccgacatccgtgcccagggcggcgtggcccgcatgagcgacccgcagctcatcaaggacatcaagcgggccgtcaccatccccgtcatggccaaggcccgcatcggccacttcgtcgaggcccagatcctcgaggccatcggcatcgactacgtcgacgagagcgaggtcctcaccctcgccgacgacgccaaccacatcaacaaacacaacttccgcatccccttcgtctgtggctgccgcaacctcggcgaggccctccgccgtatccgcgagggcgccgccatgatccgcaccaagggcgaggccggcaccggcaacatcatcgaggccgttcgccacgtgcgttccgtcatgagcgacattagggttctccgcaacatggacgacgacgaggtcttcaccttcgccaagagcatcgttgcgccctacgacctcgtcatgcagaccaaacagctcggccgcctccccgtcgtccacttcgccgccggcggagtcgccacccccgccgacgccgcgctcatgatgcagctcggatgcgacggcgtctttgtcggctccggcgtcttcaagagcggcgatcccgcgaagcgtgcgagggcaattgttcaggccgtgactcactacagtgaccccgaggttttggcagaggttagttgtggattgggggaagccatggttggtatcaatttgaccgatgacaaggttgagaggttcgccaatcgctctgaatgaatatgaatgatttgttgctatgtggcgtttcaatctagattatgggtttgctagtgtttttagttgtttcttataataaggttatgtttttttttttttttgtgttttgaaccgtgttaattggatttagaaaaaccaaaaaaaaaaaaaaatagatagatgactatttgggcatgccttgtaatatgctgatacttgtttttactacatatccagcgtcgtggtggtattgtgttgagttagtgcgttcgtccttaagtagaatcgaatcattcttgtttctggatattcaatcctaattttcatttttggggtcaatttttttattggattcagaatctcttatttccagctacttgttctagtttgaacgagtgtgatttgaaattgacaatttttgtgtccgctgaactaataattagatgctgaatagggaaggtatttgaggtatctgaatatcaattttgtgtcagttcacttgtttgtaatttatgtccatttttttgttgatgcacctgtgcggtatctaatatccattcagtagcttgtattcctaattgcaatatattcgaacgtctaagcatatgattctggtgtattc

SEQ ID NO: 10808 - DNA, 316 bp, Glycine max
  Clone ID: PAT_MRT3847_10976C.1
tcgaattgaaccatttccatattaccgtccacatatgcctcctactggtcttgcaaacccaccacccccagttcctcctggagcttgacccaaaaggcaccataagaatggagatgtctacaggcctcatatgcctgatgcctttattcgtccaagcattcctatgagacctggctttttccctggttcaatggtctatgaaggatattacagtcctccaatgggctattgcaattcaaatgaacgagatgttcctttcatgggaatggctcctggaccccctgtctataataagtactcaaatcaaaatcccccc

SEQ ID NO: 10809 - DNA, 1811 bp, Glycine max
  Clone ID: PAT_MRT3847_109770C.1
ccgccacgtcaacaagccttcctccttccttcctcacacaacaaacatatctcttcctcttctgtccctcaatggaaggatcaggatccggtgtggttacagtctacggcaacggcgccatcaccgagaccaagaagtcccccttctccgtcaaagtcggcctagcccagatgctccgcggcggcgtcatcatggacgtcgtcgacgccgagcaggcccgcatcgcggaggaggccggtgcctgcgcggtgatggccctggagcgtgtccccgccgacatccgggcccagggcggcgtggcccgcatgagcgatccgcagctcatcaaggatatcaagcgggccgtcaccatccccgtgatggccaaggcccgcatcggccacttcgtcgaagcccagatcctcgaagccatcggcatcgactacgtcgacgagagcgaggtcctcaccctcgccgacgacgccaaccacatcaacaaacacaacttccgcatccccttcgtctgtggctgccgcaacctcggcgaggccctccgccgcatccgcgagggcgccgccatgatccgcaccaagggcgaggccggcaccggcaacatcatcgaggccgttcgccacgtccgctccgtcatgagcgacattagggttctccgcaacatggacgacgacgaggtcttcaccttcgccaagaacatcgctgcgccttatgacctcgtcatgcagaccaagcagcttggccgcctccccgttgtccacttcgccgccggcggagtcgccacccccgccgacgccgcgctcatgatgcagctcggctgcgacggcgtcttcgtcggctccggcgttttcaagagcggcgatcccgcgaagcgcgccagggcgattgttcaggccgtgactcactacagcgaccctgagattttggcggaggttagctgcggattgggtgaagccatggttggtatcaatttgaccgatgacaaggttgagaggttcgccaatcgctctgaatgaaatgaataataattctcagatttgtttctctgtggcgcttcaatttggactattaagggttttagttgcttcttatatattataataaggttatgtttttagttttcggtgttttgaaccgtgttaattggattttagaaaaaccaaaaagaaaaaatagataggtagctatttgggcatgccttgtaatatgcctatacttgtttttacatattcagcgtcgtggtattgtgttgagttagtagtgcgttcgtggtaaacgagaatcgaatcattcttgtttttggatattcaatcctatttttgggtttaattttttttattggattcaaagtctgttgctttcagcttctcgttctagtttttgcattagttgaacgagttcgattcgaaattggcaatttttatgtccgctgaagtgaaaattggatgctgaaaaggaaggttactgttctgtgtatctgaatatcaattgtaactcaattcactttatttgtaattttagctcctggcaaatagtgtggcatgaacagaagagatcaccattgccatgcacccgcgtggagaatcttaaccagctatatttgatgcacttgacagaagacagaaacagatttcacaaggcaactctactcttgacaagctattttatcctacggaatccggtgcctcactggatgggaggctaattagaatgtccatttttttgttgatgcccctgtgcggtatctaatatccattcagtagcttgtattcctaattgcaatatattcgaacgtttaagcatatgattctggtgtattc

SEQ ID NO: 10810 - DNA, 831 bp, Glycine max
  Clone ID: PAT_MRT3847_109771C.1
cagattcctcaattcactcacaaataatattccattctccattttccaggaatatgcatttcttgctctgtgctctttcctttactttatactatttatttcatgtctccctcctcccaaacacacggttttcataggaactaggaagtaaaatcaatccacaagatcagaaaaaacaggaaattggttttaattattttcctcactgaaatgagtagtagtaagaaaaggttcattcctattaatctggaagatgctgcagtggacttgttaaaccatgtggtgaagttgaaggagaagggatggattccactcttcattccactcattttgattgcttgggctattcacagatggctcttctctttctccaattggcttccccttgtacttgctctatgggcatctatgcaatatggaaattatcagcgcaaactacttgaggaagagttgaataagaaatggaaacggatcctactcaacacctcgcccatgacaccattagaacactgtgagtggttgaatctgctattgacacaaatttggtccaactattttaacccaaagttctcaagaaggttaaaagccatagttgagaaacggttaaagctccggaaaccaagatttatagaaaaggttgaggtccaagagttttcacttggatcatgccctccaagtttgggtcttcaagggatgcgatggtcaacctctggtggtcagcgagtcctcaaaacgagtttcgattgggacacgagtgaaatgagcattttgatgcttgctaagctttccgttggaacagccagaattgtgaataacagtgttcatattaat

SEQ ID NO: 10811 - DNA, 401 bp, Glycine max
  Clone ID: PAT_MRT3847_109772C.1
tcccgctcggcttgtctttcacattcccaaccattcaactcttcccaaaaaccctcacatcatcaagaacatactgtcaaaaaaggaggcgaatgatatcaataaaaaccttcattcaaatgcatgaacaaacttgaaggacccttttgacaacaagacatcccaacacaagctaatagggaaggaacaggatcagcttggaacgcaactcagcacgagcaccgcctacactatctatgaatactctaaaacatggaattgaggctacaactccacaggggtttcttgagtatgaatccgtgacgctagactatgcaaccgatgttctatatctaacgaacgcactcactgcgcaatgatactctgatatgactctctcatcgggtgaggctgaagcgcaa

SEQ ID NO: 10812 - DNA, 925 bp, Glycine max
  Clone ID: PAT_MRT3847_109773C.1
tttttgttcatatcccacccatgttttcattcatatcattatggaaactatggaaggacgacgccaggaccccagaccgttatgcatgacacgtttcaaaagtcatcacagcttttccgaagcaaccacaatcccaagtccagggctcatgagtagcaacattagtcgtttggtccccgaagtgagcgcacggagccccactggaccattttcacgagggaccccagaacatcaggtggtgatgatgggtatcgcttatttcttggtggccttggcagcagacttggtgaccttgccagcggtggcagcggacttgtcgacagctcagatgaagccgacacccacatgggcttggatggcacggacggcaaaacgacccagtcaccggacttgatgaacttgggagagtcctctacggacttacgcggtacgccggtcgatcttctcgaggagctccgagaacttgcaggcaatgtgggcagtgtggcaatcgaggactggggcgtaaccggcaccgacctgacctgggtggttgaggacgatgacctgggcgttgaaggagtcgcagccctttggtgggtcgttcttggagtcaccggcaacgttgccacgacggatctccttgacggagacgttcttgacgttgaagccgacgttgtcaccaggaagaccctcagtgagctgctcgtggtgcatctcgacggacttgacttcggtggtgacaccagctggggcgaaggtgacgaccataccggccttaatgataccggtctcgacacgaccgactgggaccgtgccaataccaccaatcttgtacacgtcctggagtgggagacggagaggcttctcagttggtcgctgaggtgggtcgatggcatcgatggcctcgaggagggtcttgccagtggacttggtcttggtctcc

SEQ ID NO: 10813 - DNA, 448 bp, Glycine max
  Clone ID: PAT_MRT3847_109774C.1
aacgggtcattaataatttctttcagggtagatagtagatacaatcaaataatttcttgagaactaatataaagaattgatataatttgtagattgcaaccgctaaattatatattttttctgcctccttcccccctcccctagcactatcagtctagtttataactcacttcaattcagcattcatattccttgccaactgctacaactttctttcctttttttttggtctatacaagtaaatttttagacataaccttcagtctccatctcccagacaagtaaattcaacaccagatatagatccttgccaccataatgctgtaattgatttgacgcaaaagtgtacacattatttcttattccaatccaactgtgtccaatgaactctttagtacctctattttccacagccttcctcattcgaaccatggaatcccatctaccc

SEQ ID NO: 10814 - DNA, 297 bp, Glycine max
  Clone ID: PAT_MRT3847_109775C.1
agctatctcgatcgaactgtccaaggtcctgtcacttcatcgtcgaagtcgtccacttccggtccattccctgtgttgctctcgatgagtgtactaacaattttcttcgcactcgccttagacgtcactacgtacgcacattttcctcctcctctcgcctgcctcccctactgtggtgttcttagccgccgttctaacttcctgtattgtggttgtcatcactgtctcgcctcgatcatcactacaccatgatcggcgtagaaactatctcctgggcggtatcgttattagtagcac

SEQ ID NO: 10815 - DNA, 290 bp, Glycine max
  Clone ID: PAT_MRT3847_109776C.1
ggtttatattaattttagcatagcattgcagaagcgcttcttacactatataagggctactaagggacaagttcccaacagcaataacaagaaaatacacaaatccaggaaatatcctaacagaatgatattcccttattccctgctacaaaggcactaccagaaagatacgaatcctactacgctcttcatgtacgtgcgatgcatgcagcatgtgtcatagctagccacgtaattcctgttgttgcctcctttttgggtctcacgctttttgctttttacagacccct

SEQ ID NO: 10816 - DNA, 315 bp, Glycine max
  unsure (1)..(315): unsure at all n locations
  Clone ID: PAT_MRT3847_109777C.1
cccacgcatccnataccaccaacttttttttatacacattttatttaacaattactcattgtacaatttgtgttatcttactgaaaacttagcacaaaaaaatgaatgctacacatttccaaacaagagttacatccacttattagctaattaagaagccaccatatattcaaataccatatagtacttttatggtgtctcaccacaacgccacacaaagccttatcgaatttactattcagcttaatatatccactctttctccatatcccatcatttttttttaactataccagaattaacacaatttcgact

SEQ ID NO: 10817 - DNA, 411 bp, Glycine max
  Clone ID: PAT_MRT3847_109778C.1
tattacatattaactgaaagccaattaataaacatatgaaatattcatcgcacaaggcaaaggcacctaaaccttttgtttcttttctacatagcagaaattgattttttttttatttttttaggggaacctatataattatgacccagtgatgtcttttggtgacttaagcttatgaattcaagttacaattgagttgattctagatggttactaccttgaaaaggatgttggtgccttatgtgacacgagccagagcctgctgggaataaacaaagcagattcatgccaacaccaactcgtagctttagtggcagatgggagtggtcacagactcccaaaatgtggggctttggatttccacaccatcccacgtgtgtgtcatcttcctctttcacactcttgatgata

SEQ ID NO: 10818 - DNA, 814 bp, Glycine max
  Clone ID: PAT_MRT3847_109779C.1
tatgaactctatacagggaaagttctttttccaggttttactaacaatgacatgctatggctccacatggaattgaagggtatttttccgaaaaagatgcttcgtaagggagcatttattgaacaacattttgatcagtacctgaattttcttgctacagaggaggaccctgtgacgaaaaaggctataaagcggatgattgtaaacataaagccaaaagatattggaacaatcatcagtggctctccaggggaggatccaaagatgttaaccaattttaaggatcttatggaaaaagtttttatattggatccagacaagaggttgacagtctcacaggcattgaatcacccattcatcactggcaagggaacaatgttgctgattttgactcccacaatgatgttcactgatatttgtacatagtgttaaaattcatattgagattctaattatttggcattatttatgttctctgtacacccaaggggtatcagcacagttgttggtctgttcacgtgaaaaaagggtgatgtctagtcagagttaacacgccgttggcagttctttcagtggaaagtactctttctattgtaagataacacgccaaaggcagtttcttccttgtgtggccattgtgaaatttaatctttgctagttttacttagtatagctgtttgtaccttgaacattgcttttgcaattaagttcatggaatttttattatgagaaattcaatttcatattaattaattgtaaaaaaaaaaaaaaaaaaaaaaaaaaaaaaaaaaaaaaaaaaaaaaaaaaaaaaaaa

SEQ ID NO: 10819 - DNA, 158 bp, Glycine max
  Clone ID: PAT_MRT3847_10977C.1
tgggtgggatagggattgggatggataaagagaatgtgcataccatactaactgtgtctacctatgtatagcactaggccaaacataaaaaactctaatggggcgaaggtgacataattcctttactaacactactgtattaacagaatatattacat

SEQ ID NO: 10820 - DNA, 403 bp, Glycine max
  unsure (1)..(403): unsure at all n locations
  Clone ID: PAT_MRT3847_109780C.1
agctacttattacccantcaattaaaggccccgttccttttaaaaatagaggcggcaacaaaaaacaatcctgacatctattactttaattcacaacatctcacaaattctaataccttaccatccatcataaatttctacaaatttaagcatttttctaaaaaaaaactcaacccatccatttttcacttaaataaattctataatttgcataataactttttaatctcaaccatcccactaccctattatttaactataattttttcagacatcaccactcttaatttctattcaacatataaaaccatacctaatacaacatcctcctaacatttttattctattacataattctatattcctttataaaatcaataccccacctctatatttaaaacaa

SEQ ID NO: 10821 - DNA, 293 bp, Glycine max
  Clone ID: PAT_MRT3847_109781C.1
gcgaaaccggctcttactcaactcacattctttaaatataaactctggtccaggaaacaagatcgttcatgtaaatccttgggcgaactaaaaactggctaaggccgtcaaacctagtccccaatttttgaaaaggatgttcagcggtcctaacagattttttgtgcccccctacactgactcctttggggcgttagggattagcccggtcaaatccattaacttcctctttttttttggcagcctagctggcggatccccctttggctgccttaataagttcatcaggcatt

SEQ ID NO: 10822 - DNA, 254 bp, Glycine max
  Clone ID: PAT_MRT3847_109782C.1
cccggcacccacactctgcaggacgccaaccagccgaggtacactccctcaatgccttggagacaactctttggagatatgcaaatacaatgctaccttgaaagtgaacatatgtagttttcattcacataatgcagcataagtagttttgtagcatgaatttgaagttcattgttttggtaaaaaaaaaagtaatcaacagttttggctattcttggtctactaagggtgtgttttgctctgatatgataaaa

SEQ ID NO: 10823 - DNA, 295 bp, Glycine max
  Clone ID: PAT_MRT3847_109783C.1
aaaaaaaaaaaaaggaccccccggggggccccttaaaaattaaacaataaaaaacccttcaaccaaaaaaaaaactgggggacaaaaaaaaatcctcctcccccagcaaagttttaaggttttggtaagttttatcacaccaattttgaaaggaagtttcctaaataataaaccccctgacaacataaaaggggcacataataaaaaaaaaaggggtttgggccgcttgttatgggattttttccaccccccttggccttaaggtttcgcttcaaaaacacccttttccaaaggg

SEQ ID NO: 10824 - DNA, 288 bp, Glycine max
  Clone ID: PAT_MRT3847_109784C.1
taagtaagataggaattaggatagagtaaggatgagagaagaagaaagaagggaaattggaggttgaggggaatgggttaaaaaagatgggtattaagatttaaattaaaattagtgaagagaagaagaaaggagaaaataaaggaagaggagaatatgtaataattaagtgaactttcaatgataaaattacatgaacgttattagtaagttattactagttagtagataataaatgtattagtttttgattttgaagttttgaattaattatatgaacagttaggg

SEQ ID NO: 10825 - DNA, 360 bp, Glycine max
  Clone ID: PAT_MRT3847_109785C.1
gaaaggaagggcaaaaattaaccacacgaaaaaccggaaacgggatctaactttgaaatagcccacccgggaaaccctacaacggcactgatccccaatttataagggccaaggaaccggggcgttggaaacccagaagccaaacaatccacaacggattttgacaaaagcccaaaccatgcccaaaaacaaccacaaacaccctcggaaaaaaaaggggaaaacggccaaagaccaataacttaacagggcccggccaacccacctaaaggaatgggacccgtccaaaagggtgggggaaccgggaaaaagcccatacccggctttaaaacctttgggggacccccccggatgaaattc

SEQ ID NO: 10826 - DNA, 235 bp, Glycine max
  unsure (1)..(235): unsure at all n locations
  Clone ID: PAT_MRT3847_109786C.1
gcaaagaagggagggaacaannacgncaaacagcnccagcaacacccgnngagaaccaaggnaancacngcagggngaccancagcgancagcganngggngncncagaaacgnaccgggaacagaaaaggggggaggaggacnactttttttttgannnnnggagccgcnnancnnggacccnngggacacgggggacaaacaacacccggcaaagagggcagaggaaagagag

SEQ ID NO: 10827 - DNA, 838 bp, Glycine max
  unsure (1)..(838): unsure at all n locations
  Clone ID: PAT_MRT3847_109787C.1
tttttttttttttttttataacaaacgagcgccaaaatgcacgtttcatgaagtcattatggaattattattttttttatgaactttcttgattttggattatctctaatcaacaaaaagaaccacactttatacacacatgtaacatcagtattcccacatttgacccttacataacaagtctctcttcacacttgccaattggggtaaatccaccaaccacactcacccgatgttttctttttccattttcgaaacccgcagaattcaagccaacaacatgccacaagccatgtttttctctttgttttcttcttcatccattgaatcacagaatgccctcccttttgtctcgggcaagaatattccaaagaccccactaaaccctatcaccaacccaaaaaccccataacacaaaaacttgttccctcttccggcactcaccagcagcgggctgaacatgccaccgagcaccaccgcgagcctcgccatcgacagcgccgagttcctcacacacgtcgggaacaactctgtggtataaattaggtacacgttgaacgaagtacaagcgctaaagaacgaaactaactcaaacactatttgcacgttgttgttccatgatgatgatgatttactcacttgcacggttgacatcacgctgaaaagaccacttaaaatagtgaagaggaggagtgtgattctcctgttgaacttgtctatgaagaataacacaatcaatgctgatggtaactcggataaggcgttgaatatgacactcaagtanaggttgaaggagaagttttggagccctagtggcatgccataatacaccaatcca

SEQ ID NO: 10828 - DNA, 216 bp, Glycine max
  Clone ID: PAT_MRT3847_109788C.1
ctcgagcctaatccactcgagaaatattgttcatatacttctctgtttttaacagaacaggcgaacaggccctaaatggctaatcttccaaagccctacggatggcgtcgttccttattcaactacgtccgaccgttggagcactcttcggcggggcccaggctttctttgtgcatgcggcatattgttgcgtacccattcagagcggtgtttcat

SEQ ID NO: 10829 - DNA, 506 bp, Glycine max
  Clone ID: PAT_MRT3847_109789C.1
aaaaaaatgtgtcccttatatatttcaagtccgtgttctaaatttaatatctaactatgattttgtatgcacttgaaacagtttgggcgtcatgtggagagagagagcgttattggtgatcctgctactgcttctagtccagcaaatttgtgctaccaagaagcaagatcatggttgccccctttcttcctgcggcaaaatcaccaacataacttacccatttcgattaaagggccaccctaaaagctgcggcgacaataggagtcgatcaacaaacaaattgctcctcccttcctcgctatttcttgtctcgctccaatttcactgatacttacagtgatatttacaacatggatccataccaagctggtcaatattcaggtcatcggaatttatttatttgttatcggtaaagattagttgttagtttttatttatgatgaaatccacgactttttcattctcaattctttcaatacttaggtcgtagtaattgggacaggctt

SEQ ID NO: 10830 - DNA, 166 bp, Glycine max
  Clone ID: PAT_MRT3847_10978C.1
agatgcacggactgagcagatcactatgatcaaatcgctccaacatgccaacagtggcgatgatatagactgaggggcatggacatagaaacactacgatagaccaaatcggagcagtgtctgtaaacccactgcactcacaatccctgagaaaagagttggggta

SEQ ID NO: 10831 - DNA, 1476 bp, Glycine max
  Clone ID: PAT_MRT3847_109790C.1
gtccgcccacgcgtgcgcccacgcgtccgtacggctgcgagaagacgacagaaggggatctaactttgattttgtatgcacttcaaacagtttgggcgtcatgtggagagagagagcgttattggtgatcctgctactgcttctagtccagcaaatttgtgctaccaagaagcaagatcatggttgccccctttcttcctgcggcaaaatcaccaacataacttacccatttcgattaaagggccaccctaaaagctgcggcgacaataggtatgagctagcttgtgaaaacaatgttactgtgttacatttgtactctggaaaatatcatgtgcaggcaatcaactacaataatttcactatccgagtggttgatccaggagtcgatcaacaaacaaattgctcctcccttcctcgctatttcttgtctcgctccaatttcactgatacttacagtgatatttacaacatggatccataccaagctggtcaatattcaggtcatcggaatttatttatttgttatcggtaaagattagttgttagttttcatttatgatgaaatccacgactttttcattctcaattctttcaatacttaggtcgtagtaattgggacaggcttgctttccagcatatagtgtatatgaattgtagcaatccagtgactcagaatgggaagtatgtggatactgcttcatacgtcaactgggactccaaagacaagtacatatacgctattgctggtgacttaaaagcagaggacttccaagttggttgtcacgtaaagctggttgctctgacatcttggtggggtttggatacaaacaattattcctactctgccatgcacacggggctagtctatggatttgagatttcatggatgcgcctcatatgtgagcagcactgtccaagtaaacagggctgctactactacaactgctttttcgactctgtcagccaggagcttaattattgggacggggattcattagggagtgagtgaaacttaacataaaaagacttttttattcagattgctctatgttaatatgaattctattttttttttgttaatatacgtgaccctcttgttttatgatgataaatggattttaatattttttataaatatacataaaagtcaacatggtgtatacttcacctcaattgaagtggctcgtggaattgcttatctccactatgggtgtgagatgcagattctgcactttgatatcaagccccataacattctactagatccagacttctcccctaaggtctctggcggtggatcccctaaggctgatccttttggctatggcattgtcccaaggacagcagcaagaggaacaattggatatatggctccagaattgttttataataatattgagggaatatcccataaggctgatgtttatagctatggaatttgaaaaataatgttgttgatggagatggcaagcaaga

SEQ ID NO: 10832 - DNA, 353 bp, Glycine max
  Clone ID: PAT_MRT3847_109791C.1
aaaaaaaactccccccttttattaaaccaaccgaaaaaaaacctcttggaaagcccccccggttaaaaaaaaccacgggtttttaagaaaaccaaaatccttttttaattttccccaaggcccccgggtgaaaaagtttcattaccgggaagggtcccccaaaagggataataacttttactacgggtactccttgacaaggggcacggggctgggggcctgagttaacccaaaggtggtaacccctcccaaaattatccttgggaatgggccaaaacctttggtttccaaaaccaaaaaggttagccttcaaattttcaagggaatttaaaagtttttttttttcatccccc

SEQ ID NO: 10833 - DNA, 240 bp, Glycine max
  Clone ID: PAT_MRT3847_109792C.1
caagattcgtattagagtctcttgtcacagtccagatcatcgcgccactctgcccaggcctgccatacatcgccatatttgtgccagcaacttgtcttgccagccctccttgcatccggcttctgaatagacttgctcgttcggaagcgcataccaatagaccgacactcggtaatcatggctaccatggcagcggctgctcgtgatatcttccaggcctcctcgagccgagacaactta

SEQ ID NO: 10834 - DNA, 348 bp, Glycine max
  Clone ID: PAT_MRT3847_109793C.1
cccacgcgtccgatgaaatgggttcctttgagcaggaggtggaagatagagctcggtgcgcatgtgtggtttcagagtcaacagatggactactggaaagataaggatcgtgcatcatatgtgcaggatcggatggcagatgaagagagagtttttggaatagctagtggggctgaatgtacttgtatgaaagggacaaaaagagcgtgagaatggactgttgatgcagagagggcccccggaggcctggaaattagaccatacaccatacatgaatgatgcaggacacattgtaccaacagggatgactagacactgagggtattgaacttgcacagagggactatg

SEQ ID NO: 10835 - DNA, 261 bp, Glycine max
  Clone ID: PAT_MRT3847_109794C.1
tcgagccggattcggctcgagctcgagccgttctaatctatcctatggttttatatttaacatcaggcaacaaagttcaacacagcatgaattcttggtttgaaatgatttgtcctgttgagaaatgaaacttctagtggaaatatatttgctctgtggcatgttgttcttgcacttaaagcctcacttttgaattgagtctctttgtagtaattgatgccttcaatgtttgagagatggctttgacattgatccttagtt

SEQ ID NO: 10836 - DNA, 222 bp, Glycine max
  Clone ID: PAT_MRT3847_109795C.1
cttagaactctgtccacgctgctgtttatgttatatcatgcctaaccaaatacacgggattggggatttacttctcactgtcagaatgcaggatgctaggtcatcgaacatcactacgagcagaaatttcggtacatacaccgtcagatgcttcaaatacctatacacactatgagtgattgacccagagaaagctgatacattgaagcaatctattcctac

SEQ ID NO: 10837 - DNA, 278 bp, Glycine max
  Clone ID: PAT_MRT3847_109796C.1
agaggttccagttgaggaagaaccatgaagccaccggttacctacggatttagattccgttgcgtttgtttgatcaatcattatggttcaaggtatccttaaaacccttcttgataatctaaggtaatgtgtttctggttattacaaaaattttataaggatccccaaaaatttcaacaattgatatcagagccaccattacagttagataattgatatttaaagttatttgattctaattacaccaaaatgccttgggtaaaataaacctttttttt

SEQ ID NO: 10838 - DNA, 201 bp, Glycine max
  Clone ID: PAT_MRT3847_109797C.1
aacggctgccagaagacaactgacgggtacagctactagaagaccacagattgtatggtatcatgaatgtaataacaagtgaatttaaaaacattttttgttaaaacatatattcagcattgttatcttgccataataaaaaaaaggaacgtaccgatcggccttcgctctagatgatccaagcttatgtacgcttgcatg

SEQ ID NO: 10839 - DNA, 1217 bp, Glycine max
  Clone ID: PAT_MRT3847_109798C.1
actattttcacccctttttcaatgctagtggttttctctctcccacaaatagagtcatattcattcatcatgtcacacccaaagggataaaagaaaaaacttaatagtacatgggagttgatgatgaacaagagatggaggaggaggaggaggaggagagagaagaagagaaaaagaagcataagcaggctcctccttctctcttccctattagtgtgagaaaggggtttagtggtgaaagagtgaagagagatgagtggagtgaaggggcagtgtcaaccctacttgaggcctatgaggccaaatgggtgctaagaaacagagccaagctcaagggccatgactgggaggacgtggcccggcacgtgtcatcacgtgccaactgcaccaagtcaccaaagacttcaacgcagtgtaagaacaaggtggagtccatgaagaagaggtacagatcagaatcagcaacagcagatcatgcatcatcatcttggcctctttattcacggcttgatcttcttcttaggggaactgggcccgtcttctcgtcgccgccggggccgctgatggtggctgcgcccatgccgcctctgtcgccggtggagccgtcgcaaccgctggctccttcagggccacttgctaatgcacaaaactcgcatggatccaatggggttgatgagaagcttgctaaggaagatgggttaggaactaagtcatctgatcaagtatctagcaagaatccattggacacagatagcagcacgccagcactttatagccagaaggaggagttaagaagcaacaagaggaagaagaaaacaattgatcacaacacaggacgaagaaggaaagaatatgtggagatagcagaaagtttaagatggctagctgaagctatgataaggtcagaacaagcaagaatggacacaatgaaggagatagagaggatgagagttgaagctgaggccaagagaggggaaatggacctcaagagaactgaaattattgccaatacacaattagagattgctaggatctttgcaagtgtcaacagtaaaggtgttgattcatctctaagaattggaagaagttaattaagggtaggttgtggaagctaattaataaaatgttattattgtaagtgcacataaagttaacaaataatgctattaattaatataataaaatttgagtaaaaagttttttaaaaaactcgagac

SEQ ID NO: 10840 - DNA, 176 bp, Glycine max
  Clone ID: PAT_MRT3847_109799C.1
acgaggctgaatatccttcggtggtctcggatagcttaggtgtagcttagagttgcatatccatgattatcttatctcgcggtcacctatgctttcaggcgcggtgactgctattcgatcccatattaaaaaaaaaaaaaaaaaaaaaaaaaaaaaaaaaaaaaaaaaaaaaaaaa

SEQ ID NO: 10841 - DNA, 914 bp, Glycine max
  unsure (1)..(914): unsure at all n locations
  Clone ID: PAT_MRT3847_10979C.1
ataaaaataatattccatcctcgtttgttttcgtttcgcctccacttttctcattggagggaaaacatccaaaaaaaaatttcggacagagaagaatatagcttcttcttccaccagtgaacaagtctagggttttagtctcttccttcagcttatttactggatcttttaaaaaagctgttcctggatgcaccgtgtcagggtagtctctatgaacctgtttttgctgctttgattactcccacggaaattaatcagctcgtcaaacattcttcttgaagtggacatgcaaactaagaaaaaaacctctaggcgaaatgccagtcaagagtgtggcagtcctaaagttttaagagcaccgaggaaggtctctgaaaatggtcgagctactgaaaagaaagtcacagatttaattacatcatctgctagaaagaataaatcttttagcactcttgagaataaaactagagagcctatccctccaacagatttgaataatggatatgagtttatggacagtgggacttctgatgcttgtttggaaaatgatgcagttgacggtgtttcattagattttatgggttgtaacaatcaagctgttcatctggagtctggaactatattttctcctgggtttcacttgtccaaaaattctggtggagttgacagagttgattttatcaaaatttttcagaatgaagaccacaagagagtttctccgtgccaagaaatagagtcaccacaggaagatgcagtagatggtcatgttagtcgagactctgacactgcantggaggtngacataaacaattcatcttttagcacanaaaatgtgaatggttgcaattctgattatgatggaaaatggctttccatggaagtttctgccctatatcttgccctgaaaaactcaa

SEQ ID NO: 10842 - DNA, 385 bp, Glycine max
  Clone ID: PAT_MRT3847_1097C.1
ctcacgcgtacgtactgccactaagaaggatgccgctggatccttgctagagctgctacgtgcagcccttatactcatgcgctgaagggctagctacttactacataccagttaagaagccaccagtgtacaaggctacagtgtacaagccatcagtgtacagaaccaccaggattatgagccagaaccaccggcttacaagcctgaaccacggtgttactagccaccatatttgaagactccatactggataccaccgtatggaacgtaccctgcattttaggacagcaaccattcctaaagcatgcaatgacgtctattatctactcaattgataagaagaactgctttgagttttatagcatcgtgatttacaacttcttat

SEQ ID NO: 10843 - DNA, 478 bp, Glycine max
  unsure (1)..(478): unsure at all n locations
  Clone ID: PAT_MRT3847_109800C.1
gattctctcggtagcttgaactcagcacactcttcggaactctggatctgctgttctgctactctgagacaacattctcatgttgaatcttaatctctgggaaactaagctctaacaacagacatggatggtgtacatcctcttggaaagtcgatgtccgggactgcctagcgtgcacagctaccgcttacgcggcgagcgcagagctgcgtgtattcccgttgatctgagaaacaactgcttatctcagatgaccctagctctgaaatctgcccatgatgctgattcgttggctcttgcgatcgccatgctctgataaagtacttatgcctcaagatcaagatagctcagcatccttgacagatcaagctgaaactcctgatataacctctgaggatacacggatgttagaggatntgaccatggaagatgaggatatgtactagctttgtgaagcagctggcagtaacagacatat

SEQ ID NO: 10844 - DNA, 766 bp, Glycine max
  unsure (1)..(766): unsure at all n locations
  Clone ID: PAT_MRT3847_109801C.1
ataaccaggctcgagcacccttcttctctccacccaattaaggaagagtgtgttagtgtgagaaaaccctttagtggtgatagagtgaagagagatgaatggagtgaaggggcagtgtcaaccctccttgaggcttatgaggccaaatgggtgctaagaaacagagccaaactcaagggccatgattgggaggatgtggcacggcacgtgtcggcacgtgccaactgcaccaaatcaccaaagacttcaacgcagtgtaagaacaaggttgagtccatgaagaagagatacagatcagaatcagcagcaacagcagatcatgcatcatcatcatggcctctttattcacggcttgatcttcttcttaggggaactggacccgtgttgtcgtcgccgccgccgccgccaccggcgatgatgccggcggcgatgccggttctgtctccggtggagccgtcgcaaccgccgcagctgtcgccgcctccggcggctccttcagggccacttgctaatgcacaaaactcgcatggatccaacggagttgatgagaagcttgctaaggaagatgggttaggaactaagtcatctgatcaagtatctagcaagaatccattggactcagatagcagcacgccagcactttatagcaagaaggacgggttaagatgcaacaagaggaagaagaaaanacattgacacacagggcgaagaaggaaagagtgtgtggagatagcagaaagcttaagatggcttacagaagctatga

SEQ ID NO: 10845 - DNA, 234 bp, Glycine max
  Clone ID: PAT_MRT3847_109802C.1
cggatagagaaaaaaacgaaaagcaagcgcatctataagcggatatgctgacaaccctgaactataataccttctgcttcaccatcactcaccctgagtaagaagctgaccggaccgtcatcgttaccgtgagtttcgccttgattgttaccgccccttattatgttgtgacgcatgaaaaccctggtccagcggtctgctctgttctgatattcccatactgtcgcgaccacg

SEQ ID NO: 10846 - DNA, 228 bp, Glycine max
  Clone ID: PAT_MRT3847_109803C.1
cgcacacttgccaacacgatctaagtctacgccattattgttccatactctctagtggcgcgcttactcgccgtactcatcgccagtaccgtcaataagatgctcctactcagctccacctacgacctacatggctaccttatgagcgaaatgagcatttaaattgtggtatacgaggacctagagaggttccgctgagatgccatcaagcttgtatacgctactcat

SEQ ID NO: 10847 - DNA, 169 bp, Glycine max
  Clone ID: PAT_MRT3847_109804C.1
gcattcaacacaacgggggctttagaaaccgcctatgcacaatcatttggggagagtatctttctttctgagcatcaactagaggactgggcttgccctttaaacaactttggctgtcatggggggttgacaatacaaggctttgagtacattaaatacaatgggggac

SEQ ID NO: 10848 - DNA, 233 bp, Glycine max
  Clone ID: PAT_MRT3847_109805C.1
tccggaattcccgcctcgacccacgcgtccggttctagatcgcgagcggcgcccttttttttttttttttttagcagtggtgctcataaaaattatcaactattgataaactcccaacacttttgaatctgatgacttgcaaacatcacaatccatgaggacattcaaaattgcaaacaacagcagtagccaaagtcaaaagaacttaaccaaagtagctagaaagaacatat

SEQ ID NO: 10849 - DNA, 470 bp, Glycine max
  Clone ID: PAT_MRT3847_109806C.1
acggctgcgagaagacgacagaagggcacctaaaaataaaataacatatacattgtaaacacataaatgcaggcaaacacaaatttccctaaacacacaaaatataaaattgttaacatgaacataaataatcttcaatccattcaactgaattaacttaaacaacatcaccctaagtaacaactatatatgagcatccatcaagcagataaaatcaacaaatacacattgacccgtttgcagcccagtgaagtatgtatcagttgttgttcaaatatgttccctgcaaccaccattaccaaacaacaacaacaaagcaaggttaagttatgtcgaacgcacaacgtctgttgaacactaaggcaaccttaatttgagtaaaagaaagtaattttttaactaacctggtttcttgactccaatgtccttgttgacaaactgccactccttgatgcaaactaatttgtcat

SEQ ID NO: 10850 - DNA, 461 bp, Glycine max
  Clone ID: PAT_MRT3847_109807C.1
ggattaagcaggggcagttacgaataggaggcatacgtgcaggtacgtatcaatctctgacgggcattcggtgatgaaccaagcaagctatgcgttgactcccgccgattcttggctatagactccaatcactgttgatagcccgatggaccggcaaagagaatcaacccccactgtcaatgacatagatgagttttggtggactacatgctatagtatatagatccgaaaacggatgtggttagagactaactgtctaaaacatttacatatacaatacagaagatggacctaacacacttggtgcaggaaaaggggtcctttactctaagccaaatgaaaagaactcttcaactaaatatggggactttataatcaacacactatcgggtgatcacctagtagatccttacatgaaactgatgaagacatatggtgtattttgacctaagaggattgcc

SEQ ID NO: 10851 - DNA, 154 bp, Glycine max
  Clone ID: PAT_MRT3847_109808C.1
tggtgaactccttgacacactcaggatactgcagcttgactcggttgccgtccactacaagcctgaccgtggactggatctaccttggagtgatggagctcttcttgccgtactgcgcaaggctggaagatcgctgagcaaccttctccaagat

SEQ ID NO: 10852 - DNA, 289 bp, Glycine max
  Clone ID: PAT_MRT3847_109809C.1
acgcgttcgtttacaattttacttacatagcaagagtgaattagtagcgaatcgcgtaccaaaattggcatagggtatactaaaagcacacatcacacaatacactttcaaattatacccttaagcgcgccctcttattaaactacaattatcactcatttccagaatcccttattactttatatctctattctaattctaattccaatcacaaccataatctatttccttcctttcaaatctacagtttcatatacccaatagggttccaaatttttttttccttttc

SEQ ID NO: 10853 - DNA, 554 bp, Glycine max
  Clone ID: PAT_MRT3847_10980C.1
gcacgagagcaatgattaccttaataactacttcatgtcagatttttattcaactatctcagattatactgttaaagcttttgcatctgtccttcttcaagattactctcgcaagctatctgtatgttatcgacatctaaatttaaatgactctacatatagtttgcattagcattcagggtcaggttaacaaataacaatcatttcattcctatgaacacaatgtagtatcaaggtaatggagtggccacttgcttgagcaatgtaatttgagaacctaatatgtacttcaaaaccaaccattttgacaaaatatgatgatgaccttttgaaggcctagatatacaaatcagttaaattaagatgtgtgtaataactgattccatgatcacttgcattaacatttagtgctatgtagtttcacttattattcctcagtctagatggtctattttggctatttgcttagtatttttaatcttatatgttaagaaggattcaatttgtcttgcatgtccttatgatagattattactgatgtgctgttcacttaa

SEQ ID NO: 10854 - DNA, 605 bp, Glycine max
  unsure (1)..(605): unsure at all n locations
  Clone ID: PAT_MRT3847_109810C.1
gaaaagattcattacataatctatggacatcctcctccaagtctgattgcacatgagggagttgtattttcatctgggtttgttttcagtagtcattccggttttttctcatcccgagttgcagttcctagcagctttgatgaatgcaaggcataagatacagtgctgctactattcccctctgatttttgagaaattttaaattttttgtagctcaattgtttttttttcctttggctccaggctgcccaggaaagcagaaagtttctccttcctgttggaatatctttaaattttatttaatagctgatattgctaccagtattcagaaataatgctttaaagtaaaatctaagcagcatggatcagatggcttgggggagtatcttattggtgaagctaatttgtcccatgtattctgctcaagaacttttgtcaagtggcattaagttattttaggagctgattgatcacaggatcgaaannngagtgaacnctcagctnnacctcatggcaggtctggcnnaaggctccattctaggcaacaacaattaagcnccagtgatgccaatattggcactgagacccgcttacgtnnnactgct

SEQ ID NO: 10855 - DNA, 238 bp, Glycine max
  unsure (1)..(238): unsure at all n locations
  Clone ID: PAT_MRT3847_109811C.1
gggccgacccgacgcgaacgannaatnaagcacacaataaacttttatgatttactaatacacaccgaaacaagggattgtggcgataatagtatgatggaaccacatacataatctaatgtatactcattttatatgcatagagcaacccaaccatagctttttttttttcaattattaatatcctaaccctctttttaattgtggaataaaaatatctaatctaaataatacaaaa

SEQ ID NO: 10856 - DNA, 316 bp, Glycine max
  Clone ID: PAT_MRT3847_109812C.1
acggccacgcgtccgtttcgataagacaatactacttaatggtacttcttctataatactagacaggtttacaacttaaacagttaataaacattagtttgaataacaacatgttatttctaaaggtatatttgtttcttcttttccttttattggttacaacttcacgcatttaactgatcttcttcaaaagttatcaatcatcaatttatgattattattaatattcaaaaccattctaatatctcttcattttcacactctcaattccttcttaattcaacttttaaaattttaaacttaaatcattccactt

SEQ ID NO: 10857 - DNA, 330 bp, Glycine max
  Clone ID: PAT_MRT3847_109813C.1
gggaaagggggaaacccccacattggaccataaattggttttgaaaggacgaaagcccttacaaatttttaagggccccttggtggtttaaaaaacaagcccatttttttgtttttccccagacttaactaattttttttggcgccgacgggccgaatttgccgttaaaacctatacgggggcccttttaatcccaaagggtaaaacggaaaagacagcccctaaaattttaaaaaaagtgggggggggggggcccccaaagaatattttgggggcgggggggactttttaatttggttaacaattagccgggccctggaaaggtaaaaa

SEQ ID NO: 10858 - DNA, 280 bp, Glycine max
  Clone ID: PAT_MRT3847_109814C.1
ttacagctgctagacgacgaaatatagctcacgataagaaatcgatgtcttactccattttacggacgctctaaaggatccaatcttactgtacacatggattagacatcatatctcttctatagtgacattgagatacagatcacgtgacgtcgcattacaccttcatgacaggcaaaatcctggtattaggaaacttaatcgactagcatcacatcccaccttcgcaagcttacgttatatcaaatatgacctcatagattacacttcacaataatta

SEQ ID NO: 10859 - DNA, 1439 bp, Glycine max
  Clone ID: PAT_MRT3847_109815C.1
gcacagggacgcaggcgtaggctcgcgctctggctcgatcaattatggtttccaatttattaattgtgtgttgagtttttgtttttggattttgggtactaaaaattatgtattggggtttaaatttcatagggttttagaaaaattgatccagataggtgggagtttgcaaatgaaggattccttagagggcacaggcacctgttggcaaacataaggagaaggaaacaaccttcttctcagccttcttcttcttcttcttcatcctcttattattattattcttcttcttctcaacaagcacaacaaggtcactgtgttgaagttggtcgctttggacttgatgaagagattgatcgtttgaggcgtgacaagcacgtgttgatgatggagcttgtgaagctgagacagcagcaacagaacaaaggtcataccttcaagcaatggaggagaggctaagagggacggaaattaagcagcaacaaatgatggctttcttggctagagctttgaaaaatccaacctttattcagcagctacttcagcagaaggagaagaggaaggagcttgaagaggccatgtccaagaagaggagaaggccaattgagagagggccaaaccatggggttgttggagaagaatcaagcagtgttaaggttgagtctcttgtgtttggtgatgaatatggttttggagtgtcagagttggaagtgttagctatggagatgcaaggttatggtaagggaaggagggaacaagaggaggagcctgatgaggcactagatcaatcacaagagaggctggagaaagagcttgatgaagggttctgggaagaacttttcagtgagggttttgagggtgaattggatactaatccaactaattcccaagaccaagatgaagaagaagaagatcatgtcaatgtgttggccaatcgctttggttacttgggttcaagtcctaaatgaaaccaaccacatatagtactcaagattattattggttaacattgttcattaatttggttcaagtggaggcactcatgtggtgaatggaggaggaggcatcccatttggcatgatacatgtggaaatgatttactttttggtgtttctaacccccccattatatgatgatgcatgtccttttgtagaacctaaaaaatttctcacttttctctgtttgattaggtaggttgcagctgttgcttggacaagaatctatggtagtgatagcaatcgttatttactcaaggttcagttttatgtgttttttttttttttaaccactcaaattaaaccccctctcctttgtaatgttcatcttaattaattatattatatatcaaccaagctattgctgtaaaaaaaaaaaaaaaaaaaaaaaaaaaaaaaaaaaaaaaaaaaaaaaaaaaaaaaaaaaaaaaaaaaaaaaaaaaa

SEQ ID NO: 10860 - DNA, 293 bp, Glycine max
  Clone ID: PAT_MRT3847_109816C.1
aaaaaaaaaatggtgaggattttaaaatttgggaaaccagtaacgtgtaaaaggaccataaggaggaactcacacccctgaaagagggagacctgaaaaacaaaccgaacttaaagaaaaacccagggaggtggcaaacggaaacatgggaaggcgagaaaaacggctcttaggcaagcttgcaagcgaactcatagctcttgtatagggctacctaactccaaggcgcggcccgaatgtaaaaaacggggcgactggaaaaaccctgggggggggcaaaataatggccttgc

SEQ ID NO: 10861 - DNA, 411 bp, Glycine max
  Clone ID: PAT_MRT3847_109817C.1
tcccggcccgacccacgcgtccggttcacaagtctctcagatacagtcattcatgcagatcctccttttaaggaagttccctgtctgcagctacagcctctgcctctctgcctcagtttctgtgtaactgattgctgtttttcagtttaaattgagagatggaaccacaacaagaaatggagtggaatgaggcccaaaagattccaataagcgggggccttgaggtcgtagcaaaaaaacagcttcagttccttgcaactgttgataagaaccgtcacctctatgacggtcctgcccttgacagagctatctataggtacaatgcttgttggattcccttgcttgccaagcattccgagtctgcgatttttgaagggccatgtgggactgctcttgactgggaatggattg

SEQ ID NO: 10862 - DNA, 264 bp, Glycine max
  unsure (1)..(264): unsure at all n locations
  Clone ID: PAT_MRT3847_109818C.1
aagagatggacaacaaggcaagaaggtcattgtcggttttgaggtttatgcaaagagcatcgaggctggtaacaganatgctcaaggcatacctgtttccatcaccgacgtcagcaacggcatggaattgactatgcgcaaaaacggtactgctgccgctgctgcttcttactactcctccgacttcgacctaccacccggcgaccatccgacgacgttgatgaggangctactcttacattccctacacgtatctgtgtnctc

SEQ ID NO: 10863 - DNA, 466 bp, Glycine max
  Clone ID: PAT_MRT3847_109819C.1
cataatattcaacatatgtacaaatatgtaacaatatacatacacagatacatgcatacttaggcagttagaccagagaattttcacaatgcatgcaactaatagcagggatttcaaagttagagagatagggacaggttgactaacatgttttgcaaattattgaagacaagactatttggccgtccttgatccttgagattctgagaatttcaaaagattcgccagtttgatcaattcatttttattattattattattattattattattttttttttttaatattttttttgcgtttgatatcgttgtaaatagttaattagttatggtgcatgaatatgattttcggaattgaataatgtgttaacataggttataaatttaagaatccaaactaggaccaaactcattataatatttttgtgaagacattacagttttttttaactaaaaccaaaagaaa

SEQ ID NO: 10864 - DNA, 260 bp, Glycine max
  Clone ID: PAT_MRT3847_10981C.1
gtcgagaaagaccagcagagtagagatgataatagacagaaagaaatttaaaattcggatagacaagtacaggagcgcgtattcggttttgaggtcactcagtcccaccgatgactgatcatcattaacacctttttctttcttcaattatcccaaacctcttcttcttcttctgcttcccctatcacaaaaacgcgtcatcaagagacataaaccctattatcaccatatacttcctgtctgggatctgtagatctaac

SEQ ID NO: 10865 - DNA, 622 bp, Glycine max
  Clone ID: PAT_MRT3847_109820C.1
aaactataacccttcccattttggtattttgtttggaagaaagaaaaacaaaaattgtaaaaaagtccaaaatattggaacaaaaggaaatatagcagtaaaaccaagcacaatgtttctgcttgaggcttatgcaactcaaaaaaccctaacaagcagggtaccacgggaaatacatgaaattggattggcacaccacgaagacagaatagataaatccctaaatcccccttgcaagctctaatccacttccaagctagaaacctttgcatgatcttgatcgaattgctgccacgcataatctggcaagatacataacttcatcgttgatttgcttcccaatcaccagcagcaaaatgtatttgcacagtgtagtcatcctcgttcgccatggaccaaaacggcgaagaagatccaagccccactgtccccaccaacgccagatccggatccaccgaagaagcatccatagcagacgcaaccgaacccacaacgggggaattatttacttcctccaccaccacgccattctgatgttgctggtgctgttgattcgacaaaaccccatgttgcacttgcgcatgcacatgattattattactatccagaaaaccatgccttt

SEQ ID NO: 10866 - DNA, 343 bp, Glycine max
  Clone ID: PAT_MRT3847_109821C.1
cggccgcacagaagatcaagattgactttaatttcgcccccaaaatatgcatttacaatatggctacaacggtgaggtaaatggttggggcgcttggcgacagaaacaaatggaaaggggggagtcctgataaacagtgaaaaacatgtgaaatcctgacaaaacggtcacagtgggttgtgaaaaataactagaaagaacggctgtacgttaatctaaaagaattaatatttaagcgcataacatggtgttgagggattcggaaaaaaattttctgtccaggcgcaagaatagccatgggatcaaaattggcctttgtcttgactaatctgcaccacttatc

SEQ ID NO: 10867 - DNA, 834 bp, Glycine max
  Clone ID: PAT_MRT3847_109822C.1
ggtcgagactactctgccgacggactccttcttgcatccgtccaaacccagagttcatggaaatgggttggtttacaatcccttcgctatctgagattgtggagaatctcgcaatttctagttaccagattttccaaatttgagatttttacgcacttagagtaaatgcaagaactttaagaaagattgggtattgggtatcttgttttccaactcaataagatagtggggaggaaagagatatggctgtaggtagcaaaaccagaaatatgcttgaaggtctggttaaagaaggatcatttaaatggttgcttggcaagaagagttacttttatgaagaatttgaagagatggaaaattctccttctgctgggaagaattttatacgagagctctctcctgttgcaaacctagttgttcgtagatgctcaaaaatccttagaacctcttcaagtgatcttcaggagagcttcaatcaagaggcttctgattctatgaagaattcatcacgatatgcgaggaacttattggaatattgctgtttcaaggcacttttcctgacaacacaaatgactggtcatctctttgataaaacatttcgtcgtacgacatatgacatgatatatggcatggtgttagcctgggctgacagggaacctgacactaatgtcgatgataacatagctgaggacatagctgttggtttagaagcagctccttcaattcctatcattgccaatgtcatcattagggaaaatctttttgaggggctgagttcatcaactgatggtcgccttcagtttcccatctatgacaaggaccttactgggctag

SEQ ID NO: 10868 - DNA, 468 bp, Glycine max
  Clone ID: PAT_MRT3847_109823C.1
cctcaatccaactatgcttccttacattatcttacatctttctaatccaaggtatgcattttttggtctgtgtcgtggaagtgggttggttcataattccttcgctctctgagatcgtggagaatctcgtaatttgaagctaccaccatttgccaaagttgagatttttacgcacttaagagtaaatgcaagaactttaagaaagattaggtactgggtatcttgtattccaactcaataagatagtggggaggaaagagatatggccgtcgctagcaaaaccagaaatatgcttgaaggtctggtaaaagaaggatcattgaaatggttgcttggcaagaagagttactttggtgaagaatttgaagagatggaaaattctccttctgctgggaagaactttatacgagagctctctcctgttgcaaacctagttgttcgtagatgctcaaagtcgatgaagacata

SEQ ID NO: 10869 - DNA, 132 bp, Glycine max
  Clone ID: PAT_MRT3847_109824C.1
acagaggggagggccattttgcaattgaaaagtcctctctacccagcgagaaccgcttgagagcattagcgaggtacaaaggaaatggcgagagctagcagaaaggttttggaaaaagcaaacgggacccta

SEQ ID NO: 10870 - DNA, 1312 bp, Glycine max
  Clone ID: PAT_MRT3847_109825C.1
gctcgagcggctcgagcggctcgagcgaaaaagagtgtgggcttttaattggttttagcatgtgagagcgaaagaaacaccagagcagagacactatatatatgtatatgtatatgtaagtgagttgtggaggtgaaaaagagtggaaatggcaggtgcaggaagaggctacggggacgcgaaccagaaggtagattacgtgttcaaggtggtgctaattggggattccgcggtggggaagtcgcagatacttgcacgcttcgcgagaaacgagttcagtttggactcaaaggccacaatcggcgtcgagttccaaacgcgcactttggtcattcagcacaagagcatcaaggctcagatctgggacactgccggccaagaacggtgttatgttctattccaaattccaaatgatattcagaagtcatatttgtgtcacttcaactgtatattttgcatttacgtgatggaaaaccacatggttggatttataagaaattattcttgcttggaagtctcttatctgttaaacaatgtcactgttggatacagagcagttacaagtgcatactacaggggtgctgttggggcaatgttggtttatgacatcactaaacgtcaaagctttgatcacatacctcgttggttagaagaattgcgtaaccatgcggataagaatatagtcatcattcttataggaaacaaaagtgatcttgagaaccagcgtcaagtacccacagaggatgcaaaagaatttgccgagaaagaaggcttatttttcctagagacctcagcactggaagcaactaacgttgaaacagctttcatgactgttttgacagaaatattcaacattgtcaacaagaagaacctagctgctggtgataatcagggaaatggcaacgcagcatctctgtctggcaagcagataattgttcctggtactgcacaagaaatccccaagaggagcatgtgttgtcagtaatcctgactttatttataatttgtttaaatttactagatttccatggttctgtgttcctatcaccaatttttaatgatttggtgcatttcattttgtatatttttacattatttgaaattattttgcatgagttgctgattaaggaccagcagagggaagtaattacaatttccttggtacaacgtaggagacaaaaacttaagtgtgttgttttagatatttttggtgctattttttaattaaaatttaagttttatctcagtaaaaaaaaaaaaaaaaaaaaaaaattaaaagcggtcgctccacccccccagataaagtaagcga

SEQ ID NO: 10871 - DNA, 973 bp, Glycine max
  Clone ID: PAT_MRT3847_109826C.1
atctctattattttcaccatctatcatctcaatcttttattattattattttgaacggcttttattattggtgttgttgttgttgttgatccttcagaaactttaataataagtgttttagaacttgtcaattttgatcaagtagctttagcatgggacatcatttagttcaattgtacttgctaacataattagtttggacatgctttcctttttctcacttgttagtaatcatcagtgtagcaaagaactattttttcttgcatgcaatttatatctagttagtgcttcttcacaagattaattaagattatttcttatcattgcttggtggttcgaatggttggcttaaagtacattaaatgccaaatttcagtttaacctaatatttcattttcaatggtttatgaaacagatacagagcagttacgagtgcatactacaggggtgctgtgggggcaatgttggtttatgacatcactaaacgccaaacctttgatcacataccacgttggttagaagaactgcgcaaccatgctgacaagaacatagtcatcattcttacaggcaacaaatgtgatcttgagaaccagcgtgacgtacccactgaggatgcaaaagaatttgctgagaaagaagggttgtttttcttagagacctcagcactagaagcaactaatgttgaaacagccttcataactgctgcgagaagacgacagaagggcaacaagaataacctagctgctggtgataatcagggaaatgacaactcagcatctttgtctggcaagaaggttattgttcctggtcctgcacaggaaattcccaagaggagcatgtgttgtcagtaatcccaactttatttatgatttataatttgtttaaatttactagattttcatggttatgtgttcctatcaccaatttttaatgatttggtgcatttcctttcgaaaaaaaaaaaaaactaaaa

SEQ ID NO: 10872 - DNA, 396 bp, Glycine max
  Clone ID: PAT_MRT3847_109827C.1
atctcttcttctttctctcttgtctctctgtctctattacatgtgtcgctctatctatctgctcatttattaactctgatgggtgggtggtgggaaattctgatcaatttggataaagttcggtactttttttggagggtctatgtttgtttttcctagtgttggacttgagaaaactttaacctttgtagatgtactgtttatttttgttggcttggtttggtttgctgaattttaatataccccttttaaaaagtttgcctttttttttaattctttttaaatgtatataggtttattttttttgtatatgaagggatagattgcatactgaagagtttgtgaatccatggtgcagacctaacatgaagttgtgatcgtgttcggtgtgaaaaa

SEQ ID NO: 10873 - DNA, 1496 bp, Glycine max
  Clone ID: PAT_MRT3847_109828C.1
ctttccctttccgaaccgcaatcaagcttatcaggagcagcacccaataacgtgccaccacctgtcacccaaacggcacggcactagtcgttttttcactttaacactcctccaaaaatcaaatctaaaccaaaaaccgtgggttaattatcacttaaactcaaataatcaaacaaacaaacaagctagatttgaaattgaaagagcaacaacaaatttagaactaagaagaagaagaagaagattgcattggagaacaatggctagtggaagaagctacggagacgcgaaccagaaggtagattacgtgttcaaggtggtgctaattggtgattccgcggtggggaagtcgcagatacttgcacgcttcgcgagaaacgagttcagtttggactcaaaggccacaatcggcgtcgagttccaaacgcgcactttggtcattcagcacaagagcatcaaggctcagatctgggacactgccggccaagaacgatgttcaaggtggtgctgataggggactcgcggtggggaagtcgcagatctactcggtttgcgaggaacgagtcagcttggactccaagtccaccatcggtgttgaatttcagacgaggactttggttagcgatcacaaggcccataatggtcagatctgggacactgccggccaagaacgatacagagcagttacgagtgcatattaacaggggtgctgtggggcaatgttggtttatgacatcactaaaacgccaaacctttgatcacatataccacgttggttagaagaactgcgcaaccatgctgacaagaaacatagtcatcattcttacaggcaacaaatgtgatcttgagttgcgacgtgacgttatgactgaagtcacaatcaaagtgtaatcaaatacggaattttttacaagaacgcgtaaccattaggattagaaaatattcatcatcttagaagaatctaatgagaaccagcgtcatgtacccactgaggatgcaaaagaatttgctgagaaagaagggttatttttcttagagacctcagcactagaagcaactaatgttgaaacagccttcataactgtcttgacagaaatatacaacattgtcaacaagaagaacctagctgctggtgaaaatcagggaaatgggaactcagcatctttgtctggcaagaagattattgttccaggccctgcacaggaaatccccaagaggaatatgtgttgtcaatcatcttgactttatttataatttgtttaaatttagtatattttcatggttatgtgttcttatcaccaatttttaaaggtttggcgcatttccttttgtgtacatttaaatttaatttgatttggttggcgagttaaacattaaaaatgaaggtagatacaaattgctttttttttcttctttgaacaattgcttggttcaatataattttgaaaaaaaaaaaaaaaaaaaaaaaaaaaaaagcggccgctctagaggatcca

SEQ ID NO: 10874 - DNA, 688 bp, Glycine max
  Clone ID: PAT_MRT3847_109829C.1
gctcgagcggctcgagcggctcgagcgaaaaagatgtgggcttttaattggttttagcattaaagcgaaagaaacaccaaaacagagacactatatatatgtatatgtatatgtaagtgagttgtggaggtgaaaaagagtggaaatggcaggtgcaggaggagggtatggggacgcgaaccagaggatagactacgtgttcaaggtggtgctgataggggactcggcggtggggaagtcgcagatactagctcggtttgcgaggaacgagttcagcttggactccaagtccaccatcggtgttgaatttcagacgaggactttggttatcgatcacaagaccgttaaggctcagatctgggacactgccggccaagaacgatacagagcagttacgagtgcatattacaggggtgctgtgggggcaatgttggtttatgacatcactaaacgccaaacctttgatcacataccacgttggttagaagaactgcgcaaccatgctgacaagaacatagtcatcattcttacaggcaacaaatgtgatcttgagaaccagcgtgacgtacccactgaggatgcaaaagaatttgctgagaaagaagggttgtttttccttgaggcctcagcactagaagcaactaatgttgaaacagccttcataactgtcttgacagaaatatacaac

SEQ ID NO: 10875 - DNA, 275 bp, Glycine max
  Clone ID: PAT_MRT3847_10982C.1
ataatcatgtcaaggcacttaaggtatcttactaaggtactagggttgaatcccgcgggaagaaaatagcttccacgaccaatgttacggtgacgagcatatgattaccccataataggcttgatggaatattgaatcctcacatgataatgtcggcagacatgtacctctgctgggggaaagaacgaggccaatttgaactcactatttggctttaaggccttgactttcgagggcatgaacgtgtggtgttgagctgtcgcgatctgaattct

SEQ ID NO: 10876 - DNA, 535 bp, Glycine max
  Clone ID: PAT_MRT3847_109830C.1
ccaaagcactaggtttccaccaagttatcgagaaagagagctactggcaccgtctgtctggcaaacgaaaaacctcaatgggaacggcaactgctcatagcacgcactctacaatacccagagcgaaaccccagcctctgagaaccaccggtttctgaatcgtgctccactccgtcgaagccgatcacttctcctgaacaaggacgctcttgctgacctttatggtgccaacgcgcggaaggagccataatatgaagccggggacaaaccttaatggctcactgctccaacaaggataacgacccaagggcatctcaattaaggaggcggtaggcagagatatcggagcaagaactaaaaaagggaagtcacaaagggatgcgctcagatgaaacgatcattagcacgtactgacctgagagaaaacaggattgtcagcacagggaacctccgaataatgctgagggggtgggtccgagtcacttagaaaagagaactgcacaagagaaggccaataatcgggcttcagagaaac

SEQ ID NO: 10877 - DNA, 713 bp, Glycine max
  Clone ID: PAT_MRT3847_109831C.1
gtgcacgcaccggtctccgagggtcggcccaagcgacccgtgcgatggcgcagcggtccggcctggcctattcagtgcacagagaatagagtgctgggcaaggccagtccatacatttcctattccaaattcaattgggagagaagactgccctgccctcaatgctattgtacgggacgggtgcacactccaactggctgtgtatagtatatgagagggaacggatcgatgatccggtccaggcaagggagagacattgcaaggcagaccatgagctgagcatatgaacgaaccacagcacagtttgagggaggctgacctgcctgcgtaatgtggcatacagatgaggcaggctcgcgaaagaatatatggacagactaggcaagcctgtggatgaatgactgtactatatagggaggcattgcgtgcgctaaccttccttgctgcaattataatataaaagagtacctgccccacccattgggtgtgcgcactcaactatctctagatgaatcaagcgtgcacagaccggtcgatgaaagccgtgcttgatggagggtatgaataatgtctatcgccttcctccatcgattgattgctaggaatatcagtacatgcatgattcattgcatgctagctatgaatgagctggctaacaatgctggctggcacgcacgcgggtggttcttccttctcgttcgtacctacctttt

SEQ ID NO: 10878 - DNA, 281 bp, Glycine max
  Clone ID: PAT_MRT3847_109832C.1
aaagtgaattggaaaattttctggagcactactgatgctggatcatttcacatttactatatgattatgggcgggattttttaaaaaagccgcctcaacaaaactttggccacattaaggggggaaaaaacctaattctctcttgggggttctttttgctaaaacaaaaaacccttccattttttttttaaatttgggcacccaataaaaaaccccctttttctatccaattaacaaaatttttctttgaggcgtccaaaaaacttttttttttaatgggg

SEQ ID NO: 10879 - DNA, 380 bp, Glycine max
  Clone ID: PAT_MRT3847_109833C.1
aaaagaattgcaggagtatcatcactgtggagtaccattactagctccccacccccttttttaacaacacaagggacattccccccaaagtacttgggaaaaagttttttttttttaaatagtcccggggcctttgttatacctaaaacatcgttttgcaaagtcttttgacccaaaccttttgggttgtaaacaaaaagggcccccccctttaaaaaaccaagttaagtccccccccaaatagccaacccagtcttcccgccagggaaaacataaccggtgggaaaccaccccttggggtcaaaaataggactgtacccatcgacattacccccgtttttgtttacaaactggaaaaccccttttcctttggaacccgg

SEQ ID NO: 10880 - DNA, 957 bp, Glycine max
  Clone ID: PAT_MRT3847_109834C.1
gtttgatttcggtataggaaaaagtgaagctagcaagaacgaaaggttttcggttttccaatggaaatgaagaatgaggatcagatcacacaacaggctcagagaccaaaatatgattgccttctatttgatttagatgatactttgtatcctctcaattctggtcttgcaaatgcaattgacaaaaatattaaagactacatggtcgagaagcttggcgcagaaccaagtaaaactggtgaattggtcaacctcctttacagtaactatggaactactattgctggtctaagggctattggatatgacattgactatgaagaatattacagttttgttcatgggaaattaccttatgagaacttaaagccagacccagttctgaggaatctgctgctgagtctcccctatagaaagcttattttcacaaactcagacaaagtccatacgattaaggcacttgaaagacttgggttggaagactgctttgaaggaatgatatgctttgagacccttaatcctatccaaaagagcactgttttttattatgaagctgacataaagtttgagggttcaaagagcataaatccaacacccaaaaatggtgtagaatgctctgaaatctttgacatcatagagcattttgctcaacctgaacccagtgcagtcctgccagagacaccaattatctgcaaaccatccgaacatgccattaaattggcccatcaagatggagccccttaacccacaaagaaccttaaaaattgagaaaacccgaccaccaacaaaaaaaaaagagagagagagaagaagcccacgggaattcccccaacttcagatgatgtagttgtagttgatgtagatgctttgtaagttgcaataaattagtcattcaaataaaaaaaaaaacaagggcggctcgagcgaatacgagctacgacgcggcagcgacgcaag

SEQ ID NO: 10881 - DNA, 531 bp, Glycine max
  Clone ID: PAT_MRT3847_109835C.1
ggctcgaggaagagggtgatgattgaatttaagggtgaatttgaagaatcagtggtgaccctttgattttgtggctgttggtagctgttattttcatctctttggttattgggatgggtaagaatgatggcaagaaacaacagcaccttcttcttggaggtgttgctgctggtggtagtggtggcagaaccaacatcaatggctttattccctcctttcacactctctctggttacctgaaaattgtttcatcgggtgcttccactgttgctcggtctgctgctgcctcttttgcgtcatcaattttggataaggatgatgatgctgaccgtgatcgggttatttgggctgggtttgacacattagagggcggccatggagaagtcatgcggcaagtacttcttctaggctattggtctggtttccaggtttgggatgttgatgattcaaataatgtccgtgacctagtttccagacaggatggtcctgtttcttttatgcaaatggtaccaactccaattgtatcaaaga

SEQ ID NO: 10882 - DNA, 424 bp, Glycine max
  Clone ID: PAT_MRT3847_109836C.1
ggctcgagtgtgggtctcatcgtatcccttctcttatattgattttagcttttatggcttcaccgaacgccgaaacaatggccggaaaaggagagggtcctgctatcggaatcaatctcggaaccacctactcttgtgtgggcgtgtggcatcatgtccgagttgaaatgatacgcaacgaccatgggaacagaacgacgccgtattacgtcggctgcactgataccgagcgtctcatgcggcgatgcggatgagaaccaagtgggcatgaacccgatcaacaccgtcttcgatgccaagatgttgattcggtcaggaatacagtgactcctctgttcatagtgatatcaaattgcggcctgataaggtcattgatggtgctggtgacaagccactgatcgtggttaactacaagggggaggag

SEQ ID NO: 10883 - DNA, 444 bp, Glycine max
  Clone ID: PAT_MRT3847_109837C.1
attatagatagattttgttttttttttttgttgtaaaagaaaaaacaggcctggagaacttgctttttgttattaaatattttttctaaagagcttggaacacctttgaaaaaaaatttgtttcaaaacaaaaaactaattttttcccaaaataattaaccaaattttttaaaccttcccaatttgaattttttgggaggccctcccccaggaaaacccaaaattttcgcttgggcctaaaaaaaaaaacttttttttttggcttggacactggtccctttccctcttaaaaacaaaaacccccccccccggggggaaatctttgaaagggttaattaaaaggttggcccaaagaaccccccctgtatttctcccaaaattttggggaaaattaaacttttatttttggggggtgggggcgggcccctttaatttgtacccccc

SEQ ID NO: 10884 - DNA, 164 bp, Glycine max
  unsure (1)..(164): unsure at all n locations
  Clone ID: PAT_MRT3847_109838C.1
ctanantctgctcttnnacnccgtcgttttcaaactcttttntnccccttcgcttctctgtctttgtaancgaaaggggggnccaatataattaacaccgatttcgcnaccaattctncttctgcgttgaattgggacaacgagaaattnaancnnatttntgg

SEQ ID NO: 10885 - DNA, 129 bp, Glycine max
  Clone ID: PAT_MRT3847_109839C.1
agcttggtaaatccttttacatacaacagtttgggaagatcgcggagcccggtacatcttaggcgcaggagcgctcgaacagagagctataacgcactctttcaagaggggaagcgtataagaaaacct

SEQ ID NO: 10886 - DNA, 303 bp, Glycine max
  Clone ID: PAT_MRT3847_10983C.1
cggacgcgtgggttgggattcatttgggccaagaatcttggacccaatacgtctacatacggagacatgatttttcttgatcttccctcaattcacatttattatgtgacgctggattccgatctggacctgcagggagccatgagtgcaactgcgtcattctgcgttactgcttccgctgaccaagtactcttgctctttcgatccctggttcgagccgctcgccaagtcccccgatgccatatcagggaggaccacaaacgaaccaccatcggatactttcgacacaacgccactcttttc

SEQ ID NO: 10887 - DNA, 185 bp, Glycine max
  Clone ID: PAT_MRT3847_109840C.1
ggtatatgaagaggacgaacttatttttttccgagacctgatttaatactagcgggaattttatggtaaagtatccacgtgtgtatgatgatctgcgggtttttggcatcgaattgaagttgcattgaacaagagagtatttgctgtggaaaagataaaaataaaaaaaagggggcgccgactag

SEQ ID NO: 10888 - DNA, 414 bp, Glycine max
  Clone ID: PAT_MRT3847_109841C.1
cttctatagtgtccagaaacttaaatgcactggccgtacatttactacccagagactgcgaatacaccaaagctgcccaacgaagaagacttgtggcacatccatctgtagacagttggtgtggtaccatcaaagactcgacggatcgaacatcacatcatcagagcacactgaacgatgtccggaacgcgctctgtagatacacgctaagaacggtgggcgtagtgttttcgcacaaagagaccaggtaccttagcctcagccgaacatccggtaatattggttttttccctttgcttatagtcacgatggctagttctatgcatagaaccttattaaggtggatcccttcaagggcccgagtctcagctacacgggacctggaacactctagctgagtcacaagcgtaggga

SEQ ID NO: 10889 - DNA, 272 bp, Glycine max
  Clone ID: PAT_MRT3847_109842C.1
attagaccagtgaatgcaaagtgatgttccgagaattaccatacaggaattgaaagaacgacgcttgaacggattcaggagcccctgtagcgtgccaggacaagccatgcgatcaatacaagctagcctcggcagttcttttcttacgacccaattccgcattactatgcatatcctgcgattccgacattcactgctcgaacaaactcatgtaccgccacgatcccgtgtcgatgtgtgagacgtgcgagcctgcacccattgatgtcacg

SEQ ID NO: 10890 - DNA, 487 bp, Glycine max
  Clone ID: PAT_MRT3847_109843C.1
aaaaaaaaataccatagtgcatcaaacagagacccataacttgagcacttatgagaaaaattaacaccttcctcctatataacaactgtgacttgtacatttatggtgttatttagtccctcacatatttaacacttaaagcaaccctacctaccctctaaacgaccacaacatatcgtgatcaacatgaatatggctctaatgatataataagaaactactgggttcaacctttcatggacaaagaggaatacatgttacaaattgctctaaaccacttgaccattacggaaattgactggcaaattactccaagaagaaattacaagcttgaggatacaatccattataatggggagcaatttgttgcctaaactaggatcaccgtacacattggaactataggggggctctttaccctacaaaaagtgagatgcaaattatcttcatcaactttataaactggactagggatttgatttatcac

SEQ ID NO: 10891 - DNA, 108 bp, Glycine max
  Clone ID: PAT_MRT3847_109844C.1
atagaaaagacatatcaaagtggccattaatacatcaaaggattacaaagcacattggtataatatatgttgccattatccaacagctgaaccatgatgtaatattga

SEQ ID NO: 10892 - DNA, 235 bp, Glycine max
  Clone ID: PAT_MRT3847_109845C.1
cgctttgctgtatgtttatcatatatttctttttataaagggactgatagatactttttgcgcactgcagactctgtattcttactctgagggactgaaatctgggttctttggacaaaggaccaaaggtttttgctttttcactagcacttccttgtctttgaattatcatggcatattgctgctaattctgggccaagtagcctatttataagacttttatgtcaggtaacat

SEQ ID NO: 10893 - DNA, 378 bp, Glycine max
  Clone ID: PAT_MRT3847_109846C.1
tctatcacaccacatgcactcttacataatctcacatattccctctaaatcacaacttcaatatatactacaacgtatctttacaggacaatatatcccataccttacctatcaactcctattatacataacaatcctacatctatgctacatatatattcttacctccatttatttacatccacaaccataatattctccattcatataatccatctatcaccactccacactccacttaaacaacattacccactctatctaccacttttatcctatttattacccatataaaatatcaactaactctctatcattccataaccattatcatataaacattcaattaatacattattattttattcataacacatt

SEQ ID NO: 10894 - DNA, 330 bp, Glycine max
  Clone ID: PAT_MRT3847_109847C.1
gccaagcgttggctcactctgcgctggaaggggaaacattcgacaggtagcgtatctataatggcttctatggctgctaagtaaaacgtcccaatggcataagcatggaaatcttctacagcaattgagtatggtgctaccttgaagaagaaggcagagaggatccgaacttcagacactttccacaggccgaggacatacattaaggataggtacgccacgtacccttgcattaactcgcctacaatgaataagcgtgagcattatcatataccgtgataccatgcgaccactgaatccgtcatgaagaacattgaggacaagagcact

SEQ ID NO: 10895 - DNA, 305 bp, Glycine max
  unsure (1)..(305): unsure at all n locations
  Clone ID: PAT_MRT3847_109848C.1
acgnccacgcgtacgaaaaaaaaaaaattttaataaaaaaaaaaaaaaaaaaaaaaaaggaagggaaaaataaaaaaaaaaaaaaaaaaaaaaaaataaaaaaaaaaaaaaaaaaaagtaatgcaagattaaaacatcacaaacttaagtaatcgaaattgcaaataaattaatattgtgtaacaactcaaaaattaaatcaattagccccaaaaatagatggtgctaaatggcaaaacctatacatggccgaacttaaaaggattaaaccaaaatcagtattaggaagctgccgtatttgaaaa

SEQ ID NO: 10896 - DNA, 883 bp, Glycine max
  unsure (1)..(883): unsure at all n locations
  Clone ID: PAT_MRT3847_109849C.1
caaagaagttcaagcaaaactctttttggcatatttgctgccacagaaggaactttactcggaattcccgggtcgactgcgcgtccggaagaaagataatgactttcttgaaactctgacctccagtgtgaaatcctaatacttgggttatttaccattttttttttcaaaaatggtatgagaacaataatgaagaaactaagcatgcaaaactgcaaaagtcatgctataaaaaaaaaaatctaaaaacagagaagagggaaatttgtgtttggggagagccacaacaaaaacagaggaaaattgggagagaggaaagtttgggagaaatatttttttttagaaaaaacagattatgggacacaatatttttaaatagttttaccatctaactcaatcacaaaccacaaccaatcaattgagaatccaacacaaatcaatgtaacttatgggacacaatattttaaaataaaaataaaataataaacaacatcttaaaaacatatattttcttaagtaaataagttagaataaatagtaaacagaaccttggtatatatgaacgtccattatgtaaaaagccagagaaaaatattggcatacttaaaagtggcacataccagaaattagattggcaagttagcttttttgcattttatttgttgtgaacttttctttggtgaaaaacttagtaaatatttttttttatctggcatagaataaccatcatatatttctcctaaaattagacaaatatcgtgttttaattttcacaaactcgagacagaaggaaagaaagcagtggacatccataattttgngtcctgcttttactctaatacatagactcggtgtctacaaacacgttaattccattgatccc

SEQ ID NO: 10897 - DNA, 324 bp, Glycine max
  Clone ID: PAT_MRT3847_10984C.1
cttggggaaaggacccgggacccctttattaaaaaaaggctaggaaagggggaaaaggaaccaaaaaagataaaccaaagactcccctcaaaaacgggtttgaaaggaaaggccctaattaaaatgaaaaatttaacctcgaggggggggcccaaacaaaccgccttatttaaaaaaacggggcgccaaaagggggccggacaatccaggaaaaaaccccccccccaagaaaatttactggccaaacagaacccccctactaaagttcttaagcaaaccggaaagaactggaggggccttgcaaaaaaaaatggggccccgtaa

SEQ ID NO: 10898 - DNA, 3187 bp, Glycine max
  Clone ID: PAT_MRT3847_109850C.1
ggctcgagctcgggtttagttgaccaaaatcttcaaaatatgcttgaaaggttctcaaaaattgaaatggtgacaatgaggcatcaacttaactttaagaagaataaggttgatgactatcccattaagaagcagaatccatatgcacaaaataatctagctgcacttcttgccaatgcaactaataatgagggattgccagaggagtcaatttctttgtcaaagtcgcttattggtgggagtatgaatgcatgtaaaatgagaatcttaactttctgtgtgcctgagcgtgtagttcaaggaagtgttgttactataattccgaggatgcgaactaggatgataatatttgagaaatctgatggtactgtcgctatgcattgtggggagattgaagaagttgattacgtagctgcagaggatcatcttctcacattacccaatactcattctgcagatttgcttgtacaacagttctgttcactgatggtacgcgaaggatttgtgaaagaagatgaccgaatccaacttaaaccaaaccgggtgaaccttccattgggcaatcaatctactacccctaataatgctgtagttgaaatgcaacaatatggagaagccattcctggtcaatcatccaatgaagttgcaaaaccaactagtggcagtaatgcacctgtaaacctctctcagaatcttgtaacaaatccaaggatgctgccacctggaaacccccaagccttacagatgtcccaaggacttctctctggtgtttcgatggcttcaagaccacaacaaatggactcacaacaagccatacagcagcagcagcagcagcagcagcaacaacaacaacagcagcagctgcaacaaaatcaacacacactcattcaacagcagaatccccagttccagaggtctcctatgatgcttgggacaaatcagctttcacacttaaatccagttggacaaaactccaacatgccattaggtaatcacatgctgaacaggccttcagctctccagcttcagatgttccaacaacaacaacagcaacagcaacagcagcagcagcagcctcaaatgcaaaggaaaatgatgatgggactcggacaagctgtgggaatgggtaacttgagatatttccttgttgggcatctgaccgttctgtgaccatacattgatgggtaggtgtcaggggaatttacgtagctggaatctcacaaccaatgacatctattgctggcatgggaaatatgggtcagaacccaatgaatcttagccagactggaaatattactaattctaaaggaagatgatcgaggtcccggatcgataaatgcagcagccatctgcttgaccttttatcaaaccttacctaataatgctagaatcgtcaaggcatgctatggtcctctcaatctaacatagctagcatctcaagggctagacaaatacaccctggtggtactccaagtctttcaatgttgggcagggctaatacaatgcagcgaccaattggacctatgggtccaccgaagattatggctgggatgaatctttatatgagtcagcagcagcagcagcaacatcaacaaccccaaccccaacaacagcagcagcaacaccaacagcaattgcaacttcagcagcatatgcagcagcaattacagcagcaacaacaacaagaaacaacttcacaattgcaggcagttgtttctcccccacaggtgggatcgccatcaatgggcattccaccaatgaaccaacaagcgcagcagcaagccagccctcagcaaatgagtcaacgaacccctatgagtccacagatgagctcaggtgcgattcatgccatgaatgctggtaatcctgaagcttgtccagccagtccacagttgagctctcagacccttggctctgttagtagcataacaaactcccctatggacatgcaaggtgtcaacaagagcaactctaatgcacaatgaagctacaaaacgtaaaatgtccaaatcagtgcccctgccacataagttgttggaaactgctgaagctaataatgttgaatatgggtgcatagacttacaccagaaaatgataattatttacttataaataaacaaagcatattgaataaatatgctactctttgtaactctagggggaatcacatgtatgccagttgttaatagtttcttgttttctttttcactcattaagcacgtctgtgtaagtttttaggatatttaagctaagattagcgtgtatttattctatggctactttatggagtgcagtagcaagcttttttataagtgaaagaaaagaaaaatctctttctcgggtttatatgagtcagcagcagcaacatcaacaaccccaacagcagcagcagcaacaccaacagcaattgcaactccaacagcatatgcagcagcaattacagcagcaacagcaacaacaagaaacaacttcacaattgcagtcagttgtttcacccccacaggtgggatcgccatcaatgggcgtaccaccattgaaccaacaaacgcagcagcaagccagccctcagcaaatgagtcaacgaactccgatgagtccacaaatgagctcaggtgcaattcatgccatgagtgctggtaatcctgaagcttgtccagccagtccacagttgagctctcagacccttggctctgttagtagcataacaaactcccctatggacatgcaaggtgttaacaagagcaactctaatgcacaatgaagctacaaagcctaaattgtccaaatcagtgcccctgtcacctaagttgttggaaactgttgaagcaaataatgttgaatattggtgcattgaatcataccagaaaatgataattatttacttatgaataaacaaagcatattgaataaatatgctgctcttttgtaactctagggggaatcacatgcattattatgtcagttgtgaatagtttcttgttttcttttgctctcattaaacacatcagtgtaacttttaggatatttaggccaagattaacatgtattagtctatggctactttatggagtgcagtagcaaacttatttttttttaagtgaaaaaaaaaagaagaaaaaaaatctcgttcaggtatttgtgcatctttcggttgtctgtttatctaatgcatacaaagttaattcat

SEQ ID NO: 10899 - DNA, 1097 bp, Glycine max
  Clone ID: PAT_MRT3847_109851C.1
tagaactaggatgattatgtttgaaaaatctgatggtactgtggctatgcattgtggggtgattgaagaagttgattacgtagctgcagaggatcatctcctcacattacccaatactcattctgcggatttgcttgcacaacagttctgttcactgatggtacgcgaaggatatgtgaaggaagatgatcgaatccaacttaaaccaaaccgggtgaaccttccgttgggcaatcaatctactacccctaataatgctgtagttgaaatgcaacaatatggagaagtcattcctggtcaatcatccaatgaagttgcaaaaccagctagtggcagtaatgcacctataaacctctctcagaatcttctaacaaacccaaggatgttgccacctggaagcccccaacccttacagatgtcccaaggacttctctctggtgtttcaatggcttcaagaccacagcaaatggactcacaacaagctgtacagcaacaacagcagcagcagcagcagcaacaacaacaacaacagcagcagcagcagcagctgcaacaaaatcaacacacactcattcaacagcagaatccccagttccagaggtctcctatgatgcttgggacaaatcatctttcacacttaaatccagttggacaaaactccaacatgccattaggtaatcacatgctcaacaagccttcagctctccagatgcagatgttccaacaacagcagcagcagcctcagatgcaaaggaaaatgatgatgggacttggacaagccgtgggaatgggtaacttgagaaataacctagatgggcttgcaccaatgggcaaccctatgggaatgggaggtgcgaggggaatatgaggcaagtggaatctcatcaccaatgacatctattgctggcatggaagatatgggtcatagcccaatgaatcttagccagacttcaaaattactaattgcataagccaacagtttaggtacggatcattatatgcagcagcatctgctgaccttatatcaaggcttagattggtacattcgaatcgtcaaagcatgctagggtcccctcagtctaacctagctagcatct

SEQ ID NO: 10900 - DNA, 148 bp, Glycine max
  Clone ID: PAT_MRT3847_109852C.1
ggaccggaacctgccagctgtcgaccatttccctataatgcagcgtattgtaacatgtctgtcctcataggcacagctattgcctgcacaaaatcgttatcctctcacatttccgtcaatgtacaaccgcgaatacgtagactgctcc

SEQ ID NO: 10901 - DNA, 561 bp, Glycine max
  Clone ID: PAT_MRT3847_109853C.1
gtaattgacctctattccttcatgactaaaactaggccaaataagcattaagggcattttgtagaatgagataagaagcaaagggacagaaagttctgattatagaaaatgggcaaggaaatcattgggtttacttttattcaatgggaagtggggctaaaaattacaacctgcacagaaaatgactaaatgagtcacagtctgttttaaaaaatccaaaatatctatcataacaagaaaccctaggatgtcttttaatattccaaaggcctacttttttcttgatccaggccttctacatctcaaatattgatcagttgatgtagagtcctagacaatcagaataaagttatttaaggataacatttgtgattaattagggttatccaacgagttccattatatgtaatatgtaactgcatcattctaacaagacaacaattcatttaattaagcacaagacaaagtgttagtctcttaatttacaagacacaagtgcagttagagaatctgaattcactcggagatatccaacatgtccaatggatccttcacatttct

SEQ ID NO: 10902 - DNA, 246 bp, Glycine max
  unsure (1)..(246): unsure at all n locations
  Clone ID: PAT_MRT3847_109854C.1
ttngagccanaancacgcttcttggccactatccatcactgtttacnacnnttacactctnaagctctcaacaaaagaccnctttnnnnanttngggtttggaagagagaagaatgagagaaaggttctgatatngngctctgttgtggccttctnggggctgcctccggcngaaactagcttcggtgcagaagcganaaggattaaggtttcncaggtncattttgttacaccaaacnagngcag

SEQ ID NO: 10903 - DNA, 278 bp, Glycine max
  unsure (1)..(278): unsure at all n locations
  Clone ID: PAT_MRT3847_109855C.1
cttctttgcatgacttcctaaactctctctatanncttcncncancnacacnacatacnaannnaaaaaccnnccctcaagtactancatncacatcacacacacaagnnaaaacnctngctttccttttcaagtncttaaactcatcacntactnnnaggagtntgcatatntncttngtatggatggancctnccagtggacancaccagnaaatgtctagcgagtcattggagaacatgtnggcatgttcaaaagcacagcaagagaggaagcca

SEQ ID NO: 10904 - DNA, 371 bp, Glycine max
  Clone ID: PAT_MRT3847_109856C.1
cccacgcgtgcatacggatgccactagacttttagtggggtttggctaaccgaaacgcacaggattcacaggcacattgtaaaactctttatacataccaaaggccttcctttcctctatgtctttttgcaatccctttctttcgttactggcaggagcaccttgtgggataacagaaagtcagtggcgttaaggtactataaataagatgaaacagcggcgataaactatataaagtctggactgattgaaagacttgctgatgctgttgcaattaggtgccttggacgggtttccttctactttgaccctcagttagagcttgtctctagttcttggcaagcatctattcgtagccctggactatttaa

SEQ ID NO: 10905 - DNA, 385 bp, Glycine max
  unsure (1)..(385): unsure at all n locations
  Clone ID: PAT_MRT3847_109857C.1
taattttacagagaatcataattannnataattaatactacggagtaataagaaatactagtacaagtatagatcaatggatagggagaggggacagaagaattttaattttaatagaaattaaggaagataaaagggacaatgtgtcacgaaaagcagcgggttttccggtaggaaaggacgaaaggcgcagaaagctgttttgtttgacacgtggcgggatgtggaacgtacgatggggatgggaattagtatgggccgtggagatgagatgaatgacatccattccattaaaattttgttttgataaaaaagagagagagagagtagtaactactccttactgcgttttgggatagtgctnngttgctaacttaaccacacc

SEQ ID NO: 10906 - DNA, 1428 bp, Glycine max
  Clone ID: PAT_MRT3847_109858C.1
aacgacttgcggaataggtggcccccatcttaatgtaatgcattcctaatctttcttcacatcaatggcacagaatagacttgttcctcagcttctctaggggtcgtttctctgtttcttaactttctctccaccaatggccaagaagagaaccacgcctcagaagaagaagacccagacgataattcccatgccaaaacattctcaacagccaagaagctcacctcccaaacgccgcactgatttctctttcttcacgcgctccccctcctccttctccaaccctacttctggttcctcaccaggttcatcttctggtgaagtgaggttgtccaatgttgcttcaagcagtttgcaggggaggaaaatggtaatgaaacaattttctgaagatataatggttcaatgcagcatttaccaagagggtagaccagtatgttcatctgagtcttttgatactccagttgtggaagttgattcagctgttcaagatgaaattctcaaccttggaggacatagggctgcttgcaatgaaaaaattgatatttccaagatgtcagaatctacccgtcttgaatcatatgtctgtgatagcagttctcttgctgcaactcctggaaatgttgtatgggcgaggacagatggtcaagtgtggtggcctgctgagatcctggaagaaacatctgcattatccaaccctggcagtggtggacatgttttagttcagttttatggaaatcttcccagtgcctggattgatccaatgacagatatttcaacttttgaggattcttttgaagacaagagcaacaacccttcagaagattttcaacaggctttaaagaaggccttacagaggaaggcacaacttagttcttgccaaaagttgactcttgataggtctgctcactctgatatgcaagaacgttcatctgataaatgcacttcaactagcacaagcaaaacaattgatgatgttcaagagaaacgaagagggaaaagggaacgtaaaccgaaagttcactttgatgaggtaacatacccaatgaagtctgaaagaaaggttcgtcggttgaagataatgcggtacctcggccttgctcctccagttggttctcccttttgagttttgaccatgatcacgagtaatgcatatttcaaatgtttgcagctttacagctgtagtcgattctccctttctttaaccataataatcatgaaatatgcatatttctaaaaattgcttctacttcttgccactagctctgtaaaattttgtaggattatatagtctcaaatagtattacattactatctgtaaaatccatataagaatttcatggaatatcagattagttctccaataaaagttccatttagcacaaaagctctctccacgggggcggccgccggccccttcagttttag

SEQ ID NO: 10907 - DNA, 954 bp, Glycine max
  Clone ID: PAT_MRT3847_109859C.1
ggctcgagtctagatcgtcttcacgaggaactccagtttttgtatcttgaagaatccactcacgggtttcttagagttgtgatcaactacgttacttctctcttggttttcttgatctccaccttcaccagttggaatggcaaggagctacttcaagcaagaacatgatcttgagaagagaagagctgaggctgctaggattagggagaaataccctgacaggattccggtaattgtggagaaggctgaaagaagtgacatcccaagtattgacaagaagaagtaccttgtccctgctgacttgactgtaggacagtttgtctatgtgatccgcaaaaggattaaattaagtgcagaaaaggcaatctttatatttgtggacaacgtccttcctcctacaggagcaattatgtctgccatatatgatgagaagaaggacgaggatgggtttctctatgttacatacagtggcgagaacacctttggggatctgatttccattcagtagccattataaattcacaccgtttgaccttgtggtctcattggtctgtctgataaatttgttatagtactcatgtcaagaaccttactctcgatgttttgtacagttgtatataaattccgtgaacttgatcaatattaaaagttctctcattcagtctttcttggttttaaaagtaaacacattggctagttgatttgtcttacaaattcattatagaactcatgtcatttacctcactttcatggttatttcgtgttctatataaattccgtgaacttgattaatatgaaaacttccctcactcagtcctacaacgtcggaaaaggaaaaacccgggggttacccaattaaatcgctttgaagaacatccccttttccccagttggctaaatacaaaaaaggccccccccaatcccctttcccaaaatttgcccaccctaaatgga

SEQ ID NO: 10908 - DNA, 369 bp, Glycine max
  Clone ID: PAT_MRT3847_10985C.1
ttcatacggcaatattaccatctgaaacctgtgtaaaaatataatactaatagttatgtaaaaactattaacctgttcctaaagtacatataattatttttaaaagaaaagaaaaaaaaagctgagagaatggaatattattagtacaaattatatgaagcaattagtatatctcaatatttagaaatatggtaagtgaatgaaactcaataaatgcgtaccttagtcgaaagtcaaaaccattcaaagccctcaaagcagcaccaaatatctgatgccacgtgttacgacctgtattcaatcattagaaatgttcgaattttttacatcttatacacgagaagttaaataagaattatttacatataa

SEQ ID NO: 10909 - DNA, 410 bp, Glycine max
  Clone ID: PAT_MRT3847_109860C.1
cacacgcactagatggactatattgcggttataaccttcttcatatatcgcttgttatgagaagctctagaaatgatcacaggcacctaaggttgacattgtgttctagatccttcactcaaatctgacactccgacaacgctgatagagctgctagcttcagatatcaccccaccaacactgacgctggtggtaacagagatcacatttacacgcggcaccatacctgcattgactacatcattgacactaatatacagatttctagtattatatacgacagtgacactactagacatcatgaggctacactgggttatcaaggagacacagagatacagcatgtgctctaccggtgtctatggtataggctcctaggagcggcaccatgaatcatccgaatgctaatc

SEQ ID NO: 10910 - DNA, 796 bp, Glycine max
  Clone ID: PAT_MRT3847_109861C.1
agaagaacacggccttgttggagttgcgagcaagaaaccggagcgttgattttcttctgtttttcgatcgtcttcacgaggtttagttttctgagctatatacaatcaaattcgtaaaccttgaggtttaagtatcgaaaattattaaccggccaaacaaatttccttcgccgataagaagtaaattgtcggaaccgctttgtgtctctttccctgttttttaaggagagattgtctgcaatcagaggaagaatgacaaagagttacttcaaacaagagcatgatcttgagaagagaagagccgaggctgctaggattagggagaaatacccagaccgtatcccggtgattgtggagaaggcagaaagaagtgatatcccaagtattgacaagaagaagtaccttgtccctgctgatctgacagttggacagttcgtctatgttatccgcaaaaggattaaattaagcgcagaaaaggcaatctttatctttgtggacaacgtccttccaccgacaggagcaattatgtctgccatatatgatgagaagaaggatgaggatgggtttctttatgttacttacagtggagagaacacctttggggatctgacttcccactagcattattttaaagattggcactataatctgattgcattctcattggctagtctcataaatttgtatcaatactcgatatcaaagtacattgctctcaatataatgtacagtttgtatataaactctaagaagaacctgtttaatgttaaaaatgtttcctccttttcagccttgc

SEQ ID NO: 10911 - DNA, 398 bp, Glycine max
  Clone ID: PAT_MRT3847_109862C.1
aaaacatttactattttttctttttaaaaggaaaaagaattattatttttaaataagaaaagcctgttaaacttgtcaatggctataacctttatgaaattatgcatatggtcatctttgtctagttgttgagatcaacaggattctaaaattgatattttccttcagttttaggtgatatactggttaccattttgtataccattttcactctggaaggtatgcatcttatcatctttacctttgctttaattatgtacataataaaaagaattagttttgatgctttatcacacgaccttattcaataatatcctccaccttaaatatacatgtgagtttcactaataatttatggtttaaatatattttgatgtctaataaataattaaattttt

SEQ ID NO: 10912 - DNA, 324 bp, Glycine max
  Clone ID: PAT_MRT3847_109863C.1
gtcaagaggtgctaccctcattgtatataggtttacatattggtggcagcattgggaatagcagatgttgccaattgaccttactgaagccaaagtgaaatgaaatggggatcccaaggggagtgccccaatgacaatgtggataaatatcgtggcaaaaggggtggacgcagattgggagctgttcggccccgtaataagcctctgccgggtacctgcggaatgccagctgtcctcatgggggaccttctataagatgggcagaataatggacgaagctgaaacctgtgtaaaagagttgtcacgcatacgattcctcacaag

SEQ ID NO: 10913 - DNA, 597 bp, Glycine max
  Clone ID: PAT_MRT3847_109864C.1
gggaaaactttgctgaattttcgactaccccttttggatgggcttttaattgggattttgagtgaagattcttaggctagtcaaactaaagaaattatagtttgtacaccggtcatagtctaagagtggattgggacaaatcacacttgtaagatcttcacagaataaatttgcatatgacacgggtggctaaaaggccaactcttccaaccagcatggttttttagaatccagtgtgaaccaaattcacaaaagaatgagaaaaactaacaaaatattgttgtagcaagacttgaattttcacaatgaagccttgcatcatatgatgcactaagagctatctgacaagaagcaactgttgctgccatggctacttaaaacacaaggcacgtcacggacaagaaacttcacacaacgtgttccaatggcatccaaaatttctgtacattcttgcaaatccgagtcattcaccaacatcacccatttctcttcatcatcaagatatttgagctgggatgatccattttgcattttgaaccctcggtgcaacttctttttatagctggagacaacctggagatggatcaacttggaacg

SEQ ID NO: 10914 - DNA, 133 bp, Glycine max
  Clone ID: PAT_MRT3847_109865C.1
ccctccttacggctgggataagaccacagaaggggcctgcataaccgagctaacagccatacttacgcctggtccgcccatcctagtcatatttcatgaaatacggccgttaagcgtccgctccatcacgctt

SEQ ID NO: 10915 - DNA, 374 bp, Glycine max
  Clone ID: PAT_MRT3847_109866C.1
ggctcgagatcagggtctcagagatgacttaatttttgtgcatgcatgtgttcaattgttttaagtgagatatgatttttatcatagtttggctccatgttgatgtttgcatgacattggtgaatcgaatttcttcatggcagcctgaagaggtctagaaagtttcaacctgaagataggctcttctcattatcttcagtgacctcgccagcggcagaagatcttgcagctggacgagatggtgagttcatatattatggtcctggtcgttcaatatttggaggaattttggttaacattcatgggattttgtagcaaatgggaagccgggttagggtcctggtcgttcaaaaagtggaagaatttatgcttat

SEQ ID NO: 10916 - DNA, 346 bp, Glycine max
  unsure (1)..(346): unsure at all n locations
  Clone ID: PAT_MRT3847_109867C.1
atccgaatttgcgngcggttaccagctgctgctntcgtcacatgggtcgccgtcccgcccgttgctaccgctattgcaagggtatgccctacatcaagtcccgctattgccgtggtgtccccgacgccaagattcgcatcttcgatcttggccgcaagcgtgccaccgctgacgagttccccttctgcgctcacctcgtctcccttgagaatgagcagctctcgtctgaggctcttgaggctggccgtatctcttgcaacaagtacatcaccacgttcggtggcaaggactcgctccacatgcgtgcccgcgtgcacccctacttttttttttttccccccccccc

SEQ ID NO: 10917 - DNA, 381 bp, Glycine max
  unsure (1)..(381): unsure at all n locations
  Clone ID: PAT_MRT3847_109868C.1
tnnngagctagaaccgatcgtcgaattttcttcctcagtagtgtcatttacncttctcttctctncancaactatgcctaaccctaaggtcttcttacaacatgacnatgcggcagttcaatgcttgctnggtcacgtcatgcgttgantggaaggctgctgagcgcacgaagcgatgnanctacccacnggcatcgcagccntgtacgcntacctatcncncnggcgaacganntatgtaggcaaccgaggcggnatgcacntgcgggaccggttaagggcgcccgggaaangccgtgtccaaaacgncaccccccttgcncaagctnagcnacnagggctgcctancgntanccctantgncccagccggggcctgttg

SEQ ID NO: 10918 - DNA, 454 bp, Glycine max
  Clone ID: PAT_MRT3847_109869C.1
ttcccagttttgtcccaggaacggatattgagagtcaaagatgtgactctggataggttttggcttcaccaatcaaatggtgctattccctagcatagtagtttttgagtcattttgaatacaaggttagaagtactcttgagaatttttcgattggaaaaagttctatatttttaataagaaaagctctaaaaaccacttctggtttgtatccaaacataccatatatatctttgatttcgtctcttgatatattattgctgttaaaaaataccagtaccttgtccatttctgcttcttttgcgggttgcggaaagtgttccaatttaatgctggtcctaagtcctaaccaagttatcaagattcaagccgtggcttgcaggtaatatttaactctctgtttagactttagatgccaaaatttcggtagcagacccttttctctcctctgacc

SEQ ID NO: 10919 - DNA, 118 bp, Glycine max
  Clone ID: PAT_MRT3847_10986C.1
actaatctacaaattacaggcatccctaccaagcaccttttggccaccccacatgagagagcacgcggatttatcgacttacctttcaccaccactgccatacgtacacggcccccac

SEQ ID NO: 10920 - DNA, 201 bp, Glycine max
  unsure (1)..(201): unsure at all n locations
  Clone ID: PAT_MRT3847_109870C.1
gcgacacncggcctccacttctnaagtaccngaanaacaatnnaagaatgtaagaggggatggaactgntgacngcaaggaatgggntagnatctatgattatgatgtntacaatgacttgggngatccacataanggtgaaaagtatgctacgcngcnncnntggaggttgnnccttacctnanctcgcagangngacaa

SEQ ID NO: 10921 - DNA, 1565 bp, Glycine max
  Clone ID: PAT_MRT3847_109871C.1
gacttttccctaaataatggatttaatttttctaaacatgcatttcaatgtcgagacaagttatccaaagataattgtattttggaatattctcttcccttgcggacaagattgcttaaggtcctgttggcttgtatggaggtatctgttctttctgaagcatttgaaacaaattggatcaatgatgttaggaagcactggggcataaagttgagcaaatcatcttctgttgaggaacttttacagatattgaccctttttgagagatcactacggcgagattttctgtcgttgaacttctctacaacagatgaattgttgggatcaagcagtatgtcagaacgttctgtgcaggcttcaactgatcctgaatctgttgctgtgcttccatgggttccactaacgactgcagctttgtctctcaggctttttgagattgattcatccatcagctatgtaaagcttgaaagacttgagccttgtgaggagaaagaagcaagagaatacataaagcttccatcaagatatactcacatgaaatctaatagggaggttgaaccagccgaatttgtccatgatgaattcactaaagataaatctgttcctaagaaaattgtacgaaatggcaataaacgtggtcgagggactaatgaacaaggacggggtaaaaagctggctaaaagagtgtgcaattctaaacgagatggtggtcgtaagaatgctaaggtcactgacaatctaagtcacagattaaaacagcaggctcgaggaacacaaggacaaggtgctgggcgaggtcgccgaaccataaggaagcggagaatgggaaagagagctgttgaagatttgttgcttggccatacgacagccagtcatagctacaagattgatagagaaccggtgagaaacttggatgaggaatgggatggagaaaaggcgagtcccatgactccggtacacattggggtggctgctgacaatagtaacagtgctgaagaggtggagtctgatgacgacaatgctcaagctgtggaatatgatcaaggaaactgggaggtaggttttaatggtgttccccccaacagatggagtaggggtttggttggaatgagtgatgaagatgtggatgcttttgaagaacttaatgacaatggcattgaggagaatgaagaggaagattcagaagcagatgttatgagtgagggttcagatgggatcccaaatacggtagtaaatgttggaggctcagactcggctttgtccgaagattcttctgattagaacatgaatttttaattggtcaatgaagggatttgcacctgaaggctgcattacatttttgatattgcagctttacaaacacctgagccccaagtcatgtcatggcttgaagagtttatggttgagtagatttagtgtatattatccatgcaaaatggagccttgtatttttaagaatcttgaagcagagggctttgtagccaacctcattttgtttttgtatttttttaacctggccttgtaatagactcattaattaataaatttttattatgccttaaaaa

SEQ ID NO: 10922 - DNA, 413 bp, Glycine max
  Clone ID: PAT_MRT3847_109872C.1
gctgattttaggccttctgcagcaagtgatgatgaccttgatggtatgcaaagttcgcctggaaggtcacaacgagggcacccgagagaggatgggctcatgactgatcaaactgaggatgatcgagatgatgatgattttgatgatggatatgagatgtatcatgttcaaggaacacttagagagtgggttacaagagatgaagtgcgccgcttcatagccaggaaattcaaggactttttactcacgtatgttaatccaaaaaatgaacatagggacaaggaatacgtgtggctgataaatgagatggtgtcagctagtaagtgcagtttggagatagattataaacaatttatctatgttcatcccaacattgccatttggctagctgatgcccctcaatctgtcttaga

SEQ ID NO: 10923 - DNA, 166 bp, Glycine max
  Clone ID: PAT_MRT3847_109873C.1
gaacaaacactttgcaaacaaactcccgacttggaggagcgaagttcaaacttccaaaagcggaatacttacaagcctaccaaaatagatggcgttcgctaaacggtactttttataggctaaaaaaattcgtgttgttttctaacaggctataaaattattttat

SEQ ID NO: 10924 - DNA, 190 bp, Glycine max
  Clone ID: PAT_MRT3847_109874C.1
ccacgcgtccgtccattatgctgagccagttgtgcaagctcaaagtgcttttttttaactttgtcttctttcttgcggaggttgatagacaagagggagttgctcaccttggtgaattttaaatctagtggctttgtacacctgtcctcaaaacctattttgtgggaacctcccaggaatggcacctgtt

SEQ ID NO: 10925 - DNA, 462 bp, Glycine max
  Clone ID: PAT_MRT3847_109875C.1
ggcaaaaaacaaaaaagcatagggggttattaaaaaaaaaccgggattggtccctgccacaaacaacttaaaaacctctaggggccccccccccccaacaacaaaaactttgaaggggctgaaaaaaaaaaaaccaatcccataaagggcccccataagggaacccccacagccccccccgatttcttttattctgaaaaaaagggcttcactggggccccaaaaacccccggaaaaaaaaaaaaaaattggccatgggttggtcaaaacccgatgcctccccaattaggggagccgctgaacttggaagggacattgcccctgcaaaaacccaggagggcccgaaccaaccgggcattgagggtgaacccaaaagaatcccccttgaaaaaattgcacaccatttgttttgtaaccggggggacaacaaaaccaaaaaagtttttgacccccctgcaaaaa

SEQ ID NO: 10926 - DNA, 211 bp, Glycine max
  Clone ID: PAT_MRT3847_109876C.1
actacaacccgaactatccattatcggatccaatcagtacttggccacgtcaatacaggataactggttaattgcaaagtgtataaacccatacaatcctgccggtgatggtgcacttgatataccaacatcaccttctctcttgggtgctctgcacgaaggttccattggctcaacatctcgggctatcgcatctgctgatcagcttact

SEQ ID NO: 10927 - DNA, 2018 bp, Glycine max
  Clone ID: PAT_MRT3847_109877C.1
acgtttaccaatctccttttgtccaagaaaaacacaacaatggggaaccaatcctcttcaaacaagatagaaactcttcccatcgacacaacatttaagcttccagcaaatataccagtttggccacaaggtggtggatttgctactggaaccatcaacataggagggctaaaattgtttcaaatttcaacattcaacaaagtttggaaaaccttagaaggtggaccaggtgatgcaggggcagctttctttgagccagcaggaatacctgagggattcttcacactaggccactacagccaacccaacaacaagcctctttttggatcaattctggtggcaaaagatgagacatcatcaggtgacaataatggagctttgaagaaaccaattgattacacacttgtgtggagcagcaagtcccaaaagatcaagcaagacaaagatggctatatttggctaccaacagcacctgatggctacaaaaccttaggccatgttgtcaccaccacacctgagaagccttcacttgacaaaatcaggtgtgttaggtcagatctcacagaccagtgtgagagaagctcatggatttggggaccagacaagagcagtgatgagaaaggtttcaatgtttatgaagtgaggccaagcaatagagggactcaagctcctggtgtgcttgtaggaacattttttgctcataatggtgaaattccttcccctctccctattgcttgtttgaagaacaccaacatgaacttctccttctccatgcctaatttgcctcaagttaaggcacttgtccaagcctattctccattcatgtacttgcatcctgatgaagagttccaacctgcttccaccaagtggtatttcacaaatggggcattgcttgttaagaaaggagaagagtccaaacctgtgccaatagaccctacaggttctaaccttcctcagggtggcaacaatgatggtgagtattggttggaccttccttctgacaaagccaacaaggaaagggtgaaaaagggtgatttcaagagttgccaagcctatgttcatgccaaacccatgtttggtggaacatgaaaagaccttgtcatgggggttttctacccattcaatgggcctggaacagccaaagtagggctcatagatattccactagggaaaataggagaacatattggagactgggagcatgtgacactaagagtaagcaatttcgatggagaactaaaaaaggtgtatctctcacaacatagcaatggtcaatgggttgaagcttctcagctcgagttccaaagtgggaacaaatcagtgtgctattcctccttgaatggccatgccatttatccaaaagcaggacttgtcatgcaaggccttgatgggattggaataaagaatgaaactaagaagagtgagaaggtgattgacatgggtgttggttttgaagttgtttctggtgagtatttggggtcagcaattgtagaaccaccttggttaaactttttgaggcaatggggtccaaaaatcacttatgacattgcaaaggagctggacaatttggcgaaggtgttccctgctttggaagcccttgaagatggtttgccaaatgagttgttgggacaggagggacccacaggacctaagctcaaaagaaattggcaaggtgatgaggtttgaaatggaagacttggagaatggtggcattattgacaccatgcaattaaaaaaggagactttaatttggttggtttgcactatctgttttgtatttttatagggttcacaacaaacatgtatttcttaataataactgacaaagttgtttcttgtttgtatttgcatgccagctttttcgggtgttcccacaacattaaaaagcatgtgatattgctcttcaaatagtaggtagatggaggacagaagaaaattgaaaagatttttgtgtgcacttggcttataatgattattttccccaaagatataaatattttatccctaaaagggagggg

SEQ ID NO: 10928 - DNA, 640 bp, Glycine max
  Clone ID: PAT_MRT3847_109878C.1
aacaaccaataaaccacatttattatcacacaaacgttactcaatctccttttgtccaagaaaaacacaacaatggggaaccaatcctcttcaaacaagatagaaactcttcccatcgacacaacatttaagcttccagcaaatataccagtttggccacaaggtgcactcccccccgcgtccttcttgatattgtagtgttatttttaacttctaatcacgttttttaaaaaaccacatgcaactgtgattttggtcacaatgccaagattttttgactcaactactgtattacagtttcaattatgatcttatcaacagtatttgtctgtcatttcctatgatgtcaatgactgcgataaaattgcaatgacaactctaatctaaaaccttacttctaattatgtgtttcttaggccttcatgaattgaaacttttcatgtaggtggtggatttgctactggagccatcaacataggagggctaaaattgtttcaaatttcaacattcaacaaagtttggaaaaccttagaaggtggaccaggtgatgcaggggcagctttctttgagccagcaagaatacctgagggattcttcacactaggccactacagccaacccaaccacaaagccttttttt

SEQ ID NO: 10929 - DNA, 535 bp, Glycine max
  Clone ID: PAT_MRT3847_109879C.1
cctacgcgtccgcggacgcgtgggcggacgcgtgggtaagaagagtgagaaggtgattgacatgggtgttggttttgaagttgtttctggtgagtatttggggtcagcaattgtagaaccaccttggttaaactttttgaggcaatggggtccaaaaatcacttatgacattgcaaaggagctggacaatttggcgaaggtgttccctgctttggaagcccttgaagatggtttgccaaatgagttgttgggacaggagggacccacaggacctaagctcaaaagaaattggcaaggtgatgaggtttgaaatggaagacttggagaatggtggcattattgacaccatgcaattaaaaaaggagactttaatttggttggtttgcactatctgttttgtatttttatagggttcacaacaaacatgtatttcttaataataactgacaaagttgtttctttgttgtatttgcatgccagctttttcgggtgttcccacaacatttaaaagcatgtgatattgctcttcaatagt

SEQ ID NO: 10930 - DNA, 331 bp, Glycine max
  Clone ID: PAT_MRT3847_10987C.1
ggcagatagaagacgacagcagggtcccgtagcaagctcgtagaacagggtagggtgtgagagctgcatcctcatctcccgagtgggatgatgccaatatcgctccttttctactggagtccccaattgggcagatcctttctcagactctggaagatcacccacatcttgagcctgctgccgtctaccaacaactccaccagcaccaaactgaccgtgatgctcatctacaaaaccaacaacagacttgcttcacccacttggttagttttttacaggtcaatcgctgaggtcatggctaactaaaggaggaaaagctctttagagatct

SEQ ID NO: 10931 - DNA, 358 bp, Glycine max
  unsure (1)..(358): unsure at all n locations
  Clone ID: PAT_MRT3847_109880C.1
cgcaaagangcctctggnaagtcctagaaaatccccaccgcagaggtgaacagtgctcaaaagangattctctctcgttttctcggaaaatttggttctccggttaccttggcttagctggatgtggatgctaacatagttacaatttcagggtagggagaacttgctaaatctgaaccagaaagagagaacagaaaaggctaacgaacctgaagatctgctttctccatgtgatagtgactcatgcagagaacataaaaagctaacatcagataatacaaggatgtctgatcattgtttgaagagcagcaagtagattctagtagtagtgagctttatgcagatgataccatcttag

SEQ ID NO: 10932 - DNA, 198 bp, Glycine max
  Clone ID: PAT_MRT3847_109881C.1
gcgcttgctgcggaagagttgcaaaggaaaaaggatagaggaagatgacttgagttgagctgttcagacggaagctaacacataagaaacatagatgatgttgcagttgttttagctttcacagataagtgataacatggtgtaccgctactatctcggtcaagctcaaaaaggaagcgctgagacatttttccgaaa

SEQ ID NO: 10933 - DNA, 473 bp, Glycine max
  Clone ID: PAT_MRT3847_109882C.1
gccagatacagcttttttttttccatcaactggcataagtgtcatgcaacgcgcggcaggttcttccattgaaccttctataacacacttgactgcgaagctagcccttggcgggcggacacgggtgacccaacatatgctcaagaactagtgaacaaacaatgcatcctacaaggcctgccacatggcacgcaaaaatgtcgatgctgatcacaggataactcatgacttgcacaatataacagcaaacttgtcaggactgggcactgcaagggaacagccatctgtggatatttagtgcttcactaggaacatgaatctgctaacaggaaggaggggagctgccatactctatgcatacatgttactcagatggggataactgacaactgagactccagatttgagtgattcgaatagtaaagaacaaccacgagaaggaacatttaggaacatgcatgaacgactttgca

SEQ ID NO: 10934 - DNA, 389 bp, Glycine max
  Clone ID: PAT_MRT3847_109883C.1
acccaactacgccttttggtgagttaacgccatcaccggcgcctctgtcccggaccgagggctttggggcctgagccgcggcccgctgccattgctatcctaatgcgggccaaattactcgggcgtctggtattaccgtgtccccagctacaagtcctactacttctgtgggacgatcaagatcgcgcccgtgagccagcccaagagcattcaaaccaccccgcttgttagcagccctcaccgaccttctatttactacgtgaactctaccggaatcagcgtgggacgtgaacaggtaccctgtcccagcgagtgtctagtgcttaacctgaatacaggagccgaaaccataattgtgtggggcgcggttataacccggttcgaggagc

SEQ ID NO: 10935 - DNA, 339 bp, Glycine max
  unsure (1)..(339): unsure at all n locations
  Clone ID: PAT_MRT3847_109884C.1
cttnnnnnnnttttttttttctttagaaaaattcttatacattttattcatgccccaacatagagactacgtagaagacatctctccatcttccatcttgtttatagaattttccatactacgttgtgcctcaaactccttagctgtatcataagaagcatgcaacccaaagaaaacatagttaaccaagagaaacactgtccaaaacccaaacctaataaacgagtctttatctatagacccaaggaggaaaatgttaataaaaatagatatggaaggtatccatggaaccaaaggcaccccccaaaatttaggcttttttgccttcggaacaaaaag

SEQ ID NO: 10936 - DNA, 428 bp, Glycine max
  Clone ID: PAT_MRT3847_109885C.1
cgtgcatggaaaaccctttctttcagttccagcagctcccactaaatgtgtaacagactttattagaatgtggagttcacatcgtgtgattggtcaattaataacgttgttgttcgtgatgattgatgtgttggccctgcaagatccgtgagtgcttacactgctgtgtgtggtgcacgaagaaggagatacctccctaatcttacctggaaacgaaggagtgctgcctcggggagctggcgctgacgacacgctggacccccatggtgtaaccggtcctcgtgtcgtcactgaaaccccttttctacctctgaaggctgtttgcatttatggtcatggacaaccaggtcttgaaggtgcgcactagattcggcgagcgtaaacagatcatagctattgcttttcttaaaggagaaattggtatcccc

SEQ ID NO: 10937 - DNA, 225 bp, Glycine max
  Clone ID: PAT_MRT3847_109886C.1
tcactcattcccaaacgaaacgaaacgcagcgtttcttcagattcagacccaaactcatggtacgctacgctcttatcaatcccctcaatcatcgtatcttctgcattcggaacacgctcgaggccgcaatgtgctttccgtgtcaagaagtcgaaaggcataacaagcccgaggttgaactcaagtatgctgtctctctctgcttcattgcacatttgctccat

SEQ ID NO: 10938 - DNA, 1351 bp, Glycine max
  Clone ID: PAT_MRT3847_109887C.1
tagaccctttctgcccctcagtcactctccctcacctataccttcagccacactggaccaccacaaacttctcctcctcagcatcatatcttctgagttctgagtgttccattccaattccaagttacaacttggctgtgtctatggatcgcgctcagcttctgttgctgggtgtacccctcttcctcttctgctctgacctcttctcccttttcactcatcatccaccgccgccaccccaccaccaccaccaccaccaccatcctcacccgccgcaccaccaccaccacccaccgcaccaccatcaccacccaccccaccaccaccatcatcacccgccccaccaccatcaccagccggtgacaatagatttccctcccgagaaacccaccaacaatattgcaactccgggtctcggcaacactgtccacatcaatttctgctcttcctgctcttacaagggaacagcagtgacgatgaaaaatatgttggagattgcatttcctggaactgaggttattcttgcgaattatcccccaacgcttccgaagcgtctgctaagcaaattggttccagttgttcagattggtgttataggggttgttgttgcaggggaacatatttttccaatgttgggttttgttgcacctcctccttggtattacaacttgcgtgctaataggtttggaaccattgcaagtacttggcttcttgggaatgccttgcagtcattcttacagagctctggggctttcgaagtttacttcaatggtgaactggttttctctaaactgaaggagggaaggtttcctggagagatcgagttgaaggatctgattaccaaaaagatgacaaattctatacgtgtcaatggtgtgtcagaattgacctcttagtgcctttggtggagacatattttgagctgtcataaattatgtaactgggcctgccattccactatgaagtaaaggttgatatacagatataataggattatcatgttgtaaggtttccagatgtatactggagtatgaactttctgtattgaaagaactaagtgattgttgaaggcaaaactcagttaatagtttgtgcagagtatgaatgttttaatttttttttttttttccattgtgatatctgttccttatcagctcaaatgacttcatctaaaaattccatggctgaaagaaaacatcatcatctccttaaagtggccatatctttacaattccaatcacatgtgcctatctcattttgggggtattgtgtctacacttctgccttcatcaccaattggcttccttctacagttttgaacaagtctttatttgaacttctttatcaaaag

SEQ ID NO: 10939 - DNA, 270 bp, Glycine max
  Clone ID: PAT_MRT3847_109888C.1
cctcccaacaccacctcgccgcgatctccgtagcctccgtcgcgtcgagcatcgatcatgtcggcctactgcggaaagtacaaggatgagctcatcaagaatgctgcctacattggcaccccaggcaagggtatccttgctgctgatgagtccactggcaccattggcaagcgcctttccagcatcaatgtcgacaacgttgaggagaaccgccgtgccctccgtgagctcctattctgctgccctggtgctctccagtacatcagcggt

SEQ ID NO: 10940 - DNA, 245 bp, Glycine max
  Clone ID: PAT_MRT3847_109889C.1
tgtttttcaccggattacttaacccttttaactttattaacacctatgggggtttgcttaccatttttcttattaaaaccaaacctggccacatttttattcgacggattaaaactgcttgattggagggaattaccctaaagttattgccaaccactttttcaccattgattctttggagaatgctgggtccgtaatcaaagccaacctattgtggggtggaatccataactttttggaaaacc

SEQ ID NO: 10941 - DNA, 621 bp, Glycine max
  Clone ID: PAT_MRT3847_10988C.1
tcgagctttcgccctttttttttagattgttttttttttttttttatttattttttttttttttttttttttttttttttttttttttttttttttttttttttttttttaaaaaaccgaacgttttttttttttttaaaaaaaattttaaagggggggggggcgtttggaatttaaaaaggggggggggggttaaccgggaaatttgggaccggttcttgggggggtacaatttttttttttgggggggttaattaaagttgggggaaaaaagggaaaaaggtgtttccgggggaaaattgtttttccctaaaatttccacaaaaaatacaagccggaaataaaaagggtaaagccgggggggcctaagggggggcctaacccaatttaatggggggggcctaattggcggtttttaagggggaaaacttggggggccatttgttttaataaatgggccaacccccggggggggggggttttttttttgggccccaggggggtttttttttttcaaaggggggggggaaaaatttgtttggttttaacgggttggccctaaaagagttaaaaaggggtcccttttggttgcccaaaggggaaaaatctttttgggggggg

SEQ ID NO: 10942 - DNA, 1499 bp, Glycine max
  Clone ID: PAT_MRT3847_109890C.1
aatgggtacccccttcatcccaggttgatgaacttgatgattttgcaatgggcagaagtcgtggtcatgataatgagagtgcaaatggttttcttcctgatgaaaaattagagatgaactctgctgctgcggctttgaacgaggcaatggatatagccgacgccgagttcaggcgtgcaaaggaagttctggcgagagagtattcccaggctgctacgacgtaatgatgatttggcaaatggaaaagatgagagaactgtgctagaggagcgagaaaactatgtagttgtggttgcagccagtttcttgactgatttgattacagctgctgctgttaaaaaagcctataggaaagctacgttgtgtatccatcctgataaagtgcagcagaagggtgccaatctacagcagaaatatgttgcagagaaggtgtttgatctactcaaggaagcctggaataaattcaattctgaggagcttttctagccttttgataaattgatccacttcaaggtaatttgttcaatgattctggtcggaggggaccacgaccctgtttcatctacctccctgatagcatatttgttttgattgaagttataattcatcaatggtgaaatactgcttccttgtctggcgtctctaaaatcttcttgggtgtaattgatatccttcgaggggttcgttgggttcttcaaatgtttattaatgtagcatgttttattgatgtaaaatatctttttgtgctatcaatttcattattcattatccctgcctagtgagggctcatgagtcatcctttttttccgggttcaagagaggatccaccctgaagtgggtcctgggtggccctccttttatacttgtggtatgtatagtaggatgtcttgaatacatataaccatggattgacaccaaaagctgcaatttatacatggatcttcgcacaagcttctgcattttatacatttaaatttgtttgtcatcagcggtgttccgttgagtttgttcaactattttgtttgatgctgggacggcatagtcttttagtctactgatgaaaaacttttgtacgttttttcataaattcttgaatagttctgtatattcaactttatttctatgtacatattgcgggtggtgtaaataagccatgtcgagttaagctcttgaaagtttcggcttagattgtatgaagatttcaaactttgattctggttaaatgagtcaaattaaggggaagtaaagacgtggtctgtataatgaatgttattgacttatttagttaaataaatcaactataaagcttgagtgggtctacattatcacagaatttaatctcaactatagttacataactttctttgatttaaaaaaaatcgggaaaattttcctgccctttcttcaaaaaaaaaaaaaagggggcccccctttttaggaacccatttttacctcccgggtcgtgggaaaaaattaatttttttttggtgggcccccct

SEQ ID NO: 10943 - DNA, 327 bp, Glycine max
  Clone ID: PAT_MRT3847_109891C.1
tgttaattattgaatgataaataaaaaaggtaatgaataaaagcaaccctgactaaaatttagagaggttcatctagattaaaataataaataattctaaaacctttttttacataatctaaaagcaaaaaaaaaaaaaaaaattaccaacaaaatttagtacagttagtaactgattgtattccctaagtgatatctacgttttgcgaattacccttatgattttcggttgtaaagatgcttgcttcaagcaatttttttttttttttacgaaattaatgaaatattgctttttcatatttctttaaaaaaaaaaaaaaaaaaaaa

SEQ ID NO: 10944 - DNA, 198 bp, Glycine max
  Clone ID: PAT_MRT3847_109892C.1
atgaagaataagaaggttgaagcatctggtgtctcgctaagtgaggcatatgcgcttagcgaagaatctgcaaagcatgcacgtgctcagcgcaccatcaactcgcccagtgagtcatttgtctcttctggaagtcagcgcgcccagctcgctaagccaaaattcactaactcgcacttagtgcgaaaatggtgctaa

SEQ ID NO: 10945 - DNA, 794 bp, Glycine max
  Clone ID: PAT_MRT3847_109893C.1
gcggtagagagaacggtcttctacagagagagagcggctggaatgtattcagctttgccatatgcacttgcacaggttattattgaacttccccacatcttggttcaggcccttatgtatggaattatcgtatatgccatgatgggattcgattggaccacatcaaagttcttgtggtatcttttcttcatgtacttcactttcttatactacaccttttatggtatgatgaccatggccattacccccaacgcacacgttgctgccatattgtccagtgcattctatgcaatatggagccttttctcaggcttcgttattcccttgtctagaatacctatatggtggaagtggtactattggatctgccctgtggcgtggaccttgaatggattggtggcttcccaatatggagacaacagggacaaacttgagaatggtcaaagggttgaagaatttgtgaagagttattttgggtttgaacatgattttctaggggtagtggcatctgtggtggctggcttctcactattgtttgctttcatcttcgcctttggaatcaaagtactcaacttccaaaaacgatgaaatcatcccaatgattctcactctagagcttttatgcatccatttgaagcattgaataatttatatgaaaaatgcttagtggtgacgggtgaactaaatttacaattttctttttctttttttttattcattggaatcaaatttaagtatagaagtttactcccattcaaacttattattctacttaaaaagctggactccttaat

SEQ ID NO: 10946 - DNA, 114 bp, Glycine max
  Clone ID: PAT_MRT3847_109894C.1
cgtttcaccaccataaccctcattacgcacagctcgggcggactccgacgaacccgaattagtcgaattcgacaaacaaccgaccgcgttctcacgcgccaacgctgtcccgga

SEQ ID NO: 10947 - DNA, 224 bp, Glycine max
  Clone ID: PAT_MRT3847_109895C.1
atacatgacatttaaatttaagggatatatttttctttaaagtgctcactttttttaacaattttttcacaaaatctttcaatcttcttttttaaaaatataatcattagttattccttaataccttgataaattagttctattttaaatctatctcaatttccttaagtactccaattattttaattttatccttttttcaatccccttttaaccactttttt

SEQ ID NO: 10948 - DNA, 575 bp, Glycine max
  Clone ID: PAT_MRT3847_109896C.1
attttgctatgtttgcttcttgtgttaacatttaaactacatggatagatgattctccttgtcaaagtaaattgactttgttcacaatgtgatggtagtttacaaactaaactgatataaattcatattatgtaaatttatctttttagtttgtatttttatcgcctagtcatttatcagaacttgggaaatgatctacgtgttgtctttagtcttctatgcatttttgacattggaaacaataatccatgcagctacacagtttaattagcaaaaaaaaaatataattatattgatttttacaggaaaaccatcttaacctacagtcttctaaaaagattttctcgtcaaaaccattttagaaaactttttcttttaagacaattttggcaaaaaaacgtcttcaaaataagatatctataacttttattaaatggagtatttaacattttacgatggttttcgaaagaaaaccatcttagatagctacatttaaagatagttttggctaaaaatggtctttaaattctgtctttgtaaattttatttaaaaatatcaaataaaagaagatatt

SEQ ID NO: 10949 - DNA, 384 bp, Glycine max
  Clone ID: PAT_MRT3847_109897C.1
tttttgtttttttttttttttttaataaagagattcgcagttcttcaaacatctgacatggattgtggcacgatctataaaaataggtaggaaaaataagctaaagcggatattagcttcgggggaaaataccagactacaaaacatagtttgccggcaaaaacagctattatacaacatacaacacaaataaaaatcgagaaaagactaaaattcacagccattacaaaatttttggcaccgaccgcatttgcccaccatggtcactgtggcaaaatacttgccatttacaagaacaccattttcccaaattttcacgggaccttgcccaattcacattaccccaaagaaaactggccatgctggcatccatttttttaattg

SEQ ID NO: 10950 - DNA, 438 bp, Glycine max
  Clone ID: PAT_MRT3847_109898C.1
ctgcagccgctcgagcctattgcggtcgagttgtgatcgtagctgttttggactggctgcacagatgtactgatcagagcttcgaatatggagatcaagatatacagctgcaggatttgaaaacaatttcaacagcgaatgctgatgacaaccatgtctgttaatctaggtggaagtcacaggacatcgttctaatcaacttgatttcattccatttgaggtgagcccatactctggattggaccactggtatacttgcctcctcgggtactgataaaagaccacagacacttcatgaaaattttcgatcagaggaactttagttgttaaattcctgtgctgatgattacaaacaggctcatgacgagaaacataatacacagaccgtttctgtgacagacaaccccgcctattatgcatgctcttatggcttttgca

SEQ ID NO: 10951 - DNA, 416 bp, Glycine max
  Clone ID: PAT_MRT3847_109899C.1
aacataaaacaattacacattccagtttattgtgccaagactgtactatcagaattctagacgatacaaaaccctcttgaccactttattggatgactaaatgactgttttataacatcctatgctctaactcaccaaagttaccaattctgagagttggaaagggaaccaagaatcaaagatgcacatctacgtggggtgaggaggtcccatctaccagaagggtttagcaaaaatgagggcacttggagaggagattggcattcctatcgaggtttatggacctcgggcaacaatgactggtgtgtgcaaacaggctatccaatgcatcactgctgctgcttaattatccattcttaggccaatccctttttttacatgtattcttcatggctagttagaagagattcgtgatt

SEQ ID NO: 10952 - DNA, 319 bp, Glycine max
  Clone ID: PAT_MRT3847_10989C.1
atggggataacagggaaatggcaatgcccacagaaacgtaaacctgatgttggacctgctatgaaacaacttaggctcgatcgctgggttcgtagagtttgagtttgagagaatattttttacttgtaatagtgttgtaacgcagatcaaatctcttgatcactggatagaaacattttaattgcattgtgtgtgatttccattctattattctagtttattattgaattccttgaaaggaaaggaaaatgcccaaaaaggtctggttagctcaatatgaatgaattaggaagagttttatatacacctaagaaatcag

SEQ ID NO: 10953 - DNA, 1407 bp, Glycine max
  unsure (1)..(1407): unsure at all n locations
  Clone ID: PAT_MRT3847_1098C.1
cagccacggccgcggcgtgaacgtccacatcgcttatggtgcgtgcatcaccatacagttcgtcgccaacgtgatcatccctgggttgcgccttcgtgactgctacctcgccccgctcgccccggttccgagcgcgccgtcgcagtgtgggggcacgacccttgctgatggggatgggatctccatctttggctcgagtcacattttgattgatcataacttgctgtcgacttgcgctgatgggcttgtggatgctgttagggggtccactgctattaggggctaaatcatcttctttggttggtaccatcacctctggagctggtgttcttaactgccgcaggggtgccatgtgttaatatcaaacacactactacaaccaaaggagattaaactcataatacttgaaaaaaatgaggcagagaaaagcataaaggaaaggaagaaagaaaaagttttcattctttttcctctttttattgcgttgttataaatgtactactgattgagtttgcacatgcagcagcaactgtgatcacacccgttgtttgtcttctcactactagttagatatatcccggggggacactgtacattttatttgaactgttatcaaattgataacaatggttgcttgcttaaaaggcacttcttcccactttcacaatccttcacttgtgcgagagatttccccgtaattttccaacggaaacaaaatctattctctcttccccctagtttctttctgtcttcttcccatgtatcctctattgtatggtcttttgagactttgtccactagtacacctcaattatgtgtgtgtccttcatttagtaaacgcttgatttgctcctaatgaaatgggcaaaaaagggagaaaaaaaaaaaaggaatgtattactgaaatagttggttgtgtatttgtttaaatcagaatattatcatcttttacttatgcctttgttatgttgatgcttttccttttcaagaatatttttagcatattttttataaataaaaatgatttaatttatgagtttaaaaattgaactgttatnaaattgataacaaatgattgcttgcttaaaaggcatttcgtgccactttcacaatatattgtccacttgtgcgagagatttccccataattttccaagggaaacgaaatatattctctcttccccttagtttctttctgtcttcttcccatgtatcctctgttgtatggtctttgagactttgtccactagtgtacctcaaattatgtttgtgaccttcatttagtaaacgcttgatttccccctaatgaaatgggcaaaaaagggaggtaaaatgaaaaggaatgtattactgaaatagttggttgtgtatttttttaacgagatgataatattctgctagatcgcga

SEQ ID NO: 10954 - DNA, 373 bp, Glycine max
  Clone ID: PAT_MRT3847_109900C.1
gggccgcaaaaatataaaatttttttttttttttttacaaagggaacaaatcccttaactaaatttgtaggattaaaagggataaccgtataaacttaaacaatactatggtgccgtaccataatggaaaaaaattctggaaaaaaaagcactcactcggcaatgaaaaaaaaacgatctacttgaaattggtatttcgtcacaaattctacaaacaaaaaggacgtaaccagaaaacgttaactcattcgcaccctaacagacacctaatgcacacacactgcttaaaacgtggatcaacctgtcaattcaggaaaggtacctgaaggccactgataaatacttaggctgaggtaagtgagagcttttttta

SEQ ID NO: 10955 - DNA, 392 bp, Glycine max
  Clone ID: PAT_MRT3847_109901C.1
cactgtatgacgtcctccttctcttctttgggggggggggggggaggaaactgaaagagtaggaaatattgggtaaacgtggaacatagaatgcgttgactgtgcgcaagtacaatgtaaaccaggcctttccgtgggagtagattaacatgaagcggttaatgagtaatggacagagtatattcaaaattctctatttaaagtgtaagctgtaaatgtcgcgccagtgttaccggggggttatggcaaaatgggacgacccggtaatcccccgatccaacggactgttcctcgatatgctggtactattaactgttgatgtaaggtgtaacactgccggagagggactaacatctgtacattgctagccactgttacctggaagggcattt

SEQ ID NO: 10956 - DNA, 397 bp, Glycine max
  Clone ID: PAT_MRT3847_109902C.1
atcatacatttgtttgtttttatttttaccaaaaagttctttttctccactttaaaggagggatatgtaggaggtacagaagggcttgccactgattataccataaggctgcgataccatgttcaaaggctttcctcccaccatattcacctattacttacagtttcaagatggcccaagttcaaaaaagaagacaccgtttgatccgcgaaccatctgtctacctaccaataatgccagaaccataaactagaacctttggggcatatttttgctttgaaatttcaaaagcagcagattcataaaccttatttcacacgcccatgggttttccctacaaacttcccccttttcctcaggggtgaaggcattctggatgtagaatgttttgcaaatt

SEQ ID NO: 10957 - DNA, 710 bp, Glycine max
  Clone ID: PAT_MRT3847_109903C.1
aattcggctcgagtcccacgccacggtgctcctccttgcacttttactgcgttccactgttcttcatctttcttctggtcaatggttgctctacaattattctatttttcccattcagtattcttcactaggtgcaagtattcctcttagcgccaatcttcagcaaatttgaatacttttcgcggattcatcatttttaattttgtttgggttctgaatactcaaggggttttaaggatatttcgttactgggtatccattttctcaaaaaaccatgtctttgttccttaaagctttgcctttgatggccttccgcacgaggccatctctggtgtttctgcgcagagtttccaacaccattccattgtcactttccagaaccagaaccgtgtattccgcttctgcttcaacacaaccacctccttctgcttgtgcttctgaaacactcacttccagtgctaaaccacctttgcccctcagtgaaccccttgagtgggtcaacaggactgcattttgtggcgaattgtcttcaaatgatgtgggaaaaagtgtccagctttgtgggtgggttgcccttcacagggtccatggtgggctcacatttcttaatctcagagaccacactggcattgttcaggttacaacccttcctaatgaatttccagatgcccattctgctatcaatgatctgagacttgagtacgtggttg

SEQ ID NO: 10958 - DNA, 428 bp, Glycine max
  Clone ID: PAT_MRT3847_109904C.1
ggtccggtcatagctctaccatcttcagaatcgctccggtcaactctacttcgatcccattccctcaaaggacgaaccctatgcggaacttcttggctttcgctgaaccaattgcaagaaagcgaagggcaatgacaacaaccttcctcgtggcctgaccaaggatcttcgtgccaaatatgatatcacctcgaataatgagattcttgcggaggacaagcacaagcctatttaagatactttcgctcattgtttacttttccgttttgctgatactcaacgatgtcattttgtatagttgagattgatttgtagaatttatgaaggtttgttgtttatcattggatcatcgagttttatttcgcttcaagcactacggttttaattcttttacactggtttttttactatgttcttcacttcttcag

SEQ ID NO: 10959 - DNA, 441 bp, Glycine max
  Clone ID: PAT_MRT3847_109905C.1
gttattctttttttttttttttttttttttttttcccttaaagattctttttttcattaataatattaaaacaagtccattctccagggtttatcttcggcatatttcatttaaactaacaagttaacaacaaaaacagaggaggccctccaacaggggttaaatggccctacaaggacagaagacaactaatatgccccccctacacatatcatggattaaaaaaaatgttacgcaccactattaggggagcttgtaaatgtaagttgctccaaaaaatccagctgggcccgagaagaaaataaagatccagcagaagcatcatctttctgtgtaactccagggtcagccccatgggttggagcacatgttgggagcaaagaggaaaaaggatgatggaatttgatggggtgggggggtttatgagccaaaaaggaaggc

SEQ ID NO: 10960 - DNA, 434 bp, Glycine max
  Clone ID: PAT_MRT3847_109906C.1
tacggctgcgagaagacgacagaaggggtaatatgcattgtactgtgggactgcgttaaacttaaaccatgcaagacagttaagtactccatcatccctgttatcggtgaataataaagtaatatgcactgtggcacttcagattttcaatcaattttttaaacaattagttaaataattaagtatcatcgtagaattataatgaatagacaatttttttatagtttgaataaattaaactttaatattcgcattcacgaagcatgcattaattttaaaatattattaagaatatgccacaactaaacaaataaaaatgtattaattaagcaacaaaactactgtatacattaatagactgagattgttctaattttgctaatgatctcaattttgaatcatatatatgcagttaaaagaggatgaagatatcc

SEQ ID NO: 10961 - DNA, 347 bp, Glycine max
  Clone ID: PAT_MRT3847_109907C.1
agtgtgctggaattctcccttacgatcggccgccccttctatgcactcatatataatacatcatatgtagcatgtttataaggcgtaatctgccttaatattccatatgtggcttgtggtggggctaatttttgaaattttcctcatcttatgatcatatactggcaaaggaaaaaaattttgcgatgtaacttttgaccatttacctgtctcacttcatgaaaaaacttaaataaatatacatttaactgtcgttcttacctacaaaaaattaaaatatcccatatacttcctctaaactattcttattttataaactcactttgccgtgatttataaaacttcat

SEQ ID NO: 10962 - DNA, 484 bp, Glycine max
  unsure (1)..(484): unsure at all n locations
  Clone ID: PAT_MRT3847_109908C.1
agctttggaaagggaatgcccaggagttgtttcctgtgctgatatcctcgttctctctgccacagatggcatcgtttcgctaggaggtccccatatccctcttaaaacaggaagaagggatggtcgaaggagcaaatccgatgtggtttcatcatttcctcttatatcacaatgaatccatttcttgtcactcttgacacattttggtgccatgggaattgacacccccggcatagttgcattgcttggagcacacatcgttggtcgaacccattgtgtgaagttggtgcaccgcttgtacccaaagattgatccatctctgaaccctgaccacttccctcacattctgaagaagtgctccgatgccatttcataccctaaggctccgcagtacatgacaaactatccctgcgtctccctgattgtcgacatcaattactacataaccatataggtctatattggcgtgttgatacnagtacac

SEQ ID NO: 10963 - DNA, 175 bp, Glycine max
  Clone ID: PAT_MRT3847_109909C.1
tgatatgcgtctgtggtgtccatgcaacacccctcctacatggctatatggcagtttgccaagagatatcggctttgatcctctatgtcttgcatctgatcctgagagcctgatatggaatgatcaagcagagcttgagcactgcacatgggccatgcgaggagctgctgcatta

SEQ ID NO: 10964 - DNA, 319 bp, Glycine max
  unsure (1)..(319): unsure at all n locations
  Clone ID: PAT_MRT3847_10990C.1
attcccgctggacgcacgcatccnctggatgatcccaacactttctctaactggattcacaggatgctgaaacttgtactggtcagttttgaatatgcgggtgaagcacatgctcacattcctcctcttgaagacgctgatgcatatgctgaaggtatcaagatcgaagaagttgattaaatctgacttaattgcctgttacttttttataaacaatgattgtagaaacaaactttttactatgttttatgttttttgaattttcgaaattttgcaacgctggctatttagatgccgcatgtattaattactttatcgt

SEQ ID NO: 10965 - DNA, 215 bp, Glycine max
  Clone ID: PAT_MRT3847_109910C.1
agcctcaaacgtaattaaattaatctgcaacctgagagggcaattttcacacatgaatatcttactcaaaatgactcttggacaaaagctcctaaaaagtgggcacaatgtgattaacacccctctggatggccacgttctgatgagagaaaagaaatctcttgataccatccaataaaagccattgttcttttgccccagggtggatatatcaa

SEQ ID NO: 10966 - DNA, 1579 bp, Glycine max
  unsure (1)..(1579): unsure at all n locations
  Clone ID: PAT_MRT3847_109911C.1
ccctcgagccgaatcggctcgagcggctcgagctgaaatctgaagctaacttaagggaaatgagatggccaatggcaacactagtcatcgcttcaagctcttgcttttccttctaactctgcactcttcattcgctgagattttcttcgaagagagattcgaagatggatggaagagccgttgggtgctatccgattggaaaaggagtgaaggaaaagcgggtaccttcaagcacacagcaggaaaatggtctggggatcctgatgacaaaggtcttcagacatataatgacgccaagcattttgccatatctgcaaagatacccgagctaagcaacaaggacagaaccctggtgctgcagtattctattaggtttgagcaggacattgaatgcggtggcggttacatcaaacttctttctggttatgtcaatcagaagaagtttggtggtgataccccttatagtttgatgtttggaccagatatatgtggttcacagacaaagaagctccatcttatactatcataccaggggcagaattaccccattagaaaagatctgcaatgtgaaacggataagttgactcatttctatacatttattctaaggcctgatgcctcttatagtatccttgttgataatcgggaaagagattctggaagcatgtacacagattgggacatccttcctccaaggaaaatcaaggatgtcaaagcaaaaaagccggctgactgggatgatagagagtacattgaagaccctaatgatgtcaaaccagagggatatgattcaattccagctgaaatccctgatccaaaagccaagaagcctgttgaatgggatgaagaagatgatggactatggaagcccccgaagattcccaatccagcatacaaaggaccatggaaacgcaagaaaatcaagaaccccaactacaaaggaaagtggaagattccatggattgataacccagaatttgaggatgatcctgatctttatgttctcaaaccaataaagtatgtgggcattgaagtgtggcaggtgaaggcaggttcagtttacgacaatatcttaatttgtgatgacccacagtatgcaaagcaaattgtggatgaatttatggctaataatagagaggctgaaaaagaagcttttgaagaagcagaaaaagaaagaagggctcgggaagaagaggaggcacagagagcaggagaagagggtgaaaaaaggaggaaggagagggaacataaatatggaaataggaggcatcgtcgaaggccggatccccgtgatatggatgattgccatgatgagctttgaagactgcaataagggtagttgtttgaaatcagctggtctgcttctgctactgctactgtattcaaaggatggaatttaaactttctctattctgttaccgaaaggggggaaaagaaagaaattattttttatttcttcgattattatgtgacagctggtctgctactgctactgtattcaaggatggaattaaaactttctctatctgtaaccgaaaagggggaaaagaaacaaatttttcnnngtacnnnnctagca

SEQ ID NO: 10967 - DNA, 795 bp, Glycine max
  Clone ID: PAT_MRT3847_109912C.1
tcgcgcacgcgtggggaaatctgaagctaagtttcgttgccactgaggaatgaaatggccaatggtaacaacattagtcatttcttcaagctcttgcttttccttctaactttccactcttgtctcgctgagattttcttccaagagagattcgaagatggatggaagagccgttgggtgctatccgattggaaaaggagcgagggaaaagcgggtaccttcaagcacacagcagggaaatggtctggggatcctgatgacaaaggtcttcagacatataatgacgccaagcatttcgccatatctgcaaagataccggagcttagtaacaaggacagaaccctggtggtgcagtattctattaggtttgagcaggacattgaatgcggtggcggttacatcaagcttctttctggttatgtcaatcagaagaagtttggtggtgatactccttacagtttgatgtttggaccagacttatgtggttcacagacaaagaagctccatcttatactatcataccaggggcagaattacccgattagaaaagatctgcaatgtgaaacggataagttgactcatttctatacatttattctaaggcctgatgcctcttatagtatccttgttgataatcgggaaagagattctggaagcatgtacatggattgggacatccttcctccaggaaaatcaaggatgtcaaagcaaaaaagccgtcagactgggatgatagagagtacattgaagaccctaatgatgtcaaaccagagggatatgattcaattccagctg

SEQ ID NO: 10968 - DNA, 600 bp, Glycine max
  Clone ID: PAT_MRT3847_109913C.1
taaagtatgtgggcattgaagtgtggcaggtgaaggcgggttcagtttacgacaatattttaatttgtgatgacccacagtatgcaaagcacggctcgagtgaatttatggctaataatagagaggctgaaaaagaagcttttgaagaagcagaaaaagaaagaagggctcgggaagaagaggaggcacagagagcaagagaagagggtgaaagaaggaggaaggagagggatcataaatatggaaataggaggcatcgtcgaaggccggatccccgtgatatggatgattaccatgatgaactttgaagactgcactaagggtaggtggcaggtgcgtaattacaacactaaaatgcatctttgaagttgtgaattgtaggaccaaagctgcaattgcactgaccatgccgagctgtactgaactgtaacatctgaaatattagcgtcagtcattatgttcaacttcatttcttttcgattattaggtaacagctggtctgcttctgctactgctactgtattcaaaggatggaatttaaactttctctattctgttaccgaaaggggggaaaagaaagaaattattttttagtacatt

SEQ ID NO: 10969 - DNA, 200 bp, Glycine max
  Clone ID: PAT_MRT3847_109914C.1
cccacgcgtgcgcagacgccggggaggagatcctaggggtcacagaagtgcgtgatcctggtatatacaaactgaggccgatgctctccaaatagttacaacaatcatggggcttacaggctgctggatgctcatggtgcactttttgctgaatggcacaacaccagggcaaaagccttcagcatcttaacatacgtacg

SEQ ID NO: 10970 - DNA, 435 bp, Glycine max
  Clone ID: PAT_MRT3847_109915C.1
ctgggggtcggccttgtgcttgatttgagcatatatatgactctggtgttgtttgtgattttggaaaataaattgcacacttacatttggacatcacacatgagtgggggctcttccaacttaaaagcggaggataacattgcccatgacgcgacaagtgcacactctaataatcagtaaacatacatcttatagcatacaatactacaatgacattaatattatatgcgaggatttgagctaaacagatcatcttaatgaagggaagccgacacccacaaacattggcttgatttttgttgatgttggacctcgccaccttgatgaaacaagaatccgctgatgggatcacttgtactatgtgggagtggccttgatttcgacctggtggtgtgatgagcttgaagagctgctccgatgaatggccccatccaa

SEQ ID NO: 10971 - DNA, 293 bp, Glycine max
  Clone ID: PAT_MRT3847_109916C.1
gccgagcgtccctagaaagaatccctacccaaaatgccggatgctcacggtttgacatggcgaaccagagattacttctctcagaccttcatgaaaaagggtaccatcgagcatcacacatacctaaaaacctaccacggcagaaattctggcaacttcaaaggtagcggccccattcaacatggaatgcctcacaaggtctaccattgcccgaacctgtcgcgtatggaatgtgaccaaacgtgctgcctgggtcggattcatcacgcaggtctgccacagaattataaggg

SEQ ID NO: 10972 - DNA, 238 bp, Glycine max
  Clone ID: PAT_MRT3847_109917C.1
gaggaagagcacgagcagaaggaggatcacgaatggcatcgcaaggaggaaaaacacggaggaaagggaagtgaagaggaacaagatgaacgtgaacacccacgcccacacgacacacaatagaaaaaagtggaaaagcacgaatggcaacacaagcaggaatggcaccaaggacaggtaagtgaagaggatgtagaagacctagacgaggatgaggagcaagacagtgtgagccaag

SEQ ID NO: 10973 - DNA, 269 bp, Glycine max
  Clone ID: PAT_MRT3847_109918C.1
ttagctaaaagacaaacggatcgtgcctggttagcattcaaggcgaagagaaaaaacattgtctgggccaagctcactctgttagggagctaagaataatttggcgtttaacccctgacatctctggaagaggcacccattcccatcaactccactttacctacaagcttttctgggtctaccccttatcttacagcctttttcttgagaaaacatttggtaaatgggtggcatctttttgggaaataaatggctaaccaagaatcaag

SEQ ID NO: 10974 - DNA, 282 bp, Glycine max
  Clone ID: PAT_MRT3847_109919C.1
cgggaacaaaaccacttgttcacccattaagctttcaagagacaaactgctttgacaaatgggatccactgttcttgcggcggttgtcgttctcctctccatcaacattcttttcatttccatggtcacgtccagcagccactactatccacagccccaatcttcttacgtcactgcacttagtatacgacctatttgtctggatctgagtatttgcctcaatatttgacgctggtcactaggaaccgtggatgatggttgtgccctcagcggtggtcatgg

SEQ ID NO: 10975 - DNA, 266 bp, Glycine max
  Clone ID: PAT_MRT3847_10991C.1
ttttttttttccggagagaatggtacatgatgcatggcaaatattgattcaaacttaagcaggttcgcatataaagcctaccattccaggaaacaactcttctggttaactattggcctaacaaaggaagaaacagggggaacacaatatgcactactcaattcttcaacaagatgatgatgtgaaagacgcataacctctgcaaaaattcttccagattttttatgcaaccatgaacttagctaaacctgacactctagccgtct

SEQ ID NO: 10976 - DNA, 423 bp, Glycine max
  Clone ID: PAT_MRT3847_109920C.1
atcacacaaaaagaatgaagaattaatgctgacgaatcatagtacaaaagtatacacgtgcgtatctgtatagaactacccaacaaccaaataaaccgaaaaccccgtccaaccaaaaatcacacgtgcaatccaaacacgaagaagaacaaaaggaaggtgaaaagcacagcgcccgtgactcccacgtgcctaacaccaccgtcgctcgtgtcgctctgtcgcgaagacgtagcaggagttcccgtgaagttagggttggaaccgtagagaacctgaatccctagaatatcatcttcattgagctccaccttccttgttctcgcggttatcgtagggtacataatagcatcttcgacagaagagtgccctaaccctagcaagtgcccaatctcatgcaccgcgacggattcaaggtccacc

SEQ ID NO: 10977 - DNA, 963 bp, Glycine max
  Clone ID: PAT_MRT3847_109921C.1
ggaaaaagaaaacatttgaaatatcgagagattagagacagcgccgcctccgaagatcaaacttggttgagaaaatgatgtgccgtaggacggagttgtatagagagttgaagcagcgtatcacacatcttcgacatttctgcgacacgcaacaaaaacatcttcaagatctcgaattgctcaagtgcttcaaatctgagattcaattcgagcttgcctctaatcactttcagaatgctcgaagtgattcctccttaggggactttgtggtggacccgaactcacccagttccaaagatgtggttttgcgaagaaaattcgattcgggtgaggaaattgcaatttctgctattctgggacctcccaactacgtgaaagaccttgtttttccaagggatgcttttgtgaaagtttgtgtgaaaaagccagcattgagctccatgttgcagtttgactgtgatgtttatgaggaaactgataagggctctgattttgacatctacaatgcttattatctcagatcacctacatgtctcagcccttccatttacagaggccctttattccgcacattggatgatgagttgcaagatgctctcaaggaatacctgatagccaagggcattggggtaagcctgaccaatttccttctccactacctacacaaaagagagcatgagcagtacatgaactggttgaagaaaggtgaagcagcattcgtggcaaaagaagggtcattgagggaatcatcagagttacattcttgattaatgtttactcatattttagtcaatattttttagagttcggaaaatgatttggttgtctgataagtaaactgattagtaaaatgtagaatcatgtttgttactttcttttgtaaatgatatgcatctcaaattttgtagaagttagataagagaacttttataaaagttaagtgtataagtttgattttaaaaa

SEQ ID NO: 10978 - DNA, 466 bp, Glycine max
  Clone ID: PAT_MRT3847_109922C.1
atcttggaaagatcattctccttcctaaatttggtgagcttcctcaatgatctgttgttggagatacatttccggtaggctgcgcctttgataaggcaaatattcatgacaagtaatccaaggacaacccggattccgaataccctgctaacaacactaaaaaggggatctacgccgaaggatgtggactagagaacgtaacgatgtcttgggaacatgatgaatacatgtatatggttgctaaggaaaatagcaccactcttccatctactggattgttcattatcagatttcactctatctatttccctggaaaggttagatggtgaaccatttgaggtcaaggtcaaggctttgaggagattggcttttagtaatattctgggcagcgagcaatttactaaatgcacttatgtattcacttgcaagatgcaatcttcaatagtaataaatttcatatccagac

SEQ ID NO: 10979 - DNA, 454 bp, Glycine max
  Clone ID: PAT_MRT3847_109923C.1
tacggctgcgagaaaacgacagaaggggatggaaaagaaaagaaaggaaattaagaggggtaaacaccccctaagggaggaacacggtacctgagcagcaggtgatgaagacccaacaggggcatccagagatgcaaagtctcatcactagccagtagtgcctgtggttctcaaaagacagctgagggaagaaaggtggcttctcttagaacatgagaagtattggcggacagtgccttcgagttagcgccatgatgtctgcaatgacagcatgtaaatgaaaggttgtggacaactctagaaacctaaagccacgtgaccctccatccagagtgagaacctctctttagtagctaccatgactcatacttgaaaactactattgattatctatgtttacttttcttgcttgattattgttcagtttttcaatatactaatgtgtacctacgtg

SEQ ID NO: 10980 - DNA, 774 bp, Glycine max
  Clone ID: PAT_MRT3847_109924C.1
ggagatgtgcaaaagcacagagaggtgaaaatgttgagaagcttctctcccagaaagttcctaacctcactctcttgcaagaggctgtacacgagcgaaggagaggccgcacgtgcgatccttccgaagcttctggtggttcagccgcgcgtgcgcccggagaagctgttgcaggcgaagctgaacgaagctctgtgcctcgcgaactccctcgaagaccagcgcgatggctacttccacaccgatttcttcgacaaaccgttgccacctcacgtcctcgtccagaaccgcctcccacgcgccgacacctattttggccgtggaaccgtcgacaacatcaaggttcacatcgacgccgccgccgaatctaagggtgacgtggatgcggtttttgttaatgctatactctctggaattcagcaacggaaccttgagatggcttgggggaaacctgtgttggaccgtgtgggacttataattgagattttcaatgctcatgcctttaccaaggaagccaaactccaggcggaactcgcagctctgtcctacaagaagaccagacttgttcgcattcgtggccctgatggtcgcaatacatttggggcttctggagaagctgaagttgttagcgcccgagggagaggaagtgggggacaaggttttatgagtggtgctggagaaactgaacttcagcttcagcgacgaagaatcttagagaggagaaattatctattatctcaaattgaagaggtccgccgcacccgggctttgcaa

SEQ ID NO: 10981 - DNA, 362 bp, Glycine max
  unsure (1)..(362): unsure at all n locations
  Clone ID: PAT_MRT3847_109925C.1
gggggnnnggaaaggaagcttggattttgttcatatatcatcacttttacaattggttatttatactagtttccctactaacggaatttggccttttgggctcagggaatattttctaaatcattggctaattctattgggatcatgctggcccctggagtaccaacagccaacaattctgcaattggggatttcctttgcgcaaccaggtcagcttcctttttcaccaactttcatatgtaatccttgagggaagagggccttgtgatgacccttttgggttttcctactgactgcacccgtgtcttgggaatgcacccttgtttcgaattcttgggctgctattgctggtttcacctcct

SEQ ID NO: 10982 - DNA, 283 bp, Glycine max
  Clone ID: PAT_MRT3847_109926C.1
ggcagctgcttcccccatggcaaggcaacttaagtccaccttcactaggactcttgtagctcccaagggcctctctgcctcttcaccacttcacctttttttttctagaaggcaatttagcttcactgttaagggcattcaatcctaaaagccaacctatcaagtgattcagccaatcaacggtgacccattcattggaagcctggaaaccccatttacatccagccctttgatcgcatggtacttgtccaacctgcccgcatacaaaacccgcagtgagccc

SEQ ID NO: 10983 - DNA, 641 bp, Glycine max
  Clone ID: PAT_MRT3847_109927C.1
gacaacatatttctctaagtttgatttatacgtgaatcccaaattacacatgtgcaatgtctaatctagaaccccccactcaaatcaaaagggaaactatagtatatcaccaacttaaggagtgggggcagacaaatagaattgcgcaaaccttagctttaacgttgggcaatctaaatcatgggaatttggacttagaccgtaacacgaagttgggactagtcaacatctctactctaccatttcattcccacgtgatatagtggctaagttcggcttatattatatcaatctttttttcttttctttttttgcatacaatcttcctcctatccttgcgatgtttgtggatgatgccgagttatatcaagggctaccgagaatgaaaaaaaaaaacaaaaaaaaaacctagtcttagtttaaaaaccatgaagaatggaagtgagaaatcgcttgtcttctcaagaaattcatcacatgaaccccttttttaacatcaacacaaaattaagaaatcaaatgaaccctgtttttaacatcacaaaaaattaaggggataaacagtctcttaactgtaatggtttatcattgggttacatacttttactttagtagtgaagcatttgctttttatgatgaac

SEQ ID NO: 10984 - DNA, 491 bp, Glycine max
  Clone ID: PAT_MRT3847_109928C.1
aattcggctcgagggctgcgagagacgacagaaggggtttccttgcaggattacaaaggatggcatggctgagaagacacaccacttcacattgcttgatggggagatgattattgatacattgccagattccaaaaagcaggaaaggagatacctcatatatgatctgatggcaatcaatggagtatcagtaatggagcgaccattttatgaacggtggaagatgctagagaaagttattgaacccaggaatcaggaacggttccagagtagaaatccttactatagatatgacatggagccattccgggtgaggagaaaagatttttggctgctctctactgtcacaaagcttttaagcgaattcattccgaaactctcacatgatgcagatggtctcatattccagggatgggatgatccttacatacctcgcactcacgaaggcctcttgaagtggaaatatgctgagctgaattcagttgattttc

SEQ ID NO: 10985 - DNA, 195 bp, Glycine max
  Clone ID: PAT_MRT3847_109929C.1
gatggatatcttcagaattcggcttaagcagtggtaacaacgcagagtactttttttttttttttttttttttttggttgataatgataccatttataaatatatatatatataactaactcaacacattacccccatttatagtggcaatgattcaaacattaaccaaacccgaaccccatccttaaccccaaa

SEQ ID NO: 10986 - DNA, 340 bp, Glycine max
  Clone ID: PAT_MRT3847_10992C.1
ggcccattgagcgatgttttaggtttgtgatgtgacatgaacaattctgaatggcacacaagatactcctttaagtttgcagctgccctgttctaaccccgggaatgatgaacatatcctagtcacaacattttccatagacagtcattttagctaactttggcatttacagcagcatttttgcttacctacacccttaattcatttctgaaactactgctgttttaccacctatattatattctgcagatgatttcttgactaccattgttaacatgcacgtaccggattcagtcatacttatggctaccattactcccgggacagtgttgattcttct

SEQ ID NO: 10987 - DNA, 650 bp, Glycine max
  Clone ID: PAT_MRT3847_109930C.1
gtggcttatgacaatatgagcccctccgtcttcctcctgtggcttgtcattatttctgtcctcgcccactctgccctagcttcaatccctctagcttatttcttagactgtgggggcaccaaagaggtaacggtagacaatctcacatacattcctgatgaaagttacatcaaggtgggcaaaaccaccaccatcaacaagccagacttgttgccaatactctcaacattgcgatactttcccgacacgtcggctaaaaaatattgttattcattgcccgtcattaaaggcagcaaataccttgtgaagacaatgtactactatggaggttttgatggaaggaataagcagcctccggtgtttgatcaaatcattgaagggacaagatggagtgttgtgaacaccacagaggattatgccaaaggtcttagttcttactttgatattgtggtggtgccatcggggaagactttgagtgtgtgcttggcaaggaatgcacacacgggtggcgcaagccccttcatttcggccttggaggtgaagaggttggatgcttctttttataatcctaccgactttaacaaatatgcccttctaaccgttgccaggcatgcctttggagctgaaaaatcattagttttccagatgac

SEQ ID NO: 10988 - DNA, 459 bp, Glycine max
  Clone ID: PAT_MRT3847_109931C.1
cagacgacagatgggggaatcggcggaagaatacttgtgaggcgagggtaaggtcccgtagtgttgcgtcgtgtcctgcgctgatcctctgtttctcgtttttgtgttcagaccgaaccctagctccgcatcgcaaccatgtcgaccaagcaaggtggaaaagctaagcctttgaagaaacccaagtctgataagaaggattacgacgaggtatctcgttgaaatcccctttggagttatcttgttttttttaatattctatttatcgtggtcaaagattagaatttccatgcttgatggacttcggttttagaattggcaatcagtttaaggaagagataacacaggattgagatctttaggctcggttgaattattaggtgttttcaatatgaagctttgcaaaggtttactacataatcatttaatgtatattgctactattcttgctgctgcaat

SEQ ID NO: 10989 - DNA, 242 bp, Glycine max
  Clone ID: PAT_MRT3847_109932C.1
ggttgatccatgataattcttctgggtaaactttcaatattgagggagtaaagcacttgttaattacttgctgatctctctcttttctcactcttggacacacgcacacagaggtcaggattgtggaatgtgaacgctgtaatacttgatcttaccacagttagtaagttctcatgacatacgagattcactaatcttttttgatacatgaagggcccaaagggctgagattcactagtcta

SEQ ID NO: 10990 - DNA, 346 bp, Glycine max
  Clone ID: PAT_MRT3847_109933C.1
gtataatttgtccttgtcagcaactagggtagggttcttactaatggccattgccgccgccaaacccaaagagtagaagaaacctacaaaaggaatcctctataaacaactccgtttgtcactcgtgtcttgcgagcgggaaacggcggctttagcaatcactccctcgtcgttttcccccgttttctctcccttttccccgttttgcgttttggattcatttctctctatcttctgctgatttatcttaaataaccgctctctctctctctctctctgagactgagaatccgatccttcgtttctgaaattcttcccaaaatgaccaaaaccttcctcaacattt

SEQ ID NO: 10991 - DNA, 416 bp, Glycine max
  Clone ID: PAT_MRT3847_109934C.1
gtgttttttttttttttttttttttttttttttttttttttttttttttgggcgggggggttctcggatatctatccgattagcaggcttcaaatttatacggaaaaccccgaagggggataatcccctcctttcatttttgaaacccgagcagacctttaaaggggggggggcgcgcttacaaaaggggcgggaccctttgatcctatttttccacaaatctagaattaaatttctggggcctatttggattatcgagcactttacttttcttttcggggcggggggattaattaatcttacccgggtacccatcctcggtataaatatggcttttattttatggttaaaagcattcttcccttaaccaacatcgtggttttaagggggacccgggaacgggtttccctttgatt

SEQ ID NO: 10992 - DNA, 691 bp, Glycine max
  Clone ID: PAT_MRT3847_109935C.1
ggctgtatagaagatatcatatagaaaaattgcatactatggcttttgcagttgggaaccttttctctaacatctgcaagttcaagtgtctactagcgaaaaaatagaagttcaagaaagctcaattcatggagtaaaaaatgccgcatggaattagctcttcacagaaaggccaaatcatgtacaaaccataatcagtagacagagctaaaagttcccttcccacattctccaactgagatttggagtatttctttgccagcttggctttgtcggcaacagagacgtcgtggaaccagatgccaattcttgctcaaatgttgcactgctacctggatctctcccacattgcgcagaggggggaggtgaggaaagcataaaattctctttttgaaatcatctttatctctaccccgaacatatgaaccccaagaagcattaccctctcttctagtatctttcaagaagaatcgagtgggccctttacaaacagatttgtatggttccctggcatcaaaatcaaattcatttgtttgactaataccattccaagcagagtatgttctttcagagcgctccagttcttgaggaaaaacaatgttaggcaggacttgaacgacataaccaagtgacaccgaaatggtagatgccgtgcatggtcgtaacatattgaacgctgaaaaagctttgg

SEQ ID NO: 10993 - DNA, 504 bp, Glycine max
  Clone ID: PAT_MRT3847_109936C.1
ccctccccccccccccccccccccccccccccccccccccccccctcctctcttttttttttttttttttttttttttttttttttttttttttttggcccccaaaaaaatttttttttattcttacataaaatttttttaacaagcataattacaaaaacaaagggggggcccgttccttttttaacaataggggggggcgggggggaaaatttttttctttttgggcattaaagggaacatgggaaaatttgattttgcaaccccttgataacccgttttttttttggttttaaatcggaacccctcccttaacccccccctggtttgttttggctcccggctcaattgggagaaagggcccccctttagcggaaaaatccccccccaaaaattttttggggggtttgaaaaacccccccaaagaaaatttgggctacaggcagttacaaaccaaaaatgggactcaatttcatttttaaacggacccagttgccctccggc

SEQ ID NO: 10994 - DNA, 647 bp, Glycine max
  Clone ID: PAT_MRT3847_109937C.1
ataaaatgtataaatatattgtgcaaaaagtaagtaaaggccaatttctcgtgtcctttttgcctttgatcatgtatacaacaacctaatctatctaccaacattggtaattgcgtaaaccatgtctgtcttgtaactttgtttagtcacaggtcaaactgaaagccgtgcgggccaattttctccgaaccggtcagcaagggaggctcgaccggtctctctggctcctccaaaacgtgagcttctttatctttttccttatgcttccattcagaaatgtgaatccttgaataaataaatgcacccaagtagatccatgcaacttattttgtttttacataatcatacgtagccaccattcattaaattacaattattcctgagacctgaacacacgtatcttcaacgagtaaaagtaaacatataatgcaagtgaagcttcgtgttctgagttccatttttgtctccctgctgctatacctgccagtccaacacgctccccagtggcttcaatttcctctttttcttgagtagtaactcttattttattctggacagcaaaattcttgcagacagaggagggtacatatattggaacaccaatagctccaatccttgtgaatggaaaggaatttcatgcagtgcta

SEQ ID NO: 10995 - DNA, 399 bp, Glycine max
  Clone ID: PAT_MRT3847_109938C.1
ggagaatgggaaatagaccctattctctcagcaaattaaaagacgacagcctttgatttgcatgaggagaatggggtcacatgagaaatcaaacaagataaaagtggaagaaaaaagagggtgagattagtaaggagtgtggataaaacatgtactccaccacccaatcagaactcagagaaatcctactctttcaaatccgtccaaatccttttcctttcgccacatctcttgcaccatttccacataggcccaaacccaaatcaaaacccaaacattcactaagaaagaaagaaagaggttttaatttttttagcttatgcacaccaactaactcctcctaacttctttctcttgggttctttttcatttaattggttttaaagacaccaacccaat

SEQ ID NO: 10996 - DNA, 380 bp, Glycine max
  Clone ID: PAT_MRT3847_109939C.1
gaaaatgttatcagttaaatttgaaaaaaaaaaaaaaaaaaaaaaaaaaaaaaaaaaaaaaaaaaaaaaaaaaaaaaaaaaaaaaggaaaaagaaaaaaaaaaaaggggcgctaaaataaaaagaaacaaagcttacaaagccgggcaaaaaaaagcaaaaacactgaatgtcgggccccaaaattaaaaccgcgagccccgggaaaaaccggacctgaacgaaaaaaaatgcattcccctaattaaaactgctggcagaagcaacaatatcgaaaaggggagaactaaccaaaaggggccacaaccagaacgcctaaaaaaaaaaaccgaatgccccctgaaaaaaggcaccacccccggaggctacgatgaaaccccc

SEQ ID NO: 10997 - DNA, 1631 bp, Glycine max
  Clone ID: PAT_MRT3847_10993C.1
aactttcttacgtgtggtgtcccagaacaaggtactggttgaactttttgatgctgcaaaggtgcacaacaaacatgtcatggttgagtggcctcagagaactgaggcctttgcttcacttgctgctgccacttagcatccattgggtagctgaggagatgacagtttctgttcttgttgatgtcacaacctctgctttgtgccctggagagtcaacttgctcaaaagctatttacatcaatggggtccaacaaacgattgttggaattttcaagatggtggtacttccactactgggtcagctctcagatgagtatggccgtaaacccttgctcctgattaccatatccacggctatatttccctttgttttacttgtctggcatcagtctgaggaatatgtctatgcctactatgtgcttcgcacgatttcaaatataatcagtcaagggagtattttctgcatttctgttgcatatgcagcagatgttgtcaatgaaagcaaaagggcagcagtatttggttggattactggtctcctttctgcttcacatgttctgggggatgtactggcttggtctcttcctgaaaagtacatttttgcggtttcaatagtactattgacttcttgtcctgtttatatgaaattcttccttgttgaaacggtgataccggctccgaaaaatgatcgtgagtcaggttgctgggctaaaattgttgatgttccccgacaaagatatatatctatgaggagagctgcggaaatagtaattttcagtcccactttgaggggcatggctcttgtgtccttcttttatgagctgggaatgtcaggcataagcagtgttttgctgtactatttgaaagctgtttttggttttaacaaaaatcagttctcagaacttctgatgatggtgggaattggttcaatcttttctcagatgttgttgcttccaatactcaatccattggttggagagaaagttatactctgctctgccttgcttgcatcaatagcatatgcttggctctatggattagcatgggcaccttgggtaccatacttaagtgcctcttttggtatcatctatgtccttgtgaaacctgccacttatgctattatttcaaatgcgtcaagctcaaccaatcagggaaaagcacaaacatttattgctgggacacaatctatatctgatttgctatctcctattgctatgagtccattgacttcatggtttttatctagcaatgctccttttgaatgcaaaggttttagcattatatgtgcatccatatgcatgataatttctctttgttttgcttgcttgctgaagccagctgatactagttcgagtaatgacatagagggaagccaagagaccccgcttctgactgataattgattgtatcaattggacaaatacatttggccaatcatgtatatataggcatccttgtctcaataattgctgctccaaatagccatctttttctttatagaattggctataggagaatataagcagaagtataaggaaagggtgggagagagagagagcgatggcttcatcagctatattgaacacttaaacaagtcaaattaatcaatcaacactttctatatattttgc

SEQ ID NO: 10998 - DNA, 968 bp, Glycine max
  Clone ID: PAT_MRT3847_109940C.1
attcggaaactccaaatacctcactccacagttgaacaacaacaccaacaccaacttctggaatgaacattttcaaatccccactggaccatgatttgaactgtggtggaatattccacgactcagcagaagcatcttattcgtctgaaacaaggagcaccccctcagacgaagaagtgattctagcgtcagcgcggccaaagaagcgagcgggaagaagagtcttcaaggagacaaggcaccccgtctaccgaggagtgcgtcgcaggaacaagaacaagtgggtctgcgagatgcgagtccccaacaacaactcacggatttggctcgggacatacccaacgcccgaaatggccgcacgtgcgcacgacgttgcggcgctcgcgctcaggggaaagtccgcgtgcctcaacttcgcggactccaggtggcggctgacggtgccggcgaccaccaacgcggaggagatacggcgagcggcgggggaggctgctgaggcatttgcagttgcagatggggacgacgttaatattgaacaacagcagagtgtgatggccacgaatgatgatgaagttcaagagcctctccagcaggaggaggttcaagacttgcatgatttgcttttgagtattgcgaatgagcctttgatgtctcctccaccctgtgcaagagatggtagggactggaatgacgtggacatatttgatgatgatgaaatctcactatggaacttctcaatttgacgcgtacgtcattaagagtatgactgtatgcatgtttgatgataagcgaaaacacctttttgtgtatgtgattttctatatttttagggacctgttgtgtgtagataaattaagtagcactcgattgattaagttgagtggagttaaacatattgtagttgtatctatgatttgtttcgtgattaaattttaatgacaagtacagttggcaaattcaaaaaaaaa

SEQ ID NO: 10999 - DNA, 318 bp, Glycine max
  Clone ID: PAT_MRT3847_109941C.1
acttaatccatcatcacttcacttcactaatactttattgcagacgagacccagaacaagtatgagagctctgagaggtgaagtccaggatcgtggaggttttgactttctcgggtagaaaaaagatcaagaagacacgtctcatccttaagaggagggtactgtcaccaaaattcaaaaaagaactgtctcacaccaacagtcaagcacactcagtcttttaaaaaagctttaacgacctgtcataagatctagatcattaagcggaaggtacgtcaagtttttaagctatggtcggatatctgaaggaccaatttt

SEQ ID NO: 11000 - DNA, 2344 bp, Glycine max
  unsure (1)..(2344): unsure at all n locations
  Clone ID: PAT_MRT3847_109942C.1
ccacgcgtccgcatcatccaaaccaaatctctcccattcacaatcccaaattcccaattctctcttccttctccacaccaattgacaaaaccctaacccccaaattctccttcagcgattcatctctcttgaatcgaatcgatggcacggatgggcccagggttccgattccaccccaccgacgaagagctggtggtgttctacctgaagcgcaagatgaccggaaacctctcccgctacgaccacatcgccgtcgtcgacgtctacaagctcgagccctgggaccttccccctctgtcgaagctgaagacgaaggacttggaatggtacttcttcagcgcgctggaccgcaagtacggaaacgggtcgaggacgaaccgcgccaccgataggggctactggaagaccaccggaaaagaccgtcccgtcacccacggcgaccgcaccgtcggaatgaagaagacgcttgtttaccacagcggccgggccccacagggccgtcgcaccaactgggtcatgcacgagtataagatgctcgacgatgaattggcacgttccggcacagtgctggatgtgtttgtggtgtgtaggattttcgagaagagtggttctgggccgaagaatggggcaaagtatggtgctcccttagatgagaaggagtgggatgttgaggatgggacgaggatgaagaggatgagcagaaggaggtggctcccttgctcgttccttataatgcggtggctcctcctcctcccttgtcggcggttgctgataatgtggtggctcatcctcctttgctggcggcgactgctgataataattatctggtggctcctcctcctcctcccttgcaggctattgttgatggggcctatgtttcaaccgacgaccttgacatggaacttgattggagtggtataattgacagtgatactttgccatcattgaactttcattacggggagtgtagtagccatgctgagtattccaaagtattcatcaaggatcaggagccattggcagacacttttgaaatttcttgtcctgaaaatgtctggcctcttgatatgactgggcaacatggcgtgggtacaaattcaggggaagatggagacagtggtgagctgagcaatattggcaattttgatctttcatcgaataatatgaatctggatctttactgggatgccaacgagaatcttccgatggatgatgatggatttttggaatacaatgatattgcaattgggaatggggataatcctaccgaggctgatctttctgcaaatgccatgctagatgagtatgctgcactcgctgatgatgatatttacaagtatatatcttttgattctcctcagattcaagagagtgaaaactttattcccaaccaaggatcacctttcacccagcagaatgtggagggagaaaccgctgatagagctgtggttagtaatgagggttcttcagtgcagaatacacaggaggcaatgcttgcatcaggaagtacaaatccacttgttaagcaggcatatggatggttagccagcatacctgctgcgcctgcacatgctatggagtttcctgctaaggagattgctcttggacttcatcctgtagctcagtcttcccatccagctcatataactactacaggtatgatcagcataacagacattacttttagagacaatgcaatggattggacgatgggcaaaaatggagggtttagcactatcatatccactgggttttcgcaatccgatgttaattcggctgctttgatgcctgtttctggcaagactgcatttgtgttgtcacatggctggattttcctgactggtttctcagttcttattctttcactgagttgcaagatcggaagcatcatgtatactggtaaatgactacctgtggttggcggctactagagaataagcagcagtcagttaagtataatttagtgtttggtggtactcattgaatgactaggatcccgtgactttgtagattttttatatggtaccttagtcaaactgatctatacattcttcatcgtaacttatacaacatttttagagtgcctacagatagagtaatagtaatactgtcttcgataagattcgtaatatatattattagttcatactttcaatagtaatactagatgcaaagttctgactgatagaggctgtccattatttattattattaggttccatatgtaatttgattcacttggtaagaacaagtcatcgggtttttgtctgattgaggctgtctattatttattagttctctcgtttaatttgattcactnngtataggagcaagtcatcgggtt

SEQ ID NO: 11001 - DNA, 1389 bp, Glycine max
  Clone ID: PAT_MRT3847_109943C.1
cctactcccaaaaccactttactctcttcgttcgctccgcatctgactcctatagtttcctctgctaattccatatccccgttttccttcactcttgaaccccgattcatttccaccagcacaagaagcatggctgcaatatcaataccttctcacatgaaagcttggacatactctgagtatggaaaatccaaggaagttctcaagtttaatcagagtgtggctttgcctgaggtgaaggaagaccaggtcctcatcaaggtcgctgctgcttcccttaaccccattgatcataagagaatggaaggctatttcaagaacagcgactcccctttacctactgctccgggttatgatgttgctggagtggtggttaaagtgggaagtgaagtgaagaaatttaaggttggggatgaagtttatggtgatatcaatgtgaaagctttggaatatccaaaggtgattggttctttggctgagtacactgctgcagaagagaggctattggctcacaagccacagaatctgagctttgctgaggctgctagccttcctttaacacttgagactgcttatgaaggccttgaacgaaccgggttttctgctgggaaatctatccttgtgcttggaggtgctggtggagttggaacccatgttattcagcttgccaagcatgtttatggagcatccaaggtagcagctactgctagcactaggaaactggaactattaaggaatttgggagctgactggcctattgattatacaaaggagaattttgaagacctgtctgaaaagtttgatgtggtgtatgatacagtagggcaaactgaacaggcattcaaggttttgaaagaaggaggaaaagttgtgacaatagtaccacctggatttcatccagctatccttttcatactctctactgatggggcgatcttagagaaactaaacccctattttgagagtggtaagctgaagccaatacttgacccgaagagcccgtttccattttctcagactgttgaagcgtttgcccatctggaaacaaacagagcaactggaaaaatagttgtctatcccattccatgaacatgcataagctccactacaatctacatgcttctgtctgtgatttaaggtttgtgttaaaagagtgaggcacattagtacatgttctccatagcctaaagctacccacttactcttcaagagtgtgtagtggaataactaagttttacaagcgtgcctgcaactgtggctttaacatagtgtggtttgtaatttgtttttggtgtgcatactgtggtttgtagttttggctaatgaaataatcacatggtttttttttaactaaaaaaaaaacaaaaagaaaaatcgatataaaaaaaa

SEQ ID NO: 11002 - DNA, 249 bp, Glycine max
  unsure (1)..(249): unsure at all n locations
  Clone ID: PAT_MRT3847_109944C.1
aaaggtncctcttcataaagcatgtgaacttttttacaggctgttcaaaagcattttatcattaagaaatcctgttcctaaggatgtccaattccagtgggctttgactgaagcctctaaagattccaatgtaggagagttttttacaaagttagttcatagtgaaaaggcgagaatcaagtcaatatggggattcaatgatgacatggatatatcctctatcatggaagaaccacctctcttgccatc

SEQ ID NO: 11003 - DNA, 324 bp, Glycine max
  Clone ID: PAT_MRT3847_109945C.1
gccctcatctccatcattctttcattagcgtacgctatacaactgcttcttggcttgggtatatttttaacgatgtcttttatggccaaattcaattccatcaccggggagataatcagagactatcggtcaagaaattttgtacttcatttcattggtccgtgttctatatatcagggagtgaatctattttagttccataggcattgagctcataatctactacatcataccactcctgctagtctttaaactcggcaacattgctgagatcttgggggttggaaattcccccaccaccaggagtctaacatattgcttgct

SEQ ID NO: 11004 - DNA, 472 bp, Glycine max
  Clone ID: PAT_MRT3847_109946C.1
agacgacagaaggggattgttggatgcattttgatggattcgatcccatgccttcagggcctcaattcccaatcccaggttcccagttcgtggtcctcgctttcgtgcccttctgagcctccggatattgggaattggttctcaagctatgaatatcgatcacccggtccggattcgaattttagtgtcgaagattctgctttcagcgaagaagaaacccagagagacggtgaagaagaagaagaagaaaatgttagggttcaaggtgaaggggttgctggggagaatgtagtacaatgtatcagaacttgtgttaaagaggataatcatagcgaagatcagtgcttgaacacgaatctggagcctttcagctcgttctcactcctttctgagcctccagacatcagaaactggttctcgagctatgtttacgagtcacccgagtctgatacaagtagtctttttagagatg

SEQ ID NO: 11005 - DNA, 256 bp, Glycine max
  Clone ID: PAT_MRT3847_109947C.1
tatatctcttggctgcaccacagactgagacaacgggcatagactcggattagataaaggatggtatctggaaagcctgagaagaaaaatactacacgactcattaccaaagatgcctctagctcgagtacacgagagatgagcattaaaaacaacatccgtgaagtcagtcttgaggggggaaacaccagctctgagcactactgcgtaaggaagggaagtccataatgccggggatacgacaaccaataagact

SEQ ID NO: 11006 - DNA, 998 bp, Glycine max
  Clone ID: PAT_MRT3847_109948C.1
ccacgcgtccgtgcacccacttatccgtccgtacagatgctaagaaaggacaaaatagaagtacaaactggagtttcccgtcgtaggggaaagaaacaggcaacaatattagcaccggttccggatcttttacatcaggatttacatcaaactgctaatttgccgatttcatcaggcagtatatcaggtgaaaaagccactgaattaaagagcttgcaagagagcaatgttcaagaatcaaaatgtgttgtcctggatcaagcatcacagagcgtaggtgatcaggatttaaaatcactgggaggatcagatgattcatccaaacagacagtgatcatgtcttcatgtcaagatagtatgattaaatctccaggacaagatcttgacacggttaaaaatcctgatgctcatgattcttctgtaaaggttgttaaatcttctgaaattacctcatcgaaaattgatgaagtttgcaataactcggggaatgaaactttacttggcacaacagtgcctgttactggggtgatacaggatcaacattcaggtggtaaaactcataatcaaactgttgaaatttcaaaaaccatcccttcagttgttgatactccaattaattccttgactgacaatgaaactacacaaagcatcaacaagtctttagatcctgtgactccaacgattgttcccagtacattaactactgtttatcccacgccaggttctgaatctactcatccaggcttggctgaatccattcccaccaaaaggcaaggtcgtaaaactcaaaatagagcagagccaccacggcgtaagggaaaaaaatcagctgcagtgttacctgttgttcctgatgctgttactggtcaggatcctaagttaagtcatcatgcacaaaattcaccagtagattcattgccggggaaagccactgccaatatcactcaaacccaagcattggagatccttttacccagtggagtagttagtcatgattc

SEQ ID NO: 11007 - DNA, 196 bp, Glycine max
  unsure (1)..(196): unsure at all n locations
  Clone ID: PAT_MRT3847_109949C.1
aattcatgggagctccagaaatggccagaactgaggtatacattctttttttcatttcttctgtatttatgtaaaaatggnagttaagatagattactccactactactanttaaggttacctacaatttctataaaantgtgtatgtgatgtaatctatcttaactaccatttttacataaataacaaaaaaaaa

SEQ ID NO: 11008 - DNA, 230 bp, Glycine max
  unsure (1)..(230): unsure at all n locations
  Clone ID: PAT_MRT3847_10994C.1
caacaacttctgcnacttcctacnccaaccgcactncctgtnccacanaanacacganagcaaccaanaccggaatcaacggatttggaanaattggccnnnaanacagccagantggctctgcanagagacgacgttgaactcgttgccgtcaacgaccctttcatcaccaccgattacangacatacatgtnaaatanacaggntcatggacatggaagcatcacgat

SEQ ID NO: 11009 - DNA, 271 bp, Glycine max
  Clone ID: PAT_MRT3847_109950C.1
gcggtccaagcgcacacgggcagggaaagcatgaggaataagtgacctagctggagagacatccggcgggtttccgtggcaaccctccggaactatgggatggggaaacagggcaatgagatgccggatccagagggaggcccacgtcctgctggaagcactcaggaagacccaaggccagcctttcgagcccaccttcgtcatcggctgcgcggcctgcaacgtcataggcgacatcctgttccggaagcatattgactagaatcatgag

SEQ ID NO: 11010 - DNA, 472 bp, Glycine max
  Clone ID: PAT_MRT3847_109951C.1
tggatcttttttattatcatgacaacttgtaagtggaactttagaagcctctgtttgaggcatgagctgatgtgaagttttgtgaagatatctctttgctagaagttaattttttaatatcctgacaagagagattgattatttttccctttgcataatgatttgtgcattccttccatgctaaagatgacgttttagtttctttcgttctagcttagattgttttcttgtagctcattagtgtcctagttaaagaaaatatttaggatactattacatcattgtcaactgtattgattttactttaagaatttttaagttgtttttgaatgttcctttatcatgttatatttctggtattttattcatttgttgtgtcattttctcaatttttattgacaaactaaacaaagtgtactaaatattttatattatattttaaattaaatttaatatgtttaaaagtcatctt

SEQ ID NO: 11011 - DNA, 503 bp, Glycine max
  Clone ID: PAT_MRT3847_109952C.1
tctttatatcaataaattctataaagtttagcctaaagtgaacaattatataaccatagttaaaatctaaaattgcgtacttaacaaactaaggaagcaaggaggttttatttgtggtatacaattcttttgttcaatgatgcttatttgtttgatacatgctttaagcaagatcttatattcaagtgttgttgatagaaaaatgtgattgaaaataatttttttactaaaggtagctaaatttttaaacaaagattagtatttgataaatctgcatggttgatgcttgttgaagcatgaacatttctcttgttcgaattatcagtgtcatacacgttttttgtattgaatatcttaacacttactttatacttgtttgacatttcttattaagtgtctaatttaaaaattatttctttttgacttgaacactaaaattgttacctttaggcaacttataatttgaaaaaatataaaaggttggtttaaaaacataaatatat

SEQ ID NO: 11012 - DNA, 330 bp, Glycine max
  Clone ID: PAT_MRT3847_109953C.1
cccacgcgacggcacacgcgggagcgagctcacgaacagaacagcgacggggacaaagaggggcagctactaggcggaacggaagccctcatgggcacgcggtagcaagaacgagaactggcggcatggcccaaaccggcgatacgtggtcccaagggtcgacccaagcaacaagctgtcgacgcgcgtgaccgaaaccggggacactgacgcgaaatgcgaccaaacgctaacaatatcggtgacaccaaagcctctctaggatcaaacgttgtacatcgacgcggcgcacgcacggctcgcaggaggacaccaagccacttatcggct

SEQ ID NO: 11013 - DNA, 648 bp, Glycine max
  Clone ID: PAT_MRT3847_109954C.1
cttttttctcttgttatatcgagatcatgggagttcataaatctagatttctaactactatattccttctttttatactagtaatactgctccatctttcaagttgcaggcacatttcctgggggcttaaggaagagattatggaacaaagaacaagaagcaggttccccttttcttcattcccacatagttataattctgctgaaatcaaagacaacaaggtcagtggatttcatactgtttcacatacagctactccaggtggaccaaacccacttcataactgaatgaaagaaaaataggcatcatcatcattatcatgaagtctctagtgaaagcagatctggtataattaaccacaaagggtagcaatttcttagaagcaagacatagtttgatttcattttccttaattacctttgcagaatccaaaatggtgctttagttagtttgcatcataaagctatgccaggccatttcctttgatatatatgtataatagaaaaagcatatgttttacaatttacatatatcacttaaaagttgcttgcacttaattatgaggatcatcgggcatagtatatatatggtgaaggaaattataatgtacttgcccatagtctatgttgattatctcactatagcaat

SEQ ID NO: 11014 - DNA, 304 bp, Glycine max
  Clone ID: PAT_MRT3847_109955C.1
tgttggttgagctatttgtaaccagtggaggtatactcaggtaattggcggaagtaaataaacaaaaaattgccatttgattatttaacagggtcctattgttttattgctgaacatgactgcatacggtatccctattcaatcacatcttcattgcataggatacattaatgaaaatacagaccggaatactctactatatcactactcttactgttatacaatgtgctgccgcattcggtatgggtgcaaaactttacgggtacaaaactggtgagatattacatgctctgcaatacattaa

SEQ ID NO: 11015 - DNA, 150 bp, Glycine max
  Clone ID: PAT_MRT3847_109956C.1
tgtcctattatatatatttttattaataaattatccattggcacccagggaggtgttactatgttgtatgctctagacaggagtttgaaagggtatggaagctaggtgctatcaatattatatgcaatgagctagggtcagcaaatgctc

SEQ ID NO: 11016 - DNA, 337 bp, Glycine max
  Clone ID: PAT_MRT3847_109957C.1
taaaagtcaaaagggaatataatgagtctatgattaaacacacacacccacctttcacatacacatgattgggcaaattatttaaacacagaaaaaatgtcgcgcataatgctgaattgggtcaacatacaggtgaagaatggctattccctgacagttttagactgaaatctttgaaggaattctccaaccaaatcatccggtgaggcgaaaaagtcgcaaaatagaaaccaaacaggccaattaaccaacccaaacaacatggtcgctgtgaaagacaaactaaacataactgaaccaagataaataaatttaacctgaccctgcccttgttatt

SEQ ID NO: 11017 - DNA, 217 bp, Glycine max
  Clone ID: PAT_MRT3847_109958C.1
acgcgtgaaaacaacagagaggggtcattgaatggctctttcttttttccagggcctttcatgtataccgggcagcctgataatgataatgataaagaggatcatgctcacctgctctgtgcataaccatgtcttgatcttataacaaaaaactttaactactcaagctatctactacttatgatagtcctagggaagattaatgaacatacccaat

SEQ ID NO: 11018 - DNA, 591 bp, Glycine max
  Clone ID: PAT_MRT3847_109959C.1
ttgccgtctacatgtgtagtagtgccgccttcttgggggggggggggggtagcgaacagtgggtagcgagagtagaagccgaacgacggcacgataaaaaccccggccacaaacctaggaggcaaaaacgaacaaccgagataggagggtgttgtaaactcttctactatacatgtactcaacagggcggctgggttggtgtgcgctgggccatgaccctcacaagatggtacagagttagtttaaccaattgggggaactttactgtcagcgcacaggagcgtgtgaatttgtgtgctaaaggtaagcccgcgtgttttgcctggtaaaggggcgcctgttaacgattaaatagtataaatgatactttaacagcgtaggaaggctaacacagcacggcgcaagcaggctgggtcatgaggttaaaaactagtgatcaaaaggggcggcgatggcaggctcatgccctaaaggcgctacttaacggtaaatctatttggtggcaatagcatacacgacgcaggagggatataacggttggtagcaaagagaacaaacaccggcggcggactggttaccatagcagtttgt

SEQ ID NO: 11019 - DNA, 382 bp, Glycine max
  Clone ID: PAT_MRT3847_10995C.1
tttttgcaaagaagatgattagttatattctacaaaacactggttaatgttgaggggtattatcatacaaaccttacactaaaagaagaaaaaaagtaaagtagcaagctcttgacatactggaaccttcagaaatgcttctggtgaagctcaaactcaacaaaatcaccggggcaatttacttttcacaattgctgatatatcagaattagaccaaaagaacgaacatggttacatggacaagtatgctgtatgaagacagcttttttttgtatgcattttttttatggtcgatgcatgaagaaagctatttatatccagaagatttagagcaaccaaagcatcctcgtatagagaaatatttatgaactggtttgggttc

SEQ ID NO: 11020 - DNA, 184 bp, Glycine max
  Clone ID: PAT_MRT3847_109960C.1
tgctgagattgtggagtctgcggatacatacttgtctactggtccaacttatactgactacagctctgtggcgtattcacttcatctcaggaaggacatagcgatcaatgctgcagcctgatcccagtatacatccgacgaatgcacctgctattcggtcgtgtggctgatgaagggttgcctc

SEQ ID NO: 11021 - DNA, 306 bp, Glycine max
  unsure (1)..(306): unsure at all n locations
  Clone ID: PAT_MRT3847_109961C.1
natacgcnacncgaacgnangcacncancncgagnngatcganatannatanaaccngannagatcannnaagnagaancagncgnaaannannantgtccaaagaacanacgannaananncanaggcangcngannacnnancnggncatgaactnnactncnacnngaacggacntnganggccaagncnaaggnccnanccanctntnnctncgcatcccanacangaancaacnaacacnnnaacanccaancancacagcgacatgcancatanananctncaacncngangnntncaat

SEQ ID NO: 11022 - DNA, 293 bp, Glycine max
  unsure (1)..(293): unsure at all n locations
  Clone ID: PAT_MRT3847_109962C.1
nantnancggcggncncccctttttttttttttttttcatggtctatgttttgtttttaattctagtaagtcatcaataactttatgacacgattatttataaacacttgttaatcaccagctctccaagaagaggcaacttcaggagctaacacacatgtcctgttttcattattgtcatgtagtggtcagatgaatagaaacaaatggtaccaatacactcgaaggaaggctgggacacaaacctttccgtctcgagccgaattccgagcttacgtacgcgtgcatgcgan

SEQ ID NO: 11023 - DNA, 199 bp, Glycine max
  Clone ID: PAT_MRT3847_109963C.1
tcgagattggagagcctattcatgagccggtgttttatactggaattattcctattctagggaaaattgggaaggagggggctgatttgcctgtgagggaacggatatttcttctactagatgccacacaaacattccttggtggggcatttggaaagcttccccagtcattataatgcatattattaatttgtgagtg

SEQ ID NO: 11024 - DNA, 255 bp, Glycine max
  unsure (1)..(255): unsure at all n locations
  Clone ID: PAT_MRT3847_109964C.1
caatgcggtgtgtgatctatgctttaagaacgacanagaaaacccatctctaccgcaaaaggatagggacaaacgaggacaccataccctagagaaatccacttttttttctatacccacataattttttttgtagcaggggcacactnaattgcccccaaggaaactttattgttgggggatagtgaggataggaaagaatgcccagccaatgcgggaagacactgacgttttgctgaccagcattctcctctt

SEQ ID NO: 11025 - DNA, 377 bp, Glycine max
  Clone ID: PAT_MRT3847_109965C.1
ggaaaaaccaggcatttgccttctttagggggggaacccgtttaaaaaatcccttttttcaaccggggttctagtttgaatttaaacctaaaaaattgggcttaaggggcccattgcctggtttttttgttggccgcccggtaatatttggcttaaaatttggtttcttaaaacccaagtggggataccttttctttggggcaaaaggccccgctttttaaaaaaaattacccaaggttgtaaaattaattaattccccctaaacctggggtgggtggggggcttttaaatggttaaatttcaaggctaaatattttaacccccagttgcttccccaagttttgggcaaacaactccccggccttgggactaaatac

SEQ ID NO: 11026 - DNA, 458 bp, Glycine max
  Clone ID: PAT_MRT3847_109966C.1
tgaggaggaaagcaatgatggtcagctttacaagctttgtgcaatttgccatagtttgggaggagcttctatgttaatgtatgttgttacgcgtaggatagaagccaagccccatagactttcaagattggttttgttatcacctgctggttttcatcatgactctaacctagtcttctctgtggcggagcatgtattgtttttgctggcccctatttggtctcgaattttcccagccttctatataccaaccagatttttccgtatgcttgttaacaagttagctcgggacctgcaaaacctacctgcagttggaggattggttcaaactttagtaggttatgttgttggtggggacagctcaaattgggttggagttttagggttaccacattacaacatgaatgacatgccaggcgtatcttttggtgttgctctccatcttgctcagataaagc

SEQ ID NO: 11027 - DNA, 405 bp, Glycine max
  Clone ID: PAT_MRT3847_109967C.1
cgtaagcttggatcctctagagcggccgttttttttttttttttttttttttttttttaatgactaacacacatgtaaagaaactggcgtaaacctacatcctttgaccaactcgagtcattacatgaccttgggcattaacatatctaacatccccgagcgaagatttacactacctgatccttgaaccaattgcggacaagtgatcttttttcaacttttaaacctaggacttggtttgccaaataagccagggcaatgcctcaccgattccagaaaagattaaaccatcatctgaacccaaatctactgtcaaggagcactctgtccacttgagatggaatggggctttaaccaaagagacaggccttgcgagcataatttgatccttaaaacttttaagaa

SEQ ID NO: 11028 - DNA, 499 bp, Glycine max
  Clone ID: PAT_MRT3847_109968C.1
aaatttcatcgtgatggggatagatcattgcaattgttggttcatattctttatcgaataacacaacaatgttgaaggctactctcgccattttgttgatctgcttgtttgcaagccaagaagttttcgccgccaaggtcaagctcgtctccgttgagcgcgtcaaggagcactccaaggttgcccctaagcccaagattgagctttgcggtttctgcgtctctttcatggaccaagctattgaccaactcttgaacatcattgccaacgtcggtgtcgtcggtggctgcgctggtctctgctcatacttgcccaaccaaatcttgtctgctggctgcaacatgctctgcgacgttgttggtattgaagagttcgtcaagctcgttgacgacgctgatcccgatcccatctggattcgcgaagagctctctctctgcaacatcaacgactacgccaaggccaacatgactgccttttcactgtcctccccccactctgc

SEQ ID NO: 11029 - DNA, 315 bp, Glycine max
  unsure (1)..(315): unsure at all n locations
  Clone ID: PAT_MRT3847_109969C.1
ccacaatgctggnaccaccangtgataaacattgatacattttatttttctatatacacttacatacttgctgaatacaaaaatacggaggtgcgcgcacattataatataaaaataaaaaatctaaaaaaataaatggccctctctatataataatcatttttacacagtaaattattattccccgttacttaaaatctttctaaattatcttttagatattgtaataaaaacttgtaaaaaaaatgttcataaatattatctatgaaaaaaatttacttcgctcaaaaatccaaacaaaatttcacttttaaa

SEQ ID NO: 11030 - DNA, 1793 bp, Glycine max
  Clone ID: PAT_MRT3847_10996C.1
gggtccacgcacgcgtccgtacggctgcgagaagaaaaaaacaggagaccaaaaaacgagacaccaaagtttcagtttctctctaacgttgttgttaaatgacagtagatctggtaggtgctgccaagatggggatggaggagaatatagcgatacaagaagctgcttccgctgggttgaagagtatggagcatctgattcgtgtgctttcttctcaaatcccttcttctgcttcgtcttcttctaacgcacaccaccaccgtcttaatctcaaccaccttgactgcaccgaaatcaccgacttcactgtctccaagttcaaacaagtcatcaacttgttgaatcgcacgggacacgctcgctttcgtagcgcaccttctcatccttctccttctacttctcttccttctcaacctcaacctcaaccacaaccacaaccatatgcactgactcttgatttcgcaaaacctgttatgcttaagtcaaatcccaaccctaacccttcttctaccgatttgtcggtttctcaatattctaagaccaaggacaccaccacctttagtatatctcctcccgtgtccaccaccacctcctcattcatgtcctccatcaccgccgacggaagtgtctccgacggaaagatcggccccgccatcatcgctgccggcaagcctcctctctcctcatcccaccggaaaaggtgtcacgacgccaccctctctgccggaaaagcctcttcctccgctcactgccattgctccaagagaagaaaatctcgtgtgaaacgaatgatacgtgtgccggcgataagttcgaagattgccgatatcccagtggacgagtactcatggcgaaagtatggtcaaaaaccaatcaaaggttcaccttacccgcgagggtattacaagtgcagtagcgtgagagggtgtccggcgaggaagcacgttgagcgagcccaggatgaccccaacatgctcatcgttacctacgagggagagcaccgtcatccgcaaccgcgtctgccggaaactgctgccggcgccggcgggacttttgccgctcatcctgtttaagcgacggtggatatcgggaaagtatggcaccgacagagatgagtgataaccgccgtttgcaattaacgggggggaagttgtaaccgtatattgtaacagtgggaggaaaagaaaaaaaaaaaaaaagaagggaacttattgcaagcgagggaaagaaaagaaaaagaagcaaagtcaacttttgctatgtttggtttggctgggacctttgtggaccaaaagaatcgtctactagatggatagggaccttttctgtaaatttgacacaaaaaaaaaaaactatgaaatagtagtactatacttactttttttttattcttgtttttccaacttaatttactagacattcatttactctcagcaatcaaaaaataatttaaatttttataaaattggataaatggcatgaaattggttggactttaggccacccacctatttatttgagtgtataggggagatctgatccaagtataggattccatgggcacaacagcaacacaagggttgaaaagaaaggatggggtgaaggaaaagtcaaaggtgaagttcaaaatggagaatctgagtagcttgtcaatggacgtggtgcgagtgggacaggtaccgcgggtcccgcgccagctcattccaatctttgcggttctatcataatcttctgcttttgtacattccaagatattttaatttaggaaaaataaaataaaacatttatcctcc

SEQ ID NO: 11031 - DNA, 704 bp, Glycine max
  Clone ID: PAT_MRT3847_109970C.1
ctatatgctaatgagcctgctaatgcggaaaatccagttagcatgcctgttggtacagctgagccagaacgaacaagagatgctggtagtggtggcaatactaatcatgccagacctgctagcaatattgtaaacattgtaaagccagtaggctattcagcttcagtagccagtggaatgcaggatgttttagtaacctttgtggcttcaaagtctgatggaacagaagtgatggttgacaacaagtatctaaaagcatttaatccacttcttctgatcaatttctatgagcagcatcttcgctacagccctacattgtgaccaaacagagaatagaaggtgcttttgagtttgtagttaggttcacacgattgtgcttagttagtagttttgttgaagaatgtcttacttttatagatgcagaagatagtaaagggtaagaaatgcattgtttgttagttacacgtaggtatgattttaacaagtggttgtcagtgtggctatatactgactgatgcatgctgatggcataaataactatatatttgaatgcctcaaacacacgaggatagacaatagtttcttaggagttagtcaagaatgaaaaactattttggattattgtaaatttttatggaagttcttggctatttctgagcgatttgtttgcctattaaaaaaaaaaaaaaaaaaaaaaaaaacac

SEQ ID NO: 11032 - DNA, 2115 bp, Glycine max
  Clone ID: PAT_MRT3847_109971C.1
ggctcgagtgttgttgttgttgttgttgttgttgctgctgctgctgcaatgaagggtggtggtgggaagagaaaggcttctacctcggaggctccgaacgatgttgttgttgttgttgctgctgcttctgctccttctgatgatgctgatttgggtgttggagatgtcgggggtgtgaaagttcaaaactttgagggaaacgagggtacccagttgcggaatactgaagaacaggaagaagaaccccaccacgtggagggtgatgaaggaggagaagacgaagaagattatgccgagggagaggaagaatatgaagaagaaaatggtggtgctgttgctgggggacaacaaggttttcctgctcttggtgaaaatttctttgaagttgaagccatacgtcgtaagaggttgcgcaagggtgaggtgcaatacttaatcaaatggaatgggtggcccgagacagccaacacttgggagcctctggaaaatctagagtctgttcctgatgttgttgaagcttttgaggagagcttgaagtccggaaaacatcgtaagcgcaaacgcaagcatgtagtgcatcatactcaacccaagaagcggctggagcgttcgacaactccttacagccttcggcgtttttcaactagtacagctgagaaccatacacagtctgctcctcctcttaatgatcctagccttccagatattcccgccttccctcacactgtgctgttttctgatgatgtgggaaatggtgctgaaggcagcagtcttagaaaagccacacccagtaatgctaacaggtctgcaaatggttcagaacaaaatattaaaaggaatgaggaaaatgattatgatcctgtgcttagtgagcttaaagctatgacttctaatgggaatgatgcagacaggcttgcaatacggattccagaagctaagggttctgggccttctggcagtaatggtcaaatggatgctaaatcaaagggggcttgcatggaaacaagtgaaagtgaccgctgccggggatccaaaaggagaaaatgtggttccgtaaagaggttcaagaaagaactatatgctaatgagcctgctaatgcggaaaatccagttagcatgcctgttggtacagctgagccagaacgaacaagagatgctggtagtggtggcaatactaatcatgccagacctgctagcaatattgtaaacattgtaaagccagtaggctattcagcttcagtagccagtggaatgcaggatgttttagtaacctttgtggcttcaaagtctgatggaacagaagtgatggttgacaacaagtatctaaaagcatttaatccacttcttgtagtaccctataccttcacattattacatttaattattgggtgtattatctttttggtccctcatcttttgaggatttctgtttttagtccttaaatttttttaatctgtttttagtccctcaatttttttcgttctgcttttggtccttgatgtaaattttatcaggaactaaacgaaaatccacaaagatgagggaccaaaaatttcgtaaactccttaattatttcctcaatgcctcattaaaatgttgctatggcctcttttcacctataccctaatatttttcatatgttgcagctgatcaatttctatgagcagcatcttcgctacagccctacattgtgaccaaacagagaatagaaggtgcttttgagtttgtagttaggttcacacgattgtgcttagttagtagttttgttgaagaatgtcttacttttatagatgcagaagatagtaaagggtaagaaatgcattgtttgttagttacacgtaggtatgattttaacaagtggttgtcagtgtggctatatactgactgatgcatgctgatggcataaataactatatatttgaatgcctcaaacacacgaggatagacaatagtttcttaggagttagtcaagaatgaaaaactattttggattattgtaaatttttatggaagttcttggctatttctgagcgatttgtttgcctattataatttgaatactgattggttgattgattgacatgattctaaaggaaaatccacaattaactgtt

SEQ ID NO: 11033 - DNA, 156 bp, Glycine max
  Clone ID: PAT_MRT3847_109972C.1
cccacgcgtccgtacggctgcgagaagaccacagaggggagcactacgattttctgcaatgtcagagaaagcgcatcgtgtggttttagagagtcacattcactaaaataccgtctgagtgaagagtgagcctgtctgtcatggactcaatgccga

SEQ ID NO: 11034 - DNA, 310 bp, Glycine max
  Clone ID: PAT_MRT3847_109973C.1
ttttgttgtttttttttttttttttttttttttttgttttttttgggacagagaataaaatgttcatattatcgcaacaactaagaaattcaatcatagcagtacgagttcgggaccagaacattatcaaacaaacaaagcaataaaagcgggggggggggaatcacacactcacaccttatcacacgacgtacgaacaaaggaaatggcctccttttaaagggcacgattcaccaaaattggctgctggtgaacatttccgaagataaacatcccactagaagcacccatgggtaaacaggccacaccc

SEQ ID NO: 11035 - DNA, 531 bp, Glycine max
  Clone ID: PAT_MRT3847_109974C.1
gcggggcggtgttccccgtggggggggttgggtttgaaaacccccataggggaagaaaacaatgggggggggaaaatttttttttgtggggcacgtgtaaaacattatatactcttttttttcactagagatttttttttttcacaaactctccctttttataaaaaagcgccgggctccacaaaccctttactcttttttaagactcggggacgcgttttagaaaatgtgcgcgtgattttttagagtttttcacagggggggttataattatatttttgaggggaaaagcgctttgaggggccccttataatttgagagcgaccacttgtggcgtcaaattttttttttacaagattagagctcttattttttaaaaaaccccacaattggggtatatcctcctcaaaaaaaatatatatttctcttatgtgctataataaaaaaaatttttagtgtataaaaaaaaaatgtgatagatcggggggagtggtgacacaagagaagagattgtgcacatacacaaattta

SEQ ID NO: 11036 - DNA, 1288 bp, Glycine max
  Clone ID: PAT_MRT3847_109975C.1
ttagagtctaagggtttttaccaacttctggatatgttacttggggttggggggtgtctaatggtgctgattgctgtacaaaacaagttgagtttcacaagggtggagttcatagtggatggcatggtggtccttttattacttcttctcccacttggtatcgtgtttaaagaataattcaaaatttggaagaaccaaaaccaaaacttcactgatgctgctgcttcagttgttgaattggcacagccagaagaagcaccatctcattcagaaaggaaaaacaacaactcatgcttgaagaacgttttcaagcctccaaaaaggggtgaggactacaccatcttccaagctctcttcagcattgacatgttaattctgttcattgcaacagtttttggtgttggtggaacactaacagcacttgacaatttaggacagattgggaactcattagggtaccccaaaaagagcctcacaacttttgtgtcccttgtgagcatatggaactatttgggaagagcatcttcgggctttgtttctgagtacttattgaccaaatacaagttccctcgtcccttgttgctcactctagtcatgcttctatcttgtgttggccacattctaatagcctttggtattccaaactctctttacttctcctcagtgattatcgggttttgctttggggccatatggccgttaatgtttgccatcatatctgaaatatttggcctcaaatactactccactttgtacaattttggggcagtggcaagccctgttggctcttacattctcaatgtgagagtgaccggttatttgtatgataaagaggctttgaagcaattgggggtgaagggactcataaggcaaaaggggaaggacttaacttgtgtgggagtgcaatgctataggatggcttttctcataatcactgcttcaactttggttggttgtgttgtttcttttattcttgtgttgaggactagaaatttttacaaaggtgacatttatgagaagttcagagttgttgaactagacacaggagaaagtcttccaacttttggcagcactggcaccaccactaccaccacaaaccgcactgaagaaccagataaaatcaataggaaataataatgtatgcttggtttaacttgtttggtttgagtaaaaaaaaaaaaaatcctcttacaaggtttgtctataaacaatcatgcaattatttttgcatcaacgatgttgaactctgtatatcaaagtttagttatatatttttatttcttatctt

SEQ ID NO: 11037 - DNA, 460 bp, Glycine max
  unsure (1)..(460): unsure at all n locations
  Clone ID: PAT_MRT3847_109976C.1
ccctcgtgnccgcaccggatggggaagaagccgccgcacctgtctgacgttgaggcggcccgcaaccccccgtcaccgccgcctactttccatgtgccactgccttccatgtggttcccgtggttggtaccactcatttttttggccaccattgcaatgtttcgtgtataccatgtatgaaaatgattgccctgcctacttagatgaagaggtttgccttttctctcaatatctcggcaggttctccttccaacctttcagggaaaaccctctccttggccctgccatccgcacgctgcggctgttaggagcccttgaaaaggaactagtggtggaccaaaatgaagtatggcgctttttttcctgtatgtttcttcacgctggagtcgtgcatttactagccaatatgttcagtcttctgtttataggcgttcggcttgagaaggaattcggatttttg

SEQ ID NO: 11038 - DNA, 191 bp, Glycine max
  unsure (1)..(191): unsure at all n locations
  Clone ID: PAT_MRT3847_109977C.1
wtttggatnttgnntaccnncctcngtcttcggctcnggntcttatatgatgatcaccacncttannatgagaggaganacatacaggancattttggngatcaattnaagaanngatgagcaacagacagaaaacccccagcaggattcccgggggcttatttcatggctacttncncaccagnccattn

SEQ ID NO: 11039 - DNA, 301 bp, Glycine max
  Clone ID: PAT_MRT3847_109978C.1
ctctctctcaattccttatgactaatatttacaactttatgataactaacggtctcaagacagttgggtaataaaataacgtgtcttcgaaaagacaacattattttggccataatgcccttatatccgtttctattattgacacccaaggtgtaatctgaggaatggattttattcacacacgagctggcctcaagtttcgattaggtggatcaactgtcggacgattcttcaacgtacttcgagaacccatggatcacctacgtcctgaagatactgtcacagcatatcccattcgtaa

SEQ ID NO: 11040 - DNA, 201 bp, Glycine max
  Clone ID: PAT_MRT3847_109979C.1
ctcgagccgcttcaaattcattcaactttctctcatgcagtccaatcaacaacgcacgcgtgcatcttttccttttaactcattctttgtccccctttttcttaacgccaactctctcttctgggtttctttcattttcagaatctaataataacctaactgggatattctcttaattccaaatggtggttgggtggcgtg

SEQ ID NO: 11041 - DNA, 294 bp, Glycine max
  unsure (1)..(294): unsure at all n locations
  Clone ID: PAT_MRT3847_10997C.1
tgaacccacccccaaaaatgtcgtattgatatataccccagacacatttttaataaagacatcttcttagtcataattttctatacatatgctttgttctgttcctttcaatagtaatcagaccgaatgtaaatgtttctaaagagccttggggagtagaaatttaaaacacatcgttgaaaatgcatgctcacgtattaggacaacacgcccacattcgtctcacctcttttaattgtcgtaatgatgtgtgaagtgtgtgttattttnaaaaaaaaaagttattataattag

SEQ ID NO: 11042 - DNA, 576 bp, Glycine max
  Clone ID: PAT_MRT3847_109980C.1
caccacccccaccttttcaattaactaagccttctgctttgtattacatctttgtttcaagcatcatttgattgattcttttcttcaacactgggttgcagttgtttatatctgactcatgtttctaaatccatgaacaccatatgactttcagggtcttttcctttcccgaaggcaggaaaaaaaagagaagcaacaaaagcttggcgcgagactttgagagccaattggttggctgagatctcaattacccgtggcaattttgcagaacccatcaatcctttttttctatggatgtacacatgactcgtccatgattgtaatttgaaaatgaaccagttcgggtcatgtgtggagggacaattttgggggggattgcttcttgctctttaccttctttgctgagatggaggaacataaatctgttatctccacttgaaaacaaaatcaacatgtggctgctgccgctcaatacattttgaaggcactagcagcacataagaatggatctgatgacttgacaaaaacccttttggatattgacacacaattgccttcaatttccactagtcctga

SEQ ID NO: 11043 - DNA, 469 bp, Glycine max
  Clone ID: PAT_MRT3847_109981C.1
ggctcgaggtcgtggccccagatcatgctcacccaacgactacaacgctgttgggagctctcagggacaaagtcaggatccgagctagcggaccaggacgacctgaccggtgaggagccagagtcggactgcatagggaccaaggaaaacgagaaggggatgacgagcctagtataggcacagaggacatgacagacatgtttaaatactacagtgttgacggacactggaagcatcacgaggtgaccgataaggacgagaagaccctactcttcggtgaccaggcagacactgtttttggacacagaaaccctgaagagatcccatgggggtcaactggagctgacctcattggtgagtccaccggagttttgacccgattaggacatggctgccgcacattttgaagggtggcgccaagaaggctagcatgtatgcccccaggaagggtgcccccatgtccgtgatg

SEQ ID NO: 11044 - DNA, 256 bp, Glycine max
  Clone ID: PAT_MRT3847_109982C.1
atccggtccaagctcaaaaataattgggaaaataaggacttggccagaccaacaaccccaaaggggaaacctttgaaccacaaacctttaaagggaaaaatttgggatccaaacaaccttaaaaatcctccaactccaacggttgaggttgcccgtttgggggcgggaaacatggcaacgggccaactttacagccaccaaaaaccccccaaacaacttctctggtgatggaacaatcccaattgaggtaaccgat

SEQ ID NO: 11045 - DNA, 452 bp, Glycine max
  Clone ID: PAT_MRT3847_109983C.1
gtctcgagttccaggcgaagaagtcttcctctttcctcgacttcatcaggtcgaagggcaacaggtacaggcttatgctcatcatctctctcggtctcttctcccagtggtctggcaacgctctcttctcctactacgccaacaaggtctacacagctgccggtgtcagcggctccaaggccggtctcggtcttgacggcggcaacaaggtcctctccctgatcgtctccatctcctgtgccctgctctgtgaccgcatcggtcgtcgcccgctcttcctcgcagccaccggcggtatgcttctgtgtcttatggccgccaccgtctccgccgcgcaatacaccaagaccgaaaaccgcggcaccggcatcgccgttatcgtcttcttctggttccacggcgtgtgctacgctttcgcctggtccggtctgctcgtcgcctacaccgtcgag

SEQ ID NO: 11046 - DNA, 265 bp, Glycine max
  Clone ID: PAT_MRT3847_109984C.1
acttgacaacggatggtttttaaaggggggcttttacaaaaggcccattttatttggatacaaaaaaccggggtttcccaaatcaagttagatgaaaaaggggacaatttacatgacaatttcaaacagttttgctttacaatttttttaaacaggaaaatttttcttaaggaagttccccccggccttttattttaaatgaaaaccacttttaaaaaaacccctggccccatttattttcactaagaaaaaccgttttttttgg

SEQ ID NO: 11047 - DNA, 213 bp, Glycine max
  Clone ID: PAT_MRT3847_109985C.1
gatgaactcaacacgtgtatcgaataggagattgttcttctttgtgaagattggtgcgatgtcatcatatcacgatgaagtgacgcttttgggagctactgggagattatttgtgtataaggttcataatacgcacagattgatgggagttttgttcaactatttctattataagttgatgtacaagagtctactgtctcactgatcgaattt

SEQ ID NO: 11048 - DNA, 338 bp, Glycine max
  Clone ID: PAT_MRT3847_109986C.1
gggaaggaactatgaaaaaatttttttggtggggacccaagtattttttttaggacaacaaaaccggggccaaccaaaaaaaaaagggggggagcgggaggactattgcactaccaaggtttattaatattacctaatgaaaagaaattgtggaattcatgcaaaattcgatagggtcccttttcctatacaattaaataggcacttacgggtggattttgatccttttttcagcgttttactttgaaaaaatacaccatgcaaaaaaaggggggaaaatgtaccacgtgttgaatccaaagactttttgggggggaaaaaaggggcaaaacccagtt

SEQ ID NO: 11049 - DNA, 221 bp, Glycine max
  unsure (1)..(221): unsure at all n locations
  Clone ID: PAT_MRT3847_109987C.1
atcagggtcttgagccaatcctggttgggtagaaacccttttggtctttaagtgaggtcannagttttatgtctnngaattagacccgatcaaattctctacctggcctttcgatccccttttgctgatgcaaaattgctgatgaccttcgggtgcctgggtcaaaggagtattgtgcatattcgtgtacaagcagcgaaatggtaggaaaaggcctgaca

SEQ ID NO: 11050 - DNA, 118 bp, Glycine max
  unsure (1)..(118): unsure at all n locations
  Clone ID: PAT_MRT3847_109988C.1
cccggcctccgaacccccacgcgtccggnaccatggctcaccgtcactttctgcagcgctgtngtatgggggtcattcactaaacctcaaggcaagcgcaggcaaagtgagtgccgca

SEQ ID NO: 11051 - DNA, 412 bp, Glycine max
  Clone ID: PAT_MRT3847_109989C.1
ggttttttaaaatatatttttttttctcactttttggtttgtcttgaaagttgtttttaattaaatgaaattgtgtgaggattcgatttcgtgtgaaatgtgaactgagttgcaaatggagattgacgcattgagcacaggcaaaagtttttgccttttaactaaatggtttggaacgtgtgccacaatgtgaaaaagttgaacctaagaacactcaaaacttttatttattagcaaaaaaaggactctttttgcaataatacaaaatattaaaatggtattcctgttttagtaaacgggagttaaatgctttgggtgttggggtgttgcaactttgcaagatgagtcaatatctatttgccgtattttggagtggattggagagaaaatatgagaaagataagatgaaaag

SEQ ID NO: 11052 - DNA, 201 bp, Glycine max
  Clone ID: PAT_MRT3847_10998C.1
ctctttggtctttaaaacgagcatagatatgacgagggattctaaagacagcaattctctaactagtcatcattgaagatgcttcgaactgcatatctcctctcaaggttgtcaattctacaactcagtcagatccctgactccctttctgaagtttgcttgtcaagtgggcagacaataatcgaccatcctcaagcctga

SEQ ID NO: 11053 - DNA, 341 bp, Glycine max
  Clone ID: PAT_MRT3847_109990C.1
gtcacaaatatttgtggcataacaccgttcttttcatgttcaaagggttcaacatgacgggggtgatatggcgctgacattcacgaagcttgttagccggctcttcgcgaagaaggaaatgcgacttctgatggatggtcttgatgctgctggttagaccactattctttacaagctcaagctcgtagagatcgttactacaagtcctaccattgggttcaatgtttacactgtggaaatcaggaacattatcttcactggtttgagatgtttgtggccaagacaagattcttccttggggatgcactacttccatatctctcagggttttatttttgttg

SEQ ID NO: 11054 - DNA, 476 bp, Glycine max
  Clone ID: PAT_MRT3847_109991C.1
tttttgatactaataagtaaacaaaggctacctcatgatcacttccccactgttaccactgtcaaccgtgccggtgccggcctggatgctccattgactggcctaaagtccatggctggcttccccaccaggaaataccaacaatgacattacctcgcttgctagcaacgggggaagactgcaatgcatgcgggggtggccaccaggtggcaaaaataatttagagactctatcctacctgccagaccttgatgatgcacaattgccaaaggtaagtagaataccttcttaggaagggatggattccttgcttggaattcatagctggagcacggtttcgagtcccgtgagcacaccaggaaaccaggatactaccatggacgctactggaccatgtggaagctgcctatgtttggatgcactgatgctcctgaggtgctgaaggagcttcaagaggctaatactgcttaccccaa

SEQ ID NO: 11055 - DNA, 139 bp, Glycine max
  Clone ID: PAT_MRT3847_109992C.1
cttgaaatatgatgtgtttgatttggagctaagctctatgttttctaacttggaactcatgcgagtcatgatggaaacaaccaaccgctccatcatcgtaattgatgacatagactgcaacatagaggtgcatgctcga

SEQ ID NO: 11056 - DNA, 398 bp, Glycine max
  Clone ID: PAT_MRT3847_109993C.1
ggaatgggggtcgagagacagtatactatacacgtttattcgttcattgcaaactatccaagtactggctaggagggttatttgcggaccagaacccgttactgtagggtatttgataggtcggagcttatggagcgcatgtcaatatgtgcccgaattacagggtcaagcagatcctccagttgaagcagttgatgtattgagagagtacctgcgccaagacttaataggccatttagatgaggacagagttcgctataaccactcattacccgttggaagcccacaatgtaatcatgagtatatttctactcgtttaaatttacttatgtatcatcgcggtcctactggccctgggagttttaggtgtttgcgagatggttcagatcgttgggtag

SEQ ID NO: 11057 - DNA, 458 bp, Glycine max
  Clone ID: PAT_MRT3847_109994C.1
ctgcagtcgactctagaactggttgtagcatcccaaattgtgtcaacactctgtccggttggtaccactcaataactaggaaacaaattagcggcaccatcgcgtaccaggggagacttccgactaaacaatcgggatgcatacaatgatataacgggtggatggggtaaggctcccacacaaacttgattataacaacatagttgtgaacattgtagtaaaataacacataatttttattttacaaaaataatgcatggtcctacctcatgacgtttcataatatccagcttgcgactaaaaactctaacatcatcatggctgatatgttgggttccactgcgcagccacctacaaagataaaaattaacacatgtctaaaaccatttattctatttgaaatggaatgacgcgtttaaaatgactaacttgtgccccaagggtgtattttctaactg

SEQ ID NO: 11058 - DNA, 373 bp, Glycine max
  Clone ID: PAT_MRT3847_109995C.1
gagcaattaattttttttttaattattttaaccgggggtggggtggtaaactttatgaatttaatctgatggcatgaaatgaaacaaccaaaatgaaaacttttgtttccaaaactatgatctcgaaaaaacaaggtcccaaattggggaaaaaatcaataccaatttcttggatccaaaatatcaaaaggacaagggaatcggcatgatcatcccaggaaattggagaaactcagcaagccaccttcaccagatccgcctttctttccaaacaagacaagctgcatcttggcataaccttccagcacaccggaatcagcaacagatgcaaatgtttgcaccaacacctttgaagaaagactttggaccctca

SEQ ID NO: 11059 - DNA, 733 bp, Glycine max
  Clone ID: PAT_MRT3847_109996C.1
tgctttctcccctgaatctcaccactctccgatctttcattctcccctcttttctagctcccgtggagtctggaagcgttctcgagccttctcgctttccacgtgttttgcttttttccatttctctctctcccgtggagtttagaagtgtgcgttccggagccttttcgctttccatttctctctctcccgtgctttctagagttggtgctctgggaggagtaacgattcagcggttgaattgcgagaatggaaagcgttttagagagtgtcatgggggcacaaaaaaagttttatttttgttgataaagggttttactcagttgaaatgttgctgcttctgctcgctcttaaggattaaggtcgtagtggtaattaaagagacgatgagttgattcgagatggggaacaactgaagatggggaggattattggcttcttgcaaatcagtggaatagtgaatggggagatgatggttacttcaagatccgaagagggacatacgaatgtgggattaaagaggatgtaactgctggtttgccttccaccaaaaacctcgtcagagaggtgactgatatggatgctgacgctgctgtttcattcagaataatttgtgtgtaactgcagctgatcggcctattaaagagatattagagtaggaaaaaaaggagctggcttattgacattggatgatttgcaaagagagtgaaaagcactactctatcttcagcta

SEQ ID NO: 11060 - DNA, 533 bp, Glycine max
  Clone ID: PAT_MRT3847_109997C.1
gcactaacactatagtgctttgacttcttccaaacttggtttccatgatatcatggcggaagtttacaagaatgggccagttgaagttgcatttaccgtttatgaggattttgcttactacaaatcaggagtttacaaacacatcactggttatgaactaggtggtcatgcagtaaagctaattgggtggggaacaactgatgatggggaggactattggcttctcgcaaatcagtggaacagagaatggggagatgatggttacttcaagatccgaagagggacaaacgaatgtgggattgaagaggatgtaacagctggtttgccttccaccaaaaacctcgtcagagaggtgactgatatggatgctgacgctgctgtttcattctgaatgtaaatatattgcctttccaattatattctgtatgggtattgtaattgaaaaatcagcactagatgttgcctgtagtctgaacctctgttttaaggggaacaatctaaattatgattacgatgttcaaagatgttaaaaa

SEQ ID NO: 11061 - DNA, 1884 bp, Glycine max
  Clone ID: PAT_MRT3847_109998C.1
gtaagctcggaattcgtctcttggctttctcccctgaatctcaccactctccgatctttcattctcccctcttttctagctcccgtggagtctggaagcgttctcgagccttctcgctttccacgtgttttgcttttttccatttctctctctcccgtggagtttagaagtgtgcgttccggagccttttcgctttccatttctctctctcccgtgctttctagagttggtgctctgggaggagtaacgattcagcggttgaattgcgagaatggaaagcgttttagagagtgtcatgggggcacaaaaaaagttttatttttgttgataaagggttttactcagttgaaatgttgctgcttctgctcgctcttaaggattaaggtcgtagtggtaattaaagagacgatgagttgatacggccccttgtagtccacataagagggggtaagagattctctttctctgagttccctctgctaagaaaagtggtctataaaaatctgctctcagtcccacttccccgaaatatggcttcaactcatcttatggcttcaactcatctgcttcccctagcaaccttcttcttacttctctccgcttcttatctccagattgctggggcggaagcacaaccgttgactagtctcaagcttaactctcatattcttcaggagtctactgctaaagagattaatgaaaatcccgaggcaggatgggaggctgctataaatcctcgtttctccaattatacagttgaacaatttaagcgccttcttggagtcaaaccaatgcctaagaaggaacttagaagtacacctgctatatctcacccaaagacgttgaaattgccaaagaattttgatgcgaggacagcttggtcgcagtgtagcactattggaagaattctagatcagggtcactgtggttcttgttgggcatttggtgctgttgaatcattgtcagatcgcttttgcattcattttgatgttaatatctctctctctgttaatgaccttcttgcatgctgtggctttctgtgtggatctggctgtgatggaggatatcccttatatgcatggcgatacttagcccaccatggtgttgtcactgaagagtgtgacccatattttgatcaaattggctgttctcatcctggttgtgagccagcttaccggactcccaagtgtgttaaaaagtgtgtaagtgggaaccaagtttggaagaagtcaaaacactatagtgtcaatgcatacagagtgagctctgatccccatgatatcatgacggaagtttacaagaatgggccagttgaagttgcattcactgtttatgagggattttgcttactacaaatcaggagtttacaaacacatcacaggttatgaactaggtggtcatgcagtaaagctaattggatggggaacaactgaagatggggaggattattggcttcttgcaaatcagtggaacagagaatggggagatgatggttacttcaagatccgaagagggacaaacgaatgtgggattgaagaggatgtaactgctggtttgccttccaccaaaaacctcgtcagagaggtgactgatatggatgctgacgctgctgtttcattctgaatgcaaatatattattaccttaccaattatattctgtatgggtattgtaattgaaaaatcagaactagatgttgcctgtagtctgaacctctctgttttaaggggaacaatctaaattatgattacgatgttcaaagatgttaagcttttgttgtttatctgttatacgaaataagagattaactgctatagttactattcagtagttggagaaagtcatgtgttggtatttttaatgctgatgatgctttggcttgattt

SEQ ID NO: 11062 - DNA, 401 bp, Glycine max
  Clone ID: PAT_MRT3847_109999C.1
gctagcaattaggctggagcgagcacatccctgtaatctacttaccgatctggcctgactcaaataaacaaaacaacaagggtcaataggcgacctgtgatggatacaccataaactcaggcacaaatcagcaacaacactataatatcaacaatcagctaaaaagtggcagctatggggagtgaacaagacccagaaagcaatttaccacaacacaaaaacccggatcaaggataacatatgcgtcacacagaacccactgacagcgcctccaacatcagagtacattcccattccgaggaagacgggtttaaagaacctagcaatcaatggacgacaaaaaataaatgcatgggttgactccaacagagcctgttttacaaccaattacaaatccacct

SEQ ID NO: 11063 - DNA, 332 bp, Glycine max
  unsure (1)..(332): unsure at all n locations
  Clone ID: PAT_MRT3847_10999C.1
tcncgcatcttacgtnattctgaantcggctctagntnnagacnntcgtcttgngtttgnctnnnctngantgctcagagntcnacggcntcnngtntttgtgnttgtataggttnccgngnttncnntnangnnncaaggngncantgtnncatgccnggntngtcantcnatnanacncntgggtngangaaagntcnncngtncatngncaggtgtnnngantctcnnatngcanccnatccaanantntcntnnttntggngttgtnatgntnnncncncctncntccagagttgaagnctttaangggngtgatngctnttcncttn

SEQ ID NO: 11064 - DNA, 933 bp, Glycine max
  Clone ID: PAT_MRT3847_1099C.1
gcgtccgaacttgaatgtgtgaccaacaaaacttggttgagtcttcctttgtgtttcatgcacagcatatgaactcatcctcctccgccgcagagtccaccatggaagacccctccaaccaccgccactccaagaagcaccagcgccgccaccgccaccaccccgccacgacgacaacaacggtgagcacgacgaccggggagtcggacggcgaggaggcggaggacgtcggggatcccgaggcgtgggccacccttaacaaggggttccggcaggtgcagtcggtgctggatcggaaccggctactgattcagcaggtgaacgagaaccagcagtctcggatgcacgacaacatggtcaaaaacgtgtccctcattcaggaactcaacggcaacatctccaaggttgtctctctctactctgatctcaacaccaatttcaccaacgtttgccaacaacgctccaaaaactcctccaaataattaatgtttcgtgtctgtgtctattgtcgaagttgaagaatttgtgatggtaattttgggctttgttttgtcatcaattgtcgataaggacggtgaaaaggcgaagcattgtatcgtcctctttacttctttctctgcagatactattgaaatattgaataataaataactccactctctctgtacttcttttcttttctttttatataaaaaaaaaagtttaggtgagtcgagttcgaagctcacaaaggttcagacctcaagctcaaagaacacttacaacattatttacatattacctaccaacaaatgtcacagcagaaatcagaactcacgttctttggggaattgtgttcctttcttatcaagtggaccgtccttcccttctttctctacacatactactatattgtcgcgtcctaccattgaatagtaactccaatctctctgt

SEQ ID NO: 11065 - DNA, 559 bp, Glycine max
  unsure (1)..(559): unsure at all n locations
  Clone ID: PAT_MRT3847_109C.1
cnatttcgctttctattatggcgnccgagagtgcttctcgattgacttccatggctgattcgtacattgggagcttgataagcttgacctctaagagtgagatcaaatacaaaggtattctctaccacatcaacactgaagagtccaatattggcctcaaaaatagtattcttctgctacccacttcttttttcttatgaatttcctttcaagatgttaataatatgcgtcactcgagaatgagttgcatttgcagagcctctctgaccgcatggcggagctagagatcttggggctattcatttttgtgcagattcggttttattgtttgcaaaacagagggagcggtgagtcactgatggcgaaggcagtgatgatgggtggggtcctgtttggaaaaagcactgttgttggtgcttagctcagttggctgagtctaattataggcaggtttgcagtaccctaattgnattttcttatgtatatattgaaattaatttcatagcatctattcaatgcaaatgttgtgatcctcttattgattaatatatatattgaa

SEQ ID NO: 11066 - DNA, 811 bp, Glycine max
  Clone ID: PAT_MRT3847_10C.1
ccacgcgtccgaatggagaataaatgttatccgttaccattcaataattcaatcacaaacctatacatatataggtaaaattgaatgtcctttatggctgtgagattatgccctccaccactagtcacacacaacagtttcttaacaccataaaagctttaatttgaggcatggccaaattccatttctcacccaatgcaccaccatattggtcattcctactccacccagctagtaggcctatgatcaatttctggcacttattcctggggtgtaccattgtacaattactacagaattataaatggtggatcatcatgttaaagtgaaaccctttttggttggcataatgcctgctctagcttaatggagcattcaatagtgacccttttctttctcttctttctcccctccttattttttctttaattactaaaatagttgtaacccaatgtccaaagacactacattgatttaaaattattggcttgggttgtctttacattgtcaaaattttcaactaaagagtatcaatgtgtgtatgactatgagatagtatttgtggtccaccaaattattgattaaccttaattcaatttgctgcttgggatttagcctttgttgtacttttcccactataacctctatggctaaatagactcaaaagcctaagtaatagtggaaagttggctccttttgctttcaacttcagtcgatgttttgaccattcgattgaaaggggaagcacaatgcataacttttaaactttttaaagaaaacacctaatgcccagccaaaaggatggggggtg

SEQ ID NO: 11067 - DNA, 354 bp, Glycine max
  Clone ID: PAT_MRT3847_110000C.1
agccgggtgcgggtgcggttgacatttgatcgtgatgggagttttataatgaatgttcaggagctgaccactgtcaagggtcacaaactcccgggtaggaggttatttttgcataatccacactagaatttctttggccagtgctaaaatcaggtatcctggactttgattaccttccaaaaattctcaagttttcactcttcagtttgcagaagctctcatctccagcgaatgaggagatgatgaaggccgctcacaagaaactatttcatgaattgagtgaaatttgccattcaagggatgagtcaaacaattcatgtgttgtaaccctggtgaagggcttgcaatttgtct

SEQ ID NO: 11068 - DNA, 287 bp, Glycine max
  unsure (1)..(287): unsure at all n locations
  Clone ID: PAT_MRT3847_110001C.1
ggccccccttttttttttttttttttttttttttttttttttttgggttttttcccatnaaacagggcctaatcagttttaaataaaaacagggaaaatttttcacatccaaactttctagcttgattttttttcaacatagcttgatttgaaaacagtgttaccaaacaaaataatgccgcaaaacattgaagagagagagagacaagagatctatgggtctatgcccttaatgggctgcaaaaagacaacatatagntttttttttcattttattttcttggaat

SEQ ID NO: 11069 - DNA, 460 bp, Glycine max
  unsure (1)..(460): unsure at all n locations
  Clone ID: PAT_MRT3847_110002C.1
catacctttccaaacnacaancacctganctcggtcttctatcttaagctcaatctctatcaacgcggagagaaagcacttggaagaggctgctccacaatgcaacagttttaagggagcttgtgctgaatcgcacagatttgtcatcaacttcaatgaggccactcaatatgtcttcctctttgaacactctaagtcttagaggaactgggttaaagggaacgctggcagatggaattctctgtttgccaaatctgcaacacttgtatctatcagataattgggaccttcatggccaacttccgaactggagctgtagcacaacttctctcagtgtcttacagatctcatctaatgaattccaaggcccaatccccccttctttctctaacactgaacatcttactttcctggatctctaatgaacaaactcaacggatcaatcccacccttactctta

SEQ ID NO: 11070 - DNA, 817 bp, Glycine max
  Clone ID: PAT_MRT3847_110003C.1
aaacccaacaaagcaatgggttagttataaaatcaaaattcaaataccaatgcattggttattgattattttaaggcccttgtcaaggattttaaaattggaccaaaaactagtaaaaaatctggcttaaccaggaaaaaaacagctaaaattgtttgggctggtcctcggttagaatggcttcacaaaattcaccacaaatgtcattgttcgtgtttcaacataaatgttctttggtttttgtatacacttcgtcatgtagatacatatatgtacaaatattcgtaagtaatattggcacaaaatactggtgtataccagacaagaaaattacatagttgcggacccaaccacttacattacataccaattataatgaatttcgcttctactaaaagtagtaacacttgcacttctgacaagctcaagatctaaccccttcatgaaattctatggtgggcagcttccctcaagggtttcttcttattggctttattgtttaagaaagattgcaacgagcatattgaattgagtccatgcctcctgtaaaatatcaaaaactttttctgcaatatatttttggtatgaagaagcacccttttgttgcaacttgtctggatgcagacagagtaaagctctttgataagatcttttaactgcgttcccttcaattatatcaacaagaggcacaggcttccatccgcactccggccaaagtacatattgtaatgtcgatagcagggagcgtatgtttccttccttccctttagaccattgttttatcttgttgtcaatcgtctggatttcttgattttct

SEQ ID NO: 11071 - DNA, 171 bp, Glycine max
  unsure (1)..(171): unsure at all n locations
  Clone ID: PAT_MRT3847_110004C.1
acgcgtcgccgtacgacagcatacatgcggatgctccgtcggcgtggccacccaagttcgtgagtgccgggaccaacaaggagaaggaagaagatttactcgccattaanggctcaaagctgtctaacagacccaaaaatagacctaaattcattcaacgaaccttcaatc

SEQ ID NO: 11072 - DNA, 541 bp, Glycine max
  unsure (1)..(541): unsure at all n locations
  Clone ID: PAT_MRT3847_110005C.1
gtggtgagataagtttcataagccaaccgcaggttgggagcacattttcatttactgcagattttggaacaattaagaaaaatgcaataactgacatgaagaaacataatttggaagatctgccttccaattttagagggcttaaagccatagtggttgatggaaaacctgttagagcagcagtgactagataccatctgaagagactagggatacaggctaaagttgcaaatagcttcaataaggctgtttctttatgtgggaaaaatggttgtttgacctcgggattatttcagcccgatattatttttgtcgagaaagattcatgggtttgtgtagaggatgggatcttcaatgtgtggcaactggactggaaacagaatcggcatatattaagatacctcagatgatacttcttgcgaccaacatcggtaatgatgaatttgataaagctaaagctgcaggtttcagcgatactgtgatcatgaagcccctaanagctagcatggtggctgcttgtcttcagcaagttctgggaacg

SEQ ID NO: 11073 - DNA, 431 bp, Glycine max
  Clone ID: PAT_MRT3847_110006C.1
accggtccggaatgcccgggtcgacgcacgcgtccgcattgatatggagttatggaccatagaaattagcacatgctcatcaaaactggcattcggaggtcaccgaagcaaaattactgctgaaagaggcacttcaagcagaggttggcttgcctgttgacaggaatatccctctgataggcttcattggtaggcttgaagagcagaaaggttctgatattcttgtggaagctatcccaatgttcattgaccagaatgttcagattatgattcttggaactggcaaaaaggtcatggagaagcaaatagagcaactagaggaaatttatcctgacaaggttagaagggtagcaaaattcaacggtcccttggctcacaagattattgctggagctgactttatagtgatcccaagtagatttgaaccctgt

SEQ ID NO: 11074 - DNA, 1376 bp, Glycine max
  Clone ID: PAT_MRT3847_110007C.1
gcaataactgacatgaagaaacataatttggaagatctgccttccaattttagagggcttaaagccatagtggttgatggaaaacctgttagagcagcagtgactagataccatctgaagagactagggatacaagctaaagttgcaaatagcatcaataaggctgtttctttatgtgggaaaaatggttctttggcctcggggtatacaggctaagattgcaaatagcttcagaaagattcatgggtttgtggagaggaagagatcttcaatctctggcaactggactggaaacaaaatgggcatatgtttaagatacctcaaatgatccttcttgcgactattcaatgtgtggcaactggactggaaacagaatcggcatatatttaagatacctcagatcatacttcttgcgaccaacatcggtaatgatgaatttgataaagctaaagctgcaggtttcaacgatactgtgatcatgaaggccctgagagctagtgtggtggctgcttgtcttcgccttcttcggggaacggggatcttggggcttcacggcaatgtcgtgaacccgagggtcgccgcaggtgcattaagaaattttggcgctgatgtgacgtgtgcagaaagtggcaatgctgctctcgagatgctgcagttgcctcacaattttgatgcttgcttcatggatattcaaatgccagaaatggacgggtttcaagcaactcagcgaattcggatgatggagacaaaggcaaatgagcagcagatgaatggtgaaggaaatgggtggaaagacaagtaccatatacctatattggccatgacagctgatgtaattcacgccacatatgatgagtgcgtgaaatatgggatggatggatacgtctcaaagccttttgaggaagaaaatctgtatcaagcagttgcaaagtttttcaaccccaagcctaccacagacaacagcctaatagaaaatggcagaacttgaaaagcaacttaatgtttaatgaaagacacttactttcactactggcattttttcgtagtttgctggtaatttgaatgtgctttaatcagttggtttttgaagatatctgaggatatgcatacaccaggcatatgcagtgatcatttctaaccaccagctgaacatgatttcaatctgagtaaatgtatacccctaccctcaacttgtgtacagattctccccccgggatgaggaaaatcatgtaaattcaaaaaatttttttttcctttcttttgcatctcccgatacttccctatgattagggtttcaccaatattattttttttttctctgtaatattttggtctaatagaattttggtagtccccatattcagagggaagttcgg

SEQ ID NO: 11075 - DNA, 435 bp, Glycine max
  Clone ID: PAT_MRT3847_110008C.1
cataaattaaaagaaaaggtaagaacataaaaaatcaataacaacaggttaaccatgcccaacaggaacatatataaaaccaggttccccaaacgaaagaaaaaaaatttgaaaagggggaaggggaaagaaaggataacataaaagggggagggtcaggttggtaggggggaacggaaaaggcacccaattggctgagcaagagggccaagcccatgccccttatcatcgtaagggcaggtctggtggagggacactccttggaaaatccaaccttaccagattggagttccctgggtaggcaaacctttaatctttaatggcattccacaggaggcattccgaatttgacaacgcaattgcaatgggccatgccccaagcataaaaatcatcacatgggttttggccagcacaaccccaataccctaccccgg

SEQ ID NO: 11076 - DNA, 692 bp, Glycine max
  Clone ID: PAT_MRT3847_110009C.1
ccacgcgtccggagcattcaggttgttagagcgtccattgagctttcaatctgtggctgtaagttctttattctttggatttctgctgctacttttatgtctagggtttggtcagaaagcatgcatcttttctctgcaccttgtttttctttttttggggggggggggggggggggggttaagcaaagatgatctcgtttttgaagttctaatttcgcaaccacaatatagagttcctttccccagtgtgtgcagcaatctcgattctgtgtcctatggtgttcagtatccaattggtttgcataatgaaggtcgtgctttagaaaaggagtgtaacacgggagatggggtttcgaattttccagattgtcctgtcaactatgctgtatgtgcctcaagtggtcctcctgaattggattcaggtgctggatcaccacctcagaatcagattgaaacaagggcctcagacaggcaccacgacccaactccgtctctcgcaaagttgcaaaggtcaaagtcgacgcagaaggctctggagctacgtaatagtgcaaaagcacccagacgattgtcaggagaagatgataatgcctgtgtctgtgctggcacaggtacaggttctgcaccctcaactcaagaggcagaacatgcaatggagtcgggatgtgggcaaaagattttcattccaacat

SEQ ID NO: 11077 - DNA, 401 bp, Glycine max
  Clone ID: PAT_MRT3847_11000C.1
tcgagttcgactgcaagtagttcatcaactcacgtacgtattcttcttatgaagtatacgatgctcaattcacagaaaaatcaaagcatttctccgaagaattacttaaaggttataaagaagtagccacaaatgcaggtgtaaaaaatgtggacacacgtttagaattcggctcacctaaagcaattatacctaaaaaattagcgcgtgatgttggtgctgatttgattatgagtggtacatcaggtttaaatgcggtagaacgttttattgttggctctgtatcagaagcgattgttcgacatgcaccttgtgacgtattagttgtgcgtacagaagaaatgcctgaagatttccaacctcaagtagcaacacctcaattacgtgaaaaatatcaagat

SEQ ID NO: 11078 - DNA, 382 bp, Glycine max
  Clone ID: PAT_MRT3847_110010C.1
gcttactagtcggggtccagaactaatttttctctcatttttcttcaatttttatacattggatagcatctgactagagcacgcatgagcgttcataatgtagttcgaaataagatttgattccaaataataattacgaataagtctaaggatatgcagaaaccgcatgagacaataacaaaatctcatccgtattgggaacatcagagtgttgtatatatacgatattggctacaaagcgacagaggcatagacatactacctgctgttcttttttctacaggagataggaaacttctcatagaggactcttgtagatctttcctctgagagaagctgtctcttagtgatagatagaggaaggagattggtttagatgaac

SEQ ID NO: 11079 - DNA, 781 bp, Glycine max
  Clone ID: PAT_MRT3847_110011C.1
gtggtcatacggcatcgttttgtacgagatgttgtacggaacaactccgtttaagggcgccaataggaaggaaacgttttaccgcatcttaacgaaggagccagagctaacaggggagaagacggcgttacgggatttgattgggaaactgctggagaaagatcctgaccgtcggatcagggttgatgagatcaagggccatgatttcttcaagggggttaagtgggacatggtgttgcgcattgtgaggccaccttatattcccgaaaatgaggtcaagaacaaagtggggttcggcaaaagcgacgtggaagtgttcgtggacaaggtgttttttccaacaggtgatgatggaggaagagagaaaacaaaaatggtgttggaaaagaaggatagtaataataatggtgagaatattaacaatatggtgaaagttgatgaattgagtcatgttcccaccgagaagattgacgattttttgattttttgagttgacatattcttttaatattagcctaaatgtggatccttatctcaccttaaaaaaaaaaaactaattgtagatcgtgcatatcttttgaaatttaattaatatataattaatttcgaccattgttgagatacacgagctagttaattttgtttgttgttaattatactattttttctgtaaattatggttcaatttaatgccattaattgactaatgttttaaaaaaaaaaaaaaaaaagcggcggccgcagtaagacgtagccgccgccctgatttgatccggacggc

SEQ ID NO: 11080 - DNA, 361 bp, Glycine max
  unsure (1)..(361): unsure at all n locations
  Clone ID: PAT_MRT3847_110012C.1
antcacaaaagggaggattgtttttttattgggggggtcccccccaaaaaatgtttaagaaaaaggccgactttcttcaaaccacccccgatgcaaaatccttgggggaaaaaaaaaaccggtgggagggccaaaaaacagaatgttatgattggaggggctgaaccactaacaaactatggtaaaacttaaattttaaaaaaaattgttcatacgaaaaaaaaatcccgctaatttgaaaagtaaattaaataccggaaccaattggaaggctggttttaaacccggagaggggggtcatttgttccttaaagcccttctttttggggatcggacccggggggggaaccctgggacaacc

SEQ ID NO: 11081 - DNA, 332 bp, Glycine max
  Clone ID: PAT_MRT3847_110013C.1
atgacaataatgtattataacatcaaaatagagcagcaactgaagaaaccaaaccaaaaattaccgcggtataacagcaaatgaaacaagctatgaatgccaccagtgactctgaatattttcattaatacaagagaaagataaaaggaataaaaaaaggacttaatatggcagtgaataacatagcatccaagggaatagattttgacctaaccatgaccaaaaagtcccaaaagcctaaggccaacacccatattctctatcagttattttacaccctccatgggaaccacctgcttgaacccctaacaccttccttgtgccaaacacta

SEQ ID NO: 11082 - DNA, 347 bp, Glycine max
  Clone ID: PAT_MRT3847_110014C.1
cttagaaatggacactctcttagtcctatacggggaagccctcaactgtatttatttattacattcgctggctactgttgcctagagcatgctttgctattagctccagcaagctcacctagagccaacgcaacatcctcagcgcggtggaacccgaccaccgagtagagtccccaggtggtcagattcagacatggaaatatcaccacactatgctgaagagcgccgcatgcactgtttgcaaacatagcctgaaccgtaccgacctacacttgacatcttactcaccttatccctcggtgatcatcatctcccgaggccaaggagctcttgtacacgcaatttca

SEQ ID NO: 11083 - DNA, 481 bp, Glycine max
  Clone ID: PAT_MRT3847_110015C.1
ctacactcgagcactggtcgtctaattgctcacaaccgtatgttgccagacggcttggcctcattctttgtggttgccccccgaaagaaacgagtactagcacagggttacgactttgcctcatataaagcatttggtgccattaatgaacataattcacacttagtccacaccacgctcgcgaaatacagggcaccaactttacccagagttttatctgtacaaaagatatcgctttagcacatggagttctctgcgtccaccacccgaggactattctccttacagctgggcctttgatgacattctgcccaacactctgaaatgaacctgcctagagggccttctggcatctgcaatctggaacactgatgcgcaacggaatataccaccctgtcaggtggtactccttaccatggtgagcccactgtgcacagtatcaaccttatcaccccatggctcacgatgtgacatttgtctg

SEQ ID NO: 11084 - DNA, 564 bp, Glycine max
  Clone ID: PAT_MRT3847_110016C.1
tttttgtttgttttttttttaagcaaatctaaaaatatatttccttttgaaaacacattttcagtgtttttatttcttgaaaacagaaaacaagaagtaaaacaaaacatgttttcagaattctaatcttttgaaaatgaaaacagaaaatgaaaatacaaaccaaacacatcctaagttacttgggtacccaatactctttattataaagaaaaaaatgtcttttagggtatgttttaaaaattgatttttggattaattgttttagatattgatttaaaacaattattggtgagcaaatctaaactgctaatatctagctagctagtagtgacattttacaaatctaacatgaatccttgcaatgcaagagaaaaaaaaaatgcataatggaaatcataaattaatcatacttctgtaacattatctttcattctcacttattatttgattttcagggagtttttccgggagccttattattaaaagattattttcatatgatgctatttatttcaattctttaaactatttaccatatctattttattattctagcctata

SEQ ID NO: 11085 - DNA, 261 bp, Glycine max
  Clone ID: PAT_MRT3847_110017C.1
aaatttaaaaatattaaaaaaaaaaaaaaaaaaaaaaaaaaaatataagtcagccataaataatgtcaacaaaacatacctacagctccctacaacctcaattgggtttcctactgtcacgtcccctcctttctctcgcctgatttctacatcgtggctcctataacagccccttcactaccctcatttggcgcgtgtctccccctgcccctttcggaagccccctgttgtgccccccgttcaccgcctgccgccctttcc

SEQ ID NO: 11086 - DNA, 145 bp, Glycine max
  Clone ID: PAT_MRT3847_110018C.1
tgttttagctgacagaccattatctactgtatccctctgttagcgggactgatacagagagttattgccatgtgcgactccttggatggaccaatctacaagatcgatgacctatgcctagagacaacatctgtagctgtaaata

SEQ ID NO: 11087 - DNA, 274 bp, Glycine max
  Clone ID: PAT_MRT3847_110019C.1
cccacgcgtccgtcaattctgaacaaagagattctagcgccaatcatggaccacgctacaatggagcattgacactccataggctcaatccaaaccacttgcacactgccagcaggtttgaatcagtacaggcactcatactaggacgtagccattcaagcacagctgacaaggaccctaacaagacatagagaccttctagccctttctacatttacatggccgcaattatatagcatatctggcaagagcatcctaacaacaaattcctccc

SEQ ID NO: 11088 - DNA, 445 bp, Glycine max
  unsure (1)..(445): unsure at all n locations
  Clone ID: PAT_MRT3847_11001C.1
tnnnngtttnnnnnttttttttttttttttagaaccaaacaattcttacatttatgaataaattcttgcaatcaagtatcttttgggtgtacaatggtggcaatgaaaattgaatacaagtccttatgcacctatcctaatctcctaccactaaggcaacctagtggattttgtaatagagtatataaaacatatagggagaatttaatgcaatttttttttaacttttagtttggtatttcaattttaacaagcaattggtcatacaaaaatacaaaattaaaaactacttacattgttcttatgggaagaaatatggtaatttcgaccattatggaatagggaactggcataggttgattgcaaatcatctttagcatgataactaataaatatttcttcacgacctgatcgctttcttttaggttcaagggccatgtataca

SEQ ID NO: 11089 - DNA, 562 bp, Glycine max
  Clone ID: PAT_MRT3847_110020C.1
aaagatgcgagcacagacgctgatgacacagtggtgcacaagagcagcaacgtgtgggcaattgaggatgagcactaacactaacactcccaaacacgatggtatcgacgccattttcaaacaaaagcgctttcttcgaacgcaggtcagaaaaaccctcaagtccatcgatccctccctcaaatcccaccaagataacaccgttcaagacatagttttgggagctccgtggttcagatccagtcgcaggttgtgcgcgtacataagctgcgctgctcttcgcgaagtcgacacttcaaaaatcttgtcacagattttgcaacataatagtactactgatggaaaaaaactttatgtgccacgcgtggaggataagaatagtcacatgcgtatgcttcacatatcgcgaattgatgatctcattgcaaactcaatggacatactagagcctactccggttgatgctgatggaaatgcgcgtgaagatgttatgcaggcaaatgatccagttgatttgttccttttacctggactggcatttgacagatctggaagacgttta

SEQ ID NO: 11090 - DNA, 225 bp, Glycine max
  unsure (1)..(225): unsure at all n locations
  Clone ID: PAT_MRT3847_110021C.1
gtcaagctgtgctttgactacctcgctatctcgtattgttggaatcntggtgttgctctntgtttcntcctcatccttgtgtttcgtatcctctcacctgtctcatggatctcgcgctcccaccgtctcttccaccaccagcagtgagcatgctgaacatataggaagtatgagtctgactaagctcacaggaagccttgagaagctattgattgaagatgagta

SEQ ID NO: 11091 - DNA, 1746 bp, Glycine max
  Clone ID: PAT_MRT3847_110022C.1
tacggctgcgagaagacgagagaagaggggagtatggacgtgtgttagttggctaatgaggagtcctcatttttcttcatctgtatctgaaccctaatcccttcggaattggaaagaataagaatcatcaatggagggagtgctgtccgcgaatgagcaacagagcatggtctcttctttcctggaggtcgctcagggccagaccgccgagactgcgcgccagttcctccaggccacaagttggaagcttgaggaggctcttcagctgtttctgatagggagtgaaggtggggccgtgccgttgccggtgccgccgcctccgttgttgcacactccgcctttggaaaatgtcgattcctggaccgatcaacagcctttgagtgaaccgaggaaggacgctgcggctgcaagtgaaagtattggcctcaatgatgcggaagaggtgcgccctcccttgcctgtaataagggaaactctctacgacgacgcgatgctgtatggagcatcaagggctgggcatcgttcacatgaaccgagctccctagttgcatttcgtaactttgaagaggaaatgagacaaccaggggtttgggagtcggaacaaggtgctgcttctacagcagaggcttctcgagataatcttgcttcactttatcgccctccatttcatctaatgttcaatggtgcttttgataagcaaaagatgctgcttctgtgcagaacaaatggttgttggtgaacatacaatctaccaaggaattcagctcgcatatgcttaaccgggatacgtgggccaatgaagctgtttctcagactattagtacaaactgcatattctggcaggtatatgatgatacaactgaaggcagaaaagtctgcacttattacagactggattcaattcctgttgtacttgttattgatcccatcactggccaaaagatgcgctcttggattggaatggttcaacctgaaagcttattggaaggtctactagcattccttgatgcagggcctaaggatcatcatattaccatgtctcacaagcgtcctagaggaagttctagcccaccaaaatctaaagccttggtagaatcagatgagaataaagaggagtatgaggaagttcaaagagctctggcagcttctatggagagcatgaaagaatcaactgctatggctggaagagacaataaagatgcagatgttgcagtcaatgggcaagaaacacccatggctaagagacccacatatccaaccctgcctgaagaacccaaggttgaaagaaatctcctatgcagagttggtgttcggcttccagatggacgccgggttcagcgaaacttcttacgcactgatccaattcagctgctgtggtctttcatttctgctcaactaggggaagatgaaacaaattcatttagattaacacatgcaattcctggagcatctaaaattctggactatgaaattaattcaaccttccaggaatcaggccttgccaactctatgatttcggtgacttgggactgagttcgggttcattactgggtgaaatttgcagactgagaacttcagattggtcccatctatatgatcccgtttttcatcttttcatgaggttgtttatgttcaaagaaaaggttattgaaacttttttgtgtatagactacaaatccgaacgatgggttaagcgatgttaatggaaatatattgatgttattaattgtaaaaaaaaaaccaaag

SEQ ID NO: 11092 - DNA, 494 bp, Glycine max
  unsure (1)..(494): unsure at all n locations
  Clone ID: PAT_MRT3847_110023C.1
caaatatattctagcagtttgaaagttcatttttatggtagagttatctatgttaagatggtacttttgattaaatatgataattaatacttgcttgtgaggacagtnaataaataaaactatacgagtaaatggaaattaaagatattttgtttttttcaacatgacattgacagttatggttgatttgaatttgaagggattgaatttatttgcctttttttcaaatagatgaatgattggtcgtcatctggtgcttttgtaacaccccaagttcgcagtttgcgcaaaggcaatagtgatcatgttgccattgctgtagatgtagaccctggtagtactagtaggatagaagatgaagaggacgacaaaggtaattatgttttactaaacctgtgtactggcttctgttgttttcagcagcatcgcctgaaatttaattctggcattcccacttttttgttgcagtccatggtttcaaattcctcacaaca

SEQ ID NO: 11093 - DNA, 469 bp, Glycine max
  Clone ID: PAT_MRT3847_110024C.1
cccacgcgtccgcccacgcgtccggagcaatctggtctggagaaccttagcccttacatgatgtatgatcctatagcctggattagactaacaaatcagctgactcgcctcctgatcctctcatgctagatgcaaactgctgatctactcttgtgctggctgaaacgactatgtgcctatacacctttaacagcaaaatgcgacgacaagactgacaacccgccagggatagaaaaaagatgtcacgtatgacatgatacttacagaccttgacacagacacctgttgcaatagaacaggtggccacgacccagaactactacacgttgttcaagtggaaggggatcataggatgactggggattctctcctagaacagactggtgtcatgaacactgatcatatcaatattcataggtacggagctatcgttgtctaaaggggcaagactgatctgcgcgactatgtg

SEQ ID NO: 11094 - DNA, 417 bp, Glycine max
  Clone ID: PAT_MRT3847_110025C.1
tttttgggtttttttggttgttgaaaaaaataccacgacctttattgggcagaaagcaccaggtcttcacaaattaaaaacccttttgaaatttcacttccaggtctcgcaacaacccgaaaaggcttccggggatacaaatattgatttcatgccccgattctcgccaccgaacccaattaataccccgcttttggagatcttcctcctcgcgaggaacctcaccatggggggagtgagggcgacggttatgggaacccccacggggaacaacgccttgttgcacaggatctccaacaagaaggcgcccccgggggagggggagatctgaccccgccggttcttggggggagcggcgggcccccttgagagattaggggtagggttttgcccctccgagaccgggcccatgtggaa

SEQ ID NO: 11095 - DNA, 150 bp, Glycine max
  Clone ID: PAT_MRT3847_110026C.1
caaagactattcttggagagtggttatatatattactacttatgttgtgctttcatggaccatgttttaagctatttcgacctgattttaatttttaacagtataaatttagaattgttaaactaatactgttaaaaattctaaatttat

SEQ ID NO: 11096 - DNA, 384 bp, Glycine max
  Clone ID: PAT_MRT3847_110027C.1
ccaaaaattaaatttccgtaaaaaaataaagccggaacaaaacccaaggggaccaaaatttttttaaacatgccaaaaccccatgctataccccgaaccgggggggggccctcatccctgggggggcgttccctggaaaaaaaaaaggaacaagaggtggcaccccccactaacagcgggggggttggggcccctttgggggggcaaccccagttccaaaacccggaaatggggccccatgggaacccccgggggcattaacaaaaaaaaaagcccggtgattggtctaagggggccgcccccgtttaaacacgccccccccggtttggggatggggggccttaaaaaaacccggacaggggcctggaagggccaagaaggggg

SEQ ID NO: 11097 - DNA, 282 bp, Glycine max
  Clone ID: PAT_MRT3847_110028C.1
attccgcgcgacgccacgcgttcggagaactattaagaaggaaaggctttctcatgatctgggcccatctgttaccagcgcaaccgtgccggtgccggcatggttgctccattcaccgtcctcaaatccatggctggctttcctactaggaataccaacaatgacattacctccattgctagcatcgttggaagagtacaatgcatgcatgtgtgtccaccaattgtcaagaagaagtttgagactctttcctacttgtcagacctcgattatgcccaattg

SEQ ID NO: 11098 - DNA, 269 bp, Glycine max
  Clone ID: PAT_MRT3847_110029C.1
ttcttattcatcacttccctattcttacactccttactttaaatcattccactcctcatatatctttcatatccactttaaatatatcaaccaatcctctattctattatccatatatttcactacctccttttttcacccttactaattcatcactccattgtttaaccacatttccttatatttttcaaactcttacttcctcaatatcaacatttactaattatctaataataccaactattttaaattttaaacaattcctacta

SEQ ID NO: 11099 - DNA, 500 bp, Glycine max
  Clone ID: PAT_MRT3847_11002C.1
tacggctgcgagaagacgacagaaggggaagtactcttaacaaattgtagtcttttcccttatttgtatgtaattaattgggtaaattactctcctctaaaagatgctttgattacactactccctcccccatgttacactttagtgtatattaggttgaatgagcctccttggaatgttctctctctttaagatagaagggtaaaaaagggtattttctcggaagaagatgatagtgaaaatagctaagaattgttatagtaattagttaattagtaagatggttaagttcgatacataaacatgatgatgtgaggggaaagacaacattcaagttagtatttgtgaaatggaaataatctctgtagaataggaaaatatagggagacaaattccttaatcatagggaattatgatcaaaggaaggtaaatcccatgacttaagatttgacaaatcctatccttaatcctagattgtatattcctaatttattcaaaat

SEQ ID NO: 11100 - DNA, 2547 bp, Glycine max
  unsure (1)..(2547): unsure at all n locations
  Clone ID: PAT_MRT3847_110030C.1
gtggcttcaatctcaggcatatgctcatcctccccgactctaaaacaatggacccgaaaacaaccttcaacaaagacaaaaaccgctctcttctgttctgtccctcaccttataaaacaaagttccacttcatccgattcaactaaaccacaccattcgcatcacaacacttggttgattactacaatcttcctctactaccatgctctttatgaccttaaaaaacggtgtcccacttcataagtttcaactaaaccacaccattcgcatcaacacagcacttgtttgttcccaactccgaaaaatatcatgctcctaacgtaaaatcctcggtttcaacgttcaaccgcgatctcaaaaaacaaaactatggcatcactctcaggcatttgctcctcttccccgactctcaaaaaattcccaaaccaatccccatcgttgaccgaccctctccgcaaagaccacgtgtccttccccgcacgcctcgccgatcggaccctcagcctcgcgccgctccgtgcggtggctcgggaggtttccgacggagcgttggcggcggcggtgaagaaggggttggagaaggatccgcgcgcgctgtggcggagatacgtgggttggctataccagcacaaggaacttgggatttacttggatgtgagtcgggtcgggttcagtgatgagttcgttaaggagatggaaccccgtttccaagcggcgtttcgggcgatggaggagttggagaagggcgcgatcgcgaatcccgatgagagtcgcatggtgggacactattggctgagggaccctaagcgtgcgcccaactcgttccttaaaacgcagattgagaacactctcgacgctgtttgcaagttcgctaacgacgtcgttagtggtaagattaagcctccttcgtctccggagggtcgatttactcaaatattgtctgtgggaattggaggttctgctcttggaccacagtttgttgcagaagcattggcacctgataatcctccactcaagataagatttgtggacaacacggatcctgctggaattgatcatcagattgcacaacttgggcctgagctagcttcaacacttgtgattgtgatatcaaagagtggaggtactcctgagaccagaaatggtttattggaagtgcagaaggcctttcgtgaagcaggcttggattttcctaaacagggtgttgctataacacaagaaaattctttgttggataacactgcaagaattgagggctggttagctagatttcctatgtttgattgggtgggaggtagaacgtcagagatgtctgcagttggcctgcttccagcagcccttcagggcattgatattagagaaatgcttgctggtgcatcattgatggatgaggcgaataggagtactgtgttaaggaataaccctgcagctctgctggctttatgttggtattgggctacagatggtgtaggatccaaagatatggttattcttccatacaaggacagcctgttattatttagtagatacttgcaacagttggtcatggaatctctaggcaaggagtttgacttgaatggtaatcgggttaatcaaggaattagtgtctatggaaacaaaggaagcacagatcaacatgcctatattcaacaattgagggaaggtgtacacaatttctttgtaacattcattgaggtgctacgtgatagacctcctggtcatgattgggaacttgaacctggtgtcacatgcggtgactacttgtttggtatgctacagggaacaagatcagctctgtatgccaataaccgagagtccatcacagttactgtacaagaagtgacacctagaacagttggtgctcttattgcactctatgaacgagcagtaggaatttatgcctcccttgtcaacataaatgcttatcatcaaccaggtgtggaagctggtaaaaaagcagcaggtgaagtactagcacttcagaagcgagtgttggcagtgctaaatgaggcaagctgcaaagaacctgtagaaccattgaccctcgaagaagtagcagaccgttgccatgctcctgaagatatcgaaatgatttacaagattatcgcacacatggctgccaatgacagagcattgattgtcgaaggcagctgtggttcaccacgcagcatcaaggtttttcttggggaatgtaacattgatgggttgtatgcatgagttagacgactaccagaattcatgttttggtaatgttgcaattgtgtttgaatacacggaccaacagaagagaagttgcctgcaataatttggtttcaatgttgaatctccatcattaacgaaagtggaaatttctgttaagacaaattcttgaaagtgttttggtgttctgaattggaactacgtgtaaccaaatggagaatccagtgggtaaatataattaataaaattgttcctttcgctgcctagaaaaaaaaaaaaaaaaaaattacggcagctttttggtgcacactaactcatgggtttacaatgcanaaagttacaaaaggg

SEQ ID NO: 11101 - DNA, 531 bp, Glycine max
  unsure (1)..(531): unsure at all n locations
  Clone ID: PAT_MRT3847_110031C.1
tcgtgccgttattctcgttcttctggtctaagggggtangccctgagtatcaccatnntgaacatatcggtgcaaggctttgtggccccgttacttggggcagcagctgagagggctgtcactttggaacctcattcaacttttcgttcagtgaagggatnnngtggtccaacgcactcgtagacctgcgagntctcttagctaggtcttacagcctcggtcttccaatggtttccaatgtcccattgccccttgggggacaactactcaaatggtttgccctcttcaaactgcgattcacatttcaaatcctttaataacataggagccatcggtgctcccctgagggatgaagaaatcgtnncatgctggttgaatctttggggaactgttaaacttgtccggtgatgaatcggtacctgtcaggctttcacttaattacttgacagccagaattccttctcacttgggaccaaacaacaatcataangaaagggcggtttgntgtcccatgcctgatccctgatgatc

SEQ ID NO: 11102 - DNA, 540 bp, Glycine max
  Clone ID: PAT_MRT3847_110032C.1
ggctcgagcctttattgaacttcatggtagttacttctgactctcctatgctacatcctgcaaagcagtatctgaaattgaggtcccttggtgctcctgctgttcttctctcattagcaatgcagggagtcttccgaggatttaaagacactaaaactcctttatatgccactgtggcaggagatgtaaccaacatagcactagatcctttattcatgtttgtattccgcttgggtgtcagtggtgcagccatcgcccatgttatatctcagtacctaatttcagttattctcttgtggaggttgttggaacaagttgaccttatacctccaagcataaatcatctgcaattagaccgatttcttaaaaatggttttctattattaatgagagtcatcgctgtaacattctgcgtgacgctggctgcatcattagctgcacggcagggaccaacatctatggccgcatttcaagtatgtctgcaggtttggttggcagtgtctcttcttgcggatggtctggctgttgctggcaggcaat

SEQ ID NO: 11103 - DNA, 395 bp, Glycine max
  unsure (1)..(395): unsure at all n locations
  Clone ID: PAT_MRT3847_110033C.1
ggggttgaagaaaagaaagggtgtttacactttacttgagtgagactgagagtctcaagagagtgtgtgtgagtgtttgatattctcgattaaataaatctcactgtctctttctctctctctctctgtctctgtgtttttgttgtgttctctttactacctcttgaaaccaaaagggtcactctctgtgctgtggcctctgttttcaaaggaaacccttgttcttttccttgcctttctttcttagcactgtcttccaactcccaactcatataatttcattttccctagtctttnttggtttcactctttccttgtgaaatctgcaaaaccagctattcagtttagttatcataccaagccgaagctcttacattatttntatatataagtag

SEQ ID NO: 11104 - DNA, 511 bp, Glycine max
  Clone ID: PAT_MRT3847_110034C.1
ggagatcatttggtctaagcaaaataaacccttaccatttttaagaaatcggtctaattgcagatgatttatgcttggaggtataaggtcaacttgttccaacaacctccacaagagaataactgaaattaggtacctacacagttgatttgaaaataagggataattagggtcaaaagaagcaaaaggaaaattaagataccatggaaaagatagttgtgcataaatgtactttgcagaacatactgagatataacatgggcgatggctgcaccactgacacccaagcggaatacaaacatgaataaaggatctagtgctatgttggttacatctcctgccactgatacatcaaagaaagagtagttagaatcagataatagcaggatattgtgacatttgatcaaagacaatttaagtttgtcaaggcataccagtggcatataaaggagttttagtgtctttaaatcctcggaagactccctgcattgctaatgagagaagaacagca

SEQ ID NO: 11105 - DNA, 536 bp, Glycine max
  unsure (1)..(536): unsure at all n locations
  Clone ID: PAT_MRT3847_110035C.1
ccacgcgtccggcttgttctaattttaggagcggagaatccagagaaagagagatgtctggtatcgcccgtggacgtcttgccgaggagcgaaagtcatggcgcaaaaaccaccctcatggtttcgttgccaagcccgagactctccctgatgccaccgttaatttgatggtctggcattgcactattcctggcaaggctgggactgatttgggagggtgggttttttttccccctgtgcaatgtgccttttagggggggggttttccttttggggggctctcccggggcaaattcctctaaggggtttttttccccccattgggttttcctttttgggaaccggtggggtggggttttttttttttgggaaaaattggtgggggtggagaccccccttttttttccgggggaaaaaaatattttttttggggggggttttggagaacccttttttttttttaaaaaaaaattttttttgtttctccctctccccccccgcgctgtggggtggggtgttttntttttttttttttt

SEQ ID NO: 11106 - DNA, 386 bp, Glycine max
  Clone ID: PAT_MRT3847_110036C.1
cccctgacactgtagagggcaggctttccgtaggagcactccgctggtcgaatgtatctcgtcccagatgttatcgaatgacattgcaccatccaggaagtcgaatacagttacatcctcagtgccttgaagatggaaaaacccactgaatgacttactgcgagcaactgtgagtggacggatctttgcatgaaggacagttggaggatgaaagcgcttatcaggaaagcgctctctgtaggtctcgatctcacagagtctacttcattccagagatccttctaagatcaggttgtcaaactgtgacctgattggcatcaggtcctggtttgtttggaaccaagctgcaacaacagccacaagtgctgtgcatgcactctcccctg

SEQ ID NO: 11107 - DNA, 224 bp, Glycine max
  unsure (1)..(224): unsure at all n locations
  Clone ID: PAT_MRT3847_110037C.1
agagaagactatactgaaaggagtaacaggtatggtttgtccaggagatataatggctatgttggggctatatggcagtggcaaaactacacttctcacagcacttggaggaaggctcaaatgttnactatcaggaaaagtcacatacaacaaccagccttttttaggtgccatgaaaagaagaacaggctttgtggtcaaggatgatgtgttataccctcatc

SEQ ID NO: 11108 - DNA, 621 bp, Glycine max
  Clone ID: PAT_MRT3847_110038C.1
cccactcggctttgacgcgtgggcctcaggaaggtgggtggctgagatcaaagactcttctcagcacgtgaggttgtggcttggaacctatgatactcctgaagaagctgcaagggcttatgatgaagctgcaagagctctgagaggtgaaaatgctcgaaccaactttgcaccagtgagtcaactagtcaatggccaactgggtcaacaatcagggtttaataataataacaaccttctttcaactgggtctgatattgggaagcatggtttgagctttgcatccttgaaggccaagttgagcaagaatcttcagaacattatggctagggcaagtgatcacaacaacaacaacaacaacaagtcctcaaagagtagggtgagtgaccacttcacctttgccagcatcttccaccgtaggagttaccaaatccctgaaggtgacatgatgaagaacattgagaaagtggtgcagcctagtattattgtgcctcctatggaacaaagtggtggtgattataattcttgtgttgccaactgggaaagtgcttctagtgtctctgattgcagctctgagtgggtagggtttgggaataataattcgaaacctcggttggagtc

SEQ ID NO: 11109 - DNA, 241 bp, Glycine max
  Clone ID: PAT_MRT3847_110039C.1
ttcggaattcggtttcgagccactccacagtcccacttccgggttctcgcgttcgcactcgctatcatccatacctctctcttcctctccacaatcgcaacccaacaaccgctcctctaagatcaagacactcccatcactcattgccatcgctacctccgcattaacattgcccacccaacccctgactacacctctgctgtctgttgccgctaagcccaggcccaaagccttggcctca

SEQ ID NO: 11110 - DNA, 458 bp, Glycine max
  Clone ID: PAT_MRT3847_11003C.1
tctgaaaaaaaaattttttaaaaaaaaaaaaaaaaaaaaaaaaaaaaaaaaaaaaaaaaaaaaaaaaaaaataggggggtggaatttgtggattatttttgatgtactagttttgtggtaaggggtatttatttttttagtgttttttaaagagttattattgttcgttgtttttgaagaatgtttaaaagtgtaaaaattgggaaacccttgtttttaccctttttgtgctttttgcttttttttccctgttggtgtaggggggagagagctaaagatgttcgttcttattagatttttcaaaatgatgggtgtttggagggccccttgtaacggccctttttttggggttttagtggtggttattattaatttttaacaattacttttctttgtttcctttgtactgcgcgtttttccctttttttttattattttttttttttttttttttttgg

SEQ ID NO: 11111 - DNA, 1070 bp, Glycine max
  unsure (1)..(1070): unsure at all n locations
  Clone ID: PAT_MRT3847_110040C.1
cacacctctctctctctccttctctctctgnggttggtttttgattttgaaattgtggttagggttcatctttttcttgtttgttatatgagattgaagcaagcattagcagatctgtgatggcgagcacccacattgggaatgccggagacgccgacgcgaaggccttgaagggtcgccccaagaagccctccgacgacttcatctccctcttccatggctccgatccggtccgcgtcgagctcacgcgcctcgaccactggctccgagagaaagatagagagcttggggatgcacttgcggaaattaagtcattgaggaattcagagcgtcttaaggaaaagggggttgaagagctaacagatgagctgatcaaggtggatgaaaagctaaaagcagctgaagctcttctggaaagtaagaaccttgaaataaaaaaaatcaatgaggagaaaagggcagcactggctgcacaatttgctgcagaagccacacttcgaagggttcatgctgcacagaaagacgatgaaatgcctcctattgaagcgattattgcacccctggaggcagaactcaagcttgctaggatggaggtggcaaagctgcaggatgacaacagagcactgggtcggctaaccaaatcgaaggaggctgctcttcttgaggctgagagaactgttcagattgctttggcaaaagcatccttggttgatgatctgcaaaacaaaaatcaagagttaatgaaacagattgaaatatgccaggaggagaacaaaatcttggacaaaatgcttcggcaaaagggtgctgaagttgaaaaactaactcaaactgttcgtgagcttgaagaggctgtcttggctggtggggctgctgctaatgctgtccgtgattaccagcgtaaagtgcaagagatgaatgatgaaaggaaaattttggagcgggaagtagctcgtgccaaagttactgcaaacagggtcgcgactgtagctgcaaatgagtggaaagatgctaatgataaagtgatgccagagaagcagcggctataataaagaaaatttttttcaggc

SEQ ID NO: 11112 - DNA, 524 bp, Glycine max
  Clone ID: PAT_MRT3847_110041C.1
gaagggaaggataattttgctaactacacattctatggatgaagcagatgaactaggtgaccgcatagctatcatggccaatggttctctgaaatgctgtggaagctcacttttcttgaagcatcattatggagttggctatactctaactcttgtgaagtcagctcctactgcttctatagctggtgatattgtataccgtcatgttccatctgcaacatgtgtaagcgaggttggaactgagatttctttcaggcttccaatggcatcctcgtcagcctttgagaggatgtttagagaaattgaaggttgcatgaaaaaaacagtttcaaatatggaattgagtggaaatggtgacaaagacagtcttggtattgaaagctatggtatatctgtaacaaccctggaggaggtatttttgagagttgcaggatgtgactatgatgaagttgaatgctttgtagaaaataaccatacccataaatcagactcggtggcttctcttcctactaatgatcatcctt

SEQ ID NO: 11113 - DNA, 152 bp, Glycine max
  Clone ID: PAT_MRT3847_110042C.1
ggggcggccaaacaaccgtaggaccattcccaggcccagggaagggcccaaaaaacgaccctttacagccaaagaggagactcccccaaagagaaactcacccgggccgtaaatcacgctcggatcacacggtcaggattcatccaccaaac

SEQ ID NO: 11114 - DNA, 420 bp, Glycine max
  Clone ID: PAT_MRT3847_110043C.1
cggtggccgcccttttatttgtttttttgtaagaacgaaccgcgtgcgctatcacttatttagacagggcggattgatgatgctacatcccaacaatctattgagatggccaaattcgctgttagatacgacggtgtgacaaactgtgagcactgtgcaataccgccaaaggatttacgggcagcaaccgtgctggaactagtattactcatgacctatgaggaaacccggcttcctgggggggtgggggatactgtgctcgcaaaaggtcctctgttagccctcaatggacccatgctttaccgattgacaaggagtgttcctgaagctctgatcactgttgagatggcgaccatgttcctagaacacagtggttatgaggttagggtttcgtctgctatgggtccctattgggggact

SEQ ID NO: 11115 - DNA, 333 bp, Glycine max
  unsure (1)..(333): unsure at all n locations
  Clone ID: PAT_MRT3847_110044C.1
tcggaaggcgaaagagtagcagcagcaggcggcgccgagtagcggctccccacctcgagctggccaccatggctagaggattgaagaagcatttgaagaggctcaatgcgcccaagcattggatgctggacaagcttggcggagcttttgctcccaagccatcttctggacctcacaagtctaaggagtgcctgccactgatcctcatcatcaggaacaggctcangtatgctcttacataccgtgaggtcatttccatcctgatgcaacgccatgtacttgttgatggcaagggtcgggacagacaagacctaccctgctgggttcatggat

SEQ ID NO: 11116 - DNA, 214 bp, Glycine max
  Clone ID: PAT_MRT3847_110045C.1
ttagaacttttatgacttaggatgaatgcaattcaagtgttcgtgaattcaaaggttctaaattttcttgagttcacatcattttgttatgagagcttttgtcctaaaattaggttatctccttatttagttttattcttgcatgttgtttcaaaaaaaaaaaaaaaaaaaaaaaaaaaaaaaaaaaaaaaaaaaaaaaaaaaaaaaaaaaaaa

SEQ ID NO: 11117 - DNA, 182 bp, Glycine max
  unsure (1)..(182): unsure at all n locations
  Clone ID: PAT_MRT3847_110046C.1
cttttcntacgcttttacaatatgtcnagaggaaaaaacaaaaagttaaaggcgcatgcatttttttaaaaattaagctaaaaccacgctgccccaggggaaataataaacccccaaactcaaatggtagaggccctagtgggggacttaattggaaatagttggacccaacccagcctggg

SEQ ID NO: 11118 - DNA, 210 bp, Glycine max
  Clone ID: PAT_MRT3847_110047C.1
ggtcaacaacggacgtggcctcttctcttcatgtcgtcgcggtctactcccgacttgtgattgctgcggcagatgctggatccagcactggagggtttgcaccaattccaatagttcacgcgactcctcggttaccgcttcaccatgtaattgcttcgacctactctgctcatatcttggacaggctccccctgcaaatctgataggcat

SEQ ID NO: 11119 - DNA, 515 bp, Glycine max
  Clone ID: PAT_MRT3847_110048C.1
gttccaaggaagcgtttcccgatcatcacgtgtatgagcgtcgctcctgtgcttatggggggggggaggggaggagggggcgaataggctaatgggcgtgcgtggggaaggagtgacagagtggaaggcctaatatagtaagtaagtacccggagtaagtataagaaagcgttataagaaagaccaaaactaagtagatattagtagaggaagtgagcaataaagaaaggaaacacagtatgaaaatgccatgcggatggggtatgggtatgccctagggatagggtaaagtgtgtggtttgcggtgcagggcgtgcgtatggcaatataagaacagtacgattcgtaacaccgttagtaaataaagacaattaatggccgtacaagtataaagagcggaacgtacacagcatataggtacatggggaggtaaacaatggccataccaacagacagcgggtatggcatgttaaagacactggcttgggaggttgtcagaaaatgacaatagcagg

SEQ ID NO: 11120 - DNA, 1608 bp, Glycine max
  Clone ID: PAT_MRT3847_110049C.1
tcgcccacgcgtccgagaaaatctgaagaaaaggaaaggggaaaaagatgaaaatgctctgataatctcttagtcttgccaggctagtaaagtctcaatcatttcccagtttttaatttcaaatgttttccccaaaacataaggatttctagtctctgattttctgactgatgagttgctgttgaaatatcaggaggttgctgtgaagaaatttttggatcaggatttttcaggcgctgcattatcagaattcaaaagagaagtgcggataatgcgtaggctacgtcatccaaatattgttctttttatgggtgctgttactcgtcctcccaatctgtcaatcatttcagagtatctaccaagaggaagcttgtaccgaattcttcatcgccctaattgtcagattgatgagaaacgaagaataaaaatggctctggatgtggctaggggcatgaattgcttacacaccagcacacctacaattgttcatcgagatctaaagtctccaaatcttttggttgataagaactggaatgttaaggtatgtgattttgggttgtcacggttgaagcacaacacttttttgtcatccaagtcaactgctggaacgccggaatggatggctcctgaagttctccgcaatgagccctcaaatgagaaatgcgatgtttatagttttggagtcatcttatgggagcttgccactctaaggttgccgtggagtggaatgaatcctatgcaagttgttggtgccgttggtttccaaaaccgcagacttgatattcctaaggaagtcgatcctatagttgcaagaataatctgggagtgttggcaacaggatccaaatttgcggccctcgtttgcgcaactcacagtggctctaaagcctctacagcgtctggttatcccatcttatcaagatcagttagctccacctatgccgcaggagatttctgtaaattccaccccctgaaatgtctcgcttcaagtgtgaataattagaggcattttgcatagttatgtgcgtataaaggtaacatgaacacaataaaaggggaaaaaaaatatcaaaacttgtaacggcaaatgtttgtgttgaggaaaatatcaactgctactgcaaccaaacaactgcagagccattttgtatttgtgatgataggttgtccgaggaaccaaaactcggtaatgtgtaaattactgtacttgaaagcaaaaaagtatatacttttccaaaagtacgttttaccgggaatgtctagaatttggccaagcagtatgtgctcaagctttaatgtggtgacgaagctcgtatactaacgaaaatgtcttcaacattttatttgagtcttttgcatagttatgtgcgtataaactataaaggtaacaagaacacaataaaaggggaaaaaaatatatcaaagcttgtaacggaaaatgtttgtgttgaggaaaatatcaactgctgcaaccaaacaactgcagagccattttgtatttgtgatgataggttgtccgaggaaccaaaactcggtaatgtgtaaattactgtacttgaaagcaaaaaaatatatacttttgcaaaagtacgttttaccgggaatgtct

SEQ ID NO: 11121 - DNA, 1545 bp, Glycine max
  Clone ID: PAT_MRT3847_11004C.1
atggatttggcatctgttcttttgctattgactagcttatgctcttcttctgcactgcatgagcttgattcacaagaagatgcattgtatgctttgaaggtatcattgaatgtttctgccaaccagcttacaaactggaataaaaatctagtaaacccttgtacttggtccaatgttgaatgtgaccagaatagcaacgttgttcgaatttcactagaatttatgggattcacaggatcgttgacacctagaattggatctctaaaaagtcttacaattctttctttgcaagggaataacattactggtgacataccaaaagaatttggaaatcttacaaacttggtcagattggatttggaaagcaacaaattaactggtgaaataccatattcacttggtaatcttaaaaggcttcaattcttgacattgagtcaaaacaatctctatgggactattccagaatcacttgccagtctcccaagcttgatcaatgttatgctagattcaaatgatcttagcgggcagattccagagcagttattcagcattcctatgtacaagtatatagctacagacaacttcagcgagaaaaatattttaggacagggaggttttggaaaggtttataaaggtattctagcagatggcaccaaagttgctgtcaaaaggttaactgattatgaaagtcctgcgggtgatgcagctttccagcgtgaagtggagttgataagcatagctgtccataggaatctgttacggctcattggtttttgtactacttcaactgaacgcctcttagtttatcccttcatgcagaacttaagtgttgcctatcgtttacgagaactcaaacgtggggaacccgttttagattggcctaccagaaaacgagtggctctaggaactgcccgtggcctagaatatcttcacgagcaatgcaatcctaggattattcatagggatgtgaaggcagctaatatattacttgatggagattttgaagcagttgtcggtgactttggtttggcaaaattagttgatattcgacatactaatgtgacaactcaagttcgtgggacaatgggtcatatagctccagaatacttgtccactggaaaatcttcagaaaggacagatgtttttggttatgggattatgcttatggagcttgtaacaggtcagcgtgcaattgacttttcacgtctggaagaggaagatgacgtcttattgcttgaccatcgggagaaaagactagagactattgttgattgcaaccttaataaaaattacaacatagaagatgttgaagtaattgtacaaattgcattactctgcacacaagcatcacccgaggatcgtccagcaatgtcagaggttgtaagaatgttagagggagaagggctagctgaaagatgggaggaatggcagcatgtggaggtcaatacaaggcaagattatgagagactgcaaagaagaatgaactggggagaagattcggtttataataaccaagatgcagttgagttatcgggtggaagatga

SEQ ID NO: 11122 - DNA, 149 bp, Glycine max
  unsure (1)..(149): unsure at all n locations
  Clone ID: PAT_MRT3847_110050C.1
tgcnnaactnaccaaaagggtctgnctggttagngacgagnacacgatcatctggaacgtacgtggctanaggtngccctanaccaccctcgncaggtgnaaaccaantngggccctcctggccagtccaggcatnctccttcctncaa

SEQ ID NO: 11123 - DNA, 797 bp, Glycine max
  unsure (1)..(797): unsure at all n locations
  Clone ID: PAT_MRT3847_110051C.1
ttttttaactgacagccacaagtcttaaacttttgaaaggccaagataataattcttttacacagtttatccaagtaataaaatgacttgaaagttgagacttagcagtatgcacttaatttggttgtagatttctaatgctgacacaaaatcgcaatggaagctcaaagtacagccggttggttagcaagatcagatattaagactttaagactatgaaaaataaaagatacaaaataaccctcttaccataaacataactcaatcagaatctgtaccccacaggcataccaagcttgtccaaacgaccagaacctggatatgctttgttggtgaagcttgcttgcattgccctttgagtggccaatcttgacatatcaaatccattgagtgagtatctatccgatgaaccagacctctcactttgaggcctttgttttggtgcactcagagatctggcctttgcctttgaagattcagtgcatgccatgtaactaggataatcagggtaaccgcgaatgtagcttctagagccatcacttctagtaggagtaaaagggcttcttttgaagccatcatctttagaagaggcagataagtattgtggactattgtcagcagtgcagaatggactctcctcaacctcattgttcactttttgcgagctgtaactgtgagactgaacctcacaacatggactttgagcagattgaagagatgttgattcctttgtgctnnncnnnctcttactataaagatcagagcctgtggagtaagagaggtttcgacgnntnngt

SEQ ID NO: 11124 - DNA, 883 bp, Glycine max
  Clone ID: PAT_MRT3847_110052C.1
gagttcgactgcaagtagttcatcattcacacaacaagtgattaaagacataagtaaaaattggctaactatcgtttttgtcactatcctactaattttattagctttgataattgcattcttttttaagaaaattgcacaagtaaatttagaaactgcaattttaagtgttataccaggtgcgctaagccaaatgttagtgatggcagaagaaaataagaaagcaaatatattagttgtgagtttaacacagacatcacgtgtaatatttgttgttattttagtaccacttatttcgtatttttttcaggataaccatcatgaaatgaatcatactacaatggaagtacccacactttctcagactttaaatatatggcaaataatcatcttattctcaatggtgggaatcatctatataggaatgtcaaaaattaacttccccactaaacaattattagcacctataatagttttaattatatggaatatgacaacacatttaacattttcactagatcattggttgttagccacagcgcaacttatttatatgatacgtattggattacagattgccaacttaatgagtgatttaaagggaagaattgcaatagcaatagcctttcaaaatataatgctcatagtcacaacgtttataatgataataggaatacatttgattactaatgaatccatcaatgaattgtttttaggagcagcaccaggaggtatgagtcaaatagttttagtggctatggctactggagctgatgtagcgatgatttcaagctatcacatttttagaatattttttatattatttgtcattgcgccactaattggttattttattaatgttaaattaaataataaatgattt

SEQ ID NO: 11125 - DNA, 441 bp, Glycine max
  Clone ID: PAT_MRT3847_110053C.1
gttgggaagccaaaacttttattgaaacccttttaggaggccatattctttatataactccccctttacattttacaaggtgggtgaaccaacaaagacttttgccaaaaatgctggaaggggccaaaaatccaccgcagcgccaatttttaaaatatgccaaaaatttgggatcaaaacatttggagttttttgaaaactaacaatattttgtccacccccttggccatagggaataattttttcgggggagggggaagcaactacatcctttggaagctcccgaccagctttgtccacacccttgaatatacccaaataactaatttttttttcaacaaaaatttttacagttttttcattgggtgcactaaaaactcctgtgagggggcctccaccgcgccccgcagtattttaaagagccaccgttggaaacttttt

SEQ ID NO: 11126 - DNA, 1235 bp, Glycine max
  Clone ID: PAT_MRT3847_110054C.1
cgggtgaaaattgaaatcgcaaccgcaatttaaaaccttggtgtatgttcttatattgaaattgaaattcttggctagggaagcaaaagggtagtaattggttttagagtaagtgagaatggaaaacgtttcggttcttttgtgtaataaggaaaaggatcagatggatttgcctcctgggtttaggtttcacccaacagatgaagagcttattagtcattacctttacagaaaggtcactgacaccaacttctcagctagagccattggagaggtggacttgaacaggtctgagccttgggatttgccatggaaggccaaaatgggagagaaagagtggtactttttctgtgtgagggacagaaaatacccaactggtttgaggactaatagagccactgaatcaggatactggaaggctacagggaaagacaaagagattttcagagggaaatctcttgtgggtatgaagaaaactttggttttctacaaaggaagggctcccaagggagagaaaactgattgggtcatgcatgagtataggcttgatggtaaattctcttttcacaccctccccaaaactgcaaagaatgagtgggtgatttgcagggtttttcagaagagttcaggtgtgaaaaggactcatatttctgggatgatgatgttggactcttatggaaacgaaatggtttattcttcttctgctttgccacctctcactgattcctcaccttccattggcaacaacaccaaagcactgagtgtgactgattctgcttacgtgccctgcttctccaatccaattgatgttcctagaggaatctttgattccttgaacaacatcaatatcagcatcaacagcaacaccctttatggagtttcttcaaaccattcattttacaatactcagggggttcaacttcaggctccaccaactttgccattacctagttcttcaaaccattaccttagagcctttcttgaaaaccaaggaaatggatcgaacatgagcaacaatggttttgagccagagagggaaatggtcagtgtctcacagaaaacaagtctttctactgatgtgaaggctgaaatctcttcattgggtaaaaggcactttgagaatcaaaacaacccaattgcttcagcagctgcagttgcaccaatggaccttgctaccttgtggaactactgatctcaaataaagaattgccattggaaaaaaaaaaaaaaaaaaa

SEQ ID NO: 11127 - DNA, 1805 bp, Glycine max
  Clone ID: PAT_MRT3847_110055C.1
aattcggctcgagaccaccaccacaattttcagttccatgtcttcccatgattttcaccctttttctctctctcactttctgtggacttttctgtggtttccttttcagtgaaataaaaaaaaaaccactctggcttattactgtctatatagattcttctgaatccagttctttctaaaccaaaccaaaaaaacattccctctccaaccaagttttgtttttttttttttttcatgtgaaaattgaaatcgcaaccgcaatttaaaaccttggtgtatgttcttatattgaaattgaaattcttggctagggaagcaaaagggtagtaattggttttagagtaagtgagaatggaaaacgtttcggttcttttgtgtaataaggaaaaggatcagatggatttgcctcctgggtttaggtttcacccaacagatgaagagcttattagtcattacctttacagaaaggtcactgacaccaacttctcagctagagccattggagaggtggacttgaacaggtctgagccttgggatttgccatggaaggccaaaatgggagagaaagagtggtactttttctgtgtgagggacagaaaatacccaactggtttgaggactaatagagccactgaatcaggatactggaaggctacagggaaagacaaagagattttcagagggaaatctcttgtgggtatgaagaaaactttggttttctacaaaggaagggctcccaagggagagaaaactgattgggtcatgcatgagtataggcttgatggtaaattctcttttcacaacctccccaaaactgcaaaggtaataataataataactaataacaactttgattttggcttgatcatgttgcttcctatgttccactttttattctcttattagtattagtactttgtttgctttgtttgattttcagtgctgtgtttattattgtgttgcagaatgagtgggtgatttgcagggtttttcagaagagttcaggtgtgaaaaggactcatatttctgggatgatgatgttggactcttatggaaacgaaatggtttattcttcttctgctttgccacctctcactgattcctcaccttccattggcaacaacaccaaagcactgagtgtgactgattctgcttacgtgccctgcttctccaatccaattgatgttcctagaggaatctttgattccttgaacaacatcaatatcagcatcaacagcaacaccctttatggagtttcttcaaaccattcattttacaatactcagggggttcaacttcaggctccaccaactttgccattacctagttcttcaaaccattaccttagagcctttcttgaaaaccaaggaaatggatcgaacatgagcaacaatggttttgagccagagagggaaatggtcagtgtctcacagaaaacaagtctttctactgatgtgaaggctgaaatctcttcattgggtaaaaggcactttgagaatcaaaacaacccaattgcttcagcagctgcagttgcaccaatggaccttgctaccttgtggaactactgatctcaaataaagaattgccattggaaaaaaaaaaaaaaaaggccaactttttcagctgaaaaagtatagcctcataatttaccatatttactgtctggttttgatttttatgttgtccttcttgttgttattgttgtttgtttgtttgtctgtatagattttaactaaaagatttgctgaataatagtgaagcatgtattttgtactgttaagtgttaagttatgctgttttggtcc

SEQ ID NO: 11128 - DNA, 481 bp, Glycine max
  Clone ID: PAT_MRT3847_110056C.1
agaacgatagcacgacacgtatacgctattgtgcgaggtgtgaaagagggcatgaaatctttatataggctgaccatcctactcgatgagggtcatgccactatatctttattggcctaaacaatcgtacatgcagaagcaaacgcaaaggccctgtctgacgagcggattagcatttaccagatgagccggctattgacggtggaacagaaaaggctggcatctatggccaaccagctacaactaaccttagtgtaaaggccgaagcataatcaactcctacatgaccgttggaggaaggcggacagccatatcgcagcgagctcgcaccgagaacactgttcacaaccgcgtacctactattatcaggcgggattatcgtgtcaggcttgtagcacctgccagccgacaatgcacctctttgaacacccacgccttgctgtcgttcaccataactttgtaactaaagacctgcgaatgt

SEQ ID NO: 11129 - DNA, 189 bp, Glycine max
  Clone ID: PAT_MRT3847_110057C.1
ctcaggcgtactgccacagcgttcgaggttatttagtgagcacaatatgagaatcctttttgcccggttattctctagcgaagaacttttagttatttcttattatggaaccagttgggtggcagattacctttttgggcttggcgcctatgtggtgcacatttcagccaatattacataataattgtg

SEQ ID NO: 11130 - DNA, 326 bp, Glycine max
  Clone ID: PAT_MRT3847_110058C.1
aaatgcattgggacgctggagaccccaaggtggggggagggacccaaccatcaaagttgcaggccaacataggtcacaggaagactatctgtgggaactggccggagaggcggacgggagaaagtggggatgtctggctaaataatcacccgctcacccactgggcgcaaaactggaggggacctacaaagcagaaactcgcacatgggtgactctggctgaaggaaccgactaagccagatatagttgaggctatggccgaatcctacaacggagttaagttatcctcccagctacaatccaagggggttcatatgaacactggg

SEQ ID NO: 11131 - DNA, 249 bp, Glycine max
  Clone ID: PAT_MRT3847_110059C.1
aattccggtccgggaccggcaagcagaccaccttaccgtaaggggaagcggaccagggcttggcgaaggcaagggcaaagcgggggccggagtgaaaaggggatcccatcacaaaacaaaaaaacaggggggaggaaaaaataaaaagaaaagcccgccgagccaaaaaagtaaacaaaaaaaaattaatggggggggccccactgccaacagggaagaaaaaaaaccagaccgcccaactaaataaag

SEQ ID NO: 11132 - DNA, 115 bp, Glycine max
  Clone ID: PAT_MRT3847_11005C.1
cttttccgtagctgtcattgattattgatagaatccgtactgcccggccatagtgtgcattctgactactcttagagtgagcagagactatgcagtaaaatgaggtggagaccaa

SEQ ID NO: 11133 - DNA, 320 bp, Glycine max
  Clone ID: PAT_MRT3847_110060C.1
ggtagttccaccgagtaccaacaatgtcgaatcgatgtcacggaggatccgcgggaaacaagttccccatgtccctgggtctgccggtgcctgcgaccgtgaactgcgccgatgccaccggcgcgaagaaccgcaacatcatagcactgaaagggatcaatggtacgctgaaccggttgccgtcaacatgcgtcagagacactcttatggccaccgtcatgatgggacagcccgatctccgtatgaaggtgctgctcgccgtcatcgtccgccatctcatgccttggcgccaaaaggacggtgtttacatctacttcaat

SEQ ID NO: 11134 - DNA, 255 bp, Glycine max
  Clone ID: PAT_MRT3847_110061C.1
attggttgcgagaagacgacagaagggggctaccaacgacactgacacgaatcaagcactgccagcactcactcactccaccactccttactcttatcattcagatctacccaacacacacacaccagacaatgaaccaaaaatgcaactgcaacccactctttccactctttgcctctacgttacgctaacaataacgttaacatagacgacctagggagcacaaagcaagcctgaggatctggaccggtcctc

SEQ ID NO: 11135 - DNA, 406 bp, Glycine max
  Clone ID: PAT_MRT3847_110062C.1
atgatttcaaaagctgccaaatggttatggtcgtggcagatcgaggaatagcagctatttctaacagtgattgtatacctataattgttaatatttaataaattatgataattaaaaccaaggcaatataataaaataaaattagaagtacacataaagttgaaccaattgagtttaaattctaaccattagccactagctcatggataagttgttgtaatagttaattccttcttgatttatacctccacttagctttccttcggtaaatatatagtttattaaaaaaaatagttaatgggaaattaacatccaactaggcaaaatttagttcaaattagacattgctttgtttgcaattaacttacttgggagaatccttgaccaataaatggaaaatctatat

SEQ ID NO: 11136 - DNA, 1353 bp, Glycine max
  Clone ID: PAT_MRT3847_110063C.1
ggaagtctttcctttgtgttagctaaatttgatggattacttgggcttgggtttcaggagatctcagttgaaaatgctgtgccagtatggtacaatatggtgaagcaaaatcttgtaagcgaacaggtgttctctttttggctcaatggtgatccaaaagtgaaaaatggtggtgaactagtttttggaggtgttgatcctaaacacttcaaaggagaacatatctatgttccagttactaaaaagggctactggcagattgaaatgggagatttttttattggaggtctctcaacaggtgtttgtgagggtggctgtgctgctattgtggattcaggaacatctttgcttgctggtccaactactgttgtaactgaaatcaatcatgctattggagctgaaggagttctaagtgtagaatgtaaggaagttgtttctgaatatggagaattgttatgggatctcttggtatcaggggtacgacctgatgatgtatgctcacaggttggtttatgtttcaaaagggctaaatcagagagcaatggaattgagatggtgaccgaaaagggacaaagagagttatcagctaaagatactgctttgtgcacttcctgtcagatgcttgtggtttggattcagaatcaactaaaacaaaagaagaccaaggagatagtattcaactatgtaaatcagctgtgcgagagcttgccaagtccaaatggagagtcagtagtagactgtaatagcatttatggattgccaaacatcacgtttactgttggagacaaacctttcaccctcacccctgagcagtatattctgaaaactggagaaggcattgcagaagtttgccttagtgggtttattgcttttgacattcctcctcctcgaggtcctctctggattcttggcgatgttttcatgagggtatatcacaccgtctttgactatgggaacctccgagttggtttcgccaaagctgcctaacaagacatctaggagattatatagggcatgttttaataagcttgttagtgtgttgtaaataagctttctgtaactactatggcacaggtttacattatagatctcaagaatgtacttgtgaaactatgcaccttgatgtattgtgttgtatttgaagggaccattttcattaaatgtcatgtagaaccgtatagattatatattatacccctatgttatatgccatgtcaatgtggatagaaatggatggcctaaaatttctgctttatttaaattctctggccaatgatgatgctaatggaatatgatgcacaaagcatctgattatgaaacctatttaaccattactgattttgagacattaaa

SEQ ID NO: 11137 - DNA, 1208 bp, Glycine max
  Clone ID: PAT_MRT3847_110064C.1
gtagaatgtaaggaagttgtttctgaatatggagaattgttatgggatctcttggtatcaggggtacgacctgatgatgtatgctcacaggttggtttatgtttcaaaagggctaaatcagagaggttaggatttggtcttttaaatttgtaagaagcattttttatatatcaatgttttgtatgctctttttgtcatatttgattcagtatacttcgattgagtaatgatttaaagatgtttgatggatgcttaataattctggctgtgagcttaaagtcaagttctgagtataatcaagtatacaatatgcagaaattttctgcaaaaataattgtcaaagaacctctattaccaaccaatttctcagggcttgatacccttcgtaggttacaattactggtttatacatttcttcttttgctattgggagagtttaggttctattcttgcttataatgctatcagattttgggtgaaacagactccaaagtttactttgaatcctaataccatgcagcaatggaattgagatggtgaccgaaaagggacaaagagagttatcagctaaagatactgctttgtgcacttcctgtcagatgcttgtggtttggattcagaatcaactaaaacaaaagaagaccaaggagatagtattcaactatgtaaatcagctgtgcgagagcttgccaagtccaaatggagagtcagtagtagactgtaatagcatttatggattgccaaacatcacgtttactgttggagacaaacctttcaccctcacccctgagcagtatattctgaaaactggagaaggcattgcagaagtttgccttagtgggtttattgcttttgacattcctcctcctcgaggtcctctctggattcttggcgatgttttcatgagggtatatcacaccgtctttgactatgggaacctccgagttggtttcgccaaagctgcctaacaagacatctaggagattatatagggcatgttttaataagcttgttagtgtgttgtaaataagctttctgtaactactatggcacaggtttacattatagatctcaagaatgtacttgtgaaactatgcaccttgatgtattgtgttgtatttgaagggaccattttcattaaatgtcatgtagaaccgtatagattattatacccgctatgttatatgccatgtcaatgtgggtagcat

SEQ ID NO: 11138 - DNA, 298 bp, Glycine max
  Clone ID: PAT_MRT3847_110065C.1
aaacaaaaaaaaaatggctgttgtttaaaggggtcgcccacaaacacaatactcataccaaggataacccaaacttggcctggaccccgcagtcatgccactaatataacacgcacaggcggtggcaatcgaaataggacaaccacgctatgatccgtcactgtcactggaacatcaagacgcggcgtgctcagaagcacgcatagctgtgacaacacgacgacaagtgccgggtgaactgcatcaaacatactcactggagtgcgggaaactacagcacatggagtatccatcaaaa

SEQ ID NO: 11139 - DNA, 702 bp, Glycine max
  unsure (1)..(702): unsure at all n locations
  Clone ID: PAT_MRT3847_110066C.1
cgacccatncgtccgctaaatttagagtcgtaaaaatctaaatatcgactttttaaagattacatgtaattaattttgattttgcttgtaacatgttctttttaaaaataaataaaggtgatttattttagcaattttgttctcttgatatctatatatattttcgcgtgactctgtaggaaaatgaggttgaagagggtagtgagggtaccagctattatcttgaagatggctgatattccaccagatgattattcttggaggaaatatggacagaaaccaattaaaggatcgcctcatccaaggggttactacaagtgcagtagtgtgagagggtgtccagcgcgaaaacatgtggaaagagctttggatgatccagctatgctggtggtaacatacgagggagagcacaatcacactgtctctgctgccgatgctactaatctcattctagaatcgtcttgaaattcgtagccaaaatcatcttttttccgtgacaaggtttagaaacgcaagccatcatttaatcaacgttacaagttttcaacggggtgcaattatggcgtgttgaattgaattgcaactttactactctagtcagtcaggggggcattaaaatctccaaagaaattagtagtggggtgttggttcccttttcctgtacactattggatncttttttaatcttattttttttttctc

SEQ ID NO: 11140 - DNA, 1641 bp, Glycine max
  Clone ID: PAT_MRT3847_110067C.1
tgctactagcgggtctggtgatgttgtgagacggggtggaggaggaggcgggggtgatgagcttgctcctcacccggccttgagtttttctcttggttacctgggtttgtccgatctgcttgttgttgaaagggtgtgtaaatcttcgcattccacggtttgtggggatccgcttttgtggaggagtattcatgtggatcagcctttgaacgagaggattactgatgatgttcttttgcaattgaccaacagggctcaaggtcatctccagtgcttgagcctggtcgagtgtaccaggataacagatgatggtttgaagcggattcttgaaggcaatcccaagttaaccaagttgagtgttccaggatgtacaagactcagtattgagggtattgtgactattttaaaagcttacaactctatggatacccaaggggtgaagcatttacacataggtggtctttatggtgttacacaaaagcattttgaagagctgaggtcttgttgggggctgatagtccgctgctcccacactctcacaaaccacactattatcgcaggggaaacttgtacctgtcctgtgatgatgatcaagccatagatattgaagtttgtccacgatgccagaatttgaggcttgtatatgattgtccggcagagagttgtcaaggggtggagcacactactcaggtgtgcagggcatgcactctatgcatacccaggtgtagccagtgtggtcgctgcatcaatgacagtgaatatgaggaaacattttgtctggaattgctttgttcttcttgttctaagcagctagtcaaatgttcagaaaggggagataggaagattggatcagataaatccgttgttattcatgagcaaaactagggtttttgtcatagtatcccatggaagtctttgtgagaaaaaggtccctgatggaagtcatatgaaatgttgggtgctgttggagttgtgtgacattctgtattttgtctctcggaagtaggattctttcggggattgtcctgttggtagagaaagtgggaaatgacttcatttttgtgtttcttgcagctactagagtgtaatctgcaggaaccagatgttaccatgattattattgatcacctactgcatactatggattttcagttatgtggcacgttgtgattatgaggttatgagggctgcagtccggatgttgtgcttttcaacatcacattcaaataatatttgtgattggcttttatgcatgcataaccagtttgaacactgatcatttagacttgtgttacttcttcattagctgtattgataaattcactcttgccaggttgtggtgtatgtactctgtttattttttatttttgccatccttggaggagaaaataaggaaagtggtattatgatgtgttcaaatatccatgttgatgtcacttttagctctagcttgtatcaagtgaaattcatttatggtggacttggaccttaaaaaaatgaatacaatttattatctacttgggtattttctgggaaattttatctgtacctagtttcctgctccgtttgaaagagtttcttgttatgttggcctctattgtctcttaaataaagactatttatttaatattttgattaaaa

SEQ ID NO: 11141 - DNA, 1510 bp, Glycine max
  Clone ID: PAT_MRT3847_110068C.1
atttactcaatatgcacaccttctttctttgtttaattctcctctctctctctctttctctcttacacccttccattttctccttctcttcctcccatggtgtaattgctccaactatggccgtggacctcatgacgacgggttgcagccgaaacgacaacatcaatagtttcacaaccaaagccgaggaaaatgccgtccaagaagctgcttccggcttagagagcatcgagaagctcatcagactcctctcgcaaacccaaacccaaacccgccatcaaatcaacaacaatagctctaatgaaatcgccatcgccatggactgcaaggtcgtcgctgacgtggcagtctccaagttcaagaaggtcatatccctcctcggccgaacccgtaccggccacgccaggttccgacgcgcccctctccccaaccaaaaccaacacactcaacctccctccgaaccacccgtgttccacgctacgccgctgcaccagatcccaccaccctcccttcaccaaattcccaaaactgaaaggaaccttaacgattcctcctcttctaaaaccattcatttctcatacccctccgccgctacctccttcatctcctccctcaccggcgacggcgccgccgacaacaaacaaccttcctcgtcgccgcccgcggcggcggcgacgacgacgccctttcagatcacgagcctctcgcacgtgtcgtccgcggggaagcctccgctttcgacttcctctttcaagagaaagtgcagctctgagaatttaggctctggaaaatgcggtagctcctccagccgctgtcattgttccaaaaagagtaggaaaatgaggttgaagagggtagtgagggtaccggctataagcttgaagatggctgatattccaccagatgattattcttggagaaagtatggacagaaaccaattaaaggatcacctcatccaaggggttactacaagtgcagtagtgtgagagggtgtccagcgcgaaaacatgtggaacgagctttggatgatccagctatgctggtggtaacctacgagggagagcacaatcacactctctctgctgctgatgctactaatctcattctagaatcgtcttgaaagtcgtaaccaaatcatcttttttccgtgacaaggttttaattaagtagtagaagaaacgcaaaccattattaatcaacgttacaagttttcaacgggagcaattatggcgtgttgaattgaattgcaactttactctagtcagtcaggggcattaatcttgaaagatattattagtgggtgctgttccctttccctgtacaatattggattctttttcttctttttttaaatcttttatttcctatttctcgttctcttcaaggctgaatgaaacattgtgaatccgttgcatcattagaaaaaaaattgtcaagggtggtggttgatttggtaacggatttgaatctcggaattaaaaaaaaaaaaagcaagtgggttttggtttt

SEQ ID NO: 11142 - DNA, 1761 bp, Glycine max
  Clone ID: PAT_MRT3847_110069C.1
aaagtaaaaaaataaaattatattcggacataaggaggaacttactgataaaaaaattaaaaaagccttcttgattaaaatttgtttgccttaataggaataatcgttttttctatggcctgagagcgtgtgagcattcacatttgacggaaacagggtagcgtgagagtcgagtcacctgccgaaatcctatagcaccattttgaccaaggcgatatagctaacagctattcgcccccccatactttctttaattttctccttctcccatggtgtaattgctccaactatggccgtggacctcatgacgaccggttacacccgaaacgacaacatcagtagtttcacaaccaaagccgaggaaaatgccgtccaagaagccgcttctggtctagagagcgtcgagaagctcatcagactcctctcccaaacccaagcccaagcccaagcccaccatcaattcaacaacaacaatagctctagtaatgaaatcgccatcgccatggactgcaaagccgtcgctgacgtggcagtctccaagttccagaaggtcatttccctcctcggccgaacccgtaccggccacgccaggttccgacgcgcccctctccccaaccaacaccaacacacccaacctccctccgaaccgcccgttctccacgctaccccgctgcaccagatcccacctccctcccttcaccaaatccccaaaaccgagaaacacctcaacgattcatcgtctaagacgcttcatttctcatacccctccgccgttacttccttcgtctcctccctcaccggcgacgccgccgacaacaaacaaccatccccggcggccacgaccacgacctcccactttcagatcacgagcctctctcacgtgtcgtccgcggggaagcctccgctttcgtcttcctctttcaagagaaagtgcagctctgagaatttaggttctggaaagtgcggtagctcctctagccgctgtcattgttccaaaaagaggaaaatgaggttgaagagggtagtgagggtaccagctataagcttgaagatggctgatattccaccagatgattattcttggaggaaatatggacagaaaccaattaaaggatcgcctcatccaaggggttactacaagtgcagtagtgtgagagggtgtccagcgcgaaaacatgtggaaagagctttggatgatccagctatgctggtggtaacatacgagggagagcacaatcacactgtctctgctgccgatgctactaatctcattctagaatcgtcttgaaattcgtagccaaaatcatcttttttccgtgacaaggtttagaaacgcaagccatcatttaatcaacgttacaagttttcaacggggtgcaattatggcgtgttgaattgaattgcaactttactactctagtcagtcaggggggcattaaaatctccaaagaaattagtagtgggtgttgttccctttccctgtacactattggattcttttttatctttatttttttttttctcgttctcttcaaggctaaatggaacattgtgaatccgttgcatcattaaaaaaaatattgtcaaggatgattgtgatggtggatttggtaagggatttgaatctcgatttttttttattttttttttataaaaaaagcaagtgggtgttggttttaaaaaatcccaaacctctgaacacacctcagcgaatctcaacttcaagcacaccatcgccccctttgtaaccgtcacaacctc

SEQ ID NO: 11143 - DNA, 2300 bp, Glycine max
  Clone ID: PAT_MRT3847_11006C.1
tccagggttgaccccactctgtatgtactaaagcttcggacgcgctcgagccgaatcggctcgagggtcatttgacacatctcataacagtatcatatcgttgttcaggcaatttgcctcattttttctttcctttccttttatctttatatatacagtttttctttactgattgcaactacaaagatgaagatttgccatgtgctactagagcataatatacgttgtagtgtcactggttgatgtcagtggaaaaatggatttggcatctgttcttttgctattgactagcttatgctcttcttctgcactgcatgagcttgattcacaagaagatgcattgtatgctttgaaggtatcattgaatgtttctgccaaccagcttacaaactggaataaaaatctagtaaacccttgtacttggtccaatgttgaatgtgaccagaatagcaacgttgttcgaatttcactagaatttatgggattcacaggatcgttgacacctagaattggatctctaaaaagtcttacaattctttctttgcaagggaataacattactggtgacataccaaaagaatttggaaatcttacaaacttggtcagattggatttggaaagcaacaaattaactggtgaaataccatattcacttggtaatcttaaaaggcttcaattcttgacattgagtcaaaacaatctctatgggactattccagaatcacttgccagtctcccaagcttgatcaatgttatgctagattcaaatgatcttagcgggcagattccagagcagttattcagcattcctatgtacaagtatgtatgtttcactggaaataatttgaattgtggtgtgaattaccatcatctttgcacatctgataatgcatatcaagattcgtcacataaaacaaaaataggcctcatagctgggacagttacaggtttagttgttattctttttcttggtggcctgctgttcttctggtacaaggggtgcaagcgtgaagtttatgtagatgttccaggtgaagtcgatcgccgaattacatttggtcaaataaaaagattttcctggaaagaactgcagatagctacagacaacttcagcgagaaaaatattttaggacagggaggttttggaaaggtttataaaggtattctagcagatggcaccaaagttgctgtcaaaaggttaactgattatgaaagtcctgcgggtgatgcagctttccagcgtgaagtggagttgataagcatagctgtccataggaatctgttacggctcattggtttttgtactacttcaactgaacgcctcttagtttatcccttcatgcagaacttaagtgttgcctatcgtttacgagaactcaaacgtggggaacccgttttagattggcctaccagaaaacgagtggctctaggaactgcccgtggcctagaatatcttcacgagcaatgcaatcctaggattattcatagggatgtgaaggcagctaatatattacttgatggagattttgaagcagttgtcggtgactttggtttggcaaaattagttgatattcgacatactaatgtgacaactcaagttcgtgggacaatgggtcatatagctccagaatacttgtccactggaaaatcttcagaaaggacagatgtttttggttatgggattatgcttatggagcttgtaacaggtcagcgtgcaattgacttttcacgtctggaagaggaagatgacgtcttattgcttgaccatgttaagaaactgcagcgggagaaaagactagagactattgttgattgcaaccttaataaaaattacaacatagaagatgttgaagtaattgtacaaattgcattactctgcacacaagcatcacccgaggatcgtccagcaatgtcagaggttgtaagaatgttagagggagaagggctagctgaaagatgggaggaatggcagcatgtggaggtcaatacaaggcaagattatgagagactgcaaagaagaatgaactggggagaagattcggtttataataaccaagatgcagttgagttatcgggtggaagatgagaagatacataaatttagaccattacaattgatgctgtatcacattatcccttcttaagaggttaattcgattagaaacagacataacataggtgttattgtattccgagtgtaaaaatataggtaataatcttcatattccgattattatgctggttatgaaattatttttttctttaattaaataaggttttaacttttccccccttaaaaa

SEQ ID NO: 11144 - DNA, 895 bp, Glycine max
  Clone ID: PAT_MRT3847_110070C.1
cggacgcttgggctgagattctgctgtactttctttatgctgaggaatttcaactttctgcttttctatccgctcgcgttgcatctaatcagtcacagttttactttgtgtctcttttttttctttaaaggatttgacgaaatccggcagctagcagaggcccgtttggttgctgagaaaacgaaggaaaattagtgtgagattcttttctttcactttctctgcaagcaaacggtgaggataatgcagacgaggtacattgagaggtcgagcagctcggcgagggagaagcgtgccttagattcaggttccgctgacgaagatcaacctcaaagaaagcgacctgctctcgctagtgtaattgttgaagccctgaaggtggacagtctgcagaaactttgttcatcactggagcctattcttcgtagagttgtaagcgaagaagtagagtgtgctttggaaatttgccctgccaagcttatgggaggtctctggtgggtatgtggagggagcgcttggacccgccattcacttggttttccctggtaccacaacccgccgggttctcgcccgtggcccagctccttgtgcccttcgcgaggtttgtctgcctcgtcgcggctgcgaggccgaggatgatgttgggtggagggcgggtctcccaagggcatagaaggccctgatgacagcagtctacaattacaattcaggaccaggttatcccttccgctctttactggggggaaagtggagggagagcatggaagcgccatacacattggtttgattgatacaacaacaggccatgttgtcacatgtggcccagcttcatgtgtcaaactagatgttattgtacttgaaggagatttcaataacgaggatgatgataattgga

SEQ ID NO: 11145 - DNA, 376 bp, Glycine max
  Clone ID: PAT_MRT3847_110071C.1
ggcttgctcaatgatctcttccccatctgttaccactgtcaaccgtgcctgtgccggcatgtttgctccattcactggcctcaattccattgctggcttccccatcatgaataccaacactgacattacctccattgctagcaacggtggaagagtgcaatgcatgcaggtgtggccaccagtttgcaagaagaagtgtgagactctttcctacctgccagaccttgatgatgcacaatcggcatatgaagtacaacaccatcttatgaatggatggattacttgcttggaatgtcagttggagcactgtttcgtgtaccgtgtgcactacatgtctccagtatactacgatggactctactggaccatatggaat

SEQ ID NO: 11146 - DNA, 253 bp, Glycine max
  Clone ID: PAT_MRT3847_110072C.1
acacaaattctttggctctgagaccatgcatgaaaagtgcgtcgaagcaacaaaggaatacactcatgggatgcaatatacatcagactccaaaacagcttaccagcaacattactttcatgcaagagacctggaagtccataccaaagacacacttgtgttaagcatacatggcacggaactttctaatatgacatactacaaaacacatggatatagagtggagaaggcctactccgcgagaactgatgag

SEQ ID NO: 11147 - DNA, 124 bp, Glycine max
  Clone ID: PAT_MRT3847_110073C.1
gatgatgctggggtacaaccgctctccatcttgcaactgggatgcgtctggcccgagtgaggggcacatgagggactgcattccggagattgcacagttggggtatgtgtggcagttgctcaca

SEQ ID NO: 11148 - DNA, 345 bp, Glycine max
  unsure (1)..(345): unsure at all n locations
  Clone ID: PAT_MRT3847_110074C.1
nanatngtactngtaacgtnaggctcgggattcggntcnaggtattntagtngantcatngngtggnaccgntacnngattcanngcgganggactcggcgagtggatgtacnancnggnnncgngaacctgtnanggacgttnntagnggcnancnctgtacagnntgcacttnggttgaggtcgnatanngaagntggntnctttncccccngagangcngnnagcangaagnaaggtgngtacggtgcttnnggtgncntncatcgtgnannncacaannatacttncaagngggncccttcgggnanaanncnnnttnttncgccntcctngncggantcn

SEQ ID NO: 11149 - DNA, 1708 bp, Glycine max
  Clone ID: PAT_MRT3847_110075C.1
aaaggctcctccaagagtttcaggggaagactcttctggaaagagaatcaagaggagctttgggggaaaacctgatacaaaaagaatcgcaatgtaaaggaaaacggaaaaagactatgaggcctaaataaaagcaaaaggtggagaaaccaagagcaatgatggcaatgactcagacagacaaaattggtataacatctaaagatgagccactacaaaaatgacggcgaacctcagaaaagaaaatctcaagccaaacataggatctactatgaagattgtaagaaaaagccctgaagatttcagtagcagcagtgctgtggcagcatttcgtgtgtttcagttcaagtataggtatcagagtggatgatgactgccatttattgacactttttaatatgctatgcatgtcttgcatctaccttgtagatgtaatattaacagttgtcatccccacgtttagaattttttttttatttaaaaaaagagtagtgctttagggttttttagggttgtaatgctaaaagacctttcattagtgtaggtgataggtttagcatatgattcatgggaagaggcagagaagttctagtggttcagcaagtaaaaagacaaaaaaaatagttaatggtaagaaatctccaagcaaccatgtaaaacatggacaaaaaggtgcctcaaaaactaattcccatcatgaggatgccaaagagagttctgagttatcaaaccctgaagatatatctaaagctgagattaactcaggtggttctgaagcagaacaggctgaagggtctgatgtaattgtaactaagcagaagaaatctaacaagaaaccaaaatcagtttcacgaggaaagaaacttaaaaaagagaagagcttgaggtataagaaagagtcagatgaagagaagcgggaatcagaccaagagaagcaggatcatggtgagaggcttgctgaagagaatatcccacaaggagatcaaaatgatgatgcagaaagtagttcaaaagagacagatggcaatgaatcaagaggagctttgagagaaaatggtaatgaagaagaatcaggttctggagggaatgaaaatgacagtgatggggaaaaaagtagtcctagagaagtggaaaaatcacctaaagagtcagcaagtcctgatggtgccaaaattgctgaagtttctgatgacgagctgctgagcaaatggaggcgtccctcgggaaagaaaagctcagggcaaaaacggtgagcagtttgacagttgtagcacaaatccctgaagatttcagtagcagtagtgctgtggcagcatttagtgtgtttcagttgaagtataggtatcagagtggatgataactgccattattggcacactaatagatatgctatgcatgtcttgcagccaccttgtagatgtaatattatcagttgtcatccccacgtttagaaaaaatttaaaaaaaagagtgctttagggttttctagggttgtaatgctaaatgaccttttattagtgtaggtgataggtttagcatatgattcatgaggatgttttcatccttccaacacaattgatattccattgaatggggcaacatgtacagctatacgtggggataattgtatttgtaacttagattgtttgtactttttagtcttagcatccgtgaaaaatatgacctaccgtcccaggccgacattcct

SEQ ID NO: 11150 - DNA, 459 bp, Glycine max
  Clone ID: PAT_MRT3847_110076C.1
gtcttttctaggattgacataacttacagggtgacgtttgccaccagctgctctttgcgtgcaaatggctcaaatgcaaagttcttggtcgttggaaacagcctcattcccaaggctcatcgatctgcgccacctgtttcttgcacacatgacccatggcgtcaaatgattgcctatctcctccatgagagtaggaatcggacttacctcaaacccaaaatttgttcttcagatgctatgctcatttggctcccacagcgctgaatcgcagttccgagttcatgtatgctctgcttgtacatgctgcaatgaccgacctgaaacacttagacctagagggtgatgggcttattgacaatgagaacatccctgatcaaacgtacgatccctcaacagtccatgtatgtgcgcacttactgcgggtgaatttggctcgctgctctgtaagcttcagctgtg

SEQ ID NO: 11151 - DNA, 410 bp, Glycine max
  unsure (1)..(410): unsure at all n locations
  Clone ID: PAT_MRT3847_110077C.1
acggctgcgagaagacgacagaaggggattggagttgtgaaagatgcagaaatgggagttccttgcagcccaaagcttcaaggatgaaattcttcctgcggttttggactgaagggagctcctacttcttcactttcccatatttttttgtctttgctttttatcgaaccaaaggcttcaaacttttcttgtaattagctattgattccttgaagtttggtgatctcgttatgcacttctgctgcagtaagtatagattttcaatttttagttttaccaaatcaaagtacatcgtcatttccccttcccttttttttctcatatgacacttcttgcanatttcttcaaagggggaaaatttatcaattaagtatgcactttatgttcttgtacatttatgcagatgatgc

SEQ ID NO: 11152 - DNA, 198 bp, Glycine max
  Clone ID: PAT_MRT3847_110078C.1
actctcattccccattccctcagctacttcagcccctactcgattcggatgttccgcgatgaacgctcactcggaggtcacgacgacgtccagaacaatctcgggcgcgtcgctgagcgcaaacacgtctacgccgttatcgacggcgtgtcgtcgatttgtactcgtacggtttcatcgacatttccgcggcgtttg

SEQ ID NO: 11153 - DNA, 1099 bp, Glycine max
  unsure (1)..(1099): unsure at all n locations
  Clone ID: PAT_MRT3847_110079C.1
ggctcgagggcgtagttaactaaacccctaaaaaccccatctcagtgccgcaagcgctgctcactcccatttcagagcgatcaaaatggcagcaaagaaagcatggagaatcattccgagacccctcctagaaaccatcctcaacaaccacgtgcagcaccaccgcgtccctcaactcctccttcttcacggccccagaggcgttggcaaaaccaccctcattaaccaacgtttactcccagaatggaacaaaggccctcacatcaccggttatgtcgactttgccgaatccatcaaagcccatcacggcccgtgggcctcgtggtccacctgccctttgccggtcctctccgaatgccgcaaaacccttgagcaatgcctggagtccatggccgagaagggcgtccgtgcaggcaccatcacctcccaacaaatattcgctaccctcaacaaatggcacggcctgaccaccgccctccgccgtgtgctgcagggaaagtcccgtgttccggaccgggcttccccgttggtgttatgggaccgcgctgtgttcgccatgtctggtcaatgcactgcttctgaggttcgccggatatggggacttggggagaaggagaagaatgacttttcctctgaggaggcttcttacttgaaggagtcggttgcagcactgaaacttgcaaagaaggtaatcgcagttcagcaaggatggagggccaatgccattgctcacatgaatcggattggcacgttctcgaggactttaacacattcttgtactgattggccttgcttgttgctggagttgttgtcacaagctgctgaaattgatcattttcagccaaagctggtcattaacaacattgaagttcttaagcatgccgctgaaaatgatgagtcttcagtcagtggacccctgtatcatgatagtctgatatggagaataatggctttgggtgcagataagctttgtctacctgttatcttggtgacatctgatagttactattcatatgaagctntcttggagtttggatatatggagatatttatctcacgtgagacatttggatggactccacaagaagccaaaatgcat

SEQ ID NO: 11154 - DNA, 345 bp, Glycine max
  Clone ID: PAT_MRT3847_11007C.1
gggggcggggcaaagtacatttttcttttaatgaacgcatatttgaagcacaaaccatcaacattagaattactgatagaatataatgcatttaatcatatatccgcaaaaacatggtacgttttggagtctaaatcaataagccgcagggctgcaatagttgccgcaacagacatgaaggcaaagaaacaaatattgatccaatgccagagcttttggatggatgttagtttgttcgcatttgccacaagggacatatggtttgcaagaataaaggtaaggggaaatgggctgatagctccagggaggctcatgaaatttccaaaaaagggcaatagagctgat

SEQ ID NO: 11155 - DNA, 326 bp, Glycine max
  unsure (1)..(326): unsure at all n locations
  Clone ID: PAT_MRT3847_110080C.1
ganataacaagaacataaactatatacgcgtatcacattttgattttccttgttgcaaatatgttcggcaccgtcgagcacgacgaaattcgacgcgcttatcgtaagatggatctgtggtatcctgataggtggatcaaggacccaaagcttgcactagaagctaaaaagaatttcagcgcgttcaagaggcttattcagttttgtccaataaagggaagagaaggatatatgatgctggcttgtttggtctgattggagaggacgatgatagnggatttgttgatttcatgcagacatggtccttcgacgatgcagaaagtgag

SEQ ID NO: 11156 - DNA, 155 bp, Glycine max
  unsure (1)..(155): unsure at all n locations
  Clone ID: PAT_MRT3847_110081C.1
caagtagtcaanntcaagcttncnactacttcnctcacacgatctggggtngccagctacngtggtcatcataatggattccccannatctgttgtgncancttcaggagctcagtgntnggtgagggngaggaagcacaagtctgatgttttct

SEQ ID NO: 11157 - DNA, 508 bp, Glycine max
  Clone ID: PAT_MRT3847_110082C.1
gaggctgctcgccggcctctaccagccgaccgccggcgcggtcgagatcgacgggctggacctgcgccagctcgatccggccgatttccgccgccacatcggcgtggtcgagcaggagccgcggctgttccgcggcacggtgcgggagaacctgctgctgggccgcgaggccggcgccgaccggctcgccgaggtgctgcgcctgaccgggctggaccgggtggtggccgcgcatccgatgggtctggacatgccggtgggcgagggcggcgcgatgctctcgggcggtcagcggcagctggtcgcgctggcgcgggcactgctgctgcgccctcagatcctgctgatggacgaacccaccagcgcgatggacgcgcagaccgaggcccagttcgtcgcccagctgcgccaggcgctgccgcgctgcacgctggtggtggtcacgcaccggccggcgatgctggagctgggggagcgcatcgcggtgctcgaaggcggccggatgatc

SEQ ID NO: 11158 - DNA, 313 bp, Glycine max
  Clone ID: PAT_MRT3847_110083C.1
ggcgtagagaccacttacgagaagacgacaagatgcaatttcatatcaattatgctttagatagatcaaatctgaggccttttgaacgggcatacgttccttatactcttgccatcattgattagcttatggagattggcaaggctatgatcttgcaaatgtcactgcaagatacaactgaggtttctcgtgcaagttataggttctttgtctgtgataatctccttttataatgcatacatctctacttttattttatctttttatatggtgcattctactaattttgttctcacttattttctaagttaat

SEQ ID NO: 11159 - DNA, 280 bp, Glycine max
  Clone ID: PAT_MRT3847_110084C.1
ttgaggcgttttactattgttaggtaaaggcaggggttagggtgactaaaccgcctatgctaacgatatgggctgcaagatgtaaccgttaaggcgtttggttgtaatggacaccatggagtgcgcacgacgcgaactctgtttctagtgagggatctcaccgtgagggacctctctggttacttgagcctttcgttaagcatgatgctgatgcaccttgaagaacaggtgagtacactaactagacaggatcctgttgacggctaagacagaactgatg

SEQ ID NO: 11160 - DNA, 212 bp, Glycine max
  unsure (1)..(212): unsure at all n locations
  Clone ID: PAT_MRT3847_110085C.1
ggaaaacaacctatnnttatataatttnnttgagacaaaggattattattagcaccagcctttatcaagctagggcgttattacattttttttttgtcacatttaactaccatgtttgaagttagatggcctcatttaacacanagcttggtaaatccaaatcatcatttgtgctaccattttacaacttggaagcaaatgaccaataaatt

SEQ ID NO: 11161 - DNA, 147 bp, Glycine max
  Clone ID: PAT_MRT3847_110086C.1
agaggaagaaaagaaggtatgcggatcctaaatttgatctttcttaattgattaatgtgcaatgaacatgtgtaaaaagagttttgtagcaatttctgtggtgatctttggcaacttacacccccatttgtggaaaatattttaata

SEQ ID NO: 11162 - DNA, 152 bp, Glycine max
  Clone ID: PAT_MRT3847_110087C.1
acacacacacacacacacacaacaacactctggaactaacaacaacaatcgtagaccatgtcggtgtaggcgtgcgagcaccacgaggggaagcagacgaggatctgccggccagtgttctagtactgagctgcagtccttatcatcgtgct

SEQ ID NO: 11163 - DNA, 532 bp, Glycine max
  unsure (1)..(532): unsure at all n locations
  Clone ID: PAT_MRT3847_110088C.1
attcggctgagccaggaaggtactttggtggagagaagattacatcaaaggaagtggaaatgggtagtccatggaagtcctgaacatcaaactttgacatcgattacacttgcgctgcaagatgaatcaagcgaaacattcatttctttattctttcctacttcaactggatctgtttttgagtatcaaatgccaaaacagttaggaactgttccaaacaatcagtttccaggagcatggggaagtcatgagcatcccttacatgcaaaagcagcaagaggtatagctggcttaccattacaagttgggaggatactgtttgcactagatgatggtagacttgcagaattgcatctagcaggactaggtggtgaaacttcaggaccatctgtaccacaaaactttcgaaggaaagcatnaactaaatatgtttggactatattagatgtgccagagagtgaaggatggaatgcagaatattgcacagaagaacgtggccgccggaaattgcatggcaggaacaaaagatgag

SEQ ID NO: 11164 - DNA, 255 bp, Glycine max
  Clone ID: PAT_MRT3847_110089C.1
cccacgcgtgcggacggctgaaggcgaacgacaggtaggggtctgaaaaggaacaagtagggtacaacttctataaaacaacagatggctacctctatgataagtccaccaactgataccactgtcaacaagactcggaccggcattatttctttaactacttgtctcttgggcatcgctggcttactcacaaggaaaaccgcccgtgacataacatccatggttagcaacccgtgaatactgcaatgtatgtat

SEQ ID NO: 11165 - DNA, 709 bp, Glycine max
  Clone ID: PAT_MRT3847_11008C.1
gaagttcaatttttgccttttcgcaaacattctactatagatattaaattcagtatatataatccattgtttaattcctttacaacattcataaccgtcgctagtaactactaaaaaaaagaatgttcctctcactaatttcactaatatacaatttattgcaccaaagaccttttcctacagtataatgaaaaatacaacaaatagaaacaagagattctggtgctgactgtgcaggaaccttaccacttgattgttggctttgcacaattgatggggataacatgttctatatctgacaacactttgagaagcaggcacgcaaccgttgacggacaatattgtttacaactgcatatgcatgttccgcgttctgcgtaccattgtaaaaaacaattggaacggggaagaaaggtgtatttagttcagagcataatggactcgttcaagaagttgaaccacctgatttacagaaacatgagagggtaggagtggcttcaaactaactattaccatatcagcttccatgagaatcaaaatcgcaactatcttcagacttgtgagctccaaaaactggttcaatttgttaccatcatgaatctagggtaattcaacgcgattttcgcgactgcgaaaatcattaaggccattgcggagcacaggcgatggcgagatgggggcaaccgggcttgccagggcgggccgtagg

SEQ ID NO: 11166 - DNA, 332 bp, Glycine max
  Clone ID: PAT_MRT3847_110090C.1
ctgagacaaagcaagacagaatttattcaatgggcacaaaaccaataagtgttatcatcattttatccaacccttagtctggggcagggaaaatggaagcctagttcacttccaactggaaaaaaaaggccgccgtaaattagttcaactacataaagaaattttgaagccaataaggcgatacccttcacccctaccagattccctcaagtcaggagctttaaccagatctaattgacctccagagcttgacccacttttccattggctgagcaacctctggaaacaaaagatcaaccttccccatgggctccctgactggtttgggcccc

SEQ ID NO: 11167 - DNA, 246 bp, Glycine max
  Clone ID: PAT_MRT3847_110091C.1
gacaaccttgtttttgtgctatgccactaatgagtaggggacaattggctctccaattccaattttagggcatttctctatcaaaggaaaaaaaatccttttaaatgatttgtcttttgtcaaacttacattaaatatagttttgatatatgatatgattgtttacacgtggctataaaatgaaattcatttactagtagagcatacttcttcctccaaaatactactctcaccttaaggtagtgt

SEQ ID NO: 11168 - DNA, 330 bp, Glycine max
  Clone ID: PAT_MRT3847_110092C.1
aacatgtgcgggaacacaacagaaggggataacgggggagggtaaacagagagatatctatctattaattaattcacaatggaccactagctaaccgaccaacacatctataagttcaacgtagcctttcgtctcttccacaaggaccttcacggtcatattaacaccaaaggactttatactgttatgtagccacttgggcagaacccaactgatgcatgatctggacgacatgatacaagaagatgatgctgattgtaatgtgtactattgattttccatgatgcactcaatctcatggaacgcaagatcaaagacactgattcatag

SEQ ID NO: 11169 - DNA, 383 bp, Glycine max
  unsure (1)..(383): unsure at all n locations
  Clone ID: PAT_MRT3847_110093C.1
ggaagatgccttttgttaaggtattgaaaaataaggcgtactttaaacgctaccaggtcaagtaccgtcgtcgtcgtgagggcaagacggactaccgagctcggaaacgtctgattacgcaggataagaacaagtacaactcgcccaaatatcgtttagtggttcgcattaccaatacaaaggtgatttgtcaaattgcgtacgctgaaattgatggggacaagattttggcgcaagcgacgtccgccgagcttccacgatacggtcttactgttggccttaagaactatgctgctgcctatgctacgggtctattggttggtcgtcgggtgctccagaaacttggtcttgacgaggactatgaangcaatacggaagttgat

SEQ ID NO: 11170 - DNA, 1964 bp, Glycine max
  Clone ID: PAT_MRT3847_110094C.1
aaagtatagatatcaaaaaggcagtttagacatctggtttacatatttttaaagcatataaaggggctcgaggactctctctgactcactcctaacaaaaaacaaactaacaccgtctttctcttttctcgcgtgtcgtacggatcgtgcattttccttgaacgcgatcgtcgaatgaaaatgaaaaagaaacgaaaggaaagcgaggccagtggacggtcgaacttgccggatgagatttcgaagtcgcattactcccttgagcggcgttcgcggttgatcaaacggtgcagggaagacggcgtcgtggcgacggtgccgccgtcacgcggcgcgtcgttattcctaacgccgtcgcggggcttgaagcggaagataggttgcatcgacaaggccacgcagatggggcgcagcgtgaggatcgaggacgactacgtgaccgggggcagcgcgatcgggcaggggaagttcgggtcggtgacggtgtgccgcgcacgtgcgaacggcgcggagcacgcgtgcaagacgctgaggaagggggaggagacggtgcaccgcgaggtggagataatgcagcacctgtcggggcaccctggggtggtgacgctggaggcggtgtatgaggatgaggagtgttggcatcttgtgatggagttgtgttctggagggaggttggttgataggatgaaggaggggccgtgttcggaacacgtggcggcggggatactgaaggaggtgatgttggtggttaagtattgccatgatatgggtgtcgtgcatagagatattaagcctgagaatatcttgctcaccgcggccgggaagatcaagcttgcggatttcgggctcgccatcaggatttctgagggtcagaatttgacaggtgtggctgggagccctgcatatgttgcgccagaagtgttgttgggtagatattctgagaaggtggatatatggagttctggggtgctcctgcatgctttgttggttggtggtcttccatttaaaggagattcaccggaagcagtttttgaggaaattaagaatgtcaaactagattttcaaacaggggtgtgggaatcaatatctaaacctgcacgagatcttgttgggagaatgctgacaagggatgtttcagcaaggataacagctgatgaagtactaaggcatccatggatatttttccatactcgagatcttgttgggagaatgctgacaaaggcaaaattgaaactccaaaatgcagctgcttgccaaaatgaatctgggttagtaggaggaaacaagatagttgatgatggctcccttgatgaggattattcaagcccgttttcatcctctgagagttgcaattcagagtatcatgaggactgtgcgtggattgatgcactttccactgcagtttcacgtgtgaggatatccgaaacaaagaggaccaagttgtggggttctactagtccacttgatcaacaaggttcatctaacatgaagactaacctctgtaaagcattctgacctactgacatgctgacaccgacagtatacaccacaatatcgactgctttagtgaggttctataaaaaaacttagctcaacacattctacagttggcaaaagtggatttcatgctaacatccattattagggtgacctgggtgccagtttccctcccaagtttctttttagtgtgagatctaattacagtatgtttctttggttcctttgtccatatagcctaataatgattagctgagaaaactcagttgtacagaacttgtacatcttaatgttaatgtgtggccgcatgtttttactcttgcaggagaaggggtttatataagaatatatgctatgatttcccttgtttagtgaaaaataagttttatggtagagtgtttacctgcttcgatggtgaacacaccaaagattctcactaccaaagtttattcaatctgatttttttt

SEQ ID NO: 11171 - DNA, 1527 bp, Glycine max
  unsure (1)..(1527): unsure at all n locations
  Clone ID: PAT_MRT3847_110095C.1
cctcgcgccgtccgcaccggcgttctgcttaatcgaactattcagattctaaaaaatgagttggtggtgggctggagcaatcggtgctgccaagaagaaattcgaggaagaggaaccgccgcgaagcttccagagcgtgggcctggtgatcggcgtgacgggcatcgtgggcaacagcctcgccgagatcctccctctcgccgacacccccgccggtccatggaaggtctacggcgtcgcacgccgcccccgtccgccgtggaacgccgaccatcctgtcgagtacatccagtgcgacgtctccgatcccgccgacgccgaagccaaactctccgccctaaccgacgtcactcacgtcttcttcgtgtcgtggaccaaccgctccaccgaagcagaaaactgcgaagttaacggcgctatgttacagaacgtgcttcgcgccgttatccccaacgcccccaatctccgccacgtgtcactccagacaggcggcaagcactacatcggacccttcgaattcatcggcaagatcgaatctcatgaacctcccttcgcggaggatatgccgcgtttggatgcgcccaatttttattacacccaagaggatattctttttgaagaaaccgctaagaaagagggtttgacctggtcagttcacagaccccaagtaatctttgggttttcgccttacagtttaatgaacatgattgggacgctcagcgtgtacgccgcaatttgcaagcacgagggtgttccgttgagattccccggcacgagaggcgcgtgggagagttattcttgtgcctccgatgcggatttgattgcggagcagcacatttgggccgcggttgatccctacgcgcggaacgaggcgtttaactgctccaatggagacgtgttcaggtggaagcatctttggaaggtgctggcggaacagtttgggattgaggagtatgggtttgaggaagaaggtttgagtttgtcggaattgatgaaggataagggtcctgtttgggatgagattgtgagtgagaatcagcttctgcctaccaagcttgacgaggttgctgattggtggtttgtggatcttattttctcaggggagggaatgttggatagcatgaacaaggccaaggaacatgggtttttgggattcaggaactccaagaattcgttcataagttggatagacaagaccaaggcttataagattgtgccttgaatttaattcattctcttcttgctgcttctgtttaatttctcatgtgcgtctttgtttgtatttccctgtaatttatatcattatatggaatgaatgaatgaataaaactcgaggatataactcgtatgagtggttgggataatccagagttatgtcttgtgttgtgttgtaattttgtatccacagtttctggtatttagtatttacagaaagtggaagcaaaacttgaatgataagcaagaaccagttttcggtaaaataaataattgttctttcatttatatcnnnattataannggnnattg

SEQ ID NO: 11172 - DNA, 425 bp, Glycine max
  Clone ID: PAT_MRT3847_110096C.1
ggaaaggaattgaataccttgggtttaaaaccaaggggagggggagaccccctccggggtggaatttgcccaattgctttacccaatttttctgaaaacatggaaggggtttccaagttccaacttttggctcaaagaccgggggaacgggggaaatctgtaatggggagggtccttttgggggggccctctcaatgaaacccctaaaaggcaacagcccggtgttttaaaattgaaaacaaacccacaaccctcgccaaaaagggggcaattttaccctttaaacaaggacctgggggggggacatctttggaacaaaaaaaatccttgagtttatttgggggaacggggaaaattaacccccccaagggtgttcacctttgttttgttaacccgttaatggaaaacaccccttaccaattggg

SEQ ID NO: 11173 - DNA, 379 bp, Glycine max
  Clone ID: PAT_MRT3847_110097C.1
aattcggctcgagccgaaaaaaaagctataggctctcacgtttatactatcacgccattctcttttgcgtacgcaacactcacccatcatggaaccttactatcccctgcaaccaacatccactaagcaaaacctgatctatggagagtcccgttttttttttcgttaacaacctacatcgactgtgtctccgatggaggcgtacagaagggctcttctatgaagccaattcatctactatttgtggcgaggcgccctgtcagtgtctcgagattcttctggaccggcaactacaagcacgtcgtgagctattacgtccaatgtagcgacgtttcttacgtgagatttgatgataagtggcagagggcgtttctttcat

SEQ ID NO: 11174 - DNA, 339 bp, Glycine max
  Clone ID: PAT_MRT3847_110098C.1
gaaaaccaaaaaaaaaaattttttttttaacgggaggggcccaaaaaaaaccaaaaccctgggattttttttttttttttcccgggacatgacggaaactaagattccatctcccaggaaactttctttttaaacccgaacacgccccagggggtaaaaacacttccgtggcgacattttttttggaagcaaaaaaccccccccaccggtttctgaacaccgcaaaaacgggtccctccgacggacgagccccgccccaaaacggggggcccgccccctcccatccctcccgacacccccccattcatacattgacaaacccccccccccgtttccccc

SEQ ID NO: 11175 - DNA, 325 bp, Glycine max
  Clone ID: PAT_MRT3847_110099C.1
aaaggcgattcatcaccaaagattatgacagtatcagattttcaaagattgccttctatcaaccaggaagagctttacttacaccttgtccagataatgattacacccctgcacttgtgttaataataacatgcccccttcttttgaatggggggataaaaacatgagttaaacttttctatccgcacaaaaacggataccttacttaattgcttagtttaaacaaatcattctcgagactgctgaagttttttagcttaacagaaggcctttaattgttgttatttaaccctaagcccctttggaagggacgcatattccttaa

SEQ ID NO: 11176 - DNA, 434 bp, Glycine max
  Clone ID: PAT_MRT3847_11009C.1
tttttttttttttttttttttttttttttttttttttttttttgggggggaaaaatgattcaacagccacccaaaaggggggggggaaaagatacaacagccacccaataaaaaacggctcatttttatcttcctgggggaaaacctaatacctttttcaaacaataaggtgtaaataatctgacacatttcaaactttaaaaaggtaaacccctttcatcaaccctggtgggttaattaatcatgggctaataactgaaacataaattcaaatcaaaagcttattctttatagcaagaactccacttctcaatgtttgaatgtaaaaaaaggattggcatgacttgaatctccctccttgaaaagggttgttcccctttacaacccaaagtttgaatgaacaatttcctttttaaaaacaatttttctttttc

SEQ ID NO: 11177 - DNA, 241 bp, Glycine max
  Clone ID: PAT_MRT3847_1100C.1
tgcgctctgggtttttttttttttaaagaatccgaaaaatagctgaatctctaatttacgtgtcgggtgcctcaaattgccaaccttaattacaaaacgtgacttggtagatggaaaaattgaatcgcctttggctcattatttggcacaattataagggtggggggtgcacagacaaaagggcactcatgtacattcacacgaaaatgaatgtttttcgggggacaaaacatataaacca

SEQ ID NO: 11178 - DNA, 508 bp, Glycine max
  Clone ID: PAT_MRT3847_110100C.1
ttgggatgcttggcttgaatattgtctttgttgtagaaatggtatttggcagtagtgattgggtgggcaatttgagatggaatgtggacttgttttgactacttttcaggatgcattatcaccaatggaacaggtgttgcgtagtccaatagccatgcttgcttttttactcattctgtttttttcaaatcaaaccacagcattaacttggagttttggtggagcagtagttgtgcaaagtttcttaaaattggatattccgggttggcttcattatgctacaattagagtaattgctgttctgcctgccctttgaagtgtttggagctctagcaaggaccctggaatattcagatgtaccagttgcaagttttcatcatgatctacctgaaactatcatggagcctgatgttcctgtgactactgtaagggagactcatccatttacatcatttccttgctccccaacttctgttgttaaggaatcagcttccacttcagaatcaga

SEQ ID NO: 11179 - DNA, 366 bp, Glycine max
  Clone ID: PAT_MRT3847_110101C.1
aattcggctcgagggaggggcacctgctggtgcggcacttccagttcctgcgctggtctgcataccggtacacacctgactccaagaaggccttcttgcacctgctggctgaggtggacaagtggcatgccgagagtggggatgggcgcaccatcgtgcactgcctaaactgtggaggacgcatcggcaccttctgcgcctgcgccacggtcctggagatgatccgctgccacatactggtggacgttttctttgctgccaaaaccctccggaactacatacccaacatggtggagaccatggatcagtaccacttttgctacgatgtggccctggagtacttggaggtgctggagtcaagatagc

SEQ ID NO: 11180 - DNA, 147 bp, Glycine max
  Clone ID: PAT_MRT3847_110102C.1
cccggattaagggtttcgctgctcccaaaaaggcaggcctgaaactttccaaaccaaatggaagttgcaacccaaagaatgccacctgcccaaaattgaatccaaggagaattttgaaaaactgccggaaaagccactagtttttgt

SEQ ID NO: 11181 - DNA, 497 bp, Glycine max
  Clone ID: PAT_MRT3847_110103C.1
ggggcagattatgacactttgagagctctggattctgatactgcttctagtactcgttcaatgaccgaggaagagataaatgccttgcctattcacacttacaaagttccagtcccaccaaagtgagttgatattggatgggacaatttcaaggttgccattcttgaaagattccaaacttcagccactctcaacccttttgccgcaattcgaaaggtttgaaggaagacattggggcagaaatcaaactctacgaaccccccactttatcaatcatggtcaagaaggcattaatgatcgagcaaataaacagagcaatttggaaggtgggacctgatgttgcttcaaactcaatttcaaaagtcaatacctcttaccgaaatccatcccatacaaagactattacttatggtatgagtcagaaaggtggaggaaaaagtaatggcccttttaattctttcactagcagtacatctgtgaacacaccagaaaacaac

SEQ ID NO: 11182 - DNA, 306 bp, Glycine max
  Clone ID: PAT_MRT3847_110104C.1
aaaccggaacaggaaaacaacgggggggccatttgatacagccaaaaaaggccaaccccaattttttgggttcccccccaccaaaaatatttcaaagggttcaaaagggagaacaaaaaaaggggggggaaaaaaactcttttataaaggggggaaaaaaaatccctttccctgggaaaaaaggggttttcacgggggggtttctgaaacccgggcaaaccctggttaaaaaaaggaatttgggcgggcttgaagcctttgggggtggggacccggggggcaaccccggaatttcgggccggggcc

SEQ ID NO: 11183 - DNA, 1391 bp, Glycine max
  Clone ID: PAT_MRT3847_110105C.1
ggaggaatgaaaattgcaaagctgcaaaaagcaaggtaatcctaacggatttgtactctcagccgacagggtaattccaggggcaccactaccatcaggagcactactgccagctcatcctttgctccactacttgctcacgaagtccctgagagctcaagttgcgatcaagggaattcaagattctcgtctgaatacgaagatcaagctgtgggagtcttgtttttggttctttcgctgcttctttgtgatcaagaacactcaagaaatcatgtcaaacacaatcaggattgagaaattcaatggaaagaacagcttcaatctgtggcgcatcaagatgcgagctttgttgaaggaacaacgtgtttgggctgttgttgcttctgcatctgtgaagaaaaaaatggcttctgaatcaaaagaaaaggcctctatttcaaagactaaagaacttgtagaacaagaagaaaaggctcactcactaatcttgctttccttgtctgatgaagttttatatgaagttgcaaatgaagaaactgcgcagatttgataaggtaccacagttgatttgtacattataaaaacaaaactcttgcaaaatttattttccactaatactcaaatactgattttcttttcagaacatacttgcagcaggtacagataccactgcagccacatcagtttgggctatgacagccctagtaaaaaaccctagagtaatgaagaaagttcaagaagaagttagaaatgtggggggaacaaaagatttcttagatgaagatgatattcaaaaacttccctatttcaaggcaatgataaaagagacgttgagattgcacctaccaggtccactacttgtaccaagagaatcaactgaagagtgcattgtagatggctaccgaattccagccaagacaatattatatgtgaatgcttgggttattcaaagagatcccgaagcttggaaaaatcctcaagagtttattcccgaaagattcttggatagcgacgtagattttcgtggacaagatttccaactaattccttttggatcaggtcgcagaagttgcccaggtttacctatggcagttgtgatattagaacttgttcttgctaatcttcttcattcctttgattgggaattgccacaagggatgataaaggaagacattgatgttcaagtattgccaggactcacccaacacaagaagaacgatctttgtctttgtgccaagactaggagccatatataactactagatggactttgtgatcaaaataataaaataatgcatgttataatgttctatcaagaaattttaatgtgctatacttgactttttggttagtgttgttataatgtatgttctattatgattttcctctca

SEQ ID NO: 11184 - DNA, 365 bp, Glycine max
  unsure (1)..(365): unsure at all n locations
  Clone ID: PAT_MRT3847_110106C.1
ttgatgatccgccaccggggacggcgaagagaggacattgattccgggaaccaggggggaagaggcccacaacaagcnaannagcgaacaagagaaaagcgcncccacaccggccggcaccgaacgacccaaggangagaaacacccgcgncgcaaaaagggggacaaacctaagacgcgcngccgcactatacgccctatggagtgtaatcttgcggtccgtcagaagattctaaatctcgtgaggcccattatgaagaaaagggacaagctcagccgccaagctggaatcaacccacaccccatggaacggactggcttggccaatagatcactgaagaagggcaacgatattctgtgatgcg

SEQ ID NO: 11185 - DNA, 682 bp, Glycine max
  unsure (1)..(682): unsure at all n locations
  Clone ID: PAT_MRT3847_110107C.1
ggcaaggaatgcccagtatgcccccccgggntccccnggaagngggttcgcccnattnggggncgaaggccaagccttttggacttgtgttgttttcccccaaaaaanaangccaagagctcgttcancgacgattgcncgcctgacgccgagtccggggctcaaagtggtnccgtcataaagttttaggcatcaagcaancagctcttttacggcggcaaagcgtgccccaagccggaggccgcacatgccagcagctttgcaagccggagccgtgcgtcatggacaagtgggtctacactggccagtgcaacaagtcgaccggcaggcgaccgaaggctcgcaaggtcgcggtgcaggctcggtacggctctccgtcgtgtgtcgaccaagtgggcgaggatccgtgcaaggtcgactgcgagttcacgtggggcgactggtccaagtgcacgagctacacgccgaccaagacgcgcaagaaagtcatctctgtgcagcccaagaacggcggcgcgacgtgcgagccgctcaccgagaccaagaagtgctaacgcagcactcaagcacctcgccgatcggctgttcgtccgttgggaagcccgtcaaaagacaacgagtcgttaggccttcatttgccaatgcacgttttcccctttcctgtaaaaaaaaaaaaaaaaaa

SEQ ID NO: 11186 - DNA, 444 bp, Glycine max
  Clone ID: PAT_MRT3847_110108C.1
atggctgaggccagactctacgctcccccctctcaattggatattaagcaaattattttagaagcacagcatcgatggctacgtccggctgaaatttgtgcaattctcggtaattataagaagtttcgaattgctccagaacctgcacatatgccaccaagtggttcacttttcttatttgatcggaaggtgctgagacacttcagaaaggatggccataactggaggaagaaaaaagatggaaaaacagtgagagaagctcatgagagactaaaggctggaagtgtggatgtgttgcattgctactatgcccatggagaagaaaatgaaaattttcaaagacgcacgtattggttgcttgaagagctcctcttctcaccctttttattcaacattgttgcagggaactctctcacattgttctcgtccattatcgacaagtga

SEQ ID NO: 11187 - DNA, 477 bp, Glycine max
  Clone ID: PAT_MRT3847_110109C.1
acgagcttcaattctttcctactcattaagcctaatattctcactaaccaaagaaacactactcactactctctctgtagtgttttcaatagccatgggtggcaacaggcaaaggaaatcttcctccttcaagtctgttttcaacattttcaaatctagcaataggcaaagaggagggcactacgatgctaattatgatgatgcaccaaagcaatggaccaaagtttggcccagtgatgaggacagaggtcgctggggggtggctgatcctgtcattgacctcagagccactgctttcattgctcaatacaagaaacgagtttctgagtcagaaattcattgccaagctcaagttcagcagtaggaaaactcttgtaccatggattttaataattggtttgtgccgctattgtaattagttattgattatcatatgtgaattccacaataattaatgctgttatgaataaactttca

SEQ ID NO: 11188 - DNA, 480 bp, Glycine max
  Clone ID: PAT_MRT3847_11010C.1
cggaattcgattcgagttgacctaatatagagaaggcctttatttatttccaccaaacaccaacaaaagaggggaggttaaatggtccttaattctggcagtggcgatgctagactattgacgcaactatcttgtaagtcccaccgtctgaacaactacgagcccgactgcagacccgagcttgtcccctcattcagcggcccgcacatcctccagcttcgctcgcgcttgcctacaccctccgatcaagcctcacaaggtcctcggtcgtgcgcgcgccgtctccgataacccctcgaacacccgaatgcgtgctggctacgggcgttacatcttcaagccgctgcagcctctcattcaggggcgcgactgaaggcggcaggtttcagccgtcggagactaggtgaagacgtttagtgttggacaacatgttatcggggcactgcatgccactgccctgagaggcactgactcggatta

SEQ ID NO: 11189 - DNA, 224 bp, Glycine max
  Clone ID: PAT_MRT3847_110110C.1
acgcatagttatgggacccaaatcacaggagattgtcgatattcaatttaagagagctgggctactcgatcgtggactacgttctatgaggttgaatggtgaaaaagcgagctggtcaggtattatgaaggtacatcttggactcgacagttaattcacgactgagcaatatactggagatgtgttaaaaactcaagtctgactatacatgcgttgacgcattt

SEQ ID NO: 11190 - DNA, 370 bp, Glycine max
  unsure (1)..(370): unsure at all n locations
  Clone ID: PAT_MRT3847_110111C.1
ctgtgttccctacgttacacgcgttagtagttactcactttccttctcttcacaaacctgacttgtttnctctctcatnttttccccactataggcatgtcnctaaggtctaagccaatcnaaacttaacaacctgggcnttcnttcnttntncnnttcnttgttttccccttcctttaaccccctcaaancnaaanccaagcnnaaacaaatgggncaaaagcnaaangtttaanagcaantttttgcgnggaaaaatcttggggtttccccaanganacccaaaggggttttgggtacccccaaaaacccccanttttaattggggcaancncaaaancccctttggggattcnatttcccccagngg

SEQ ID NO: 11191 - DNA, 248 bp, Glycine max
  unsure (1)..(248): unsure at all n locations
  Clone ID: PAT_MRT3847_110112C.1
cggctcgagcaagcacacaataataatatctaccttaatgacggtctctgcaatgtgcactgtggtaccaaccaacaccattcacaagatcacaccatgaggaacaacaagccacagttatggctttctctttctctcatcatcacatgcttctcgttccacacaacatacgaggggnccnngatnagctgagncnnagnaanncataaatgtggnttgttgttattaatggtgtgatgttggtgatg

SEQ ID NO: 11192 - DNA, 396 bp, Glycine max
  Clone ID: PAT_MRT3847_110113C.1
gtcacgcctagtcctccgaggcgcgagaatgaagatctggaagattatagcggacctgacgaaatttctgatcgaaacgacggcgccgggaagatcgatacggaggttaaagcaaaaacaaaagcaaaaccggaatcagaatctgattctgaatctgagaaatctgccagtagtgaatcagacgattcgcgttcgaggaagaagagaaggaagggttctgctggttcttcgaggaaatcatatagcgagagtgaatcagaatcagattctgagtcagaagaagaggaacgtagacggagaaagagtaggaagaatagaagaaaaagaagttacaggagcaggaagaagagaagatatagcgattcagatgagagtgaagagagcgagagcgatgac

SEQ ID NO: 11193 - DNA, 332 bp, Glycine max
  Clone ID: PAT_MRT3847_110114C.1
tataataaaggtttattattacaattacattcactgttttttatgtttccaccttaaaagcgtggccatcttaacccacattgggttccagtctttttagccttcttatgaaacatgttcctttctccttgttcatttttctttgattctaagaccattttttcttacagacccattctacgcatttgtgccatcaacgcgtcccagcccttcgactacgtgtacagaatggcccaacagttctactactcccagtagctgaagatcgtcattgtgggcttcggcaactttctggcagttctgtcccaaacccttgttcgccagggccatac

SEQ ID NO: 11194 - DNA, 495 bp, Glycine max
  unsure (1)..(495): unsure at all n locations
  Clone ID: PAT_MRT3847_110115C.1
ccacgcgtccgcccacgcgtccggctaaagcttagccatggccagcaccgcccgcgtcgccgccgcgctgatcctcctcctgctcgggctctccgccacagcccccctcgccgcccgcgacctcatgtccgccgcgccatccgccaagaagcagccggcggggaggaagccgtccgtgcagccgggttacccgggcaccaatcccggcggcggcggtggcggcggcatcccgaccatcccggggttcgggagcatcccggggatgggcggcggcatgggcgggatcaacgtgcccgggatgggcggcggatggggcggagggtacggcacgccgagcggaggttactcacgcggcggcgtggaggagcccacggtggtgtgctcccacgagggcccgtgctacaggaagaacgtgacccgccccacgaagcgcttnacgccctacaggagctgctgtaagggcaaaagcacttgtggcggcaggtgaccttgttc

SEQ ID NO: 11195 - DNA, 473 bp, Glycine max
  Clone ID: PAT_MRT3847_110116C.1
gaactagtctcgagttttttttttttttttttcacatttttggattgaatatattatacatctttcactgcatgttattttaatctctacttggaattgtgtggtgtgttgaagttttgaattggcttgacgtgcttcttatcaacttatacgtgaatgtctatctcaagagaacaatttaaatttcttgtcttcgtttatggtctggcttttattttccttttggcttgattttgttacccttttatttttcatcttcttccttaattcccattagaaaaagaaaaaggaaataaagcaggagggtcagcagtggaagtgaaagaccaacctaatagttcaaagcagcagaaacccaaactctcaaaagctgaaagacgtgcactccaagaatctcaacgggctgcaaaggctgctgcaaaaggtgaaggaagtaaggcatctggaactgtggctacaatgaatgcaaaacc

SEQ ID NO: 11196 - DNA, 983 bp, Glycine max
  Clone ID: PAT_MRT3847_110117C.1
ccagataatgcagaaaatatcaaagggaccactggatgtaagggcaaatgggaaaagagaagagttcaggcaggattatcgaaatttgaggaaggctttatgtatgggctatgcgaatcagctggctgaaagaaagatgcatcacaatggttatcgaactttgggtttccaagctcaagtagtccaggtgcatccgtcatctgtgttgagtcttgatgacctggggaagttcccagactatgttgtgtaccatgaactaattgctacgccacggccgtacatgagaaatgtatgtgctgttgagatgagatgggttatacctattattaacaagctcaagagcctggatgtgtacaaattaagtggtggtgttcatcatgttgaggaggaacctgagaaaaagcttccagattttcccaagaaggatgttgaggtggctagtactgctgatgaccgtgaaagtagaatccaagctgctagagaacgatttcttgctcgtaaaggcaaaaaatgagcctgaaaggatggagaggttaaatacactagagatgatcttggcctgtcaggcattttattagctggtatagttacctgaaaggatggaagagtctggatgagctgatgcttgagttttccacgttgtcacaacaccaatttcgtgctatgatgttatctcagcttgatcctcatcagttgtctctcccaaacattacaagatttagcacaaaaacctaagatttggtctcatactgttctgataagttggttgatgagtggctgaatgcatatatactttgtgctcatgcttttggtttgaaatatacccagaaagaagaaagaaaaaggaagaggagacagaaagtagcaagtccccttcacaagtaaatgttaattaaacagtttaggggttttgaaatgcaatcgtggttactgtcatctgattgtgataattacctttgagtggcacactttgcgtgatagtt

SEQ ID NO: 11197 - DNA, 149 bp, Glycine max
  unsure (1)..(149): unsure at all n locations
  Clone ID: PAT_MRT3847_110118C.1
gtacnctatcatcatgcacnactttgccatggacaactctnacntgntccaattccttcccaacancaccagcaccancaccacnaccaacaggccttnttnnatgctgcacgtcacacntcagacggtgcaccacgnntctctantaa

SEQ ID NO: 11198 - DNA, 521 bp, Glycine max
  Clone ID: PAT_MRT3847_110119C.1
agtctcgatctgacggctgcgagaagacgacagaaggggacttcattgcttctcagttctctcttctatttttggttttagctcgacttggttttttttcttttatcagttagctcaacttgtaagagtgctttaactggctggttttgtctttgtcaaaatccaattacaggaattcattggatattcatcttgaatgattggaagtccacatttgagggaatcatgttttcagtgcatctctttaatgcttacacaaatgtgatgaatgtaccgttccataatcaaacttcagttccaccatggaagagcattaagaaactcaaagaagaaaattcaaaaatggagacaaaagagatgaataaaatgacaccacaatcacactttgataatcgtaagtccttggaaatttgccacaaaaatttcaagacaccttgatgggaatcaaaacggttcaactcaaaaacctaagaggagcttactgattctcacagataagcaaggcttaatcttcactcaac

SEQ ID NO: 11199 - DNA, 137 bp, Glycine max
  unsure (1)..(137): unsure at all n locations
  Clone ID: PAT_MRT3847_11011C.1
aatantcanaatcactgtgtncnanattncgntattcanatggaccacgaccacgaatnccctattctccangccttcagccttacctcgcnaaaagaaacnctccatacgacgntatcatngngctgctatggcac

SEQ ID NO: 11200 - DNA, 380 bp, Glycine max
  unsure (1)..(380): unsure at all n locations
  Clone ID: PAT_MRT3847_110120C.1
gagcatcgtctagctatctcgatcgaactgtccaaggtcctgtcaccaacaaaggcgcaaccaacgggtggttgatggcaacaaccgaccggataatttacataacaggttagggcggtttagtgtaccggggcacccgcataatagcaggcacgaccgttattaagtggcaggccgataacccgattaatttggtgtcacctgtggcattacagtaagcacgtttaacacatttgtacatacgttgggcacatggtttggctacaagcgtgataacaggccgccagaggccaatacgcattacgcccatcacggcaaatgccgcagtggcaacattctcgagcngccagcaatggggcatgtttatgccattgcataat

SEQ ID NO: 11201 - DNA, 2904 bp, Glycine max
  Clone ID: PAT_MRT3847_110121C.1
ggctgataaacaaagaactcactcaaactcaacatagagagagagagagagagagagagagagagagagagagatatgaccgattacgaagagagatacgaagggaacggagaagaagaggaacttcacaattctcatcatcagcctcatcctgattcctctcctttacccacccacgacgatctcaccgattccaaatctcgccatggatctcgcgattatgacagagattcttccagaagcagagataaggagcgggagaaagggagagacagggagagaaaaagggaaaaggggagggacagggaaagggagaaaagtagggatagggattcggagagaagcagggacaaggacagagatagggataagagcaaagacagggagagggaccgggatcgtgatggtgagaaggaaagggaccgtgacagggaccgccatcatagagatcgacacagggatcgtggtgagagaagggaaaggacaagggatagagatgacgatgattatcacagaagtcgtgactttgacagaagaagggattttgatagagaggataggcataggcgcaggtctcggtctcgatctcaatcccggtcagggggtcgatctgagcatagatcaaggtcacgttcgcgttctcgttcaaagagcaaaaggactagtggttttgatatggctccccctgcctctgctatgttgactggtgcttctgctgttgcaggtcagatcactggggcaaatcctacaattcctggaatgtttccaaatatgtttccgttggctacaaatcagatgcagcaatttagtgctctccctgtcatgccagtgcaggctatgactcaacaggctacacgacatgctaggcgggtgtatgttggaggcctccctcctacagctaatgagcagtcagttgcaactttcttcagtcaagttatggctaagattgggggaaacactgctggcccaggtgatgctgtggtcaatgtttacattaatcatgacaagaagtttgcctttgtggagatgaggtctgttgagggagctagcaactcgagggctctggatgggattatttttgagggggcacctgttaaggtcaggagacctactgattataatccttccttagctgctaccctaggcccaagccaacctaacccaaaccttaatctgggtgctgttggcttaacacctgggtcggctgggggacttgatggtcctgatcggatttttgttggtggacttccttattactttactgaaacacagatcagagagcttttagagacttttgggcctctacggggttttgatctagtgaaagatagagaaacgggaaactcaaagggttatgcgttttgtgtttaccaggatcttgcagttacagatattgcatgtgctgctctaaatggaataaagatgggagataagactcttacagttagacgagctaatcaaggtgcaaacccacagcagcctaaacccgagcaagagagcattttaatgcacgcacaacagcagattgcactgcagaaacttatgttgcagccagccttagtggcaacaaaggtggtgtgtttaactcatgcagtttcttctgatgagctcaaagatgatgaagactatgaagagattcttgatgatatgagacaggagtgctccaaatttggtactttggtgaatgtggtgatcccacgaccaccgtctgatggtgaacctgccgctggagttggaaaggtgtttttggagtacgttgatattgacggtgctacaaaagcccgtgccggattaaatggccgaaaatttgatggaaatcaagtagtagctgttttctatccagagaacaaatttgctcagggagattatgaaggttaattatgtggtgtttggattctatcttgattagcaaggataatcttttgtattattatcataaacttgtaagctagagttgtggtcatagtacagaaactgttctatttagatgcgagtagtaagagagacatgatgacaatttgttaaaatagttttaccggtctacatggatctgtgtggtcccttgagatattctctatttgcttgagtgaggtttgttttgaagtggacttctgcattaatcaaattaaagcttgttgctggtgaaaaaaaaaaaataaaaaaccgaaaactaaataaaaaaaataaataaataaataatatattataataaataaaatattaaaataatattttattttttttttattaatataaatatataatataaaaagcgcgcccccattattgttgctccccctggaataaatatgttttgtacggggctcttggggagtcgagcatttttttttgcaaacccggttcagccaaaatgtggggaaaaggggattttaatgcatgcacagcagcagattgccctgcagaaacttatgttgcagccagccttagtggcaacaaaagtggtgtgtttaactcatgcagtttcttctgatgagctcaaagatgatgaagactatgatgagattcttgatgatatgagacaggagtgctccaaatttggtactttggtgaatgtggtgatcccccgccccccgcctgatggtgatcctgccgcaggagttggaaaggtgtttttggagtacgttgatattgatggtgccaccaaagcccgtgctggattaaatgggcgaaaatttgatgcaaatcaagtagtagctgttttctatccaaagaacaaatttgctcagggagattatgaaggctaattggatgttatttggattccatcttgattagtaaggataatcttttgtattattatcataaacttgtaagccagagttgtggtcatagtacataaacttaaatgcgagtagtaagaaagtcatgatgggccatttttta

SEQ ID NO: 11202 - DNA, 712 bp, Glycine max
  Clone ID: PAT_MRT3847_110122C.1
cccacgcgtccgggtaatttctgatttagtttgcttgtctcactgtgaagtgtgaactaatattaattttctgtgttataggactccaaatttgccaatttgtagtcccacattctcatagagaatcaggcctaatttacagactgaagcctctataacctttgtcctcgcatgcttgttcattgcatgtctatgaaaatttatttgcatatttcactgttttgttttcactttatgcaggtactttggtgaatgtggtgatcccacgaccaccgtctgatggtgaacctgccgctggagttggaaaggtgtttttggagtacgttgatattgacggtgctacaaaagcccgtgccggattaaatggccgaaaatttgatggaaatcaagtagtagctgttttctatccagagaacaaatttgctcagggagattatgaaggttaattatgtggtgtttggattctatcttgattagcaaggataatcttttgtattattatcataaacttgtaagctagagttgtggtcatagtacagaaactgttctatttagatgcgagtagtaagagagacatgatgacaatttgttaaaatagttttaccggtctacatggatctgtgtggtcccttgagatattctctatttgcttgagtgaggtttgttttgaagtggacttctgcattaatcaaattaaagcttgttgctggtg

SEQ ID NO: 11203 - DNA, 878 bp, Glycine max
  Clone ID: PAT_MRT3847_110123C.1
aagatcaagttcaaaaatctcactcacctctatcaggaacaggttaaattcatatacaaagtcaaaatctttgaaaagcccagtgagttgtgttctggaaactactgaggtcaaattaagcggcacaagaaacagggcttatcagagatctttgctgaatgacttctctaacacagcaaagcattctgaggggatttctgagtttatcaatagagatatccagttttcaggtctatcatgttctcctgttcatcttcatggcaatctcaagttgaaaaacaaacaaggactgccattttttgagtttaaggtaaagtgccccgaagatgtctttgtggtgaagacatggaaatcaggcaatgctttcaattgggcgtatacctttcattcaatggataatagaaaaaaaagtactgccactgacttgggatcccattgttgtgacaaagactcatcaatggtagcacagatgctggtttcctctaattcatgctcgaaattagaaggtggaatgtttgacaactctatggtatcagaatttgtgctgtatgatcttacacactcaagcaaaagtgtttctcctgaaaaaaagcgttacagcgaccaacactgttctaaaactctaaaagcttctcgtgtaggaatgaagggcgaaactttcaggccagatgaagagactttgttcactaaaaacaagcttctatcaggcaatgcagattttgataaatcaaattcctatcctttgtcatccacagaattgcattcaaaccctgaaatggctgccattgttttgcaaattccatttcgcaagagagaaagcttgaaatacaaaagaagggatagaataaatgctgaagagcattcaaaaataagtgatc

SEQ ID NO: 11204 - DNA, 655 bp, Glycine max
  Clone ID: PAT_MRT3847_110124C.1
cagctgggaattcggctcgagctcaatcccggtcagggggtcgatctgagcatagatcaaggtcacgttctcgttcacgctcaaagagcaaaaggactagtggttttgatatggctccccctgcctctgctatgttggctggtgcttctgctgttgcaggcaatgttgggctactagccccactctgctgacaattggcgtgagccgacatctgtagcttttatgtccacggaggaatcaatgcacctgtttttggtcagatcactggggctaaccctacaattcctggaatgtttccaaatatgtttccgttggctacaaatcagatgcaacaatttagtgctctccctgtcatgccagtgcaggctatgactcaacaggctactcgacatgctaggcgggtgtatgttggaggcctccctcctacagctaatgagcagtcagttgcaactttcttcagtcaagttatggctaagattggtggaaacactgctggcccaggtgatgctgtggtcaatgtttacattaatcatgacaagaagtttgcctttgtggagatgaggtctgttgaggaagctagcaatgcgatggctctggatgggattatttttgagggggcacctgttaaggacaggagacctactggttataatac

SEQ ID NO: 11205 - DNA, 739 bp, Glycine max
  Clone ID: PAT_MRT3847_110125C.1
tagaccgataaaactatttttaataaattgtccatcatgactttcttactactcgcatctaagtttatgtactatgaccacaactctagcttacaagtttatgataataatacaaaagattatccttactaatcaagatagaatccaaataacatacaattagccttcataatctccctgagcaaatttgttctctggatagaaaacagctactacttgatttccatcaaattttcgcccatttaatccagcacgggcttttgtagcaccatcaatatcaacgtactccaaaaacacctttccaactcctgcggcaggttcaccatcaggcggtggtcgtgggatcaccacattcaccaaagtacctgcataaagtgaaaacaaaaaacagtgaaatatgcaaataaattttcatagacatgcaatgaacaagcatgtgaagacaaaggttatagaggcttcagtctgtaagttaggcctgattctctatgagaatgtgggactacaaattggcaaatttggagcactcctgtctcatatcatcaagaatctcatcatagtcttcatcatctttgagctcatcagaagaaactgcatgagttaaacacaccacttttgttgccactaaggctggctgcaacataagtttctgcagtgcaatctgctgctgtgcatgcattaaaatgctctcttgctcaggtttaggctgctgtgggtttgcaccttgattagctcgtct

SEQ ID NO: 11206 - DNA, 191 bp, Glycine max
  Clone ID: PAT_MRT3847_110126C.1
aaaagagctatcccttgatcatctttaatccagtgctcatctggcaattggcatagccaaaatggattttaagttttgctcacaaacaccatgctgaaaccaaatgttaattgccatctgactacaaaataggtaaggagggaaacaaattgtatactaggatcacgcaatctacctatataatataccat

SEQ ID NO: 11207 - DNA, 427 bp, Glycine max
  Clone ID: PAT_MRT3847_110127C.1
gggggaaaaattgccccccttaaaccccccaccctatattcctttaaaaggcccaagaaaactccttggaaaaggccaataaaaaccaaattggccaaaaacaacccaaggggggagggggcataaaaagcggggggaaaaaaaaaactttttcccacccaagggaaccaatccgggggccctttggtttttttcatctccccaaagggaacttttggaaaacccgggggttttttttggggacacccggtaaaaaaccaaaaatgggggggggggaaaaatttttacccccaaaggcccctttttttaccctttgggccgggggaaaccacccaaaatttttccccttaatggggtgggaaatattaaccccccccattttaaccccaagaaaacacccttttttgcggttttttgggtttaaaaa

SEQ ID NO: 11208 - DNA, 327 bp, Glycine max
  unsure (1)..(327): unsure at all n locations
  Clone ID: PAT_MRT3847_110128C.1
ggtgggggtttttttttttttttttttttttttttttttttttttnnaccttgccactctttaaaatttttttttaaaaaatatcccttataaataaagggtttccaaacaggaactaacttgagatgggggttgaaaattttaatcccaacctctttttcaatttttctgggtaagggttacttattaagccttgccccttttcccttctcaggggttgaaacatccaattttcccccccatcacctaacctaaaaactttgtacttttagcccgatttttctccccctttgaggtaaatataaaacttgggaaaaatgttttttt

SEQ ID NO: 11209 - DNA, 631 bp, Glycine max
  Clone ID: PAT_MRT3847_110129C.1
gttgatcacactcttacttctctcttactattagatgtcatttgcctaccaaacggatgggtaccagttggttgcttcacaggccccgccaatctttatgagaaagggcaagtcaattgtcctaggagtattcgtcttgctccgctggtactctgtgccactagctgctggcctaagtgagggcatatcattgggaatgcatgaggcccttgtattgagagatggaagatctgactaccttggaaagggtgtataaaaggctgttgactatgcgaacaccgaccttggtcctgctttgattggcaaggacccacctgagcaaactgatattgacaacttaatggtttaacagctagatggaactgctaacgaaaggggtagaagcaagctaaagctaggaacaaatgccatattgtataaagtgtgttgaaatctgtataaatgaagctagcatgctgaaaaatcctatatacaagcatatagttaatatttgtgggtgacaaaaagccggatttgcctgttcctgcttctaaagtcaataaaggtggatcacatgcttgagacaaactggctatgaacgagggtatagccctgcctgtgggagctacctatgtcaaggaaaccatgatga

SEQ ID NO: 11210 - DNA, 218 bp, Glycine max
  Clone ID: PAT_MRT3847_11012C.1
acgcgtccgcccgcgcgtccgatacgataaatacatgtagtaatacactcaattgctcactaatcaaagttgtaggttcttactaaggcacactgcaaccaaccaagcacataatgaatatatcgactctaattttccatcagcatatctcagatattgcgaatgtcaatggagttactacagataacagatacgtcaacactctataggacccaagc

SEQ ID NO: 11211 - DNA, 558 bp, Glycine max
  unsure (1)..(558): unsure at all n locations
  Clone ID: PAT_MRT3847_110130C.1
tcgatctatcgctaggaatgtgccagagtgccgtgcatgtttgtggcatggtgaacccatgggcttataacacacggtaagctcgggtgcgcctgagcgtgtcggctgcgtattatttggggctgtacaacatgtggtaagtgtgggacctgcgcctagacccttaaaattaggttgcccttatttgtgtttgtgggtgggccatatgctaactggggggtttcctaaaagggtattggtatgcatcgcggcgtacaagtttagtaaaacgagccattgaggcggaactgcgccggaccgttgatgtactgcggccgcgttcggatccagttactatgaaggtaacacagctggagaaaccttaaccagaacggcttggggattccaaaacgcgggtagtggcttgggccccaagtaacttgtgggcttttggttgggcaaaaccgctaaaacacaacccaatgaggcctaaagcaaggatagcanacaggcggcaacacgcatcacgcaggttgagcaccggctacatggtagaatacagaanagacaaaatagtac

SEQ ID NO: 11212 - DNA, 266 bp, Glycine max
  Clone ID: PAT_MRT3847_110131C.1
ggctcgaggtgggacttagacctctttttgtggacgtcaggcaaactgatctatgctaggagacgaccttttacacgccaccatctgtgcattaacggagcataagcagaaccaaccgcggggtgggctttccgagactgacaaaacgctataacaccattaaatggtgcacaaaagcatcagaatagaatcctgtatacaatataggtttggtaagatgagcagaaactcatgaaaagcctaagcctatacaagagggcaccgct

SEQ ID NO: 11213 - DNA, 361 bp, Glycine max
  unsure (1)..(361): unsure at all n locations
  Clone ID: PAT_MRT3847_110132C.1
gtgtagcctttgttgggccaaggcgaanaatttctttaatttcttagggataataaaaaagatgaagaaggatgttcatgcacttaagtgatcatatatccttcttaatctcttgaatatccatgaaaaatgaaagaaaaagatgggagtagctagagacctcgtttggttactggtgagaaagggtggttgagaattgaattgggaattaaattctcgggagagagaaaacgggagtgctatgactgtgagggtgacgagagattgaatgtgagtgatgattgcatggaacccccaagcttgggcatttattattgtggaaaattaatgagtgggaaagagagagagcgtggtgaatgtc

SEQ ID NO: 11214 - DNA, 303 bp, Glycine max
  Clone ID: PAT_MRT3847_110133C.1
ttagagtacaaatctggagattggatcacacttatacggaggggtccaattggtaactggtctcccttttctgctttccttaaaggctcaataaaggtcaccattgtgatgtcaacaaatgctgtcatcaaaaagagtgattgagcctaattgggtcacgtgtttataacaaacagcacctcctcatagcattttgttgcttgtgagctgacacaatcagaaccacatttcttgcaatcgatcttgccaatacacgtatgtggtactcataatgagttttaaaactggaggtctgagggggca

SEQ ID NO: 11215 - DNA, 1730 bp, Glycine max
  Clone ID: PAT_MRT3847_110134C.1
cccacgcgtccgcccacgcgtccgctcactcctccccacacttttttttttttctgctttcagctgctacatacatcacctaccccttctctgttcattgctcaattgtttccctcacaactcataacctctttcccatttaacctttgaaaaaattccatactgtaacaacagatcaccatggctctatcacgtttgtcccaccgcagcatcggatccactctcacaaaacccttctccgccgccgccgcctcctcccgttcgatctccacctcggacacccccttaacaatcgagacctctgtccccttcaccgcgcacaactgcgaccccccgtcacgcgcggtcgcgacctcctcctcggagctcctcaccttcttccgcgacatggccctgatgcggcgcatggagatcgccgctgactccctctacaaggccaagctcatccgcggcttctgccacctctacgacggccaggaggccgtcgccgtcggcatggaggccgccatcactaaaaaggactccatcatcaccgcctaccgcgaccattgcatcttcgtcggccgcggtggcacgctcctggaggtcttcgccgagctcatgggccgcaaggaaggatgctcgaaggggaagggcgggtccatgcatttttataagaaggagagtgggttttatggtgggcatgggattgttggggcgcaggttccgttggggtgtgggttggcgtttgctcagaagtattctaaggacgagagtgtcacttttgctatgtatggagatggcgctgccaatcagggacagctctttgaggcgcttaatatcgccgcgctttgggatcttcctgctattttggtctgcgagaataatcactatgggatggggactgcggagtggagagctgccaagagtcctgcttattataagcgtggggattacgtgcctggcttgaaggttgatggtatggatgttcttgctgttaaacaagcttgcaaatttgcaaaggaacatgctttgaagaatggaccccttattcttgaaatggacacttatagataccatggacactctatgtctgatcctggcagcacataccgtacacgtgatgaaatttctggtgtgagacaggagcgtgatccaattgagagagtaagaaagctggtattgtctcatgatattgctgctgaaaaggagctaaaggacattgagaaagaagtcagaaaagaagttgacgaagccattgctaaagcaaaggagagtccaatgccagatccatctgatctatttaccaatgtctatgttaaaggttacggagttgagacatttggtgctgataggaaagaagtgagagctactttaccataattcagaactttgtcctttgaatatcttgccaccttgtcgtagcagactcttcaaaatagtgaagaataaaaggttctacagagggtcatctctctcccctattcgttgagtttctgcccgcgtgtatagtgtgaatttattcatatgcttggttagcaatggggcggggtttgttatttttttgtcatgtaatatttgcggatctaacagccaaagcatcattgtgattgatgcaactggggtgttctgcaaatttgaggaatacattgtgcactactgaagatatgtagttcagaatattttagacacgtcaaacagttcaaaaatctatatagatatatattaaagaataggctggtggaaagtct

SEQ ID NO: 11216 - DNA, 549 bp, Glycine max
  unsure (1)..(549): unsure at all n locations
  Clone ID: PAT_MRT3847_110135C.1
tttaagtttagtttaacactgcccaaaagatgtgtgaaaataacacacttttatacaaatctttataaagtgctttgcagaaacatagtggtaaaccttgagacaggatatttttaattgtaatttcatgtacaataaatgcaagagtagatcttcttcctatggttgagcaattttctagattattactgtctgaaggtttagctaaataaccttgctgattttagttaatattacctggaataagaaaatttttctttcgagctgcagatgttctagaggaagaagttgcatgggtcttgggcctacaatttacatttaaagaagttaaagtaccttgtggtggatttactagtttcaatctgatgtggaaacaattttttttctttatacatcacagttgttttgtgggggtgggttaggttctagctcatattcantttatggttaatgatttatgtatatagcaatagttattttcataattttttcccagtaactttgatgtttatttgacatatgccgtgacagataatggcaattggaaca

SEQ ID NO: 11217 - DNA, 413 bp, Glycine max
  unsure (1)..(413): unsure at all n locations
  Clone ID: PAT_MRT3847_110136C.1
acgaggcatcgtccaacaatcaccgccagtagagatcttgcgcttggatttgccaaccgctatcgtggctcaacgtcacgctcctccaccaccccaccatcgaaaaacctccacattgtcgtcggcaaccccaactccttcgtccatgtgtttctcgtccaaaacctcaaccctccactctcatgccaactctaatggacgatcaggttttagcgccaaagctctgacaatcatatttcttgctccgatggtccccaaagatatgacaccaccatagataaagcaaaagaagaggaactgattttgcatttgggtttcttgtgggttttggacctgattttaggtttggatttgttgtgggtttcatatatgattttgagtttgggttaattgantctgatttttattttaaa

SEQ ID NO: 11218 - DNA, 369 bp, Glycine max
  Clone ID: PAT_MRT3847_110137C.1
gccaaaggcttgtttttttttttgtttttttttttttttttttgttggggaagggggggccaaaaaacccccattaatttaacttgggtacccgctccaactttttcggctctaaaatttaatcccccaaaaaaaaactcccgtttttttttaggggaacccttctttaagaaaccccaaaagattaaaagttccaagggggattgccgccccctttgttcactaaattttgtttaccagatccaaagggggggcccccccccctgtaactttgggtttttttatcccgtgagaccaaaaggcctttttaaagcctgccttttccctggcctagcccaacattatcttggtcatggggagcagggtttt

SEQ ID NO: 11219 - DNA, 478 bp, Glycine max
  Clone ID: PAT_MRT3847_110138C.1
tcgaactgtccaaggtcctgtcactggagagctccagcagtgcaggcaacgtggcaacaaaaaatagctggtgccaatcgagaaaaattgacgaggggagtgccacctagcgcaagtgcccacgagtgggcaaccgtggtggtttcaacagagtaagagggagctaattatactgggtaagctacaacaaacgacgcccccaatagaggctttgcccacgagttgacgttgttttacaagaggtaattgctgcccgcagtgcgatagcggctggccagcaacataccatacatataagggatcaatcaaatgtgctagtaataagagaaagccggaacacaccatgagagtccacaggagatgacctgtgtatgcagctagaccacacggatcaggagtagcacggtgtggttaggaggcccgatacagttctgaacagaagggatggggcccataaaatgttgagcgtattggaaaa

SEQ ID NO: 11220 - DNA, 471 bp, Glycine max
  Clone ID: PAT_MRT3847_110139C.1
ggctcgagccgatatggtgcccgacagttgcgtgcaggacccctgtggggcgtatgcacagatgaaggccagagtggctgacctcattgagacacacaagcgagtagtggcatgtgacgcgtgtaggtgctttagagatagtcatgatgagccgttgcaggagcatcattgtattcgcaagacttagtctacatgatgctactcacgggactctagcggtagtgacctctaattagacatggctgctgacgagtgtgtgggtttgacatagctgtgggagatgcgcttgaccaaccatagtagtgccgaggctagatggtcagctaaggagctgtcaatgcgactgttgtggcgtgactacgacatcactggagtatcagcaatattgctgttgcagagcatttttggaaacctgatgactcacattactacagtagagatggggtgaaatcgccagtacgacatgaataa

SEQ ID NO: 11221 - DNA, 372 bp, Glycine max
  unsure (1)..(372): unsure at all n locations
  Clone ID: PAT_MRT3847_11013C.1
cccttctatttggacaatggttagtttttcgagaccctaatcaatcaatgtatgccacttgattccgcgtgcacagatggttttatcattgcataatatgtggagacagactgttaatgaacgcgccctattgttctgagctgaaaagagacttattccctttgagctgaaagtatatgtggaatcactgattgtgtgcttagacgaccacactcgctatctgaccagtttatgtgagatccacggattataaaggagcaacctgcgtcttatactcatcatatgtctgcattcatgtanctgagaagatgggacggtgagtctcaacaagcagtgaggagtacttagtgcagcacgagcaatggatacatg

SEQ ID NO: 11222 - DNA, 304 bp, Glycine max
  Clone ID: PAT_MRT3847_110140C.1
ttatgggcaaaccaattcaacgaacaactggtccaaggggcattacaccgacgatgcagcattcattgattactcccttgtatttaacacacaacgaggatgataacgagtactcttcgcactgttttcaagaggcactaacccttctgaagggtactgtgtcatgtaacgaaacctacgctaactctaacaccaaggctcaaccccccgctgcaatggacgcttactcttgcgaccatctacgcatgaacgagttcaacgctcgttgatgcccacgtgtcatgtcacactactgtacggagtg

SEQ ID NO: 11223 - DNA, 283 bp, Glycine max
  Clone ID: PAT_MRT3847_110141C.1
gtaaggagtgcggttcgagttgagagcatgattggccttctatacctgttgaatttggtgcactcctttgctacaagaggtgaaaaccaacatagaggtaaggtgggcgatgatgggtttagtggggatgaagattgtgtataggatgctgagttgtgtgttgctaaacaaaccaatctttatcttaggaaaagtatttttagcttaataactggaaaactttttgctttgttacagtttcctgtttcctgcaatgatacttgatttgcttactcctttctca

SEQ ID NO: 11224 - DNA, 415 bp, Glycine max
  Clone ID: PAT_MRT3847_110142C.1
attgagtgttttttatcacataaccataagcattagaaaacatgccctttctggcaagagaaccttgtgctttgtacaaaatatttaattaaccacttgcaaaaaaggatattaagaaaaaaaatacaactggcaaaaaataaagctcctctcaagacgaaactgtaaaggagatacaaaagattgcgaaagctgtaaagccttgagaatataaaaacctagaagtagcgcacaggacttaccagagggcgacgatctattcagagaaacagtgtgctgaaggctatatgttaagaagttatatatcttaccagcctctggatcggagggtatgcaaagtacactactacaaatgattggttggcaataagaatcgtgcctccaaagtatacgactgaaataacctcacaggagg

SEQ ID NO: 11225 - DNA, 277 bp, Glycine max
  unsure (1)..(277): unsure at all n locations
  Clone ID: PAT_MRT3847_110143C.1
aggaaggaagagacttcaacttcanttcagttttattgtctgacaaaacnaacaacatgtgggtttttatacaatatcgatcttcaaaccctaattccaatccaaatcccaatccttacaacccccataccccattccaatttccccttcccccccattccacctccttcaaccaccttccccacccctttttcttctttttattcccccccttccacctaccttaccaccctctaacccacttcnatattaattttccacttccccaccaatttat

SEQ ID NO: 11226 - DNA, 839 bp, Glycine max
  Clone ID: PAT_MRT3847_110144C.1
aaaatacccctggctgcacatttaatccacattcatgtgacaagattatcactcatccacggcaaccaatcatagtaaggataaaatggcttctttttcagtggaagaattcataggaaatggaattttgaaggaactgctccaaaagttgttggaagaagggtgggatgatgtaccaaccctgaagattatgagttcagaggacatggatttactacagatgacacaagagcaaaaggatgcacttggaatcagatcatacctgcatgatcgtggactaatgcaatatgcagataagatggaagattgtgggaaagctctgtcagagcttatcaatttaagcaccacagatctttctacgcaattcgaaatgaagagaggccacattgcgcgctttattaacagaacaacaagcgatgattctgtcaaattacgtgcactcgctgctcgaagaagaagcagcacgatgcatagagatgatagcattcccaagagtgttggatccaatagctctaatagcttgacaagatcacacataagaagcaatgcagcttctgatgcacttgaacaatcaatggctgatatgaagattaaagaaggatatgtctttaaggggattgttgctgctgaaccagctgagcctagagcatgtggctgtgtgaatccaccacctcctatcagtgaccaagttgctccttatggtactgttgaaaatatttcagttcagaaacttactcctgagtacaagattggcatggaaccgttggtgaaaaccaaggctccctcactgaaggtttcagaactgtggcgagataaacagctgttttcctgtgtctcaa

SEQ ID NO: 11227 - DNA, 625 bp, Glycine max
  Clone ID: PAT_MRT3847_110145C.1
aaatgaaacttatcattggcctgcaaatttattagcatatttatccaaacacactcaactgatcacacatttctcataaatttttttagtagaacaaggcatgactaccttacatgaggtagtcagcatgccttgctaactcacaataaaagcacaacaagactacacaaacaaaacaatgaagggaagaagacacgaaagaaagttaaactaaacaaactaaggacaaacacatgtgtggctagctgctagtttcagttgtgttccttattcaggaacttcttgagaatgccacatgcaaaagcatccctaggtatagtactcgtcacgttttgaacagcctcagcaaaaatgacacccattcccatgtgcaaatgaggctcaatgtggcaatggaaggcccaaactccaggattatctgccttaaacctcaaagcagtccaaccatgagggaatatcactgcagtgttcctcaatggtgggttcttcaagttgaatttggaatcatcaccttgtttgaatttcccatctccataccctaaaatccaaaagtcatgcccgtgcaaatgccaagggtgaatctcactgtttttgcccttcattacattagcattttgcctcgtgc

SEQ ID NO: 11228 - DNA, 287 bp, Glycine max
  Clone ID: PAT_MRT3847_110146C.1
gactagcctttagtggcatccctcagcccaatgccgcgggagccccacaacaccgcccgctaaaacccttgcatttctcagtgggaagactacctcaggccacgaatgaaagagagaaatttgacctcatagaggagaggctgagggccactgaaaggataggtgattatccatttgccaacatggcggagctatgcttagtgcccgatgttgtcatccctcccaagttgaaggtgtcggacttcgacaagtacaaagggacaacttgtcccaagaaccacttataa

SEQ ID NO: 11229 - DNA, 388 bp, Glycine max
  Clone ID: PAT_MRT3847_110147C.1
acacaccagaacaaggcaccagaagcaaaggcagccaacaccaaccaccgagaaaaagaaagcaacaacggccacaccagcgcaaaagaccccacgaaccggggggcggccgcggaggcaacggcagggagccaccacgacgaggacaagcgcacgctagaggagcaccggaggcccgacgacaagcccggaggagagaccccgaccatcccgcaggacgcggcgaacgcggcccacgaccagggggcgaaggcggagcaggcggagacccccagggccggaggaaaggccagcagagaccgggcgaaggagagcacgaacaagggcactgacagacacggcgacaccaccggggacggtgctaccccccaccggagaaccaaacagg

SEQ ID NO: 11230 - DNA, 2262 bp, Glycine max
  Clone ID: PAT_MRT3847_110148C.1
ttttcagctaacccaacgccattagtgaaccttgaaaccttaacagagtaaacttgcttgcagcgaatccagattcggaggaggagtgagtggtccttgttgctgatttggcaacaacaaataaagatgatagtttgagtttgagtttgtgtgaatccagatctgagtttcatttcgcagttttgcggagaagagaacaatggagtcagcaacggtatcatcatcggaatcggagatggcgcttcctcttcctctggcgtcggagtcacagcaaccctacgtctccgaactcctctcctttacgctcgatcgcctccacaaggagcccgaactcctccgcgtcgacgccgaccgcattcgccgccaaatgcaggaggtcgcagtcggcaactaccgatccttcattgccgccgccgacgccttaatcgctattcgccaggaagtttcttccattgacaaccaccttgaatctctgataaatgagatcccgaagctgacatctggatgcactgagttcatagaatctgctgagcagattttggagaagaggaagatgaaccaaacaatgctaactaatcacagtactttgcttgacttgctagaaattcctcaactcatggacacatgtgtacggaacgggaattatgatgaagccctagatttggaagcatttgttggcaaactttcaaccatgcatccaaagttaccagttattcaagcgttggctgcagaagttaggctgactacccaatcacttctttctcagcttctacagaaacttcgctcaaatattcagttaccagaatgccttcgcattattggatatttacggcgaataggagtatttagtgagtatggaatgcgtttgctgttcttaagatgccgagaggcatggcttactggtatactcgaggatttggaccaggcaaatccatatgagtacttaaaagggatgatcaactgtcacagaatgcatctttttgatgttgttaatcaatatcgagcaatatttgcggatgacacatcaggaagtgaggaaaattatgacggtgggcttctttttagttgggcaatgcaccaaattacctcacacctacaaactctgaaagttatgcttccaaagataactgaaggtggatcactgtcaaatattttggatcagtgcatgtactgtgctatgggacttggctgggttggactggattttcgaggcttgctcccatcactttttgaagaagctgttctcaacttattctccaaaaatatgagtactgcagtagagaattttcagttggtcttggattcacatcgatgggttcccctgcccggagttggcttttctgcacatactgtcggtgatgaaaatcatgaggatgtcactccgccctctaatttgatggagcatccacctcttgctgtttttattaatggtgtatctgcagcaatgaatgagctacgtccatgtgccccaataagtctaaaacatgtccttgcccaagaattgattaagggattacaggctgtttctgattcattgttgctgtacaatacaactcgagttctaaggtctaatgagtcaggacttttcctctcactctgttgggcatttatagaggctgcctatcctcattgtgcaacttgttttgggcgttgctatctgggtggagcaactctcattatggatgcaaagaatgtatacaatggaatcagccgcttattagagacttcctctgcaagagaactcccaaaaccagtgaacaatgtagaatccaagagcgtagctgagaatggcgaatcgccaaaaatggaaaatggagaaacacctgatgccaaagaatctgaagccgtcaatagtgaagaggtgaatgaagaaggcaccgaagaaggccctactttgcagacagatcgggaagacactaatcttgaaaagccacttgaataatgacattagagatgacagtttttattttcttgtttatgatattgctccccatttcagtgtttacatttttgccttggttttattctttgtatactcgaagacaggtctcgtcagctgtaattatattattggattacataaaatgaataggccgtagaaagcattgattgtattagaggaacgaagagggtttttggcagatagattacttatagagattagttttgtatttttgggggcataatgttttcatatattgctaatgtacgttgtacgttccaagtgccacaattctactttggtttttatgaaaaaaaaga

SEQ ID NO: 11231 - DNA, 528 bp, Glycine max
  Clone ID: PAT_MRT3847_110149C.1
atgtttgggggagtgttggggcaattgattttaaaatgatgtaatttatgtttgttggatgtttttctttaaaagcaagttagtactaaaactctataaattttttctatcttatacaaaagttatctaaattgcttcaattcaaaatcaattttaggttcagaatcaattctttatcatggaatcaatcatgtgaacatttatctaaaatcatgttaaacttgtattttgacatgcttttgttttcgataatccaacgtgaaaccaaacaggcacatagagcttttttctggttgaaagtagggagcctgaatctatataatatgcaagtaatattttcttagttgcttgagatgattccctacttgtttacttaagtgagaagctgctgaaaagttgacgaggaggtcagaatttgtcagattgtaacaattgaagtgtaaaatgagatggaaatttatggctaggtagtgctcgagtgacatcctgtattttgttcctatctgcaaggtcttgctcttatctgca

SEQ ID NO: 11232 - DNA, 150 bp, Glycine max
  Clone ID: PAT_MRT3847_11014C.1
acacggcatgtcttctctatgccaaaagttacggccatggggtctactaccatggggcctcgacttgcatgctcaggagcaacatgggccgctacttgtctaaaaaaacccttgctttctcgtactctgactttcaaagcctatgttctt

SEQ ID NO: 11233 - DNA, 418 bp, Glycine max
  Clone ID: PAT_MRT3847_110150C.1
ggataacaaccgcacctcactaatttctcccccggaaggaggctccttccaggcgaggaaggtttccagggtggtaaaggcggaaggaacacctccattggtggcccaaggaaaggatccaattggggtggtactccaaaaaaaggtcccgaaaaacttttggacaacaccaggggtacaccccctcctttcccttacccaagaacctgggttaatggctaacggcatggcaagtggaggcaagagactgggcccaccaagcagaaatggagccgctgaagttcgccttaactaaggataagaaaaggctggagaaggattaacttaaaggaatggcgaacaatcaccaagctatactccacatggctatatgagaacaactggaagaagtggcatggttttggggaatggaggagat

SEQ ID NO: 11234 - DNA, 346 bp, Glycine max
  Clone ID: PAT_MRT3847_110151C.1
cccgcgtccgcttcaccgcgctttctctttctctcttttttctgttcacaatctcttcccttcatcctcctctttcagatctccctttatttttctcccttttcgtttttcttcgattttgagatctagggctttttaatttccgcaattactcgcaccgcttatcttttcttcgttctagggttccgatttgcgcattcaattcggttttccattgtgggttgggtcgcgattctcgatcggttcccttttcttcttcttttttttttttactcttaaaaggtttcttggtggtcggttggttgagggtgtttttctgagaaaaagagttaaaaaaaatcctttt

SEQ ID NO: 11235 - DNA, 376 bp, Glycine max
  Clone ID: PAT_MRT3847_110152C.1
atatatatatatatgtgggtggttttttctgttgctgtttaagacttaaagtaagtatatatataattaacagggacaatatattgtacatgcgaatcgaatgaaagctcgcagaaggggcgaagtacaggtagcgtagagtgaagtcctaaggaaaacacagggggacatgacacaccttatacggagaggagaacgaagaagaatataaggtctaacagcaccaccccaagtccagaaaggaccgcaccatggagctcctttgtacacaggtagaggtctgccttcaagggctgacggaacaagaggcccaacaattatagccacacttgaggcagaagagaagcaagaggtcaagaagcctcagaacgatcag

SEQ ID NO: 11236 - DNA, 258 bp, Glycine max
  Clone ID: PAT_MRT3847_110153C.1
ataggatgcgtgttgcaacacgggaattatgggactgaccaaagaccaatgccaattttccttaaggagggtaataaataaatggtagaaagcaacaggaaatatagggacactgaaaaaaaaaatttctcgtacagaacaacaaaaagagtgcaccccgaaagaacaaagagcaaaacggggtggccataaggacgaatccatacattattaaatcagcgactcgacacgtgtttttttgggcataaaaacacggga

SEQ ID NO: 11237 - DNA, 458 bp, Glycine max
  Clone ID: PAT_MRT3847_110154C.1
cactttataggtctcctattgagtcacctatattcaacacactggcgctcttttatacagcgtcttaaatggaaaaaccttgccgttgcctaacttaatcttttcggggaacatcctggtttaacccggtggagtcctatcgaagaggcccccccttatagcccttttcaacatatggacaagctcaatggcgaacggcattccccctgtttcgccacattaaatgcggaaggggtggcgatttgtaccagccctttaactgcacttgatagggcggtaacgcccggtgtttccgctacattccctatcttcttagccccgttccctggcttttcctttcatgcttttatccccgcgttccctgcatggtcccgaaatattcttttacggggcctccatcgggggtacctttatggggctgatgggtcacttaacggcccatagccctgttagacggt

SEQ ID NO: 11238 - DNA, 263 bp, Glycine max
  Clone ID: PAT_MRT3847_110155C.1
caagtaaacatgcctatttgtttactgtgtacttacatgatctcagcaatttctaaacccttgacaaaacaccaatcacataaaacaatggtttactatcggtgcccaatacaattgaacagagataccatactgttttatccataagccacctgtacaccgtctattacaaagaacttcgaaactcaagaagcaatggacacagtttatcttctcaaatctgcacaccacatttgcctccttttcaaaccctatttattcca

SEQ ID NO: 11239 - DNA, 263 bp, Glycine max
  Clone ID: PAT_MRT3847_110156C.1
acggctgcgagaagacgacagaagggttgtgacgcttttagtcattaatatctttatttactaacaatgttaagtgtgtattaacaaaatgatcattttgatcttcttttttaaacataaaagattaaaatggattttctaaaaaataaataatcaaattaagcttaatataagataagtgatcaaatagattatttggtctatatagattatagaatatacgtatatgtatcgacttctaaaataaatatgttaaaagtcat

SEQ ID NO: 11240 - DNA, 402 bp, Glycine max
  Clone ID: PAT_MRT3847_110157C.1
aaaaaaaaaaagcatttggggtttataattaaaaaaacccatttccctgttaactgaagcgggaacattaagacatttataaacccaggctgaaaaacaggcgatcaacataattttttaacaatttttcaatgaagggtccttaaaaatttcccacattctggggcaactgggagagaaactattgcctgactaagctggggggctaagaagggggataccccccattttaattcttagattttaccacattattcacagggcaaagccaatttttttggtggaacttgaaggggaaataaacttctgccaaaacctgaaaaccaaaagggctcaaagcctgtttttcagccttttgtttagtcttgaccataaaggggaattcctccacccaaccagggt

SEQ ID NO: 11241 - DNA, 145 bp, Glycine max
  Clone ID: PAT_MRT3847_110158C.1
aaaactcataaggctaaatatatacattgcatctgggtggaacacaaggctcctacagattttggctaggactaccgacacctgcgaaaggaaccagctcgattttctgactttctcccgccacggattccaacagattttttga

SEQ ID NO: 11242 - DNA, 136 bp, Glycine max
  Clone ID: PAT_MRT3847_110159C.1
cttaatgtgtgactgctcaagagggactgcgagcatgagggggagcaccatgctcaagaatgcaatggggagcaccgcggtgaacacaatgatggatcaaccgaatcgtccagggtgtcacaaacacacgagatcc

SEQ ID NO: 11243 - DNA, 311 bp, Glycine max
  unsure (1)..(311): unsure at all n locations
  Clone ID: PAT_MRT3847_11015C.1
tggaacctttgggctgttgtgagtgcttgnatggtcgtgagaagatcatagaagggggtgtaccgaatgaaaaccagggcccggagcctagtaggcagaagtagtaccggtgttgaagacaatatgcaaggccagtagaaatttcgaaccgacaaggggaactggaaagcatctgaggctgtagacgcattataagaggggtacccgggtcactaaggctaaaaatggcggtgccccattctgttacgatttcaaatttaagttcgaagtcgtcgtcgaaaaattatttaaaccccatttcgtccacgaca

SEQ ID NO: 11244 - DNA, 274 bp, Glycine max
  Clone ID: PAT_MRT3847_110160C.1
ttttcaagaaataatctggcgaccatgtgcacatacccaattggctttatagaaatctcttattatgaccgaccttgattcctattaaagaactaccctttattcataagtatagccaattccacctagaatatcaataatgacgaaccttattgcatttatggatgcatagcttttaaggaattagtatatccatcctgcagcaaaaggaaatgaaaacgcaattacccatttaatgacaaattcccatctaaaatacatagtgacactccta

SEQ ID NO: 11245 - DNA, 844 bp, Glycine max
  Clone ID: PAT_MRT3847_110161C.1
aaaaaaagcgtttgatgtttatataatgtttgcgataaaatgcaaaatcctaacgcgtttcatttgtgtatataaaggaagtggaccttataagaatgaagcggagggtgaagaggaaagtgcctgaagctaactccaacactatgataatcattcggatacagggatatcctaatcttaaaagcataaaggagctaatttacaaaaaaggacatgcaaggatggaacagcgaaaagttcccttgacggataataacattattgagcaggaattaggaaagttcggtattgtatgcatagaagacatggttcatcagatttataatgctggtccacactttaaggaagttgccagatttatgtggccctttgagctgaacaagccagctgaaggattgaaaggatcaaaaaccatattcaaggaaggtggagacacagggaaccgtgaggatctcatcaatgaactaatcaataaaatgaattagtggccttttgtagtatcaaaattttgatgtttactatgtccattggatgatcctaggtgcaatatctcatttttgaagtaatcaatttattacctagagaaacattgccacaggttcttgttatagttgagttttaagtgtgtatttatctttacagtcttcatttacttattgaattccattaggcattggaatggggtggggtggagaagaaagggacgggcatggtgtgctgtggggcttgaatctgaattctcaatatatttttaatgtcatgaacgatgattcaagtccgaatgtgattttcattaaggtggacagaaatggaatatctgaatatatgaagaacattattgttg

SEQ ID NO: 11246 - DNA, 1178 bp, Glycine max
  Clone ID: PAT_MRT3847_110162C.1
gcagtttcgtgctttcccgccgccgctacactgccaccgtcttccccgccgtctccgccaggttctctctcactccgcaaccagtctttccaactctctctctctctacgaaaccctaaacttgaaacctaccccactcatcgtgtgtgtgtgtgcagagatggcagaagaggattcaaagcctctgaactacatctccgaggtcattctcaagaagaggaagaacaccgaagcatgggctttaaggaaaaaagaacagttccagcaaaagaaataccaatccatcaagaagccggaggatttcatccacgagtatcgcaacaaggaagtggaccttataagaatgaagcggagggtgaagaggaaagtgcctgaagctaactccaacactctaataatcattcggattcaggggaaaaaggacatgcatccgaggacgaggaaggtgttgtacagcttggggttgaggagaagattcagtgctgtgtttgtgaagccaagtgagggaataatggccaagctgcagagggtggaaccatatgtcacctatggatatcctaatcttaaaagcataaaggagctaatttacaaaaaaggacatgcaaggatggaacagcgaaaagttcccttgactgataataacattattgagcaggaattaggaaagttcggtattgtatgcatagaagacatggttcatcagatttataatgctggtccacactttaaggaagttgttagatttatgtggccctttgagctcaacaagccagctgaaggattgaaaggatcaaaaacctcattcaaagaagatggagacacagggaaccgtgaggatctcatcaacgaactgatcaataaaatgaattagtggcttttgtagtatcaaaattttgatgattactatgttcgttggatgatcctaggtgcaatatctgatttttcaagaaaccaatttattaccgagagaaacattgctacatgttcttgttatagtagagttttagtgtgtatttatctttacagtcttcatttacttattgaattccgttaggcattggaagggggcggggtggaaaaaaaagggacgggcatggtgtgctgtggggcttttaatgtcatgaacgaagattcaagtgccaatgtgattatcctttaggtggacagaaatggaatat

SEQ ID NO: 11247 - DNA, 349 bp, Glycine max
  Clone ID: PAT_MRT3847_110163C.1
agtcgggtgccaaaacaacacaaaggggggcacaagttcatttgttgatcaaaatcgctaccaacggtgggatgagaatgtaagtccttgtattcttcgctgctacggatttgtgatcatggtccagacattcgtagaatatgatgactctctcaataaaggatggcaatcgtgcccgtaatctgtgatgtgatatactgcagtttggtgcttgccatgccatcacattgcatcatttcctttgggaacagtcatgaagattgcgtttgtccacctcctgaatgtatccatggctaacattataaatgaatccacagactgttaacttgaagccatacttttattccaa

SEQ ID NO: 11248 - DNA, 722 bp, Glycine max
  Clone ID: PAT_MRT3847_110164C.1
cccacgcgtccgtacggctgcgagaagacgacagaaggggggccggcaggttcgtgctttcccgccgccgctatactgccaccgtctccgccagcgatggcagaggatgattcaaagcctctgaactacatctccgaagtcatactcaagaagaggaaaagcaccgaagcatgggcgttaaggaaaaaagaacagttccagcaaaagaaattccaatccatcagaaagcccgaggatttcatccacgagtatcgcaacaaggaagtggaccttataagaatgaagcggagggtgaagaggaaagtgcctgaagctaactccaacactatgataatcattcggatacaggggtgagtgaagaaaaaagacacgcatcctaggactaggaaggtgttgtacagcttggggttgaggagaagggtcagtgctgtgtttgtgaagccaagtgagggaataatggccaagctgcagagggtggaaccatatgtcacctatggatatcctaatcttaaaagcataaagggagctgatttacaaaaaaagacatgcaaggatggaacagcgaaaagttcccttgacggataataacattattgagcaggaattaggaaagttcggtattgtatgcatagaagacatggatcatcagatttataatgctggtccacactttaaggaagttgccagatttatgtgggcctttgagctgaccaagccagctg

SEQ ID NO: 11249 - DNA, 475 bp, Glycine max
  Clone ID: PAT_MRT3847_110165C.1
gccaaggcaaaaaaactttgttaaaggggggaaaaaaaaaattttttttacgggaaaccccgggacctggcccgatttttaaaagctggaattctgttttgaattaaacaatttggaaaaaaaaagccaaagggtttccggatttttaacccggggcccccccccttaaaaaggttttaattcggggggactttggggcccaatttaattcccttaacgaaaaaaaggggccaaatttttcctttttttggtgggcagggaaccttttttattttttcccttttcccaaaacccaaccccccctttttggaaaaattttctttccccaaaaacttttgcagtgccaatttatttggacattttggtggcccccaaggtttaaggacacttggggggtaacccttttttttgggggcaaggttcacgggcacttccaagcttggaatgggccccttattaaacccccggggggttt

SEQ ID NO: 11250 - DNA, 473 bp, Glycine max
  Clone ID: PAT_MRT3847_110166C.1
tagtaaaatccttcacagataagcgaaaggactgatgattaaattctgctcttaccccaaaccaccaagtgaaccatttcctgattgaaatgttttagtgctattccaaattatagcaagaaaaattcatatttgaaacccaatcaccaacagctggatctattttgttacccatttcactaacataacaacatacactaaaaaagtaatcaacaaatcttctgataagttgcaaacgcaaaaaagacagaaacaggatataacaatacatccagccttcaaaaggcatgctaccatggatctacaagtatttacatcctatatacatcacaaaaaggtcagcttggtatgctgaacaaaacataatcatgtaaattgttctagcctaacatgccatttcttaatgaagcctacgcttacacctacgaattgccccttctctggaagcattttcctcattgcattcaggagat

SEQ ID NO: 11251 - DNA, 474 bp, Glycine max
  Clone ID: PAT_MRT3847_110167C.1
ctaggactagtagaatgctggtttcctccagatacaggaacaatagctgaagaaaaccagcattctactaggactagtacccctgattctttgcagcgctcacttgcaacccagcctgttggtgcacagcttcagcaagcccagccggtggtaaaacaggaccagcatgcgtcagtccagacacataataagccgaattcatctggacttccagggagattacaggattctgcttccagtcaatcccaagctccatggccaaggatgactcaaactgatgttcagaaatatatgaaagtattcatggaagtagacacagatagagatgggaaaatcacgggggaacaagcgcggaacttgtttcttagttggagattaccaagagaggttttaaagcaggtttgggacttatcggatcaagataatgatagcatgctttctctcaggggagtttgtattgcattgtacctaatg

SEQ ID NO: 11252 - DNA, 433 bp, Glycine max
  Clone ID: PAT_MRT3847_110168C.1
acggctgcgagaagacgacagaagggtgcatacatgatttatagtaaacgattaactaatttatcacaaccttatgattaaagtatcaatacatataaaagtacagaaacattgactaagtgtgaaatctaagacatgattaaaaatatattttccctgtatgaaatgtgcgtaaatttaatttactaaacaaaattctcaaaggagtacttaagagtagtgtgaaccgtgaagaggtggggaaaatgtagaagtgtgaagaacacgaaagcagttatttggatgtgaactgcgaagagacaatagaagataagaagatcgaagcccgtgagttccattcagaggcaccaacaacaacaacagcaccatcttctttgtaataatcaacaacaacaacatatatgctcgtactctgccactacatatatatttt

SEQ ID NO: 11253 - DNA, 751 bp, Glycine max
  Clone ID: PAT_MRT3847_110169C.1
gtgcgctcggaattcggccggctcgagcggctcgagacgggctgcgagaagacgacagaaggggacacagagagtccagcaatataccaaaaatcatgtttggaccattattttgataaacctatacaagtaacaggagatgtacggctcacattctatgagaaaatgataggagggcgcctgttctactgctgttttaatacagcttttattaggaacagcttactacagctcccaatacaagagttggacaaagttgggaagaaaggaacatcaatatgtggccctgacttctgcttagaattattgtttggtcctgctaatgcaggatactcatcgtcaagtatatccaatgatgaatattctaatgatgattctttataataatatttccacatatctttgcataatattaaaggccatgttcaatttactgctgtagcatattcctgcaaaatgatcccaacaatgagtcccttgtggtgtgatgtagtaagagcattcattcctccaactgctttgccgtctaatttttcattggccaaaggcatggagagtaagtgtaatttttgtattgttagtgattgagtagcattttgcagaagatgaagttgagagcattataatgcaaaatttcactaaaaaacttggaattaattttgatgtttaaattttattaatcaccattcgtgtaaaaattcattattgagtttgactgatgattgcagataaaaaaattagcattctttcc

SEQ ID NO: 11254 - DNA, 1161 bp, Glycine max
  Clone ID: PAT_MRT3847_11016C.1
ggctcgagctcggcccgattttctctctcgatacaaaaatacatagaaatggcctcttctcttgcatcctcatcaactgttctctggatcctttttctaaccattgcaactcttcatttgagttcagccaggaagttgtccgggtcagacccgcagttgcagtttcaataccacagaggccctctcctcaaaggcaaaatctcagtaaacctcatttggtacggtaaattcaaaccttctcaaaaagccatcgttgctgatttcatcacctcgctctcctctcccaaacccgtcaccgcccaaccatccgttgccacgtggtggaaagccaccgataaatactacaaaaactcgtcccccaaactcgctctttccctcggcaccacccaaatcctggacgagaattactccttaggcaaatcgcttacgaataaccaaatcttaaaacttgcatccaagggtccacagagaaacgctatcaacattgttctcacttctgctgacgtggcagtggaggggttctgttccagtaggtgcggaacacacggatcctccgtgggggcgcgcgtgaacggaaagagatacaagttggcgtacatttgggtgggtaattcagagacacagtgcccgggtcaatgcgcgtggccgttccaccaacccatttacggtccccagaatccacctttggttgcacccaacaccgatgtgggacttgacggcatgctgatcaatgtggctagtctccttgctggcactgtcactaacccttttggaaatggttactttcaaggacccaaagaggctccgttggaagcaggttcggcttgcactggggtgtatggtaagggcgcgtaccctggctatgcagggaacctcttgcttgaccccaccactggtgccagctacaacgctaatggagtcaacggaaggaagtatctgttgccagctcttgttgaccctgaaacctcagcttgctccacactcgtgtaaaactaccactcaaactagttttcatccatgcttagttgttacttgttaggcaataccagagattctttcatttcttcattctttttgttatagcttgaaaacaaaattatagtgttagaagtaatgttgtaacgacgttggttacaccaataatattcgtaataaaagctc

SEQ ID NO: 11255 - DNA, 373 bp, Glycine max
  Clone ID: PAT_MRT3847_110170C.1
ccacgcgtccgtacggctgcgagaagaacgacagaaggggactgatctttttataaacttattactcaaagggcaaaactaatcccattctgtttttcaaaaatggaagtaatttgttagatggctatctaaaacgcatacatcaacattaagggcgttaagcttgtcccatctgccgcagaaaccgccatggtcagcctgaagaagaccgttaccaagcaagactcctcaggacgtccattatgcgggcctgaccgtgccaggctctgagggcccactcctataggctatgcccacaaactacctaaccaccgtgtatgcagacgactaccgctaggacactgcttaagtttgctcagacccagataccttc

SEQ ID NO: 11256 - DNA, 1513 bp, Glycine max
  Clone ID: PAT_MRT3847_110171C.1
ggctcgagctctcttcaacgattccaaggaattcgttagcaactcccttgccattctgtctcctcgagccgcggctctttcaacaatccaaacactagcacgcggcagccgttcgttgctgtctgagaacagcaactccccagttgcttctctagacaaagctgatggccttccttcttggatgaaccatgaggaccgaagggtattgaaggctatggataacaaacctgcacctaatgtcaccgtggctaaagatggcagcggagacttcaaaaccatctctgaatgtttaaatgctgtccctcaaaattttgaaggacgttatgtgatttttgttaaagaaggagtatacgatgagactgtgaccataacaaagaaaatgcaaaatataaccatgtatggtgatggatcccaaaagagcatcatcactggcaacaaaaactttagggacggtgtcaggactttcctaactgcaagttttgtggtagagggagatggattcataggcctagcaatgggattcagaaacactgcaggccctgatggccaccaagcagtggctgcaagagtgcaggcggatcgtgcagtgtttgccaactgtcggttcgagggctaccaagacactctatacacccaagcccacagacaattctacaggagctgcatcgttacaggaacaatcgatttcatctttggcgacgcagctgtcgtgttccagaactgcatcatggtagttaggaagccattggaaaaccagcagaacatggtgactgctcaagggagagtcgacaagcaacaagtcactggaattgtgctgcagaaatgcacaatcaaggctgatgattcactggttccagagaaggacaagatcaggagctaccttgggaggccgtggaaggagttctcgagaacaattgtgatggaatcggaaataggtgacttcattcaccccgatggatggacagcttgggagggagactttgctctcaagacattgtactatgctgagtatggcaacacaggacctggtgccagcaccaatgctaggatcaagtggcctggttaccaagtcattaacaaggatgaggctagccagttcactgtgggatctttcttgagaggcacatggctccagaacacgggcgtgcctgccacgcaaggcttgtacaattaaacgcctttgcttcaaatttcataccacttgagttcttgcttcagcctttgagctgctgctgctacatgttaattaggcacaccggaaaataaacttgatggtcttgctcattttgatgaattgtatttttctttctttcttttaccgtaaattttttaaaaacatttaatcttgaattgtaatcttgcactaactgcagtggggtggaatatacttgcatagaattgtgtcaccaaatgtttaagtaaatagaagaatcatttcttgctgataaaaacaagttgagtctgtagtgaactctgagatgtcaataaaattttatttgattgcaaagttaaa

SEQ ID NO: 11257 - DNA, 1482 bp, Glycine max
  Clone ID: PAT_MRT3847_110172C.1
ttttttttttttaaggcattcaaatctttccctttaaattcttttgtttgaattgttttttatgctgtcatacatagagagaaaaaagaagcaaataaagtaaataaaaataaaaataccaaagccaaatttcctcctatacaaactctctctgtctgctaagtccctttggaccaaaaccaagctgtaaaataaataaacataccaagatctccaaatgaagctaaagaaaaatgcacttcttcgaaagagaagaagtacaaaaaaacagtgactagagcaacatctaattagaaactcaactcaagtactgtgatgagctaactagcatgcatccatagatatttcaaaagcactcactaatcacaaattcattcaactcaacttccaaccaaataaagttcattgggagctattaggatcatcttctccactctcacttggttgagattgatgctgatgttgatgatgatcggaattaacattcaaactagcccttgtgtaagcattaagtgctgccaacatgcccaagttggagtcggacatggcgaggcccagatgctgttgctgcggcattgacatggaccccaactgaagcgaacccgcacgtgcgccttggaattcaagtgcacccggaaccggaaggttgaaccttggcatgaaaccactcacactttgaggaaacggccacatctgagtctccgaggaagcagaagacgaagcccccgcggtaacgggaagcatccaaattgtgctaccagggggcccactggcgggagagggtgccacggcccacatcgctgttgcgggaagcaaattgctgggccgaagaagcccagaaccagcttcggattgctgcttcggtaacttaggcgaagacccatcaccatcaccgctctcgttctgcgattgggtattgttgttgttgatgttatcgtctttgaagagatcttctcggtagcgttttctaaggtagttgtcgccggagtcaccggcgccgctgggaagggattctgggatgtgatcggcggagagaagctgctgcggttgatggtgagggtggaagccaagtaagagcggggtgttgaaaggcttcgtcgtaagggtggtgagcgagtgcgagggcgccatgaaaggtgtgcggggctgatttggagggcggggccgagagcgtggagccgctgctgcgtaaggagacgttgagggaggagaaattggcggggatggttccggttccggtggcggcgatgatggcgggctcggcctgctggaggagccattcgatagtttcgccgtcggacttgtggcccaattctcttgtcaactggaaaaccctagcggcgcaggtggcgggcattcgaattctgcggccgcggccgtcgactttggtgtgcctgtccttggtggatcgcttagggttggcggtggggatggctagggaggatgaagaagcaggactactagctccacctgtcagcttct

SEQ ID NO: 11258 - DNA, 553 bp, Glycine max
  Clone ID: PAT_MRT3847_110173C.1
ctcgagccgcgggaagattaagagaaagtgagaaggcaaagagggcatggataatatcgtgtggcagactccagcgaatcccccgcaccctaacgattacgtctttcgaaacgggattcgatacgttagaccatactacttcgaattcatcgctcatgttaaaaatcggtgggcagggaaaaccattgtggatttgttcgctgaggaattcaaaggtcgaccttatgagtattatgttagtgcagtgaaatgtggaaggattcaagtggatggtgagatggtaccggtttcatacatagttaaatcatctcaaaagataagccatttcttacacaggcatgaaccacctgtgatgtgctgtgagtttcatgttcttcaaaaagatattgatgtgctaactgtttgtaagccagcatatgtcccttaggtgcacccatgtagtcaatatcggaagaacactgttgttggcattcttcaagctagagcatgggctgacccctttatttcctggtcattagactggatcgccttgtctcaggacttcttaatttgg

SEQ ID NO: 11259 - DNA, 382 bp, Glycine max
  Clone ID: PAT_MRT3847_110174C.1
cggaaaaaagggatcggcccattacaaaaccaacaaaacaggggcatcatcatgaattttcatgcttcaaagggccaaaacaaatcccgaagattccaaccggggaaaatgggggagggggcccaccccaaaatttagctgggaaaaaataatccccccagattttgccaacttaaaaggcctaagccttggtgcaatataatatcgggaaacaattagggggctttcccaactgggggcaaaaatttgggaagggacaaagacgggtttcgacccgggggattaaaaagtaacataaatgtcaaaagggtcaaggctccaccctgatgtgcagggcccagggaaaccgggccctttgaaagaagcgttgaaattctaaggg

SEQ ID NO: 11260 - DNA, 302 bp, Glycine max
  Clone ID: PAT_MRT3847_110175C.1
aaggcggcgctgttggggtttttttgtgttttttttttttatacaaaatttcaggggtttttttaacaatagggttataggaggaaggactaaaggggcacaggctgggataaatactcaaaattaaaatcagaaatagcgcatgagaaggacaaaaccgaaatgggggataacaagcgagcgggacaaggcttacacaatcaaacaatccctgggttgggagaacaaactccatctattccggagggttaaaacagaaatatcatgggaaccttggtcacttggaatctaccccagcgtca

SEQ ID NO: 11261 - DNA, 584 bp, Glycine max
  Clone ID: PAT_MRT3847_110176C.1
ctcgagccgaatcggctcgagcggctcgagaaccctctctaggagtgacagagtctgcagcgaagctagggcagtggacatcaacggagcgaacgtcacagtcgttttctaacaatcgtcacggcggtttcagctctcgctcttcatctcagacaactgggcagaagaaccagagttttattgaaatgatgaagtctgcaagggatagtaatgcccaggatgaagtgctagaaagcgaggaaacattttttctcaagaaagaaccctcctcgaatacccaaagagaactcagggtgaaagtggatgcgaagagtactgatcaaaagccaaacacaccaagatcaaaacactctgcaacagaacagcggagaaggagcaaaattaatgacagattccaaatgctaagagagcttattccacacagtgaccaaaagagggacaaagcatcttttttattggaggtcgttgagtatattcattttttacaagagaaggtgcacaagtatgaaggttcatttcaagggtggagtaacgagcccgaaaaattgatgccatggagaaataatgacaagccagcagaaact

SEQ ID NO: 11262 - DNA, 627 bp, Glycine max
  unsure (1)..(627): unsure at all n locations
  Clone ID: PAT_MRT3847_110177C.1
tgtctctaatatttcttcggccaacagctgaaatcttggagctaaatcaacaagatatgttttccttgactcatttgaggcattgaacccagtaatgttttaagcaaataatacaaacaaacattaaaataaaatgtgttaaggatgacactaggaattaaaaaaaaaaactagcatacatctactgattattagacttgtggtgttgttcttcaagtagatctccttccactaaagcataatctgactgtaggtatatatatatatatatatatatatatatatatatatatatatatatatatatatatatatatatatatataaaaacatctttaaaatgatatctattacaatttctgataaaaacatctttaaaattaaattattacatttttttttattgataagataaatatctgttccactatatatcnnntagaaattaacctcttttgattaacgctggctcattctctactccaaacattgcggacaagaatttgggcgaggaagatatcaagagagaaacaaatctgattaatacaagtcaaagtctaagccacctaaattatttatttatttattttactaaccacttaacatcacatcatatcatcataatta

SEQ ID NO: 11263 - DNA, 187 bp, Glycine max
  Clone ID: PAT_MRT3847_110178C.1
aataataacttcactattgtttcaaataactaaggaacacaacacagaaaggtgttataatttattacaccggagtttaaagtatctttataaagctaaaaacacataaactattctcaatcacaaacatatccaaataaccttttcaaaacaaatttactactataacatacctccaatatatcaa

SEQ ID NO: 11264 - DNA, 504 bp, Glycine max
  Clone ID: PAT_MRT3847_110179C.1
ccaactcttccaaccatcatacacgcaaatagggacattgactgaggtagatcaaaaccccatttgacagtggggaagccaatttgaacatccgcaccatatatcaccttataagggcttaatgatcaacccttgatgcacaggaccatataacattcttgatatacgctatctagttaccttatcacgaacaaatttgcatcgcaatgtgaagttcgagatgtgagcaacaataacataccatagaaccataccaaccttagagacctaaaatcacatctcattccaagacttcaaggacctcatcaaatctaagcaaccgcagaccgtcacttgagaaacatggcaaccccttccatagactgaggtcttacaacacctatgtgacaggcaatatcgacaacccctgcaatacctactaccatgtataacaacaatcaagtacacttcatgttcagatgaaaccaacttcatctccgagatcaagcactatccaggtgttag

SEQ ID NO: 11265 - DNA, 204 bp, Glycine max
  Clone ID: PAT_MRT3847_11017C.1
cccaagcgtacattccaaacgtggtcatttgcagttactccctaattataggggacctggcaaattccatttgaggccggcggaaatatcgcgatcgacactttttccgttaagattatcttgtgctcatgatacgttgacgcgcacgaagatcttatccggaatgggatacctattcacgattatgactgccgatattgatga

SEQ ID NO: 11266 - DNA, 286 bp, Glycine max
  Clone ID: PAT_MRT3847_110180C.1
ctagccccatgaacgcataggtattacatttattttatataaatcacaaacggctatttctttatgggaggccattcccagactgactctaagtgctatcgttcgcttctaagtggggacagaaacccattaccattaccacaaaatgttggtcattaaattaaaactaacttacaaaacattttattaattggccatctaagaaactacttcacattatctttgattccgtgaaaggaacaagatccattatatttatgctcctggattctggcagaataaaaag

SEQ ID NO: 11267 - DNA, 676 bp, Glycine max
  Clone ID: PAT_MRT3847_110181C.1
aattctttccactacctagattttaaaattctaagaaaggaccaaaataatcccctatgcagtttcttacacctccaccaccccgttcctcttcctcctcagtcttcccctctttcctttgtctggtttccctcaacgacgcaaatggaggggatggtggcggcgtcattgccaccaacggtggggattctagttgtttccctccatgagctttgcattctcttgcacctcttcctcggtggcgtcatcacagtaaacgaatcccttttccattcatgttgcgccacactagcatcgttgtcggagaggatcttgtcaacatctgaggtttggcgatggtccaagagggtcttacgctccctgagaaccttccgagcagagatcgaatccaacagcaactcacccaacaagattggtgtcgtgccacactagccacctcgcccccgccagatctgtatctagccactgcacgccccttgctccgtcaagaccacacacaagatctgtttctcatttttagattttgttgttgttgttaatgagtttgggtggtgatcagggtggttggggaagctgggtcagaaacacaaatataattctgtaattgtacaatgtatttttttttacacacatcgggtaaaaaaaaattaagaaaatatgattttattgtactcgc

SEQ ID NO: 11268 - DNA, 592 bp, Glycine max
  Clone ID: PAT_MRT3847_110182C.1
acatggcgcagaacacgtcctagacgctggatgcgcctgtcgtacaagcagacgctgggtcggaaaccgaacatcactcaccactggactactacattgttgccacaacaagaggattattgacaattctcaccgaaactgcagagagggagcagacaaaccactaactctacgctaatggaccctagcctaaaccctcactataccaatatcactggtctgtgaaacgagctcgaacactacatatggaatatgacagcaaatgctgctaagcctaattcacatggtgcataccattctggaaaaaaagctcctacataaacaaaagaggaggacaatgaagcacctacaattaatggaaaaccttattatgctgtcaacaaggtttcttatgccaactctgatacaccgctcaaccttgctgattactacaacatctctggaatatacagtggcgactcagtccaaacccttactttgaaagactcctgcatacatagcgcacacttcgtagcgccaacaactctccatgatgacaatgacgttgaaagtcaggacatcgaacacgccatgcaaccttggcgtctcgacg

SEQ ID NO: 11269 - DNA, 4316 bp, Glycine max
  Clone ID: PAT_MRT3847_110183C.1
gacttttttgcaattgaaaattttgcaattataatttcttctactaataaatccatctttttttcttcttcttcttctttttcgtatgagtatcatttacttctacgcagtcgcagtacagatacccgtatgagcttcttaaattttgatactctcaaaatctaaagaactaatcatatagaagatcaaataagaaaaagtatcaaggaaaacaaaaccaataatcagatccttaacagtgaaaggtgaaatgtattatttattcctatttacaagaactatctttgatctttgtgtaattttgtgaaagtaccaagaattttgattttcttattatcatctttcatacttcctctggctattttctttgattttgatacatcatcaatgcgaatttagagtggagactatgagaaagcattttcccaacaattaaaatgatcaaggttccaagagattgaaaatcaaacatgaagagaaagttcaaaagcatataattaatatatctgtttcggatatgaataataattagaggaataagatgaaggcaataaaagaaaagatccaaaagatatacttcggacaataataaggagggacgatgctttaagaacattgagtagctttgagctactctttcattcctattggaactttggcatttaaatcaattttctagtgaaaattgctaagccttttaatgaattatgatctcttagttagaaaatgaaaacttatcagtggttactgtcaagtctttacccttgctaacttgttgtgttgactctccttacatggaatctttaacaattttgataatgttcaaagccttcatacaacaatttaatcatcttagatgtatgtttgtcaaaaattctaactagaattatatagataatataaacactatatccaaaaattattgatcttgaatatgctatgcaatttgattacatgggtatatgtgttcatcgttctcaaaagttatgttcctcaaaactctattagtaatatcatttattacgttccacttcacataaaaacaaccacttcctcatgtgtttaggactataatctactgttacacctaaataaacaggaccaaacatcgatcatcaactaaaataatgctcaaagaagtttagggagatgaatatgttcctgtatggtgcataaccattaccttgatggtacatataagagcagctatcccctataaacaccttgagccatccctaccatcaaggttcatatatctggaataagcattccaatcaccttgcccatcataaccttaaaaccataataatacgcagatgggtatccatttggaacaaagcatgaatttggattgaatggcttggccctccctttagctgccccattggaaaaagcaggtccattcttcttcgcaggctcagcaactccaatggctttggactcagagtccagagtcaaattctgcaataaatctgcagttttgtcagaagaaggagcaacagctgccatgatcgaaatcagagagagaaagggtcgccgccaactccgtgttctttgggtttgagacacaccttcagggattggcttcttgacgcaagcactatattaagtacgaagaaaagcatgtttagattatattaactgccctgaaatagttgaaaatcattgcttcaccgacatgggtttttcaaggatgctgcaattgtgacagaaccaggtgaaataaaagattgaaagtgttagtccaggaagtgaaatacgaaggtggttgaataatgagcatgagggaaattgtgtaagcttagacgcatctcctgttatgcatgaccataattggattggcgttgcgttttgtgcaatattcgtcgtacctcatgaaacactctcagcaatgagtttttcagaaacagaatatccattccatttgtttggtgatattcgagtggatttatatggagatttagatctagaacttgttttagacaaatcagatcacatgtggctattctttgtgaatcgacatgacatcattgcagatttccatctcaaggacaaatatcttggcagattggtttcgagatatgatggagtgttgaaagagtcatatgcggaggtgaagaaatacggatatcgctggctatataaaggggatattgaacaaaggaagcacaaatttggggaaattgaagaaaatgtgagctgaagggagaaaagatgatgcaaggtcctcccaggaaaagatagtaaagttgaagcttaggccgtagaatcatcatttcttctctcattttattcatttgagttgtccttcaaattttgaataagcttggtggcgtaaaatcaggttttaaatttttaatccactatatctaagaataaaattcaatgtcattataattaaaaattgcataatttgattttttatcaagttgccactgtttggcgtggactttttttttcattgtatctgcctccaaatttgtcgcatacgcagccccatggcttcatcaattcttcttctaatacacctcatttgttagaatttatatcttgactaacttcttctcggcttatgtattagactcgtaggcctcggttctcttgtatatctgtgtctctctcgctcttcaaaactgtccaacaccgagttattatatgaactaagggatgcagagcaattgaagaagattgatatagatggagctcctattcatttccattcaacatcctccaactccatagaacataaaaaatcagttagttgctcaatgccttcctccccaatatttccatgtatgcgtgaacttgatctaagtttctgtaatttagttgaaatccctgatgctattggagttatgagttgcttacaatggctagatttaagtggcaacaattttgctacactgcccaacctcaagaagctttccaaactgttctgtttaaagttacaacattgcaagcagttgaaatctttggctgagctcccttcacgtgcagtagactcagaccagaattatacatttttaactgcccagaattagttgatagggttccccgcgccgccagcgcgtgcgcatggctgaggcaattgtgtcaggtgttatactcataggtggttgacctgtctggaagtgttagtccaggaagtgaaatacgaaggtggttcaataatgagcatgagggaaattgtgtaagcttagacgcatctcctgttatgcatgaccataattggattggcgttgcgttttgtgcaatattcgtcgtacctcatgaaacactctcagcgatgcctttttcagattcagaatggccatggtctttgcttggtgatattccagtggatttttatgtagatctagatctagaacttgtcttgcactaacctggcctcttctggcttgtcgctctggttccaggtgactccccgttctaccatgttagtagagttgttagtcctggaagtgaaataccaaggtggttcaataatgagcatgagggaaattgtgtaagcttagacgcatctcatgttatgcatgacgataattggattggcgttgcgttttgtgcaatattcgtcgtacctcatgaaacaatctcagcgatggctttttcaaaaacagatgggtactactcgggttttagtgatattccagtggatttttatgaagatctagatcaagaacttgttttagacaaatcagatcacatgtggctattcttttttgatcgaaaaatgttcatttttaaattccatctccagcccgaaaatcttggaagattgcttttgaaatgtgatggaaggagaaagtggaaagagtcatatgctgaggtgaagaaatacggatatcgctgggtatataaaggggataatgaacaaaggaagcgcaaatttggggaaattgaagaaaatgaaggaatgatgtcagaagaagggagaaaagatgatgcaagctcctcccaggaaaacacaatcaacttggatcttagcctgtagaatcatttcttctctcattttattcatttcagtcgtccttcaaattttgaataagcttggtggcgtaaaataaggtttttggttgttatgggatgcttgtgtagctgtctttgttggttaagaatattgttttttttttttcttgtttggtttgagtaatgtttaacagagactgatgcaatttctcgttttcagtcctttttacttttagggcatgacagctaaaaaaaagtacaaataatttttttttaaaattctcgtgtcagtcgatccaggaatcaggaagtcaaactaaggaataaaaaatttaaatttattaatc

SEQ ID NO: 11270 - DNA, 619 bp, Glycine max
  Clone ID: PAT_MRT3847_110184C.1
tttagtgacacttatatacttgactcgctgcccgtactagctcgattcggttgagtgaaggaaccaagattaccatggctgaacagagagcctatgcatactggaaaggtaatccagttgttgctgaaaccagacaagatctcatgaaatgcaatgtttctgaaaatcaagattggaatgctcgtttatatgttcaggattggggacgagaatcacaagaggggtacaagaactcatacttggcaagtcaaggttcgtgcagatataaggtgtacattgaaggttctgcttggtccgtgagtgaaaaatacattctggcatgtgactctcccaccctacttgtaaaaccccattactatgattttttcacaagaggactaattccggtgcaccactattggcccataaaggaagatgacaagtgcaggtccattaagtttgctgtggattggggcaatagtcacaaacaaagggtaatcttgaagttttgcttattcattaattctagaatataagtcttaccaagttaatcttaaaagatttcacctctctgaatatttaatttaatggtgaatcacttattataatcagggccaaaataaattacataacaccttct

SEQ ID NO: 11271 - DNA, 2362 bp, Glycine max
  unsure (1)..(2362): unsure at all n locations
  Clone ID: PAT_MRT3847_110185C.1
gaccacanactgtcatgccatcctcagttctatctagtgatagtatgcacattgggcttcttgcagctgctgctcatgctgcagcaactaatatttacagtgtgctacaacccacatctgaactgtttttcctttaaatatgtcaaagctttctctgtaccattttttctttaattcggctcaagatgctttttgagactgaagaatcaagtgtccgcaggtatatgggtacaataactggcataagtgatttggattctgttcggtggccaaattctcattggcgctctgtcaaggttggttgggatgaatcaacagctggagagagacaaccacgagtgtctctgtgggaaattgagccattaacaacattcccgatgtatccatcattatttcccctcagactgaaacgtccatggcatcctggcacctcatctttgcatgatgggagagatgaagctactaatgggctaatgtggatgagaggtggacctgtagaccaaggtctcaattccctaaattttcaaggagctggtatgttgccctggatgcagcagagactggatccaactttactaggaaatgatcagaatcaacagtaccaagccatgttggcagctggtttacagaacttaggtagtggatatctaatgaaacaacaaatgatgaattttcagcagccttaccactatcttcaacaatctggaaacagtaattctcctttgcaacttcagcagcagcaaccaattcaacaatctgtgtcttctaacatgctgcagccacaagctcacgtgttgacagagaacctctctcagcacctccttcagaaaccacataacaatcaagaagtccaagcacaacagcagcaacatacttatcaagactcgctcttaattccgagtgatcaactccatcagagacaacactctggcattccttcaccatcatattcaaaaccggatttcttggattcgagcatgaagttccctgcttcagtttctcccgggcaaaacatgcttagttcactttgtcccgaaggaagtggcagtctcttgaatttatccaggagtggtcagtccttgctgaccgaacagttaccgcaacagcaatggactcaaaaatatgcacctgtgcaggtcaatgcctatggaagcactgtgtcacatgcacaatattctggaaaagattctgtaatggtgctaccacattgtaactcagatgcccaaaattctacgctttttggtgtcaatatcgattcatctggccttctcctccccaccaccgtccctggttacaccacctcgtcagctgacactaattcatcaacaatgccattagcggagtctggtttccagggttctctatatggttgcatgcaagattcatcggagttgttgcaaagcgcagggcatgttgacccagaaaaccagactcaaacctttgtcaaggtttacaaatcagggtcagttgggcgctcacttgacatatcccggttcagcagctatcatgaactgcgcgaggagttggctcagatgtttggaattgaggggaagttagaagaccctcttagatcaggctggcagcttgtgttcgtcgacagggagaacgatgttcttctccttggagatgatccgtgggaatcatttgtcaataatgtttggtatatcaaaatactttcacctgaagacattcagaaaatgggggatcaagcggtagaatcccttgctctaggttcaggacaaaggctaaacggcactggtgctgagtctcaggacattgtttctggaccaccatcaatcggctcacttgagtactgagaaaactgaaacatgtattccttcagaccccatggtcaagagaatttctctacatgttttattacttaagttggaatatgttgtgtatgatctgttccccctttcagccctccttattattactatcagcattgaagaaaagtatacatttatgattaaaaaaaacccttaggacatgcttctgtgccaatttgaacttggagcactgcaagctagagttagtgttaatgctattttagcataatatttgatcaaacttttgcatgaactaatgtactctagataggaaactagagaaggctgtttatgcttgagctgtctttgtattctacaatgccattagttcccagttaaggggtcgaacttttaactcaaaatgtatgagtagtattttactatattgccattgaaaccatcaacccaccatacgacatgtctcttaaatgctactattttgtagctctattnaaaaaaaaaagtaaaaaaataaaaaaaaaaaaaaaaaaaaaaaagagggcngcgccgntcttataagagatatcaag

SEQ ID NO: 11272 - DNA, 347 bp, Glycine max
  Clone ID: PAT_MRT3847_110186C.1
aactcatggttgcttgatttggttttagtaaatgtactttgattttttattgatcaactatatgatattctttcctcattagcttttgactgatctggttccactcttcattttgttgaagagatgtaattgtacctagtacaagaaaatcaaggtcaaagcatggacgctgtgtcatccgcactactagagccagtaactaattctgtgttggatctgattaaaaagcaagtggattacatccgttataggcaaaactttgatgaactacgcgagtgtgtaaagcagcttaaacttgtaaaggagaaagtagatcatcaatgtgaggaagctttcaaaaatggaca

SEQ ID NO: 11273 - DNA, 500 bp, Glycine max
  unsure (1)..(500): unsure at all n locations
  Clone ID: PAT_MRT3847_110187C.1
ggacctttaggatcttttaccgacaatatgctgccctctacttttgcgcctgtggaattgtcaatgacagcaacctgtcttacctgtaggcctttcacaacttcctaggacgagatgttcctggctggacaatgccacaaaccagccgactaacgtgctaacagatgctgatgctacaggccctgaagagagggcagacgagccccaccccggacccagcccctactggactcaactgctcacttcctattcccaagcccgtggccaaccaagctattcttacctcaggtgtctaggaagaaaggacccagctgggactggaccacaacggaggagactgctcccaactgcctctgggccctgaatgtgggcaaagacctccgagtgtgtccccagtaactgaggccgttgcataagatgccctatgctgctgtacataacgggccgaacaaaacgggcgtgccttctgaaaatgtagcanaagctatggtgcacgtgat

SEQ ID NO: 11274 - DNA, 505 bp, Glycine max
  Clone ID: PAT_MRT3847_110188C.1
cttcttctcaacatgcttgttcctccaccaccaccacccatgatcaaatgaaaacaacatttcttactcttcatgcacattgccatttctcttatggcatgagcctgttcagatacccttcatggagtcacctgttaatggagtagattccttatcagaggttcagaattcagtttctggggtacatcatgatcttctttcatctgggactccccgtccttcacggcctcccttgagagcatctagaaaccatcaaaccaagaccatccaccatcaaaacagccatgtaattaatcaaaagcattcctatcaagagggaaacaatgtggagcatgaaaggttgccaacaaaattgtgcagcaagcatcaaccacttgatgattccaagaattgtgagtcaagtgatgtgttagaatctgacaattgcatcttatggccgtcaaaacgagttgtggctaatcatgcaaggagttactgccagtcagaggttactttctgtccaagt

SEQ ID NO: 11275 - DNA, 965 bp, Glycine max
  unsure (1)..(965): unsure at all n locations
  Clone ID: PAT_MRT3847_110189C.1
gctttctctggggttcactctttgttcagtggtgtcttggtgctcaaagactcccaaagttacttccctttctgttttctttcttcttctcaacatgcttgttcctccaccaccaccacccatgaacaaatgaaaacaacatttcttactcttcatccacattgccatttctcttatctcatcagacatttttgtaggagattctgtaattaaagagctcgttgaatgagtacatattggtaattcactgtgctgagttggattttttaagcctgttcagatacccttcatggagtcacctgttaatggagtagattccttatcagaggttcagaattcagtttctggggtacatcatgatcttctttcatctgggactccccgtccttcacggcctcccttgagagcatctagaaaccatcaaaccaagaccatccaccatcaaaacagccatgtaattaatcaaaagcattcctatcaagagggaaacaatgtggagcatgaaaggttgccaacaaaattgtgcagcaagcatcaaccacttgatgattccaagaattgtgagtcaagtgatgtgttagaatctgacaattgcatcttanggccgtcaaacgagttgtggctaatcatgcaaggagttactgccagtcagaggttactttctgtccaagtcctcagagtagtttctattcagccactgtctattcggaagcgaaacaaagtttcaccaacactgaggtcagtgagtgtgctagtgttgacaagtcttgtgtaagtggagaaatggcaaattcctgtgattttaatgagagcaggaagaccagcatctgtagagcaagtactggcagtgatgctagtgatgagagcagcaccagtagtttgagcagtgtcgtgtataaaccacacaaggccaatgacataagatgggaagcgattcagctgtccgagctcgagatgggatgttg

SEQ ID NO: 11276 - DNA, 347 bp, Glycine max
  unsure (1)..(347): unsure at all n locations
  Clone ID: PAT_MRT3847_11018C.1
nnnnncacttcgagatcttgatataatgcaagggttgcagtggcctggtttgtttcacattctagcttcaagacctggtggagcaccttatgtgaggctcacggggcttggtacctctatggaagcacttgaagccacgggaaaacgtttgtctgattttgcaaacaaactttgccttccctttgagttcttccctgttgctgagaaagttgggaaccttgaccctgagaggctcaatggtagcaaaacagaagctggtgctgttcactgttgcaacattccctttatgatgtcactggctcagacaccaacaccttgtggctttttgcaaagactggcacctaaag

SEQ ID NO: 11277 - DNA, 232 bp, Glycine max
  unsure (1)..(232): unsure at all n locations
  Clone ID: PAT_MRT3847_110190C.1
tggattttattgcatgtacaatttggtaaagttcttccaaaaactttgtatcgaatcaaatttatttctgcatattggatttcaaaagtgaagctgcgaatagcataaaggctataaagaatacagtctgtacatgacatattttggtgagcatcattgaccaaacctcttgggaatcgtttgaatttatcaaactgatanggatggatgcattatgctccctgtttgtcat

SEQ ID NO: 11278 - DNA, 921 bp, Glycine max
  Clone ID: PAT_MRT3847_110191C.1
gtctgaaaatcgaccacaccttaagcgagaacccctacttttatagcgtataatagtaggcactgtactgagttcacagcttcagcatggtttctctcagtctctcgtcacaccaactgtcttcaaatcagcgtttcattcccatctccaccttcaattcccaccttaggtgcatttctctagactcctttctctccttttcttatttatttatttttcctcataactggttttgaaggttcaggtacttttgctccgaccccaagaacaaccccaaaacgcaagacccagatcaagaaacgcaagcaagccaaaaccatcgccaatctcatcaattccaaacctttttcaaatgggttgctctcttctctcctaatcactatctccaaaaccactgttcttcgaacacttcgtctcatcaaagacccttccaaggccctttgcttcttcaaatggacccagcaaaagggtttctcccacacacccgaatcctacttcatcatgcttgaaatccttggtcgcgagaggaacctcaatgtggccagaaacttcctcttttccattgagaaacactccaagggaacggtcaagctcgaggacaggttcttcaatagcctcattcggagttacgccgaagccggccttttcaaagagtccatgaagctttttcagaccatgaaatccattgccgtgtccccctccgtggttaccttcaacaacctgttgtcaattttgcttaaaaggggttgcaccaatatggccaaggaggtgtatgatgaaatgcttcgcacgtatggtgtttctccggacacttgtacttacaatgttttgatcatagggttttgcaagaactccatggttgatgaagggtttcgtttttttagagagatggagagttttaattgcgatgcggatgttgtt

SEQ ID NO: 11279 - DNA, 175 bp, Glycine max
  Clone ID: PAT_MRT3847_110192C.1
catttaaacttccatcaacatttactcattaaattttaaccaaacctacttaaaccactacataccatcctttattagtctccattattcctaaaacaatcaaaaggatttcttacatcctaaactaatcatatttactcttttacccaaattacataaaaactatttatctaac

SEQ ID NO: 11280 - DNA, 385 bp, Glycine max
  unsure (1)..(385): unsure at all n locations
  Clone ID: PAT_MRT3847_110193C.1
cgtgcgccacgcgtccgtccactcgtncgaacacttcanaatttacgacacctgggaaactcttgatcattgtggattttaacaagcaactataccaacaccgccaataactaaacatggcatacatatacctaccatatttaaaagaaaagctaaaccattgaccgaaaattttacccacttgttctcttcaattacattcactcagaaacaaaaaacatcccaaaataatattttacccttcattctaaaaaacccaagcttacttacacttacatgctatcaaatatctaatttctcgacacacctaaattcactacactgaccgtcaaataacaacgtctttactaacaaaacccttgcataacccaactaaacctccctg

SEQ ID NO: 11281 - DNA, 395 bp, Glycine max
  Clone ID: PAT_MRT3847_110194C.1
ttttatattatcttactgtttttggtcacctttagaaggaaaatttccaaattaactgtggaaaacacgaaccaccttggtcacagttaactatggaaacaagggttataagctcgcaaaacaaacttggggctattctgaacccccctttttttggtcttgaaacaaaattttgtggccaccggagccctcaaaccgcaccacattaccaccatccttggacagcccatgcattataaagcattgcaacaaacgggatggcttttcaactttgcaatgcctaaaaacacctatcactccaactgagctccacttgccttgccaaaaggggtatgagaagcaaaacccggagaaactagaactgctttgatggttggggttttcatgccatccat

SEQ ID NO: 11282 - DNA, 395 bp, Glycine max
  Clone ID: PAT_MRT3847_110195C.1
aaaatgatcttcccttgatagacatttttgtctgtttttttattttttttttttggggatacctaaactgccttatttttttgattaaaaattccccgcccggaaaacctattttctttgaagaagcacaccagtttatttttcgcaaaaaatacatttcctatgcgctcatcaatataatcttatttaactgactcttagtaatcttgggctcaacaatccttggggcctcacgggggctctgaatttggctccagctttcacatgattgccaaccaagttcccccttaatccttaggaactggttgtacttggcaagcctttcatactgggagggagcctcagtcttgttctgaccagtctctaatacagctgagaggtcaacattgaagggc

SEQ ID NO: 11283 - DNA, 367 bp, Glycine max
  Clone ID: PAT_MRT3847_110196C.1
attatggacaccaaaaaggcaacttttttttcttaggacacgctgtgcttaacaaacccgtttttttgggaggtaacagacacattatagggggggggctgaccaaaggtgaatcgccacaggagggcaaaaccccaaccctgcgagggggaggcgcaacccgatggccgtccccccaagctaaacccgggggttgggctctctagagacgaatccccaatggcacgtggggggccctgattgtatccacacgggggggggggggggggaagaccaataccgcacgattcactccttgttctgggcagccttggtgaccttggcttccgtaggatccttcttctccgcggtcttgatgactgccaca

SEQ ID NO: 11284 - DNA, 254 bp, Glycine max
  unsure (1)..(254): unsure at all n locations
  Clone ID: PAT_MRT3847_110197C.1
cactaacaaaacgaaccccgtgaaagcaaagcacccaaccgcgtttcttgcctatcctactcacacccacgtagttccgatcttgacgacgccgatgtgaccgtagcacataacgaaaacgacgccnctaccttgcaaactgactaggcgttatataaagacccaaccactcgtatcgaacccccaaaagaggcacatagatacatttgtattttgtataccgctttacttggaacaaatattggataaacaaa

SEQ ID NO: 11285 - DNA, 707 bp, Glycine max
  Clone ID: PAT_MRT3847_110198C.1
ccacgcgtccgcgctgtctctgatctaccatacctctcttctttgacccacctttcttccttcaatgtctttcgcactcttaatccttcccacactctctcccctgagattctccctcccccaattcctacgccaaacaaaccctctctttccccctttttcctcttttctccttcattcctagggtgcagaaaataaaaaaagatgaagtccctcagcaagttgaagaaaacacttcacaagacagtctccaaggacaaaaaggactttccccccaccgttaagttcgacgaactcgccctcgctgccaaggacatgcaagccatgagagattgctacgatagcctgctttctgcagccgctgccacgcaaaacagtgcttacggtaaacattagtcttcatcacagctcgtgttgttctctgcattcctcacttatgatgtattcaaagcttttgaaatggttgtgcattttgttttgttatgttccccagttccgcgtatatgtcaacaaatgtttaggtcgcaagttaaacattcacacacacacatattttgtttacttgtcatatgtaatgtctccaacaatttaagaaacaagtttgcatttccagttgccatagtccatggttggctggccttctgcactatccttattagatatacatattcgtttcattttcatttgtaatcgggtttagtttctct

SEQ ID NO: 11286 - DNA, 332 bp, Glycine max
  Clone ID: PAT_MRT3847_110199C.1
ctcatattttcatttccaaaactcaaacaatgcctagttaaattaaaaacaaggcaaatattagggtgcgtaattaggcaccgtgcgaaagttattacaatgcgatcacaaccgttggattttgttgattttaaatcaatggttcaaatttttctttcttttttttttatttttttatttttttcttacttttcctaatttacccccaccatctaccctcccccgcggtggaagcccaaggcaacaccgtccgcgcccttaaggccgtcaaaagccgccaacccgaaatcgacgccccaatcgaagccctaaacgcgctgaagcttggaaaa

SEQ ID NO: 11287 - DNA, 462 bp, Glycine max
  Clone ID: PAT_MRT3847_11019C.1
cacagggggtccctattattaagatcacacttgccaaaggacatgctccttaaggtatacgagtttcttatagccttagccaaatggtactcaattcctgtgagtttttaatgcttcattgtgacttaggcatagtctagatttatagactagattgagttaattcttagttttggcgcttgagacatttagttataatactttagcaaatcttgagtgaagatttgtaaataggcaccataccctcttcaacaatttcataacatataaaatcataaggaaaaatgtcaagaggagaagggttactaggaccttatccattttgcacatgtacatttgaccatgtttttgcactgctaatcatgcttcctgttttccatgttacatcttttgattttatgatttgttattaatcagttgcatgcatttgtgcaggtaaacaggaggatagtttagcatttt

SEQ ID NO: 11288 - DNA, 964 bp, Glycine max
  Clone ID: PAT_MRT3847_1101C.1
ggctcgaggcaatgtctgtctcaacaagatttggttgagtcttccttttctcctccttttgtgtttcatgcacagcacatgaactcatcctcctccgccgcagagtccaccatggaagaccgccgctcgaagaagcaccaccgccgtcaccgccaccaccccgccacgacgacaacaaccttgagcacgacgaccggggagtcggacggggaggtggaggaggcggaggacggcgacccggaggcgtgggtcaccctgaacaaggggttccggcaggtgcagtcggtgctggaccggaaccggctactgattcagcaggtgaacgagaaccagcagtctcggatgcacgacaacatggtaaaaaacgtgtccctcattcaggaactcaacggcaacatctccaaggttgtctctctctactctgatctcaacaccaatttctccaacgtttgccaacaacgctccaaaaactcctccaaataagtcaattcaaaaggttcttcctaagtaatgtttcgtgtctgtgtcctctgtctatgtctattgcgtatgtgtctgttgttgaagttgaagaatttgtgatggtaattttgggctttgttttgtcatcaattgtcgataaggacggtgaaaaggcgaagcattgtatcgtcctctttacttctttttcttttcttttctttttatataaaaaaaaaagtttaggtgagtcgagttcgaagctcacaaaggttcagacctcaagctcaaagaacacttacaacattatttacatattacctaccaacaaatgtcacagcagaaatcagaactcacgttctttggggaattgtgttcctttcttatcaagtggaccgtccttcccttctttctctacacatactactatattgtcgcgtcctaccattgaatagtaactcccctctctctgtacttctaaatcaataaattaacttgtcattgg

SEQ ID NO: 11289 - DNA, 280 bp, Glycine max
  Clone ID: PAT_MRT3847_110200C.1
accggtgggagaagaccaccgaagggctcccatgaacataactgctccaaacacaatgactcatttaacacgggttgaacttggttggaatgtgtggtatgcgactctaaatcactaacggcacagctgggaaggattctagcgatgctgacataactgaattcaggtattctaactaaattcagatgtcatatctgcattggtcttagtaccaaaggataggctgtggtcccagagctagcccctacagcatctatatataagagcatggcattcattg

SEQ ID NO: 11290 - DNA, 276 bp, Glycine max
  Clone ID: PAT_MRT3847_110201C.1
gtttgcttcttgaaatagagctcgttgtaggatgctactacctctctatatatatatgattgtcttattctacagactgaacttgaagctatcaccttgcagatgatctgaaatttatttgacaatcatggattattcctgacgcattatcacttacttggatctgaacgttaatctacatagcgctcacgatatacttcctagagagctgctggaaaataatattttctcattggctttgtaggtgaagagatctgctgttaaacaagagtcagc

SEQ ID NO: 11291 - DNA, 566 bp, Glycine max
  unsure (1)..(566): unsure at all n locations
  Clone ID: PAT_MRT3847_110202C.1
tctacgncgtcgtggacgcgncgggtttgagaataatcgtattgttacaaaaatgctttcttcttccgcctgctgtactctgttggccgcgctcatttcggcggcgtttttcgccgcggctaacccaccaacggtgaagcagtgcttgtgctccgaaattcagccctgcacccaaaagtacatgaacacgtggaaggcgtgcatggagcagtgtaagggccatctgtccggcgtgggtggcaacgtggacaaattgggccactgcatggacagcaactcggcactcctccaatcgacaatcaaatgcacccaatcgcataggcaaacggcatgtgccaaatcggcggcatcagctaaacaggtgccaaagcgataccctgaaacgttggaaattgctacaatcagtgagatcaatcggatggtcaacagcatgggcatcgaaggcgcaatgaaaggtttgatggatgccggcaaaaaaatgtacggctgcacgagcaaatgcatgaacagcaaggcgggcaactgcgagaagtcgtcaagtgcggcttgactacccgccgacaacg

SEQ ID NO: 11292 - DNA, 250 bp, Glycine max
  Clone ID: PAT_MRT3847_110203C.1
gattcagggaattcgactatgaacccatgctgaactttaatgtttaaggggaaccgaggcgcatcacggggactaaaacataaaagggggaccctaaaccaaaacgggaaacccttctggggggaaaattggactcgacaaacgggaatcacgaaaacccctgaaaaacaaccccctgaaagcacggcccccggaacaaagacccccttaaaagcccccgtgaaggccaaggtccctttacgcggggggt

SEQ ID NO: 11293 - DNA, 340 bp, Glycine max
  Clone ID: PAT_MRT3847_110204C.1
actcggtccttaattcccgtgtctggtccactccttacaatccactcgtttctgcaatgctgatcttagcaaatctaatgattatcacatactgcataaagttggtgatattcactccaagggcattatttctcttgtcttaaattcaattcttacattctttcaacaatttaatatgtttcacctactttaatatttttattatatatatattatcttttatattcttttttcaatttatattttatttttatttatttctatattattaatctttttcttatttattttttatttattatttatcatacttttatcttttttttttctatttattttt

SEQ ID NO: 11294 - DNA, 507 bp, Glycine max
  Clone ID: PAT_MRT3847_110205C.1
gaaaataaaaattgtgtttcaaatagcaactaagtgctaataaattttgtgtgttgttaggaatagaagacaagaaagttgggggctatgaaatataagtcatgggttatcaggtatgtgctatcttagaatctaactttgtttccaaagaaaaaccatgagttctttgttagcccagccatgttacaagcctaaaaagcccttagtgatccacaatatgtatgtatgctttccttaactaagaagaagtacaaaattgggaacattagttcagttgttgactttaaaaacacttagccgagacacttgtgcgctgagggaatcactaaccttgtgaggaatgaagtgttgtaattttgcctcgatgaagtttttattggctaacctttttcatctccatgtgtattccttcacgcttccatcacaagatcaagacaaatgcaagctcaggatcattcagtgaaaagtttgaaaaggtttcgtagttatctcatgtgttgatacttt

SEQ ID NO: 11295 - DNA, 381 bp, Glycine max
  Clone ID: PAT_MRT3847_110206C.1
gttatattataaaaggagtttactaaagatttggaaaaataaatattaaaagagatgacatatcagtaaaattttctatcttcatttaaggattaattaatttttttaaaatactattatagattaattcatatttaagtactcatagttttatatcaatcatcaatataaactattaaagttgaacatgttttatttattttctttgtttaggcaaaataattagatcagttaaatatatgtatttgtttataaaatatttaattaaattatatttatattgagtatttaaatatatgtatttttcctaaatgttattctatataaattatattttttataaattaatatatatatatatatatttgtcaaaaaaaaaaa

SEQ ID NO: 11296 - DNA, 356 bp, Glycine max
  Clone ID: PAT_MRT3847_110207C.1
cgagcacgtgggtaacggtgcttgtagatagagacagagaaacagtgtttcgccgggggtgggaaccggggaggaatggttctggtatgactcaccagacgcaatcgggaatggagaggtttggggtgagagatctgcaccacgccaacggcgccggagatcacgtctccgtcgggattcgcggtggcgccgccctgaagcagccgtggttccggcgatcggcgcgatcggacagatcctctcaccccacgatggcctgtatcactctttgccatttcctccgactagaccgcactaagctcggacttttttacatttctagagacgacctatgtaaccttggtggcgatagtgat

SEQ ID NO: 11297 - DNA, 313 bp, Glycine max
  Clone ID: PAT_MRT3847_110208C.1
tgctcggctgcgggcagccgacaggaggggagaatatttgattcttttcccctagattcatccacagttccggaggagatgaaaatagccgttcgagatggcccgttcgaagcaaactgctcgcaagtccacaggaggaaaggctcctaggaagcagctcgcaaccaaggctggacgtaagtctgcaccaactaccggtggtgtgaagaatccacatcgttaccgttccggcaccgttgctcttcctgtgattaggaattaccagaagagtaccgtgcctttgatcaggaagctgcccttccagaggctggtt

SEQ ID NO: 11298 - DNA, 317 bp, Glycine max
  Clone ID: PAT_MRT3847_110209C.1
cgatctataactagtgttggcactttgcggcagcgccgttcgaagctgctcctgcgtgtaaaatttatttttattttcaaagccgctcgaaggatcatcaaaacagcgaccatcgttactgtggcgtaccgcacgtcctagtccaactccatcaatggccgaatggacatctttcgcggtgtggttcttcttgccgcaagagaacgttatcatcgcgtgccacccaatgctctttacgtgcatctcaaccaaatcacctaactcccgctgaatcgaccaccccttgttgttattgctattattacccgccagattag

SEQ ID NO: 11299 - DNA, 410 bp, Glycine max
  unsure (1)..(410): unsure at all n locations
  Clone ID: PAT_MRT3847_11020C.1
cttnaacaaccaacaaacattggcctggaacattccacagcttgaatcaaaaaaactactcaaactaaccaacacaaaaatacccctcgctagtaacctgccatggattaaagtccctccattaggctgacacacaaagcctatcgggtgaacaaaccaacccccccagccaaaccctgggaaggagccaccacccccactaaataaaccaatcatttagattacgaattaatcattccgaagatgaatggcttagaaaaaacgctctttaatagcttcctttagtaggtgaattgaatatttaaattaactgcctccattaatgggaacacaaaaagcaatgactggcctgcagacccaacatgcacgttcaaagagttgtttggaagggacaaacacttatggtaaat

SEQ ID NO: 11300 - DNA, 538 bp, Glycine max
  Clone ID: PAT_MRT3847_110210C.1
gtgctccccagattgttctattttggcttttataaagaattgtttagatcctttgaattgaagaatgtgtatagctttgtttctttggcaagcccacccactctaccctttccttcttttgaacaacagagatgaatatcacaacaggcctacgaagccagtgtcatggtgggaagatattgatatagttggaggaagagatgagattgctggaggaacatggctggcttgttcaagagaaggaacagctgcttttctgaccaatgttttggagcttccttcccttcctgaggctaaaagcacaggagacctacctgtctcatttcttaagagcggcaagcatcccaaagaatttgcagaaagcctacacatggaacctcattattacaatgggttcaacttgattgtggccgatattccgtcgaaatgcatggtttacatctccaacagtcccaaaggacaaccaattaccattaaagaggtctctcctggcctccatgttctttcaaacgccaagctggactctaagtggcataag

SEQ ID NO: 11301 - DNA, 513 bp, Glycine max
  Clone ID: PAT_MRT3847_110211C.1
aaaaaaaaaaaagtcccccaaagtttttattgggggaaactattggggcaagcataaacaaaggggatggaaggaaaggctttgggggaaaaaacggaccaaggaaaaagaaaccccccaatttttcactaaaaacgggaagagaaaaaaaaaaccctcgcaaaaaatggatatggttacaaccccgggcccaagggccccttattttaaaaaacaggcccccccccaagggcccaacacaagaccatggggaaaaacaaaaggggggggaacaaggggccaaagcagggggaaaacaaaaatattaacccccccccccctgggaaaagggcccccagtcccttggggggggcaaaaaaattaaacatagccccgggttttaaaaccccccacgggatcctgggggattggcccaacgggggggaattttaaacccaaacaaaacagctttttggaggcatcctttccactgggtctaaaaaacccggggggggaatccttgggcaacttacc

SEQ ID NO: 11302 - DNA, 776 bp, Glycine max
  Clone ID: PAT_MRT3847_110212C.1
atggcctatacccttactacggatttataccaaactgagattcttggaatcaattatggaaatcgtcaactcaaatttgatggccaaagcaaagtaggaaaagtgttttttgatagtggcagttcttatacatatttcccaaaagaggcatacttggatcttgttgcttctcttaatgaagtttctgggttaggacttgttcaagatgattcagatactactttacccatttgctggcaagcaaatttccaaatcagatctatcaaagatgtcaaggattacttcaagaccttaactcttcggttcggaagcaagtggtggattttgtccacattgtttcagatacctccagagggttacttgatcattagtaacaaaggccatgtgtgcttgggaatccttgatggtagtaaagtaaatgacggatcctcaattatacttggagacatttcattgagaggatattccgttgtgtacgataatgtgaagcaaaaaatttggttgaagcgatcagactgtggcatgccaagcagtagattaagaaagaaaaataatttcatcccagatagtatgctataatttactaccaaagcgttcataagattttataccttgtattattttgatcctttttcatgctaaaatataagatgccatccacaagtaaaacagcctatgtacagttacagccaaaatatgggaacttagaagaacgattaatcgacaccaaagatagttttatgaatcaatagttatttgacttgttattataaaaa

SEQ ID NO: 11303 - DNA, 143 bp, Glycine max
  Clone ID: PAT_MRT3847_110213C.1
tccacgcgtccgtctatccttgcattccaatttttcagtagatgctattacactggcaccggtctacttccaaatcggcatgggctcaacgatccttatctcgatgattctataaacgctaatcaacttgcaccacaacactt

SEQ ID NO: 11304 - DNA, 530 bp, Glycine max
  Clone ID: PAT_MRT3847_110214C.1
ggctcgaggtggtactacatcctggcgccccctggattatgtgcaaacaacaacatactccgtattctgttattgacacctgctctggatactactgcgaaaactatactcacaacatgaaatacaaatcaaaaatgtggacatacaactggactggctggtacacttaaccaggaggcgcggaccatcgtagaccagcacatgacatgacattttcagatgaaagattcgtacataatggaggcccatctgctaattactatatgtaccatgtaggaactagcttagaccggacttccagaggactcatcattgtctcagctatgactatgactgacctatagacgaatactgacgtttaaatgaaccacaatgggggcatcatagagattcgcatactgaaattaagttctgtgagccagctttagtgtctgtagattcaacagtgacatggtccgataataaccttgaagtccatgtgattaaagactaatggtgcttgcgttgcatcattagtaaactatgacatc

SEQ ID NO: 11305 - DNA, 200 bp, Glycine max
  Clone ID: PAT_MRT3847_110215C.1
atgagttgtgttttttttctcttaaaggcaatgattttgggggtggccgccccccttggtcctagtttgggagtaacatgccggagaaaaaaggtcccgtccaaccaaacacattctttttactatttaattcctgatcaatagtaaaaagaaaagctaaaaacggcacaaacgtacaggcaacacggatcagaaaataa

SEQ ID NO: 11306 - DNA, 446 bp, Glycine max
  Clone ID: PAT_MRT3847_110216C.1
actgcacgtacgtggacccatacgtatgctatggcctgattcgtgtgcggatattgtatattggaatggatagctttttttaaaacgcttgggggttacgactttaacttcctatcttttgcttaggattatataaacgtgatgagggcctagtgaaggcaggtgcattactttgttccaaactacaactgaggacatcaccgactatgctgcttttatcacgattcaatcacatgaacatgatgatgtttgcgtgagaaacaaacacattggtccttcgctgtaaatgattcaagcttacgacgacggacctggaggtattggcgatggaatagtagcagctaaacctaatgcaatggccgctgctgtacacccaaaggactgtgatgatcctgacgacaaccatcataatcggcatgtgcacagtgcactttcgccgatgaaag

SEQ ID NO: 11307 - DNA, 1665 bp, Glycine max
  unsure (1)..(1665): unsure at all n locations
  Clone ID: PAT_MRT3847_110217C.1
taaaaatctctccaacccaaaaaaacgtcatcgtggggccaacgacaccgacaagtcaatatcggttcccattttttcatctcactccttcgatttcaaatacagcctcggaattcggctcgagacccgacccatgtcgggtctctcattcgggtcatcgcaaacacactccaacccgacccgaagcattctctccgcaactttcacgggaaacgaatccctcagcctcttatccgcccacttcctcacgccgccgttcacctccgccgcaatcttcgccgtctccaccacgctaatcctccgataacctccgtcgtcgttgaattcgaacttcaacgcctcttccccgctcagcagctccaaaacaaccactccgaaggcgtacacgtcggtcttcttcgtcgcgaggccgctgatctgaaactccggcgccatgtagcccctcctcccctcgatcctcaccatccggccgccggatggctcgccttcgccggcgacggcctcgccgcagaggtctgacgcgccgaagtggcagattttcgcgcgcagattctcctccgtgattacaatgctcgaaatcttgatatgattgtgaacgaatccggcttcggaatccgaaccggagccggagaaattgtggatgtaatcgagaccgtgcgccacgtcggatgcgatctgcatccgagagatccacgtcttgagatcggtgaagctagggttccggcggttgcggaggcagtcggcgaggctggcgccggggacgaactcgtagancaagaaaaatgacggcgccggagacccacgcgccgaggaagtttcacgaggctgctgtggtggctccggcagatgagcccgaggcggcgactgagctccggaagatcaatttgttggcggaagttgcggcgcgaaacgacgacgtcgcgttggcgaattaccgcagccccaggaggaagaagagaggcgcggggaagagaaattgccggttgcggcgccgatctcggagaagtggtagatgttagggttttcagggagcgtgtctctgagacttgatagagaagcgcggcttgaaattgaagaggttttggaccactcgaagtcgtagttggtgttggagttgttgttgttttcgaatacgtagcttcttgattctgtgattggaacatccctcgtggaggtttcgtagttcgaggaagacgatgttggggttcgtgttcggtgaggacgaggggaatttgtcctttttgtgtttgttcgggttctgggttggatcacgcttgtgctctttttggatttgcacatcgaagcagcgagagattctggctctctcttgctattctgagcatccgaagaacaatttctttcaaacactcctgtctgcttccttcgatgttgtattcttgggcggcgtatttatttcctttgcgtgctgtttggtcagggaaatagaatatagcagctatgaattcaaatgtgcctctcacgtgtggctgctactcatatacctcttactagttctcaccttcaatttcaacattttccacttaggaaccaaaataaaacagttgcgtgcttgggtttgtttaagtgactactgcagccttcaggggcatttgctcccacacactagacactgaaaaattaagttaaacgtggaatttcttaaaa

SEQ ID NO: 11308 - DNA, 257 bp, Glycine max
  Clone ID: PAT_MRT3847_110218C.1
tggatggaggcatctgctgttggcttgctgcgcaagggtggccattagttgggtcagaggcctggagagttgaatgtggagtgcccttctggatttccgcacacagttatttgtgatcgcattgttgacgagatgctcattagctgtagctatgagaaatgactgcgccatgcttatgctcctagtatgactgtaggatcctacaaagcttgtgcatctttgcgcgtgtatggtgttgctaacttcattagtgtcca

SEQ ID NO: 11309 - DNA, 583 bp, Glycine max
  unsure (1)..(583): unsure at all n locations
  Clone ID: PAT_MRT3847_110219C.1
gacttttctatctcttggtggcagaacagcttccacaccaacacttcagacatacccctcgttcttcattctctatggatatcaatagtatatttcattgattcgataactaatgaaatactaatacaagtggatagtcacattaatggtatcggtatcgtgagggttaaaagaaataaagataatttgaaatgatgtttattttttttggccgaatatannntgttgtttgtattaattatttttagggtacaaatattctaatttaagaagaagaaagtattggtaaataattagaagagagagaaatattaattataagaataatttaaaaaaaatataaatttaagaaaaatatattgttattaactaaattatttaatttttgttaattttgataaattaaataattgaatcttatatctgaagtatgattgttatacataaaatagtctttgtccaagagactgtttggcaatgaatatttcagaaataaattaagtttattttcatangacagttaataaaatttagtgaaatgaattaaaaataacttattataagctacttcttcctcttaaag

SEQ ID NO: 11310 - DNA, 352 bp, Glycine max
  Clone ID: PAT_MRT3847_11021C.1
cccatgggaaaaccatccatttttttggggttacaaaaaaaatctctttcaaaatgaaatgaaacttttgaagaaaatgcacccatcaaattgctaagggttcgatttttacaacttaaaaaaccaggcctttttttttagttgttgaaactaagctgggtttttaaaatttaagttttgaacacgtcgccacacagccaaaatccggttttcataccctttccaaaaaaaatttccatttggccttgatgggaaatagctgtttgacctttttcctaggcatcaacttaaatttaccccgcgagcttcctttgaaggctttggatttggacccaaataaggggccttttgc

SEQ ID NO: 11311 - DNA, 289 bp, Glycine max
  Clone ID: PAT_MRT3847_110220C.1
cggaaggaaggcccggactccgacgccacgcggtcgcagtacggctagcagaaaggactacccattgcccactggattcctgatcttcgtggatttagagggtaagctacccttggaatgacctattctcctaattgcggcttctacaattatcctgcacacatgcatgaatcacccaaaggcaaagatctaccttttttttattctacaaaaggtactaccccaacttcctcactagataaattattcctaatctggactagaatatcgactcatatatgcaacattc

SEQ ID NO: 11312 - DNA, 304 bp, Glycine max
  Clone ID: PAT_MRT3847_110221C.1
aaaaaaaaggcatcctaggaatgacttttaaaatcacgggccacaatgacttttttccaaagggtttggttaacttcctccttttaacatctggactaatgttatgggaaaaatttgcatttgaaacaacatttggggcataacttttggaactgaaacatgcagtgaccaacacccctattgggttttcgggcccccttgggacaaaaacaaaaacccttccacccttggcaaaaccaccactttttgatgccagctttttggttattttaacaaactttaaaaccctttcttgccaaaaaga

SEQ ID NO: 11313 - DNA, 317 bp, Glycine max
  unsure (1)..(317): unsure at all n locations
  Clone ID: PAT_MRT3847_110222C.1
cangcnngcgtacgtaagctcggaattcggctcgaggannatntncgccgttnggggatnntcncncagancntggtnnnagngacggngcatacaggcgctngacactaccgccatccacggcttcacgcantcatccgatctcaccgngnacgagtttcagaagcnctacactnatgncaannncgtgcnncccntcatngnatantaccnnnggtggnattncnncnccgtnnnatgtntncccgntnacnnaggatnntgnttcnncagagnangganctnttaangaagttaattacagngtnnatgtgnnt

SEQ ID NO: 11314 - DNA, 317 bp, Glycine max
  Clone ID: PAT_MRT3847_110223C.1
agagtggaaaacttcaagaaaagaactcccacaaatgcctcaatcgaagaaggatttacgaaaattaaagcaaaaacaagatgccgaaaatggaatcgttcatcaaaagaaggcaccaaataccagtgcaaaatgcactcaatgcaacctttcttttagaaccacaaaaagaaatattgaaatatatcaacatgctactgctaagcatccaaatgtaacctttgagcaatgctttcctggagaaaagtataatcctgatgcaaagcaataagatgtaaagtattctgtaaaatgcacgctggaataaatagtccctc

SEQ ID NO: 11315 - DNA, 287 bp, Glycine max
  Clone ID: PAT_MRT3847_110224C.1
ggaaaatgcatttctgataactgaagctgttagaggtgatgggggcatcctttataattttggcatggaaagattcatgcccttgcatgatgagagggcagaacttgctccaagggatgtggtggctagaagtattcacgaccaactttaaaagcgctatgagaagtatgtgcttctcgatataagtcacaaacccaaggaagaaattgctctcccattttcccaaccttgcttctacgtgtattcagtatggtttggacataactcctcgaacaatcccagctgtt

SEQ ID NO: 11316 - DNA, 310 bp, Glycine max
  Clone ID: PAT_MRT3847_110225C.1
agggctgcgcttttttagtctttttttttgttaaaggtatttattccataaatcagtctattataaagcttcaagtcttaaatcatgtggtgacagtatatatgtgcggttgtacaccagataccgaaactgagcccaatagctatctggcacattaaagccattctcaaacttctaaaaggcctatacaccggtccagggcttcctaaaccagaatgaatctgaaagcactcagtaacgggtaatacccagttcttgacagtgcatgctctcatgccaaggcccaattattcacagatcgtcactagct

SEQ ID NO: 11317 - DNA, 749 bp, Glycine max
  Clone ID: PAT_MRT3847_110226C.1
gtgaagaaatctttgatgatccatccacttttgcattgttacaggtgggtttgctttatgctcaacgggatccaccattccttcgtcccatatctaaggggatacagaggtgtctagtgagatggcttgcacagcagtggatgcagctgaattttcacaactggattcattttgtgtggcacagaatgatacgcggacgctattatcgccatttgatggtacaaagagcatgaaagtaggtcaattactgataggagatccagtttgagattttgtccctttcttggaggaaacttatatcttggagatctaaaacactgctgagatattacttattaagtactcagtggaatggatttatttattatcttgattacagtgtcatggcgttttgtagagcttaagagaggttttaacagcggtcaaaatcactatttagagtggtagaaactataaagtgaagaatatataggaagttcatttggtgggttttggaagcagttatatcttaacatcaagtaatcaaacacaaacaaaacctgaaacttgttcctctctgaaacccgaagagtactataaaattataatcagaaacattcaagtactataatctgaaacaaggcaacatagatggaaataaacagagatcaaaagttaatacacgaataattctaatttattgaaggtagctcatcatttttatgtttctaataacagactccatccgctctatggaccccattgatatt

SEQ ID NO: 11318 - DNA, 658 bp, Glycine max
  unsure (1)..(658): unsure at all n locations
  Clone ID: PAT_MRT3847_110227C.1
aattccattctcattttcaaatatcatggggatggttacgagttacatgggaggagctgaggttgcatccaaggggatgagtatgctaacaggaacactctatgatcggatcattaagcagagaaatatccgagaattaaatgagttccaaattgccattcttgatatcttcaatgcaatcaacatggcattgcccggtaagcattatgatgctccagcacacgatgatatacagaaatgttatgaaacatggactaaatctgagggtgctgagaagaaaaaggaagctttcaccagattcatctcagagaatgtgaatctgagcaaagcagatgaatctatgatgatcactgggatagtggctccaccagttgccatggtagctaagagaactgggcaaactgtgcctcagctaagtgttatcaaagccatccctgatgttgcatttgttcctggagctaccattttggctctcattgctattaagctcacaaaaagaatggcattcaagaatatcccatcccttcctcaaaaagaggaggataccccttcctagctttcccttttgatggaaatgtgcattattanatgtttcatgttatttccaaatgcaattaattgtgaacttgacattattgaacaaagatgaattttagtg

SEQ ID NO: 11319 - DNA, 209 bp, Glycine max
  Clone ID: PAT_MRT3847_110228C.1
cgtataaagtgtgatgggtgcaagggttatgtgagggcatggaatacgtctcacagtgaaacgtgctccaaatattctcacaattcgcgctgcacagatttcagtgggggagggttgaatatcttatctagagagttacttttatttgagactctacgatcgtagggcctctacatttgttccccctccttttatggttctttttattt

SEQ ID NO: 11320 - DNA, 314 bp, Glycine max
  unsure (1)..(314): unsure at all n locations
  Clone ID: PAT_MRT3847_110229C.1
cttacgcgtccgcttcttgttgatcgtcgtggtcgttgaggtcttcaattttttttttattattattccgttttcgctgtttttagtttagtcctggatgcaatgcaggataaagacagggtcagtcagttattgttctctgcattttgttcccaaatgaaatgtctatgactttcgtcgtcaagttctagggtaacaaattttattgttgccttgcttgtttttattctaagtataataataacaagcaaggcaacaataaaaatgttctcgcatggacaagttcttttnaaaaaaaaacaaaaaaaaagaaa

SEQ ID NO: 11321 - DNA, 460 bp, Glycine max
  unsure (1)..(460): unsure at all n locations
  Clone ID: PAT_MRT3847_11022C.1
aattatanattttttatatatttcaataattttttttaaatttcttaatcaatattttaaaaatactagtttatatttttctgcctttcttaaaaggtatgacttataagtttctcttgtactcttcaatggcaccaccacttcactttctcttcaaaattcatacattaacaacatgggccactaacaaaatcagaagtaaccctacagtgggcccatcaccatggcccaacccatagaacacaccccaactcgttggatattcccctttcctccatccgactttatttattcacctaaaaatgtttctccctacttttctaaatacacacacaaaaccgggtcctctcttaaccctctgtaagccataagagaaaaaaaaaatgcagctcccccaccaaccctctccgactggttttcaacccgtaggtcccggaaatctaaatccaccactctggct

SEQ ID NO: 11322 - DNA, 158 bp, Glycine max
  Clone ID: PAT_MRT3847_110230C.1
ggtcatgtagatagatctcaggtcggatctgtatcatatacgtataggagccgtcaaatacgaagcgaatatgtatctgcacgtgatctgggacagttctgatgagcgtatgcatgtcttacatgattaatcacacttttacatgtttggaatcagaa

SEQ ID NO: 11323 - DNA, 402 bp, Glycine max
  Clone ID: PAT_MRT3847_110231C.1
atgctaaagttgctttgattgcatttaacagttcgaatactaataattaacattgacgaggaacaacaaaaccataccacatgtacatctcagtcaagaattcatactttgtcccttcaataaaaaaataatacttgcaaaaaaaaaaaaactaacaacaaaaactgaaaggagatagtagttgatttcaacccctcattcaaaatttaacgcttgaaatttgtgaaaataaattttcaaaccattcactaatacgacaattttaaaataatttatcgaaaatcgaaaatagcacctttgtgaccacattaattttcatattttatgtttaatccacctcagttaggcttcaacatatcagaaaacacgtgccaacttaggtaagacgacgaacgttacaac

SEQ ID NO: 11324 - DNA, 1101 bp, Glycine max
  Clone ID: PAT_MRT3847_110232C.1
ccacgcgtccgcgaagattggattctactcagatccttgcaaatgctgttctagaagaccccgaggcacatgctttgaaggaagaaggtgagcgtcttcgacgagagaatgaagggttgacgaaagaacttgagcaactacatgctgatagatgtttagatcttgaagagctagtttatttgaggtggataaatgcttgcttgagacatgaactgcgaagttatcaacccccacctggtaaaacagttgcaagggacttaagtaaaagcctaagtcctcatctgagaagaaagccaagcaacttatacttgaatatgcaagcaacgaagggggcgagggagcgtttctgatatggactctgatcaatggggtcctcttcccaggctttcttttctcacagaccctggagagcgtgaagattattttcctcttgataattcatctgagctcaaagcaaccaacaacacaagcaagtcaaggatttttggcaagcttatgaggctaatacgaggcaaagagagccagaatcaacgcgatcgagctacatctaaagaaaaatcaatgtctcgagaagacagcaataccaactctccacatttcagcttgagtatatcaactggaaccgagggtcttaggagcgagaatgcaactccctctgccacatctagaacttcccttgattttaaccagacaatgagtatgaaggaagaaagtagtagaaattcagatagccataccccaggaagctccaagaatctcagtccaaggagaacaagatcagtagatttcaaaaaccaccttcgttctttctcagaatcctctggctcggagaaatctaatttggtcaaatatgctgaagctataaaagattccagtggaaccctcaaacaaagaacacatagaagatcagcatcgattagttcattttaacttattagctatatgcaaggatcttaccttattctaacagttaatattacagattagcaggtgatttagtaatcaatcctgatgtgcattcaacaacagcgttaggagctgttcaaataaccatgtattaaataaggatgcatttataatcataggcaagtattcatgaac

SEQ ID NO: 11325 - DNA, 253 bp, Glycine max
  Clone ID: PAT_MRT3847_110233C.1
ggttgaacaacttgaacttgctgagcagaatgttaaatttatagcagagttaattgatttgctattgacaactttgcttcctgattggaaaccttgtgtagcaattgatcatttagtttcttctaatggtaaactaactcattcaagtaaacagaaagactcagaattagcaaaatacaggcaaagctcagaagattctagccaaattgtggctgaaattgtaggtctctcaacctcgcctggaagaccggca

SEQ ID NO: 11326 - DNA, 284 bp, Glycine max
  Clone ID: PAT_MRT3847_110234C.1
gatcgagagaaagtgagagagaattacagaccattttccaagacgattacacgaccgaatcaaagccctctttctctccgaagctgcgtttaagatcgtagtaggcttcgattgttctcctctttaagacatactgttctctcgtcgatgtgagggaagagtcgaagactctgagcagcggttaagccaactgcacaggtagtctccaaatagtggagcgtcatgatgacactggatgcgagggtcctgaagggcgccattctttgcattaagaagtgtggctt

SEQ ID NO: 11327 - DNA, 254 bp, Glycine max
  Clone ID: PAT_MRT3847_110235C.1
ggcaggtttgtcattggtgggccgcatggtgatgctggtctcaccggtcgctagatgatcatcgacaccgatggcggacggggtcgcacatggatcgcgtgtgttcgctgcgaaggatcgtaccagtgtcgataggagtggtgcctacatgatgcggcgagtctgttggagcattgttgcctatggcactgtcaggctgggcaattgtgcaagcgtcctatgccattggtgggcccgagcccttgtctgtgttt

SEQ ID NO: 11328 - DNA, 358 bp, Glycine max
  Clone ID: PAT_MRT3847_110236C.1
cggatgcgtgggctctgtatcaaacctgagaagaatcagagctgagtagcttgaaatagtttagttcacacggatgaaaaccatagtttgtcatgataagaactttttgggcactcattttctatatgtactctggtgaggaatactcgttaggtggaagattaataacctgaccttaatcataatatggccatgtgtgggtcatgaataactgccaaacctgatcagagagattagccgactataggatcggagagccgttgctgagtatgggctaatatgcctgcctgaaacgctgcgggagcatagaatatgatcacaaagagaaatttctgccgttggtggtggcaaaaggcct

SEQ ID NO: 11329 - DNA, 743 bp, Glycine max
  unsure (1)..(743): unsure at all n locations
  Clone ID: PAT_MRT3847_110237C.1
cacgcgtccgctctctttacgcaaatanntcatctttctacannatttagtgtcacaacggaattcggtaattgggagactaaccatttttgatcttgggaatcagatcctcaacacaccgaaataagaatcaaagtagcgtgcgtgcgtgaattcgatgatgtctgggtacgttagacgagcattctcgtaccggaacatgctgtggctccgaaactcaggtgttgttcgtggttgcgacgtgtggtctcccattcagatgtgcgatagcaacagagtgttgactcttccggcaacgcctaattttgttgcggaaagtcgcagagcctttgccaaagggcgaaagtcaaaggatgaagggggtgccagtacaattgaagttccaccaaatgctggtcctactatcaaggcaaatgctgtctcgcagatggaggctgcaatggctgcattatcaacagaactaagcaagctacgaacaggaagggcatccccaggaatgcttgaccatatcattgttgaaactagtggtttgaagatgcctttgaatcggcttgctgttgtttcagtcttggatccaaaaaccttgtctgttaatccgtatgatccagagacacttaaacaattagagaatgctattgtttcatctccattggggtttaaatcctaaatcagatggtggaagattgattgcttgttttccaccattgaccaaagaacatatggaggctttgactcagttggtg

SEQ ID NO: 11330 - DNA, 1737 bp, Glycine max
  Clone ID: PAT_MRT3847_110238C.1
aaacaggagtacaaaacagaggaccatgaccctgcatgatgtttaaactctattaagatcttgcttggttgtgcttttgctataaacccaaaccatagagagagggaagaagattccacccttcatttatttcttcatacacgtgtctctgccgctgaaaaattctttcttttctcgctctataacttcattgtttgttttcgatcaacatcatcaaactcctcgcacttgggctgtttttttctcagcttttcaccagaaaaagcttccatttttgctcagatcttcctcttgctcctcctgttcctgggaggatacttgccaattgataaacagtgaagaatagctcctccatatagttttatgaacatacagttacagaagttccaacataaatgggaatcatcactcgcagttctgctggtagaaaaccaagtgaaattatgaggttttttgtgacaacttttattagtatagttttaggattctttataggagtatcagttccaacattgtcaataacaaaggtgcaagactgagtatctctttcctctcctctttatggcatagtttctgcagaaataattttttgtcaatggtttttatgttattggacttgataatggtatgctaacagcgcataacattttgcagttgaatctcccatctggcctgcttccctcaattgatctttcttacattgaagacagatatgcaggtcgccaggcttggtcttttatgaataatggtaacaaaagaagttcatcgcaagttcaattatcaagtgatacatcaaagatttgggttccctcaaatccaagaggtgcagaaagattacctcctggcattgttgaagccgagtcagacttttatttgcgtagattgtggggcaagcccagtgaggatctaacgtccaggccaaattaccttgtaaccttcactgttggctatgatcagaaaaataatattgatgcagctgtgaaaaagttctcagggaacttcactatcctgctatttcattatgatggccgaactactgaatgggatgagtttgaatggtcaaagaaggctattcatgtcagtgttcacaaacagaccaaatggttaggagctaagcggtggtatgccaagcggtttctgcatcctgacattgtggcaccatatgactatatattcatatgggatgaagacctgggtgttgagcattttaatgcggaagagtacataaaactggtgaggaagcatgggttggagatttcacagcctggcttagagcctaataaagggttgacatggcaaatgacaaaaagaagaggtgatcaggaagttcacaaagtgacagaggaaaaaccaggatggtgttctgaccctcatttgcctccttgtgcagcgtttgttgagattatggctccagtgttctcaagagatgcatggcgctgtgtgtggcatatgattcagaatgacttggtccacgggtggggtcttgattttgctcttagaagatgtgttgagcctgcccatgagaagattggagttgttgattctcagtggattgttcaccaaggtcttccctcactagggaatcagggtgaatctcaaacagggaaatcacggtggcagggggtgagggagcggtgtagaaaggagtggaccatgttccagagtcggttggcaaatgccgaaaacgcgtattacaagtccatgggaactgatacatctaattccacagctcattag

SEQ ID NO: 11331 - DNA, 2274 bp, Glycine max
  Clone ID: PAT_MRT3847_110239C.1
ccacgcgtccgaaatacaatcactaatcacagccctttctctctctctctaattaattttcataagtaaaggtggaagaagagaagggaactcaaaaaccaaaaccaaaaacaaaacaaggggtacaaaaaaatagaggagcatgaccctccatgctgtttaaactctaatagactcgatcttgtttggtagtgctatttctattgctataaacccaaaccaaagaagattccacccttcatttatttcttcgtacgtgtctctgccgctgaaaatttctttctctgctttgctcgctctataactttcgactttattttcgatcaacatcatcaaactcctcgcatttgggggtttttttttgccctcagctattcaccagaaaaaaagcttccatttttgctcagatcttcctcttgctcctcccgttcctgttcctgggtttttattactttaatttgacaagcatatctgtttcttatactgaggatacttgccaattgataaacagtgaagaatagctcctccatatagttttatgaacatacagttgcagaagttccaacataaatggtgatcatcactcgcagttctgctggtagaaaaccaagtgaaattatgaagtttttcttgacaacttttattggtatagttttcggattctttataggagtatcaattccaacattgtcaataacaaagttgaatctcccatctggcctgcttccctccattgatctttcttacattgaagacagatatgcaggtcgccaggcttggtcttttatgaataatggtaacaaaagaagttcatcgcaagttcaattatcaagtgatacatcaaagatttgggttccctcaaatccaagaggtgcagaaagattacctcctggcattgttgaagccgagtcagacttttatttgcgtagattgtggggcaagcccagtgaggatctaacgtccaggccaaattaccttgtaaccttcactgttggctatgatcagaaaaataatattgatgcagctgtgaaaaagttctcagggaacttcactatcctgctatttcattatgatggccgaactactgaatgggatgagtttgaatggtcaaagaaggctattcatgtcagtgttcacaaacagaccaaatggttaggagctaagcggtggtatgccaagcggtttctgcatcctgacattgtggcaccatatgactatatattcatatgggatgaagacctgggtgttgagcattttaatgcggtagagtacataaaactggtgaggaagcatgggttggagatttcacagcctggcttagagcctaataaagggttgacatggcaaatgacaaaaagaagaggtgatcaggaagttcacaaagtgacagaggaaaaaccaggatggtgttctgaccctcatttgcctccttgtgcagcgtttgttgagattatggctccagtgttctcaagagatgcatggcgctgtgtgtggcatatgattcagaatgacttggtccacgggtggggtcttgattttgctcttagaagatgtgttgagcctgcccatgagaagattggagttgttgattctcagtggattgttcaccaaggtcttccctcactagggaatcagggtgaatctcaaacagggaaatcacggtggcagggggtgagggagcggtgtagaaaggagtggaccatgttccagagtcggttggcaaatgccgaaaacgcgtattacaagtccatgggaactgatacatctaattccacagctcattagggtgactaaggccaaagttgacttgtacacagatatcattactacccttacgcgtagaattttcccttgaagaaaaatatatattcctatgtaacgttacgtacatgcaatgcaatcacaatagagtcctagctggggaccaaacatcatttcaatgtagaattttgcagtactgaacagtgagtaaatcaagtgaagagaattattattgctgctaatgaaagtgcttataggaaatggaaatgctagtgaatcctaaaattggaggctgacaacgaagttcattagggtttgtatgttgggaatggagaaaacgaaatgtcataattatcatacccttgggatgaggagacaggactattactataatagtgttacattttcttattgttttattctacttgtcagatactggaataaaaatttaaaaattgattttattataaaatgtttaaataagtaggattgtctttagtgaacagaaataaa

SEQ ID NO: 11332 - DNA, 398 bp, Glycine max
  Clone ID: PAT_MRT3847_11023C.1
ggaaattttgagggaagggagcagaataagtcttttacattttgacgactcatgttctgcttggtctgtattgcaaatataaaattacctaaaaaattatgttaatttatctgctgtattgtctttaatgattagtataaattgatataggttgtatattttggtcccttttacattttctgatctttgtatttccttgtgtagtttacaatgcaagaaggatctgtggagggtattgcatggcgggcaagctcgctcacctttgagaatgaaatatatccactcaatgagtcgtgggttgtgtctggactgggtcatgattataaaactgatactcagcccattaagacagcttcggtgctacactacgatgggaaaatgaaaccttggcttgatct

SEQ ID NO: 11333 - DNA, 896 bp, Glycine max
  Clone ID: PAT_MRT3847_110240C.1
aagtaaaaaaatatttattaatttcttaatataagaccattaaaaaaaatcctatctaccagttttgagctctcaacgaatgttgtgtcctaattaagtgtcagatcttagatgctcaacattaattattcatctaatcgatcaatttatccaacaatgtcactgtactactacagcccctcagctcgataagcaataactctccatacgtttttctttgtccaatacagccccttagctccataggcaacttaaaaaatcaaatttcatgaacctttgaaatgtcaagtactaatacattttatgaaaaatcgtgtaataaatgttctcattggacaataattgtatgcacactcttacaacttgaacacactagcagaagatcaaatcagctgggagtaatcttcctcttctaaattttgcacacctcctaagattaaccatgaaaacctcaattaaatttcctaatgcaagaggttttaacttaggaaccaatggttgccactttgggcacatgaacaggaaactcgtgaatctcatccatccaaggatttttctcctttgctggattaatggtcctcaatgcacgccacacagcactgttgcacttgaaccctgaaccaaatgcaatctgccaagtcctgtcaccctttctgatccttcctttagcttcagtgtaggccaattcataccacaaggaactgctagaagtattgccgaacctgtttagtgtcattcttgaaggctccatgtgccaatcaaagagctctagattcttctccaactaatccaacactgttcttcctccagcatggatgcaaaaagtgctcaaaagctagcttaaagtcagggatgtatgggctttatttttcatcttaaacacttttctagccacc

SEQ ID NO: 11334 - DNA, 3131 bp, Glycine max
  Clone ID: PAT_MRT3847_110241C.1
taccgccactgccaggttacctcgggtcccgggaatttccccgggttccgaaccccacgcggccgccgaggcggcggatcttcttcttctcctttcaaattcccacacattcttattagcctaacatactctctcttccaaagttgtttcactttaccaaaaaaaaaaaaaagctttccctttgagaaagaaaacccaaaaccagtcttttgataattttgagcagttgcattccttgttttcttcctttttgggtcccctcaaaagtagtttcaaaagggttcctcttcctccacagatatcatggcagatcataccccgggttcaggaaccgtttctgttgaagcttcttcacaagaaagaaggaaacttccaaactttctcctatccgtgagacttaagtatgtgaagcttggttaccactacttgatctccaatgctatgtaccttttactcataccccttcttggaatagcttcttgtcatctttcaacaatctcttaccaagatgttgttcagctatgggaaaatctcaagttcaatctcctctcagtgactctatgttccagtcttatagtattccttgtcaccttttactttatgagccgtccaaggggtgtttacttggtggattttgcgtgttacaagccagagccagagtgcacttgcacgagggagattttcatgaacaggtctgtggaaactggtgtgttttcagaggagaacttggcctttcagaagaagatacttgagaggtctggtttggggcaaaagacttacttgcccccagcaatattgagtgtcccttcaaacccttgtatggctgaagcaaggaaagaagctgagcaagtgatgtttggagccattgaccagcttctggagaaaactggggtcaaggctaaggatattgggattttggtagtgaattgcagcttgttcaatcccacaccttctctctctgcaatgattgtgaaccactacaagctaagagggaatatccaaagttataatcttggtggcatgggttgcagtgctggactaatctctatagaccttgccaaacagctcctccaggttcatccaaactcttatgccttagtggtgagcatggagaacatcactctcaactggtattttggcaacaacagatcaatgctagtctcaaattgtctcttcagaatgggtggagctgcagttctactctccaacaagtcttctgatcgcagaagagccaaataccaactgatccatacagtgcgtactcacaagggtgcagatgacagatcatatggttgtgtcttccaagaagaagatgagaagaaaacaattggtgtggcactctcaaaggacttaatggctgttgcaggagaagccctcaagaccaatatcacaacacttggcccattagtccttcccatgtcagaacagctctttttttttgcaactttggtggctagaaaagtgtttaagatgaaaataaagccatacatccctgacttcaagctagcttttgagcacttttgcatccatgctggaggaagagcagtgttggatgagttggagaagaatcttgagctctctgattggcacatggagccttcaagaatgacactgaacaggtttggcaacacttctagcagttccttgtggtatgaattggcctacactgaagctaaagggaggatcagaaagggtgacaggacttggcagattgcatttggttcagggttcaagtgcaacagtgctgtgtggcgtgcattgaggaccattaatccagcaaaggagaaaaatccttggatggatgagattcacgagtttcctgttcatgtgcctaaagtggcaaccattagttcctaagttaaacaacctcttgcatttttttgggaggaggaaattaatttacttgaggttttcattgttaatcttaggaggtgtgcaaaatttagaagagaagattactcccagctgatttgatcttgtgctagtgtgttcaagtcgtaagagtgtgcatacaattattgtccaatgaaatttattacacgatttttcataaaaatgtattacgtttactactggacctttcaggcctctaaagaccaacatcacaacactaggacccttggtcctccctatgtcagaacagcttcttttctttgccacattggtggctaggaaagtgttcaagatgaagataaaaccatacatcccagatttcaagttggcctttgagcatttttgcattcatgctggagggagggcagtgttggatgagttggagaagaatcttgagctctctgattggcacatggagccctcaaggatgacactaaataggtttggtaacacttctagcagttccttgtggtatgagttggcctacactgaagccaaagggaggatcaagaaaggtgacaggacttggcagattgcatttgggtcagggtttaagtgcaacagtgctgtgtggagggctttgaggaccatcaatcctgctaaggagaaaaatccttggatggatgagattcatgactttcctgttcatgtgcctaaagtggcaccaattgcttcctaaattaatcaaacatctttttctctttttagtatgattctaaaattaaagaaacttgttcatgaaactgtgcaagatgtagaagagaagttaattactcccttttccagtttctttggtcttgtaacaatgtgttgaatttaaaagagtgtgcatacagttattcccctgttatttatttcattatttccaataaatgtatcaattgaccacctgaaggtgttcaaattttctacaatggaaaattgggaattgataaggttatttaccgcccccgtctctcccctattctcgaccccccttcccttttcccctcccccttccctttcaacccgttccctcttcccctcccctcccccccctccccccctctccatcctccgtttcctccgcgccatcgcctccccccccctccattcccccctttttattttttcactacccccttcccccccttcccatcccttccccccttttttcccccttcctccctccttttttattctcccctctcccccccccctttcccctttccctccctccccctttgttcccccccccc

SEQ ID NO: 11335 - DNA, 101 bp, Glycine max
  Clone ID: PAT_MRT3847_110242C.1
cggtccgtgaattcccgggatcgaacccactgcgtcacgagctggctgagaaacgaccagacagggtaccggcttgcttatgaagaccgacccagaagggg

SEQ ID NO: 11336 - DNA, 377 bp, Glycine max
  Clone ID: PAT_MRT3847_110243C.1
ccccaagctcgacaatcaggtgtgttctcacgcaagtgggcaaacaccaagagttttcagtttctgcactttcttccccaaaagcgccagatctgaagcttccagagctccctagaacgaaccagcgtcaatcaacctgtccactcttttaaactacttccgtcgctcgcttaaatccgtctcttcgttcaaaatgtttggaaaacgctcctttgctagctcaaaagaccgttccggcaagataaccaagcagcaaacgacgaagagatcctttcgcgatgcttccaagcagaagcaggccgtcgccgagaagctcgacacgcgcaaggatagtccgatgatggagggctccccgagccttaccagcgccatcgtga

SEQ ID NO: 11337 - DNA, 1138 bp, Glycine max
  Clone ID: PAT_MRT3847_110244C.1
ctcgcgccggtcgtcgcgcttctactcttattagaagccccgcggttggcgtcttttcgttcgaacttcccttgtgctgtacaaggaactgtattttgtcaaaggaagcaattaactcatggatgcacaaaccaaaaatcaaaggattacattgtgcaggatagctgcatgttacagcattcggagaaagcattgaggaggacacttttcctttctgtcttggtctcagctggtgtttttccaactttgtcgtcttatggcaagacaaagagtaagaatccgtatgatgaaaaacggttgcttcaacaaaatcggcggatacagaaagaaaacaatgcgccagaggacttcccaaattttgttagagaaggttttcaagttaaagtagtatcatcagataactatataaagagtgattcagggctcatataccgagattttgtagttggtcaaggtgattgcccaaaggatggtttgcaggttacttttcactatattggctataatgaatctggccgtcgtattgacagcacttatttgcagggtactcctgccaaaatccgtatgggcaccaagggattagttccaggatttgaggaaggaattagagacatgagaccaggtggaaagagaagaatcattattccccctgaacttggaccaccagtaggaccttcaacctttttcagctcaaaacagtttgaagtttttgatgttgagctattaagcgtacaaaactgtgaaagaagaaccatagccttttactcagatgttgtatgcaattgagacaaggctgccatttgagctgtctaaagcatgaccactaaaggccaaagcacacattattacagctaggaacttagaaatagtaactccacaacctttagcttcttgctttaagtttgaggcaatcatcatttgtcactgttaaagagtttttatttattttctttggaggaaattggccagtgtactttattgctctggtttgtaggttgtaaccttgttaatcatcaagaaagggtatgatattcattgtgaaattggttaagaatttctcagattaggatcctctttatctttattagattgtatgactgatcaatggtagttttttccactccagtccaataaatta

SEQ ID NO: 11338 - DNA, 561 bp, Glycine max
  Clone ID: PAT_MRT3847_110245C.1
cttttctttttcgcatcgagcttaatcaacaaacatgggtacagggaaaccaagaggtattcgagcagcacgtaaattgagaaacctcagaagagaggaaagatgggctgacaaacaatacaaaaagtccaatttgggaactgctttaaaagctaatccttttggtggtgcttctatggccaagggaatcgttttggaaaagattggtattgaagccaaacaacctaactctgctattcgtaaatgcgtcagagttcaattgatcaagaatggaaagaaggtgtctgctttcgtcccaagagatggttgcttaaactttattgaggaaaatgatgaagttcttgtcgctggttttggacgaaagggtcacgctgtgggagatattccgggcattagattcaaagttgtcaaggtagctagtgttggtttggatgcactctatcgtgagaagaaagagaaacccagaagttaaatgttttccacaaaacgaaagaggttcacattcctttattccctaccctgtaaaagttaaatgaatcaatgaagaaggatagtgatccc

SEQ ID NO: 11339 - DNA, 252 bp, Glycine max
  Clone ID: PAT_MRT3847_110246C.1
ctcgagccgtaatctattcattgtttcataaaactgaccaaatataatatagttggagtgagttctgttgttatcaatattataaataatttataatgaaatattaaaaggcattatatataaaaactgagtggccacaggttggtttgggtttaggagatattttggtccaaaccgatcaatgttaatcaacttggattggtttggtttttttgaaaaaaattggcaacttgaaccgaaccaacctgatca

SEQ ID NO: 11340 - DNA, 1463 bp, Glycine max
  Clone ID: PAT_MRT3847_110247C.1
ccagagcatataaccattctttcaaacagaacaatacaaatctccatgcttttataaatcaaactccaaccgatttctctcttcattcagttcattgcgttccctctcttctcttcctctcttctctatataaagtactattaactcccactaaaacccattcctgtctttttcttcttcttccggctctgcatttgcaatactctgttttcttggtttcaattcaatcacacacctccattgccctcatggctcactttacctcctcaggtaaatcagacgatctcacaaaagaagactgtaagggacaaagtgcacttgttgtttgctttggtgaaattttaatagattttgtgccaacagtgggtggagtgtcactagctgaagcacccgctttcaagaaagctcctggtggtgctcctgccaacgtggctgttggaatctctaggcttggggggtcatctgcctttgtaggcaaggttggagcagatgaatttgggtatatgttggctgatattttaaagaagaacgatgttgagacatctggcatgaagtttgaccctaatgcaagaactgcgttagcttttgttacacttagagctgatggtgagcgcgagttcttgtttttccgaatcctagtgctgatatgctacttcaagagtcagaacttgatgaaaatctcataaagaaggctaaaattttccattatggttccatcaccttgattgatgagccatgcaagtctgctcatcttgctgctatgagatttgctaaagaatctggttgcattctttcatatgatccaaatttgagattggcactatggccatcagctgaggctgctagggatggcataatgagtatatgggatcaagctgatatcataaagataagtgaggaagagattacatttttgactggtggtgatgatccttatgatgataatgttgtattaaataagctttttcaccctaatctcaagcttttaatagttactgaagggtcagaaggttgtagatattacaccaaggaatttaagggcagggttgctggtgttgaagttaaacccgtagacacaactggtgctggtgatgcatttgttagtgggattatctatagcttagcttccgatcaaagccttttccagaatgaggagcatctccgaaaagctctatattttgccaatgtatgcggtgcgatcacggtaacagaaagaggggcaattcttgcattacctacaaaagaagctgtttttcaattcgctgcaacataacatcagcactcacagttagttctttgatcatcaaatgtaatatttgtttttaacctatagcttgggtcttgctgagcttcatgtatcttctttatctttggggctgtattttccttatatataataaattcaatttgcattgctctctcatgcaatgtcttgtagcagtaagcacaaagtacagtgacct

SEQ ID NO: 11341 - DNA, 411 bp, Glycine max
  Clone ID: PAT_MRT3847_110248C.1
aagagctttgacggaaatgccgcgacgaagctcggaatcggtcggggcgagcgagggttcatgacgcagggagtcggcgcatgggggaccttttcctgtttccccactgacatccctaccaattacgccacccgtggtcctacagatgtgagcgatacacggtgacctactctctaacctctatctttctttatctgtccgccgtgtatcgcttcacctgacaccctcactgtcccatttattttcaaagcccattgatttcaacccctgttcgcctctgtgccttggaccatgcacgccacgcgcatccagagacgccggttggaggggcccttggtcctcggccaatcgtcttccgtcaggtggcagcctgcgcttcttagcaacgcgctggatagtcctcctgggggt

SEQ ID NO: 11342 - DNA, 850 bp, Glycine max
  Clone ID: PAT_MRT3847_110249C.1
caagccctgatagcaccaatagcaataacggcagcagaaagaaactgaagctcacaaaggagcaatcagccacccttgaagatattttcaagctgcatagctctcttaaccccgcacagaaacaggcacttgctgaacaattgaattattagcatagacgggttgaagtttggtttcagaacagaagagcaaggaccaagctgaagcaaacagaggtggattgcgagttcctgaagaaatgttgtgagaaactgaccgatgagaatctaaggctgaagaaggagttgcaagagctgcgtgcacaaaagcttggatcaacaccactgtacattcaactctccaaggccacaaccttgaccatttgttcatcgtgcgagaaactgttgaagcccaatgaagggaacaaaggagccattaacaaattgcagaacagtatagagttagggggtatctagagggtataaaataaaactatgaggaactcataatttggtgaagggtattggaatgtcagaatgcaattatcaaacatggatagtttagtttaattaatcagcacaaaaaagaaaagtacacaccctcagtccccacatcgaataatttgtatagccatgtaggactgcttgtggtatatatgctaaggctagaatctagatagttaaggtaacttgttgtctctttctagtttctattcattcaaaatacaaattaatcaaaattaaccccctctatttgctttattttgtttggcttgatttgcaaatgaaaatgtgtgagtgtgtacggacaaaaaaaacgtgtgtttgaatgattgaattaggatgagacaaatatgatgatgattcactcg

SEQ ID NO: 11343 - DNA, 406 bp, Glycine max
  unsure (1)..(406): unsure at all n locations
  Clone ID: PAT_MRT3847_11024C.1
ccntncnnnnnnnnccctttnntnntcctnnnnnntcacccnnanccttnnctatcnnctnnnnnatataatntntnnntcncttncnnncnnnntnannnctcnnccccnttnnttctctncnncncnnntnnnctnacnntctcnnnctcannncnacnntntatctcannnncaccnttcatacnttatttntaattnctnnccnnntctccannctcannnttnancannntcttnnnntacaccctntcatntntnttntnnnnnnttcanntctnnantctgtccnctnnccntnnactctccnccctttcnnncacctctcacanntntcntnccnnntacacnntntnntnctnnactcntncncnttncctncnnccnncnnannnntnnnntnncc

SEQ ID NO: 11344 - DNA, 209 bp, Glycine max
  Clone ID: PAT_MRT3847_110250C.1
atacaggtaataggttaaacactacatgcctaaagcacatcaatttgcgaagccaaccaaaatgacggatcacaaaactgattgaatgattttaatactacagtcttcctctggaaacttgcgtgctcatacttatatccccagaccaaaagtgtaacctgactaacctagcactgaacttatgaactttccctgaataccgtattgat

SEQ ID NO: 11345 - DNA, 441 bp, Glycine max
  Clone ID: PAT_MRT3847_110251C.1
cttcgcaaatcaacaacgtctctctctgttactctgaaagtaggtgaccatggatcatcattatcatcgtcatgttttcttcatatatgtgcccatcatcatttgttgggtgcaatttttttgttcagttttgatcctgtggcctatctttaatattattattattttaaatgctagtaagttgatcttattcttggcagttagatcgtggtttttgtacggatattgatataaagttggattttttatatatttattttggggtctttgatttagttagtgcaaccaccttatttttttttatatgattgaagctgtaacccatttttttttaatgttttttaatgctaatatagtgatccaattgtgagtagtagatttttttttgtctgtgtggatagtactttaagattgtattttttttcttcttactgggtctga

SEQ ID NO: 11346 - DNA, 344 bp, Glycine max
  Clone ID: PAT_MRT3847_110252C.1
catttattaccagcaggaccatcaccaacaacgcactgggccggctttgctctatccacaggcccagctagttgaatttgacatgcatacaccgccaagcagccaaccgggcctgggcttccacaatgaaacatacgaggggagcgaggacactccagcagatactggaggaccgacagcgccatgcagagtttgcgaagccgagatcccattggagggaaaagtcaaccagcatgttgcacggagccaacagagcaatgaggtcacaccaattctagccgcacccgcctggcaagaaaagcgttcaatggccatgcaattgccttctcgtttgcaaagcaacc

SEQ ID NO: 11347 - DNA, 109 bp, Glycine max
  Clone ID: PAT_MRT3847_110253C.1
agaagaccaagttgttgacaactcctacggtgaacaactcgggtccctcaacgttctcttccatggctgccaccactgtcaatggtgccgctgccaacatagctgtttc

SEQ ID NO: 11348 - DNA, 502 bp, Glycine max
  Clone ID: PAT_MRT3847_110254C.1
cgcggagctgacatttgtgaaccacacttgatgcacacactattgttataacaatgtatccatcatacacgcgtgtgactatgatgactctctaggagtcgttgatcgatggcacggatgaatgttctacagaccctcttatatactcactcgcatatgtatatgagttgctttctgagctggttatgatgatctgctgactctgacgactctgcgctttacacggcattgttttgggattcatgctaagaaaaagtgggacaaacaaatgctatttcgatctgcagtaaaactctgaggttcaatggggactaaaccacgtaagcattctacaaaaagttattaaaaattgacatgtattataatgtaaacaacttcttagttagttaatgaaatttatgtgacaaaatatcaccacgactcaatcatgtatagatcatttctgagatgggatgatccaaaaagagtagtaccatgtcgaacaatcaggaaatacaggact

SEQ ID NO: 11349 - DNA, 788 bp, Glycine max
  Clone ID: PAT_MRT3847_110255C.1
gctcctgcagcacctccaccgtattcgtcctcaatagcttccttttcagcactttcactatagtatactttctgaacctctgagaatgacttcttcctcttccgcactcgttcttctgctcgcggcgattttcgtcttctccggcgtcgcacaatctccggcgtcgtctcctgagtcccctgctactccaccgaaagccgccactccctcgccttcttcgtccaagtctccacccgctgtttctccgacaccttcaccttccggcgggatctctccgccatctcctccttctttagtaccggcgtcttctccttcatcgatctcttcccctccgtccgatgctcccgcaccgtccgagaatgccgccgtctcgaatggattcgccgccgccggatctgtcgtagtcggtctcgtcgctgccgcctcattgatcatgtgaaccgccgcataggcttatatagaaaatttattatctcctaataaattattctccttatttttgagtttgttatggttttttttttttttcatttagagtttgtataagacgcttagtagtatatcattttagctctatttttattcgcctaataaatttattatttaattcaccttattacttttacattgaattcgtaatggtattcgctatttgcctgtttgttcagtgaaagcaatctccgtgtaatctttcgttatttattattattattatttgtgagagagatttgtgattatgttatgattgttaacactgggaggcttttgttccttattttttgttgtta

SEQ ID NO: 11350 - DNA, 259 bp, Glycine max
  unsure (1)..(259): unsure at all n locations
  Clone ID: PAT_MRT3847_110256C.1
cnatcttacaacttgtagaaccttaaaganagtctgaaaacccgtgattgcaaaagcaacagccaaccactctactcatgcgtagattctgaaggcacgaaaaatgacaaaaacaagaganataaaaataaaactatgcaaatgaaaaanaagggagtggggggtggtgtggtgtggcaaagtgaggtggagggtcggtgaaagctaaaaccaaaccaaaccctttttttttcttctctttttttccattttaaaaaaa

SEQ ID NO: 11351 - DNA, 504 bp, Glycine max
  Clone ID: PAT_MRT3847_110257C.1
ggaaaggaaacgggcccccccaggggggaggccttaattttcaaaaaagccccacgggattaaaaaaaaaaaagttggttccggggggggaaatttggggacacccctcacatgaaaaagcgggccttaggattttcatgggggaataattcaaaggaacaaaacgggggggaaggggatgtaaaagtttgggagttggactgggccccaacgccccggtccccgggaaaaaacaaaaacggggggggggacgtataaaacccccccccggagggggggaaagggggaaacccggggggggggggcccagggtatacgggaaaagcgggcccaaaaaaggggggggggtactgatgccgggggggacccttatggggggggccatggccatgaccaccaaggtttggggtccaatttcccccagggggggccaccaaagaaaccccctgggggccggcggagattaaaaaattccctttttgcccctgggttttgggccttttc

SEQ ID NO: 11352 - DNA, 111 bp, Glycine max
  Clone ID: PAT_MRT3847_110259C.1
aaatgatcacaatcaggtgacatgcggataagtgagtgatcaatgagtggctctgcctgcccacttcggcgctctattctatatatagcgatggcatccaccacacctgca

SEQ ID NO: 11353 - DNA, 165 bp, Glycine max
  Clone ID: PAT_MRT3847_11025C.1
ctcacctcttcttcctcctatacttcatcatcaaacctttctcttactttctatatgggggcgctctcttcctacggcacttggacacctgtataagcgcaccaaaaccttcaccgaagaagccaataaaaaatcccaatccctgaccccttcctacttccggat

SEQ ID NO: 11354 - DNA, 259 bp, Glycine max
  unsure (1)..(259): unsure at all n locations
  Clone ID: PAT_MRT3847_110260C.1
gagagagaganatttataaaacaacactttagagagagaaacacaaacctaaaaaactctccaaaaaccatgcgtccaccagaacttcactcgggttttctgtntttcaattcaatccaatttcgaaacanaaaacgcgtttggtgtgtgtgttcgctcgcancactctcatgccantggttaacggaggcgntccttaaaacaaanntnggggggnaanaacnngggngtcnttaccanaananactcggcttcntnc

SEQ ID NO: 11355 - DNA, 290 bp, Glycine max
  unsure (1)..(290): unsure at all n locations
  Clone ID: PAT_MRT3847_110261C.1
ngtcgcatgcacgcgtacgtanagctcggaattcggctcnagancnccttctgnacttccccaacnatnaantgnaaaaaaaaancnaaaaaaccanaatagtnanaaattttttnaantttcccgncggnggnanaaacaacaaacnttcttcgnttngatttnccggagnactantatcncnannacaaattnaacttnnttttnaaggganangnnatttaanaannccncaatccccaaaaaaaacccaaangggngccggggantggntntntattttancaaat

SEQ ID NO: 11356 - DNA, 497 bp, Glycine max
  Clone ID: PAT_MRT3847_110262C.1
tgtgcattgtcaccctgcaccccgccccccaaatttagtagtagtaatattttaatgatttactgatagtaatacagagttgttatgctgttggctttaaattgcttttgagctatgctaatgctcatttaacttgtctattctaattttaatgcttcacaatcaagccttgtgcatttcaatttgttaaacacttaagcgatcattcagtcctaattcagaattggcatcgatataggttatatgtgacagatatgagtagaccacaatatggagttgttcagatagaacatcagatatacaggggggctacgagtatcatttgcttaggctttcttttatcttgataaacttttcattattttttactttatgggggttatctgctaagtttgagcatattttatcttcctattcagtattcacatcttaggattattcttaccataattgctgtttccttctgtttctgccttcatatgtttatgctgcacttc

SEQ ID NO: 11357 - DNA, 446 bp, Glycine max
  Clone ID: PAT_MRT3847_110263C.1
aattcggctcgagatcaacacttgttctgaagtttcgcctgaagtgtgggcattaggaggatctgtagttgagtttgttttctccaactttgctcttttctttagcaacaacttctgtgatcttcttggcaatattgcatgtgtacctgctgaactggggtttcctagtgttggttgcaagagggtgcttgcttcatataatgaagctattttgtctaaagattggcctctagcttggagttgtgctcccattctatccaaacaacacactgttcctccagagtattcatggggacctctgcatctacagagtcctcctcctttttgtacagttttgaagcacttgcaagtaattgggagaaatggaggggaagatactcttgctcattggcccattgcttcaggaatgaacattgaggaatgtacctgcgagattttgaaatatt

SEQ ID NO: 11358 - DNA, 265 bp, Glycine max
  Clone ID: PAT_MRT3847_110264C.1
tcgagagagtccctcagtcccattgtcgttgtcttgtgtcgccgtgctctagtcgacctctccaacgtaaagaaggtagatgaagtagtagttgctacttgatatggctctacagaggaagcgtcagatggcagtcaaagattctgaattaaggaaaagcttttaagagctctcgagcaattcaactagcttggtatctttcagagataatttcttaaattcctccttgtgattcatcacatgctatatcatcctactgatcctc

SEQ ID NO: 11359 - DNA, 403 bp, Glycine max
  Clone ID: PAT_MRT3847_110265C.1
aactcgtgccgaatcgccgttgtttgctccattcactgtcctcaagaccatggctggcttacccaccatcaagaccaccaattacattacctccattgctaacaacggtggaagagtgcaatgcatgcaggtgtgtccaccagttggcaaaaagaagtttgatactctttcctacctgccaaaccttgatgatgcacaattggcaaaggaagtacaataccttcttaggaagggatggattccttgctagaaattcgagtaagaccacggtttggagtaccgagagcacaacaggtgacacggatactacaatagacgctactagaccatgctgaatctgactatgtattgatacactgatgctagacacatgataaacggacttaatgagagtaagactgca

SEQ ID NO: 11360 - DNA, 414 bp, Glycine max
  Clone ID: PAT_MRT3847_110266C.1
aacttatccaaacggattttacgtgagatggagcgacccgcttacccatggtacctgtgagacaagaaagggggcagtagaggcaaaactgcaagcaaaacggacccccacttgaacaatttggtaatttccgctgccacaccaccaccaaagaaggaaataaaatttgatacgcgtctctatgaggcccatatttcattcctattaccgaccttacagcacatcaatacatcttcaaatccacctctcatctctctctcgcatcacaatttcatcaaaaccttttaagtcttcatagttttccttctttctttctttgtgaaaaaacaaaaagtccaaaccatggctcagaaaaccgagaaagaagaaaccgacttcaaggttcccgaaacgattacggcttgcgttaacaac

SEQ ID NO: 11361 - DNA, 1154 bp, Glycine max
  Clone ID: PAT_MRT3847_110267C.1
tcgacaccaagaaaaataataagattggaatggagaaggcaagcctgtgccacaggaacactcctctcccacttcttaatcgcccttccaattttcttcaattcaagcaccaaaactccttcctcaagttcccgaacccaaacctccatcgactgcgcaggctcaattgctcagtatcagacggcaccgtttcgtcttcgcttggtgccacggactcgtctcttgcggtgaagaagaaagcagcagaggtgtcttctgagctcaaagggacctccatatttctggttggtttgaagagctctcttaaaactagtttggggaagctgctggctgatgcattgcggtattattatttcgacagtgatagtttggtggaagaagctgtaggtggtgcactggctgcaaaatcattcagagagagtgacgaaaaaggcttctatgagtctgagactgaagtactgaagcaattatcgtccatgggtcgactagtggtttgtgcaggaaatggcactgttacaagctccactaatctggcccttctgagacatgggatttcattatggattgatgtgcctctagattttgtggccagagatgtaattgaagataagagtcaatttgctccatctgaaatatctatttcaggatcatacccagaggtacaggatgaactacgtgctctgtacgataaatacagagttaggtcagatccgattctattatttcagttcaaaaagtagcatctcggttgggttgtgataacttagatgaaattacaagagaagacatgggcgctttaggggctcttagggaaattgagaagttgaccaaagtaaagaaaatgcaggaagaggctgcaagaccattttaaccaacttggacatgctcccttcctttacccggaatcaaattggacaatctaaacatttttaaatttgcaatccctgtgttagcttctcaaatttcagttttctttttagttgttttcctttgaaatttcagtcttcctattgttgttgttgttttaagacttactctgtactatagtgttatataggggaggagaaaaatactcctttctgtacctccaatacaacttttttgcctactttttttttcttctttttatcaatgattacttgatttcttcctga

SEQ ID NO: 11362 - DNA, 546 bp, Glycine max
  Clone ID: PAT_MRT3847_110268C.1
aggaaaaaagttgcactgtaggtacagaaaggagtaatttttttctccccaatataacactctagtacagtgtcagtctttaaacaacatcaaaaggaagactgaaatttcaaaggaaaacaactaaaaagaaaactgaaatttgagaagggagcatgtccaagctggttaaaatggtcttgcagcctcttccaacatcttctttactctggtcaacttctcaatttccccaagagcctccaaagccatgtcttctcttgtaatttcatctaagttatcacaacccaaccgagatgctactttttgaactgaaataatagcatcggctgtggcatatccaactctgtatctatcgtatagagcacctagttcatcctgtacctaacatcatttatcagagacattaacaattaggaatttaaatttcctgaaggaagtttgtaaacttgtgccactacacttttcacagcagggaataaacctctgggtatgatcctgaaatagatagttcagatggagcaaattgactctgggcttcaatacatc

SEQ ID NO: 11363 - DNA, 544 bp, Glycine max
  Clone ID: PAT_MRT3847_110269C.1
cttctgactctttaagcagaacaccaaagaggatgcacaatataaggagaatgaagatcccatggaaataaaggatattgtagaagatgcctatcatccaacggtggaagtgtccaatcctagttgggactaccttgttgataaaccccatcagccctctaaagaattcttagctctaccaaatggcaccttcctgtagcaggatgcaaaatggaagaggagcatgcccttaatgatgctaaacaaaagagccttgttatcaagcttgagtgtgtatacactccttatccgagaatcattagacacaaaaaatctttaattctagaagaggttgatagacaaatggagatggacactcttatggcctaacaacttgccgcagaagaagtagcaacaaccaaggaaaaagccaaaaagaagacaaaagggaagaagtccaagaagaagaagaggacctcgtctaatgatgagatgaatgacatccaagaagctattacaaatagcctaagggactcgtcttctctgacttctacttactcacaca

SEQ ID NO: 11364 - DNA, 466 bp, Glycine max
  unsure (1)..(466): unsure at all n locations
  Clone ID: PAT_MRT3847_11026C.1
gagattaaacgtggaaaggagttcagaagatgagaagaaaattcctagtgtgatatatggcattttttgtctaatttggtgcaagatatttgtcttgccactcaatccagcctctgattttcttacttggttgaagagaaattggcagcttttctaagtgctcgtgatgtcctgtggagaactgatataacttgctccaactctttattcattgcttctaactcttctactttttaatgtagtgcttctttcctgatcagtgttatcaatggcagatggcggaagactgaaattctgccatataaacatgccattgtgccttatggcgggcctccctccacaaattgcctatggcagttggcaaaaaaaatccaccacgccattccgccatggcagccccttggccgctatttaataatactattactgattaagttttaccataaagaaacatctaagctntgct

SEQ ID NO: 11365 - DNA, 1096 bp, Glycine max
  unsure (1)..(1096): unsure at all n locations
  Clone ID: PAT_MRT3847_110270C.1
ggtaagcccatgccacaccaacactcctctcccacttcctaatcgcccttccaattttcttcaattcaagcaccaaactttcttcttcaagttcccgaacctgagtccgaacccgaacccgagtccgaacccgaacctccttcgattgcgcaggctcaattgctcagtatcagacggcaccgttccgtcttcggttggtgccacggactcttcttctcttgcggtgaagtctttgttcagaagaaagcagcagaggtgtcttctgagctcaaagggacctccatatttctggttggtttgaagagctcttttaaaactagtttggggaagctgctggcggatgcattgcggtattattatttcgacagtgataatttggtggaagaagctgtaggtggtgcactggctgcaaaatcattcagagagagtgatgaaaaaggcttctatgagtctgagactgaagtactgaagcaattatcgtccatgggtcgactagtggtttgtgccggaaatggcgctgntacaagctcaactaatctggcacttctgagacatgggatttcattgtggattgatgtgcctctagattttgtagccagagatgtaattgaagaccagagtcaatttgctccatctgaaatatctatttcaggatcatacccagaggtacaggatgaactaggtgctctatacgatagatacagagttggatatgccacagccgatgctattatttcagttcaaaaagtagcatctcggttgggttgtgataacttagatgaaattacaagagaagacatggctttggaggctcttggggaaattgagaagttgaccagagtaaagaagatgttggaagaggctgcaagaccattttaaccagcttggacatgctcccttctcaaatttcagttttctttttagttgttttcctttgaaatttcagtcttccttttgatgttgtttaaagactgacactgtactagagtgttatattggggagaaaaaaattactcctttctgtacctacagtgcaacttttttcctactttttttttcttctttttatcaatgattagttgatttcttcctgaac

SEQ ID NO: 11366 - DNA, 594 bp, Glycine max
  Clone ID: PAT_MRT3847_110271C.1
aattcggcaccaggaaaaggagaagaaaaactggtggaagcactttataagcagcaagaaaggaggtgggggtaaagtcagatcaaaattgaattcatcgacaaataaaactcgaagaataaatgttaggcagaataagaagaggtggatggagctcagtgcactgtatattggacaagagattagagctcacaaaggcctaatttggactatgaagtttagtcccaatggccaatatctagctagtggaggtgaagatggtgttatacgcatatgcgtgtaaaaacactcaatacatctagtatttgcttcaatgcagaagacagtgcagctaacaaagtgaaacatgacttctctagttctcagaagaaacactcaagccagtccttcgtcgttcttcccgtaagatttcaaaattgaggaatcaccgttgcatgaattttctggtcatgccagtgatgtcttggatttggcttggtccaattcagatactctcctttcatcttcttcggataaaactgttcgcttgtggaaaattggttgtagtcaatgtctaagtgttttccatcacaaagactatgtgacttgtattca

SEQ ID NO: 11367 - DNA, 435 bp, Glycine max
  Clone ID: PAT_MRT3847_110272C.1
aattcggctcgagacggctggagaagacgacagaagggcgaagtggcctgtacccaaagatcttattgagctacaaccttcatataagcaggataattgggatcctgattggcaatctacatctagtagtaaagtctcgtatctcgtcctgaggttgaaagctttgcgaggaaccaaatcagggacaaacttcaatacagaaaatatcattgatgagatgcatattgagaatagtctgcatagaagtgatgacaaatcatcaattcagacatgttttatgagcagcactaagaccaatttgaaccctgagaaagtcctgatattttctcaatttcttgagcatatacatgtcattgaacagcaggtgactattgcatggtatcaaatatactggaatgtatagcccaatgcattccagcaacaagaagaagtcat

SEQ ID NO: 11368 - DNA, 248 bp, Glycine max
  Clone ID: PAT_MRT3847_110273C.1
tcgatagatgagaagatcgcgtttacttgcatataaaataaggtctatctagtactaatgcagatgtggtatcccctctcatcattgtgaaagctcaggcacataaaacattgaatgatgaaatggcacgaaacatgaagatgactagactgatctgatagggtaatccgaatcctaaggtattggacgtgcacaaatactaaaattcacaggtcaagctacctcgcaactcaaccataatgtcatgt

SEQ ID NO: 11369 - DNA, 503 bp, Glycine max
  Clone ID: PAT_MRT3847_110274C.1
gcctcactgggttgcaattgggccagttccaaacacctactcattggcggcaattactcaaagcacatcatttttttttggcttggtgtaccctcaaaaatttgtaaagtcttcatcttacccttttcatctcactcgctctcttcatctctccatcttcctcttcaccacagtggcacttgtgcagatcctctcgactggaatggtggcggcttcgatcaaaccacaatgatgattttcaaggagcattatggttgcttaaacacaaattggtatctattacatattgagtaattcataataaaaaaatacattatggattgaataatccgtaatacaaatatattatgaaatgcccaatctaaaactatattgtggaggtgacgggtttatattctctttcttttatttgatgaagtagagcgagcttatatgcttttcatttaggggacttttggtacaaggatttttgtttctcattaagggaatggtttttcgcaaaa

SEQ ID NO: 11370 - DNA, 231 bp, Glycine max
  Clone ID: PAT_MRT3847_110275C.1
ggcaaaacatgcgtgggttacatacagcatcttctttggactgactcagaacaggcattgagtcaacagaaaccgaatacgccgggggggtccagataagatttgcatttttttcttcagaagaaatcgaggccacacacagttactcagagctgttatatagtcaccccttcactaccagggttttatcttgcccccaaaaatcccagtctatgtttttctggctttttt

SEQ ID NO: 11371 - DNA, 393 bp, Glycine max
  unsure (1)..(393): unsure at all n locations
  Clone ID: PAT_MRT3847_110276C.1
ggctagtattgccaccattgctgctgtggtggtggagcttcccaatgctcttctatcagaatatcngcctgatgtgcctggaataagtgatcgtcgaacagttgcagctactccaaggcagcatccatcaagcagccgcacttttgctggacatttttcatctggtccaaagaagagtgaactgaagattggagagtcatcagcctttttcacctatgtcaaagcaacaacacttaagagaaacgttgaagagagtgctcatgttgacaatactaccactactgctgccacggcgaccactacagaagttaggatggaagatatgaatcaagcatgtactgaacagggggataatggccttaaaacacacaacaatggagaaatgtttggaaa

SEQ ID NO: 11372 - DNA, 1826 bp, Glycine max
  Clone ID: PAT_MRT3847_110277C.1
ccttcttgtccgcggacgcgtgggagcaaatagggctattttctagatgaaatgggcgtaccagaccaatatgattgaaagatgtcacatctattaatcagatatattaattaggttgatagcttcagctgtttttcatttcatgaggacttctcatatggagatttcatcaatcagagggttgcctgaaatggggataatagaggatcctaacttcctccatcactggcagttaaactctattgatacaactagcctaacaggtgctccttttggagagattttacaaaagcactcattctctgataactcaaatttcaaccccaaaacatccatggaaacatcaccaactggaattgaaagacctgcaaaacagctcagaaataacagctggaatcacaacaaaagtcaacaacagacaccagaaacacaatttgcttcatgctcaaatcttctttcatttgttaattcgaattacacgagcgaattgggactagtgaaacctaaggtggagatggcgtgtcctaaaattgacaacaacgctcttgcagacatgttgatctctcaaggaaccttaggaaatcaaaactatattttcaaggctagccaagagaccaaaaagattaaaacacgtcctaaactttctcaacctcaagaccacataatagctgaaaggaagcgaagagagaagctcagccaacggttcattgctctatctgctcttgttccgggcctaaagaagatggacaaagcttcggttcttggagaagctataaagtatttgaagcaaatgcaagagaaagtgagtgctcttgaggaggaacagaacaggaagagaactgtggaatctgtggtaattgtgaagaaatctcagctatctagtgatgccgaagactcttcttcagagactggtggtacatttgtcgaggcactacctgaaattgaagcaagattttgggaaagaaatgtcctcataagaatacattgtgagaagaataaaggagtcatagagaaaacaatcagcgaaattgagaaactccatctaaaagtcatcaatagcagtgccttgacatttgggagtttcatcctggatataaccattattgctcagatggatatggaattttgcatgacagtgaaggatcttgtgagaagtttacgctcagctttttcatatttcgtgtgaagagttatgcatttttcggtcgtccccgaaaggtacatgaagaataggagtgcaatcaatttatatatagcagttccatatatcaactatattatcaagtttaagttcttcaataataattctgtttccaaggccggtctgcaatgtctgccatccacaccatgtttgctctgaggttcatttttgcagaagggttttttgtagcgatattttcttcttgcatggtccacttgttgacagtgttatattgtcacactcacaccctactgtttcaagagtgaacgtagagcttgttaggcattttttggcaggaagttgaaaagttcaactacctgttttccatctatttcttacctaaatcctgacagacaggcctttgttgagtgacttattatcttcttttttttttttcaagtgttctcgagttacttttttatttgaaacaaaatatgcttgtaaaagtttggttgaaattggtagtgatggaataatcgtacttttttatatcttgtgtatatgctcgacatgttgcatggcctcaacatgatattctgcaaaagcattaatgctaccaatttaagcatatgtaaattgtaggtggtggattaagcttaaaaaaaaaaaaaaaaaaaaaaaaaaa

SEQ ID NO: 11373 - DNA, 369 bp, Glycine max
  unsure (1)..(369): unsure at all n locations
  Clone ID: PAT_MRT3847_110278C.1
attcaggactgaaagggtaatggatcatcccactgctgaaggagagacattaaaaacaacaaatgaacaataaccattacaaaaaaaataaatagtatgctaaaaaagtaaaaaagaaaaaaaaacgtctatttatttaacaatacagaaattccatcattatcagcattcgcccctaaacctaattctcattcccataataataaattataaaatctcatccatcttgaacacgttgttccaaccaccgttcccgttcaagctggacataacaaaagccttctgatattccccgacncgctatatagaaaaattggtctttccctgcagagaaatgagctccatccaatcgcacggttttttaacatt

SEQ ID NO: 11374 - DNA, 1282 bp, Glycine max
  Clone ID: PAT_MRT3847_110279C.1
cggctcgagcggcttgagtagacatagactgaaagaagaagaagaagaaaattgagggttgcaacgatgtggctcgagattatcttcggtttggtcatttacaaattgttccgacgcttcttctacgacgacgacgttttggacattgaaggatccgattcttctgctcttttcttcgtcgcggataggcttaaaaaactgtacggagcaaatgtgtatgtgggtcttcggattcccgatgccgatactgcttctcgacagagcattgatatggttcttctcaccaaacaagagctatgggtgatatctgtgaaaaacttctctggaattttgacaattggtggcgatggttgttgggtctgtgaaaagccagacaaacataaagcagagcgtcaccctgatcctgtggaagaagcaaggaagcaagcttcaatcgttgaatcatatcttgaacagagaggggttgctctgcctgaaggatacatatcttgcaaagttatacttccaaatcctaaattatgtaccattccatgctgatagttttccatctgaagttattacccatgatcaatggatgcaactgaagccagaaccaaagaggatgctgtctagttgggtgaagagtgcctttcgtagtgggaagaaggatatgcaagaatctgttaatcagaatcttgattttgtccttggctcagctccaatatgggatagggtggagcttaaaggcaacaagtatgtattgggggagttcctggaatttaagggcaaacaagaagatgttgaggctttaagacctattagaagatcaaaagttggtcgtatgataatccaaaagacaagcatgtttggactagctccttctaggcttcaagttctatacagcttgcgtgactatagaactgaaggggcatcagaaccagagtggaaagaagtaaccgtcagatcaagtactgagatagtctttcagcctgaaaatgcttcaaaagttcgaaagtttaagctctcttcagtgagctctatgcttcttagcgcttgaagttgcccaaactaaggaaagttattttagggcgctgatttttgcagatggcatccatcgctcgtctatttatattcctcttcaagcatatgtatattcttcgttaagctacatgaaatggatacattactagccttagaaaatatcaatacagtcagatgtctttttccgcgagcttgtattatgtatattttaatataattaacagttttatttacgtgtgaggtttaaaaaacaaatgaaaaa

SEQ ID NO: 11375 - DNA, 1148 bp, Glycine max
  Clone ID: PAT_MRT3847_11027C.1
ccacgcgtccgtcttgattcttcccctacacttcgaatgcatcatattcatatttccccttcaaatccctaatccgcttcaaatccacactccaattccaatggaggattccgagggagtcctcagcttcgatttcgagggcggcctcgacgccgccccctcctccgccgccgccgccccctccggccccctcatcccgcacgactcctccgcggcctcctccgcggtgtctaacggaggccccgccgctcccgccccgtccgcggtggaccccgtgggcggcggcaacgtccccgggcggcggagcttccggcagacggtgtgccggcactggctgcgcagcctgtgcatgaagggtgacgcgtgcgggttcctgcatcagtacgacaaggcaaggatgccggtgtgccgcttcttcaggctctacggagaatgccgggaacaggattgcgtctataaacacaccaatgaagacatcaaggagtgtaacatgtacaagttggggttttgtcctaatgggcctgattgtcgatataggcatgcaaaatctcctggacccccacctcctgttgaggaggtccttcaaaagatccaacatttatattcctacaattataactcatccaacaagtttttccaacaaagaagtgctagttataatcaacgagctgagaagacgatagaagggcaaggaaataattctacaaaccaaggggtgactggaaacccattaccagcagggttaggaaatgcccagccacagcaacaagttcagcagtctcagcagcaggtcaaccagagccaaatgcaaaatgttgctaatggccagcctaatcaagcaaatagaactgcaacccctttacctcaaggaatatctaggtgtgttcagggtcctgtgtttttcaattgagctatgtaaaatctgttaagtatgcttacagttacataaatactataagcaaggtacatatttatgtatcttttgtttgggacattataccattatttgccttatgttgctagtttctttcagtattactgctacttggcagttaacacatgcatttcatgctgtacaatgttggctggttacacacatgttttagtttatttctttcattttctattttcttttaccactaattgac

SEQ ID NO: 11376 - DNA, 648 bp, Glycine max
  Clone ID: PAT_MRT3847_110280C.1
attgaagcagacaccttaacaaggaaggaagacacagtagtagatacggctgcgagaagacggcagaagggggaggagaagactgaaagaagaagaagaagaaaattgagggaggatgtggctcgagattatcttcggtttggtcatttacagattgttccggcgcttcttctacgacgacgacgttttggacatcgaaggatcggattcttctgctcttttctccgtcgcggataggtctctttctttcccctatttttcctttccgattatggcactaatcgatttcaatttcttttcaggcttaaaaaactttacggagcaaatgtgtatgtgggtcttcggattcccgatgccgatactgcttctcgacagagcattgatatggttcttctcactaaacaagagctatgggtgatatctgtgaaaaacttctctggaattttgacaattggtggcgatggttgttgggtctgtgaaaagccagacaaacataaagcagagcgtcaccctgatcctgtggaagaagcaaggaagcaagcttctatcctccaatcatatcttgaacagagaggggttgctctgcctgaaggatacatatcttgcaaaggtatacttccaaatcctaaattatgtacccgtccagca

SEQ ID NO: 11377 - DNA, 684 bp, Glycine max
  Clone ID: PAT_MRT3847_110281C.1
gatcgttgagggtgaatcttgtcattgaatattgaatagggttagagtgggcatttcaataccttgggacatgcaatatttctttgcaattcacagtaggggagaaaataacaatgggagatctaaagttaaacctcacacgtaaataaaacttctaattatattaaaatatacataatacaatctcgcgaaaaagacatttgactgtattgatattttctaaggctagtaatgtatacatccatttcatgtagcttaacgaagaatgtacatgcttgaagaggaatataaatggacgagcgatggatgacatcggcaaacattagcactaaaatacctttccttagtttgggcaacttcaagcgctaagaagcatagagctcactgaagagagcttaaactttcgaacttttgaagcattttcaggctgaaaggctatctcagtacttgatctgacagttacttctttccactctggtcctagatgccccttcagttctatagtcacgcaagctgtatagaacttgaagcctagaaggagctgcaaatcatcccaagttaatcaaataaactgcaaactacagaccaaatcaatacaagtatagaaagcttcctttcttgaatgtttttccctccatcagagacaggttattatcagttgaagatcattcatgtaacaggtag

SEQ ID NO: 11378 - DNA, 155 bp, Glycine max
  Clone ID: PAT_MRT3847_110282C.1
gaaactgcggagtcacatggagagttcgatcctggctcaagaataacggctgcgtcgacaaggattacaagctgaccatacgcgatgcatagctacgtgcatcgagctttcgatacgggtcacctaaatcctattcaccggccgtcggatgggaa

SEQ ID NO: 11379 - DNA, 363 bp, Glycine max
  Clone ID: PAT_MRT3847_110283C.1
ggtgaaagaacgaacggacggagggtgttgacagattaaaaaggttcaacattgcttgctggcgactataaaaattggggtgactaggattaatgcatgctgcacatatatggcgagaggttgcacatggacattatggatgggcaaaaagaaccggatggaacgtattggagcttcaaagattgcaagcgcgtgaatgcacacaaagggatatttggttgggtaccttatggttacaaaacctgtcgattatgtacagcccttggactaagctaacgcttgtggttctacatttaatgtggtggcatcacatgataactgggacggacttattcatagaaataaggcacatggcgtgactcc

SEQ ID NO: 11380 - DNA, 379 bp, Glycine max
  Clone ID: PAT_MRT3847_110284C.1
ggctcgaggaggaataaatctgaagaaagagactgtattttaacacgcattatcctaaaggggaggttcgtatgcaatggagacctctgccaaaactgactccaacgttaatgatatattatatgaaatatccgatacattaccaagggctcagccagctcacaacccagctgggaccgtacttgaagatagacccatctaaggaactacggctgaatcatgttgatcataaatatttgaactgtatgtgcactccccaaccctttttaattaaccacgttttctgaggtttgtatgtactacacactttgatatcactggtatgtggagcttcaactgcaattgacaaaacacaacttgatctagtgcaaaatatata

SEQ ID NO: 11381 - DNA, 1196 bp, Glycine max
  Clone ID: PAT_MRT3847_110285C.1
tccagtttcagcttagctttaaggtatcaagcatatcttctatttctacttcacccctttcttctctctcctttcttcacccacatgagatgtgccttccttttccaacttgtgtactcttcttcttctccttcttcttcttgttgtccacctctctggaagagatgccccatcacttctaccacttctcttacttcttgatgcctagtatcatcattgtctagtttttactgtgttttttttttgggttgttgttgtctctctctttttttatggatcttggggtggtgggtttggagggggtggtgggttcagaaagtggttgtgtgtttggttcttctcttgcttcagatcctgagacaaagcacaagtggtacggatctggtttgctcaagcaagagagatctgccatagctactgaagatgatgagtggagaatttctaaagtggctaaaactgatcatgacatgtcttctgcctccaaagcaatgctctttcagcaaagaaacaactctttgttgagatctaattgctacccttttctctgatggccatcatcaccaatcacaaatgttgagcttctcttctccaaagtcagagtctttgttggtagataaggcttcctcaaatgccacattgcctttttcttaccaccaattgtctagcaacaccagaaatgcaggttacagttcaggaagcataagcatgcatggtcggctcgagggtgtgagagggccattcactccgtcacagtggatggagcttgaacaccaagccttgatctacaaatacatcacttcaaacgtgcctgtgccaacccatctcatacccattagaaaagcacttgattctttgggcttctgcaacttttcaactggactcctaaggcccaacgcattgggatggggaggtttccatctgggattctcgaacaacacagaccctgagccaggcaggtgtaggagaacagatggaaaaaaatggcgatgctcgagagatgccgtagtggatcaaaagtattgcgagcggcacatgaatagaggacgccatcgttcaagaaagcctgtggaaggccaattaggccatgccctcaccaccaccaccaccaccaatacacctaatgcttcctccaactctaccgtggtgccccgcaacaccaccaccaccaccacctttgcacacaacaatgtgcacca

SEQ ID NO: 11382 - DNA, 1007 bp, Glycine max
  unsure (1)..(1007): unsure at all n locations
  Clone ID: PAT_MRT3847_110286C.1
tgatataacnnngctaaacnnnattttactcatcctgttttactttcatagcttctttggcctgtgaaaaaaaattaacaggacaactgctttacacaaatatacactaaaacacatgcaaataaaagaccactgaatagcaaaagcaaacagctcctgttctactttacattcctaagaggtaaccttcagaccatgagatctattatgcgtacacttcaattaatcatttcatattattcaaaaacaaaatctatgtcaatttgtagccttaaacttcaatctgcattttcctatcaggagaggtgaccctaaaaatatgttcttctcctgtgcatttgtccacctgaacaatccaacgactcttcctttgtacaaccttgtcatcattaaccttcacaatattgggatctattttggccaccaacaacccttctccaatgggtaaaaatgatgctttaagttgtctccaccttgagaccctatgcttaacattatatccaaccacaattgccccatttttgttggcacctttaaatgctgctagaaaaacttcctttgcgttggtgatgtcacaatctacaagcacaaaatcagctcctttgtattcccctagcaggagggttttcacatcacctacaacgaactcaacacgatctccatgaactcctagagcttttcttgatgcatctgactcgatttgatcacaacaaatgcacaccacacggccattagtttggtgagcagctgcagccagagcaagcgtggccgaaccggccacgccggcactggacaccatcatgagttgtgcattgttgcctgctgctatagcagatatgaactcagctacatcaggttctttacctcttttggccattttcagtgcttggagataagctttcttggcattttcggcagaccaattagccatgttgttgatgtgtttgttttcctcaaattggagatttctttgggtgcaattttaagctagctttgatatgaaaaat

SEQ ID NO: 11383 - DNA, 887 bp, Glycine max
  Clone ID: PAT_MRT3847_110287C.1
ggctcgaggatctatatatgcatgaacactaataatagaagtctaactataatttttattatttggccaaatgaacatgaccaaagaattagctaaaacaatgccccagctagattagattggttatatcctgtattatataattcaattaaacagatttattattcaagagaaaatcagcatttcttctacagtactgagatttcctccaagagtattttatatataaatcaacattttgaagaagcagcggcagcagaaacgaaatgaaaggtcaacaacagctaaaaaaatctaaggtggtgaaaattgactcaagaaaatcatgggaacaccacataactaatgcaaccaataaaggctaccctgttatggttcatttctctgcttattggtgcatgccttcaatagctatgaatcatttctttcaacaactggcctccacctatcaaaatgttctctttctgaatgttgatgttgatgaggtcaaggaagttgcttccaagttggaaattaaagcaattcctaccttttgtttgatgaatggaggagctccagtggataaaattgtgggtgcaaaccctgatgaattaaggaaaaggatcaattgttttattcaccagaaacattcacccaagtcagtgtgatgatgcttgaacgaacacattgaacagttgccggagctgtaaatatgacccattatgtttattatcttaataaaataaagtactaaataaaattgattccttgtatgtcacaaattccaagtggttgatcttttgttatttgtataagtttcggtgtgtacatggaatagtgtcggtacgaaagggcaagttgctgtacaataaaagggtatttattgtattcattttcttcagaatgct

SEQ ID NO: 11384 - DNA, 348 bp, Glycine max
  Clone ID: PAT_MRT3847_110288C.1
gtctgtgcgggtgggtaccctgattgatgttgacaaaatctaggattgcggtgaagtctgggagttttgtgcccaagaactgtcaacgctctttgaatacgattgatgctggcactctcatgggccccaaggagccgattatatagaactgccactagatcttgaccttcaatctcaacgggaagccggtgttagatgaccacgatctactcgactagatatacttgctgatggccaagaaggagaatgggatggacaggacgtttcttgagagtactttctaatggcacacacattcgtccgacacgattgatcggtataaggagatgattgacatatatcacccaa

SEQ ID NO: 11385 - DNA, 362 bp, Glycine max
  Clone ID: PAT_MRT3847_110289C.1
ggctcgagcttgagccgctcgagccgctctagccgtttgtttttaaaaaaaaaaatgtaccattggatggcttatgacatgcgagatggtagcctcatcaacatgccttggacgggatcgttcatctacacgggggtttacaataactcgtattaaggactctcctggaagaagatgtctttactcatctcggagatagacattattgagcatcaatcttgcatctaaagccttttccataccggcatctttggagcaaaggtaacatgaagggagaagggggatcctgaaactgttgcttggaaattctggagttcctatgactgcactattgggaagtggttgcgcttatgctgctgaac

SEQ ID NO: 11386 - DNA, 179 bp, Glycine max
  Clone ID: PAT_MRT3847_11028C.1
ccacgcgtccggacgatcgtactagagacagcagaggctttttttctcctgtaacgcgcctttctttgcggtcgggttattcgtaatgagaggacgcccccatacagatctagaccattatcacagtttgcacacctgctgacaacaaaaacatcgggcgggctgctaatgtctcgtac

SEQ ID NO: 11387 - DNA, 448 bp, Glycine max
  Clone ID: PAT_MRT3847_110290C.1
cgtcctcggcgctgatcttcaccgtcagtgccttggtgtagctgtcccattgctcctcggtgcgcgggccgacaatcgccgagctgaccgccgtattgttcagcacccaggcaatcgcgaactccaccaggccgacgccacgctgttgggtatacgcctgcaactgctgggcaatgcgcaatgattccacccgccattcggtctcgaggatgcgcttgtcttggcgtccggcccggctgttggcatccggcgcgacatccggggcgtatttgccgctgagcacgccacgggccagcgggctgtagggcaccacgccgaggccgtaggcggcagcggcggtgatctgctcggtctcggcctggcggttgacgatgttgtacagcggttggctgatcaccggcttgtccactcccaggcgttcggccacgcggatcacttcggcaatccg

SEQ ID NO: 11388 - DNA, 191 bp, Glycine max
  Clone ID: PAT_MRT3847_110291C.1
aggcgtgcgaacaggtgagagacgactgaagggggaccgtaatcattgcatcttcacgctccacactggagcgctaaggacgttgaactgctgttactcacacacgccatgggtgaatgaatggtttttgagcaacagcagttaaaagagaaaaggggttcaccgtatatgacatccaatgttacgtaccc

SEQ ID NO: 11389 - DNA, 487 bp, Glycine max
  Clone ID: PAT_MRT3847_110292C.1
ttccccacgtgtagcagtagcaccttcttggggggggggggggggggggggggggggggggggggggggggggggggggggggggggggggggccatatggcccctaaaagggtttactggacggcagacaggttgtttaactgccctttaaaccggggaagacaatatattttggggagctagctaatcccgaaagaatgctgcgaggataaagccgggaattggttgggactgtaaaccaaataagtccgaggccaaaattccggggatagatgggaagttttttggcgggagtccccaagcggcgttataaattgggccttcaaggttccctggatcgatcccgctggctaaactgagactttggtgaggcccgcattgaaagggaaggtatgccttcgtcggggataatcgacggatgcccaaaatttgccgcggatttaatggaagtcttggccacaataggttttgggtcctactgccccg

SEQ ID NO: 11390 - DNA, 604 bp, Glycine max
  Clone ID: PAT_MRT3847_110293C.1
ccgcaaaaaaaaaaaaaaaaaaaatttttttttaccaaaaacttccaaaatttttaaaaacttaaaatgcatgatgaacctaatattcaaatcaagccttgcacctaaaggaacaccacaccaccaaaatccacattttaattaacaaaaaattttactggccagctgatgaatttgtcagcaactcaagtaatttcttcaaaaattcaactgcaactagaaacataataaaatgccaatgccccaacggcaaatcttgaagccttgtgtgcctctgatattttttcaggccgctggactagaactaactgtcctactggtatgcctaacaagttgttggctaaaattacaaagattcattactgctactgggttaagcacttgatgaatggttcgtacttaccgaagccgactggaaaaaatatgaaacatctgatccttgataatgagtatattttgatggaactgaaagaaggcagatttctgaaaaacttggataaaactgaaaatggggataacaataacaggaactttcataaaaagggtacttaagacctaaatgctaaaaattttctgcccagtattgctgatgattgtagagctc

SEQ ID NO: 11391 - DNA, 379 bp, Glycine max
  Clone ID: PAT_MRT3847_110294C.1
gaccttcctaacttggtgggtaaattgttcttgcatcaactctgctttggactttagtactacgctcctagctgcacaagcatctgcagcagcttaagagactaacaaggaggcaagagaataactacaagagtacaagattctccctgatgatggggcacaagtatttgtggttggtcttttgcttgtgggctttaacatgctcacttcttccttctttctcctttggactaatgagaattggtttgaagaagagagatctagatcttgatagtatcagagcagctagaatggtaagagaaaagccaagattaggcagacctgtgttgggtgcgtatgatcacgatcttggcaaaccaattgacgagggcatagtacc

SEQ ID NO: 11392 - DNA, 368 bp, Glycine max
  Clone ID: PAT_MRT3847_110295C.1
gggtggtggactttttttccttacaattttttttttttcttttctaaaaataaaaaaaattttttccaccccccaacgggaaggcaagctactaaataaaaccaacaaaccaaggccgcgtacgaatttaataataatccgtccaaaccacataaaagtgcttttccatcccgggaacgactaatttggggcccaacaaagcaaaagaagccttggatccgcttcctttcttcccccctgcttggaaaaaaaacccttacttatttttccccccgttaaacgaccaaactctcatattttcgcgcgaacagctactatcgtcccctcccctcgttaaacagggcgaaagcaaaaacacctggatgccc

SEQ ID NO: 11393 - DNA, 434 bp, Glycine max
  Clone ID: PAT_MRT3847_110296C.1
gagatcacatactgaaacgggtttgttatattgttacttgcaccaccatgctattactatggctgtcagaagcccatcacatcgcatcatggctagcaccaagcctaatcagatggtttgcaaagtacacacaccggaggaatttgtggtcgcaccaatatctacagggatagctataacatatctcatggcagctgctgcgtgcggttcctaagcccaccctgctgatacagctgatggggaagctatctatgaggtggacaagccgaagaactgcacccatcgcgtgtcctacaaggcaaagagcttcaaactatcctgctgctcagagtggaagacacacaccgaggccgagcactcagatcaggaccgttgatatgaggataacagggccacacccacccacgcggatggcatgatcgctgccactgata

SEQ ID NO: 11394 - DNA, 1217 bp, Glycine max
  unsure (1)..(1217): unsure at all n locations
  Clone ID: PAT_MRT3847_110297C.1
cgccctaactgaaactcaaaaggtagcataagcgttagcattgctttccaacttgcacttccgtctcctttcagccttgaggattcagttctgtcttcaacttcattgtttctgtcgccttgctttgcttttaacgttaacctgcaattgcataaactttcaataactcagtgctcacgcttcaattacaagctttggtttttcacttcacgcttgaaacccaatggcagcctcagctttctccaacacattggtttctcccatttctcttccatccaaacccaaacccaaagccatttccttgcaacccaaatttccacttgtcaaattccccaaccccagatcccatcccttgtcgaggaaaacgacgtcgctcaccacgttttgttcctccgatgctgccaatgctcctcaacatgacaccccaattgaattaaggtatcccgcattcccaaccgtcatggacatcaaccagattcgtgacattttgccccacaggtttccttttcttctggtggatagagtgattgaatacaatcctggagtttctgcagtggccataaagaatgtgacaataaatgacaacttctttcctggacattttccagaaaggccaatcatgcctggtgttctaatggtcgaggcaatggcacaagttggtggtttggtcatgttgcaacctgaagtgggaggttctcgtgaaaacttcttctttgctggaatagacaaagtgcggtttcgtaagcctgtgatagctggggacaccttagttatgagaatgacacttactaagctgcaaaagcgatttggaatagcaaagatggaagggaaggcatatgttggaggtgaagttgtgtgtgagggtgaatttttgatggcaatggggagtgaataagtagacacattccttccaactggaatagagttgattttctagcatcttttaatttaatgcttctgccttttaatgcagaacatcgtgaacatttaatttaatgtatgcattttcaatgaaatttatctaagcattctgttctatttctatatggcttcgctttggctattcagtgcgaaaattatctttgatggatgaaaacttggcatttgaacttgtgtggttgtatccccatttgtttcaaagtatttgtttatggcaattcaatccttgtggacatttttttaccctnnnnnnnnnnnnnnnnnnnnnnnnnnnnnna

SEQ ID NO: 11395 - DNA, 298 bp, Glycine max
  unsure (1)..(298): unsure at all n locations
  Clone ID: PAT_MRT3847_110298C.1
nnntntangacgtcgcatgcacgcgtacgtaagctcggaattcggctcgagnntanagctgtntcgttccacaggtgtncccattntccaatggnancntcgaacacagagattngnnttcangngaaaaggggatcaangcatngangnntnatagaagtactnactnatggcnggncaaaaatgtatngncntgnaaggngacanncangagctnatgaangtanggatttcnatctggcctccctaggtaacgttattnngtnccngggngggnncccagggctcntgantttng

SEQ ID NO: 11396 - DNA, 2063 bp, Glycine max
  Clone ID: PAT_MRT3847_110299C.1
atcaacatgaaaccgatgtagaaatgggcacaactaaatgtggctaatttattgcagcaagcgtaccaaacattttcctgagtacacttgtggtgtggggtgtactatttaatatttagagcaagtgaagtgagaaaattgaataattgattcgtttagggatggagggattaggaggactgggccacctttttgtgacaatgtttgtgtcggggtttggtggtgtcatagttcttccggcaatcaccgacgttaccatggcagcactttgccctggtcaagatcagtgttcccttgccatttacctctctggcttccaacaagctatggctggagtggggtcagtggtgatgacaccattaataggaaacttgtcggaccgatatggcagaaaagcgttgctcacacttcctctcactgtctctgtcattcctcaagtgatattggcatatagcagggatacccaattcttctacgcgtactatgtggtgaaaactctggctgccatggcaggcgaagggtccttccactgcctggctcttgcatacgtggcagacaaggttccagatgggaaacgaacatcagcattcggaatacttgctggtgttggatcagcatcgttcgttggtggaacattagctgctcgtttcctatccactgctttaacatttcaggttgcttcagtcttgtcaatggttgcattggtgtacatgagaattttccttaaggatagtgtacctggtggtgccatcagacagccattattgaaagtggtcgaggaatcatgtgctgaggatgattcaacacccaaagtcagcaggaacatttaagaaacttccatcgctgggggatttgatttgtttgctcaggtgtagtcccacattctcccaagcagccatggtttcgttcttcaatagtcttgcagatggtggcttgatggctgtattgctgtattatttgaaggcacgttttcaattcaacaagaaccagtttgctgatttgttgatgattactgggattggagccactcttgcacaactatttttcatgcccattttagtgcctgtgataggagaggagaagctgctctccacagggctcttaattagctgcataaatgtctttgtctacagcatagcatggacagcatgggttccttatgctctagcaggttgctctgtgtttgcagtttttgtgcgcccaagtttatgcagcattgcatcaaaacaagttggacctactgaacagggaatggttcaaggatgtctttcagcaattagttccttcgccaacatcattgctccattaattttcagtccactgacagccttgttcctgtcagaagaagcaccgttttattttcctggcttcagtctaatgtgccttgggctagcactgatggtagcattttttcagagtctaataattcgtgctgttcctcctattgcgggtggcaaaattagcagtaaccgctgcacggataccttggtctgaggaggagactagagtgtttcagtcaataaacataaactctttaagtttcattttgcctcggcaaaaatgtggttcatagcatatcagacgataacttagaaagatagcaaaaggaattgcactgtaagtgtagattctagggtcgacatatatgctttggcacttggagataaagaacaccaaatagcaaaatacagaaaatagaacatgaagttggttctgaaaaataataatcaggtgaatcaactgcagaagcacagatttctttacagttatgaagaggaaatgtggcacatattaatgaatcatagggtctcatcagttacatattaaccattcaaacattgcaatttgcaacattaaccattgtgtgtaagcacacctttaggccttagccagttagccatatgctgcctacatttctagctagtatatttttcccaagtttctttgcgtagtcattggtcaaggactttgtaattttcatattttatgtaatggatggttgagttttgaagtatatgaatttgaaccctgtaatgcaatatcgactgattttactatttaac

SEQ ID NO: 11397 - DNA, 1057 bp, Glycine max
  Clone ID: PAT_MRT3847_11029C.1
cggaattcccgggtcgacccaggcgtccgcttggatcagttggagattgtctgagtctacgagatactacttggtttggttcatcatcaggttctatagttatatgctctaattgattcaccttcattcttttcttatgttgtataaaatgattatcatcactagaggcagatatttcgatttctgaatcttgcctgctattaatattgtattgatctcttttcggtcatctgatccagttcctttttctgtttcttgttctgtcgttggttccgtgcaaagtttcattgacattcctagtcaattattgttgacttcatagaaacaattttcacctcttgaggtacatgtcttctaatttcttggtcgagttcaacatgaactctcttgtgcaaaactttggtggtcctatctcagtattttcaaatcaggaccaagtagagaaggggtttgactttgagtttgatgattcatcttccccttcttccggcacaagctcaggtggagaatccacagaggtaaccaaatattccaacccaatcctcagatacataagcgacatactcatggacgaggaagacgacttggagcgcaaaccctgcatgttgcaggaatgtttgagactccaggctgctgaaaaatccttccatgatgcccttctccatcaaaacccttcttcttgtttctctgatgaaaattatggtcgcactgttagctttgagagctgcaccactgataattcatgtgagtctgaattggtcaacggtgttggtgaatttgattcttctttcttacaactacaaacccctctggttcatgatccatttggggagtcacaagctgctggctattttcatgacggaacctggaatctcttccagtctcagtctcagaccaagccactgatggtggaagagggttcttcagcttcagcaccaagagaaaagagaagccatgggatggatgattatgcttctcatgaacaggaagggagaagaggcagcaaggtttcagccgtcttttcggacgagtcagagtcaccagagatcttagatga

SEQ ID NO: 11398 - DNA, 738 bp, Glycine max
  unsure (1)..(738): unsure at all n locations
  Clone ID: PAT_MRT3847_1102C.1
ccacgcgtccgcatttttgtctgtggggaaaacgaaactctgtttttctttcttcctaactggttcaaggaagtagcatggcaggagctgcaccaccacccaagccggaagagcttcagccacaccctgtgaaagatcaacttccaaatgtttcatactgcatcactagtcctcctccatggccggaggcgatactacttggtttccaacattacttggtgatgcttggcacaactgttctaataccaaccactcttgttactcagatgggaggaggaaatgaagagaaagcaaaaatggtccagactctgctgtttgttgctggcataaacacatttttccaaacactatttgggactcgtctacctgcagttattggaggatcctacacctttgtgccaactaccatttctatcatttttgctggtcgctacagtgacattgtgaatcctcgggagaggtttgagaggataatgcgtggaacgcagggtgcgcttattgttgcttcgaccttgcaaattgttgttggcttcagtggcctttggcgcaatgtagtgaggttcttaagccctctctctgctgttcccttggttgctctgtcaggctttggactttatgagtggggctntcctgtgcttgcanaatgtgtggagatttggctgccggaaatcgtattcttactagtattttcacagtacatttctcatgtgatgaaaggagaaaagcgtatctttgatc

SEQ ID NO: 11399 - DNA, 596 bp, Glycine max
  Clone ID: PAT_MRT3847_110300C.1
ctttgacttcttctcttttcaattagagcatttcttttgtccacttcctttcttttcttctctcgttcatcatccattcgagtctgcaatatagaaatctgaatctcaatatctttttcttccttgtccaatgcagaaatcgaatccttcaacttggtgtaagaagctttcatggaagaagcttctttcatttttcttctagtctcgacctctcattctttgtatccacttccaaggtcgcaagacctaccttactgactagaaactttctgtaagatgcatgtccatttgagaagatcgagttaaaagcattcaaagtttctttgttagatttaggcatgatgttctcatatttatcaaattcaaaaagaaaatttcctaatttgttttcaaacatcgggaagcgagagaaaatatttgaggtcttgataaactcgatgaaaggttgtgcgaaattgatcccaaacttcttgatattcataaacattgttgggttgatttgcattgggttctgaggcaactttagtttgagtttcataacttttccatctatgcaaaattgtgtaatcctcatcatctaattcgaacatgttgct

SEQ ID NO: 11400 - DNA, 140 bp, Glycine max
  Clone ID: PAT_MRT3847_110301C.1
ttttacctatatatagacattgtgagattcggaccaaaatatgctaatttcacatgaaaaggtgcaagatctaaatgtgacttgtatgatagagggcttacttttattatactaacgccatgagactcttgaacagtaaa

SEQ ID NO: 11401 - DNA, 715 bp, Glycine max
  Clone ID: PAT_MRT3847_110302C.1
ggctcgagtgagaaagttgcattttggtatttattggattcgttaaatggatattgaatccacagtgtagagctgagacacatttttcagtgtatacttcttgttacaatttttttttggtcttgttttccttcttgttacgttgtgtatttatgattctgaattgcctgtttttttaaacatcgtcagaggggctttgatcaacaatggctatcattaacattctcaaaggctatatttcttggaaatggtcttgttgctattttgtctgggctgtttggaaatgtacttgttgatacattggctcttggacctgtggccccctttgatgctgcttcatgttttcttgctattggtatggccatcatactatcttcatggtcagagaatttcggggatccttcagagaacaaggacttgcttacccaatttaggggtgctgctgtggccattgcttctggtagatttcttaccttaaaatttattttctcattttgatactgtaaatttgaactttgaaactctttatgtgtgatgttaatctttttaacattttacatgtaaaaaatgtgagcattgttgtaaccaatagtagttgttagttaagctaccctaatggaattgatcgatcaaagttgttcttttgcttttcttattctgttatcatttatttgtattcatctcttgtcttgtattcttgttcatattgtacttc

SEQ ID NO: 11402 - DNA, 495 bp, Glycine max
  Clone ID: PAT_MRT3847_110303C.1
gcgccactgtccagtgcgcgcgtcaagcttgcttagctagccgccatggcctccctcgccgccgtctccgtgaagcccgtggccatcaagggtctcgccggcagctccatctccggaaggaagctcgccgtccccaggccgacggcccgctccatccgcaggccccgcgcagccgccgtggtggccaagtacggcgacaagagcgtctactttgacctcgacgacatcggcaacaccaccggacagtgggacctctacgggtctgacgcgccctcgccctacaacccgctacagagcaagttcttcgagacgttcgcggctccgttcaccaagagaggtctgctgctcaagttcctgctgctgggcggcggctcacttctggcctacgtcagcgccgtggcgtcaccggaccttctgccgatcaagaagggaccttatgagccgtcgtagccgggcccccgcgggaagatctaagctcagcttctccatttgcat

SEQ ID NO: 11403 - DNA, 707 bp, Glycine max
  Clone ID: PAT_MRT3847_110304C.1
gaagacgacagaaggggatgccaaagctattttataggccaaattgccgaaactggactacctcctagaataaatttcatttttattttttttgttcaaggccaagaattcaatggcaggtattgcatctggaatcagcacccttgccattggctcaggtgatgctcgacggcgtccagcacaagcccaatccactcccaacactaacactaacacaaacactaacagcaacacttcttcttctacgccatcatctgaagggttcacttatttaaattctgccaagcaagatataaagggtcttaccaaccagactggatacgttaaaggcaacgctaatggggtcatcaactttgggaccctcacagcctctgcttctgtccaaaggcaatgaatcccttaacaacaaccagcaagaatgaagaacatatatacatatatatatagctgcaggcaactcaataattaactaaataacctctgctgtcgttgccttaatttatatcattttgattttatgttttactcgccaaaaccatcatagtaggaataatcagatatggatctactactactaattgtctaagtttaaaattttatagatattgctcttcaattaggtttgcattatttttgtttctgttgatacttggatatcgattagtggttatatataacctcgtacaacattaattaatgtttgtaag

SEQ ID NO: 11404 - DNA, 528 bp, Glycine max
  Clone ID: PAT_MRT3847_110305C.1
ctcaactcggcacgatatgtctttccaattacaagaaatgtactaaaattcaccgcgatagagatcatgcatgaaagaataatgaccatcgtcacttgggttgtgtacttgaaagcagagacatttaggttggtcaaaagtttatccaaatatggtccaaagattaacaaggtagctgattgatatggacatgtttgatacaaaagttgggtagaagaaaccttaaacttcttctgaatggtatttgtcataatctgagcaacgcatgttgtaatcaccgcgagcaaagataagaaagagcccaaagcattgagttgcagatcagtaacggttgcaattccaacacccagaaggaggatagaaagagaaaattgcactcttttactgaatttcttcccaagaaaaaggatctccaatagaatagtgcatgggatgattgccaactttgtcatctgataaaagccaacagaattgaagcctaggctcaaattaaaagaccacatagatttccattaagaattcacaatc

SEQ ID NO: 11405 - DNA, 3056 bp, Glycine max
  Clone ID: PAT_MRT3847_110306C.1
ccgggatgggtctgtgactttgcaatgtagaatatccagtgttgaagcaggcacgcgatacgtggaataatcgtggacagcttggatcggaatcaagggtgtgatgtggtcacaccccaatcacatcttaaacatcagctcgtttctctatatactcaaggaataacacaggtttatccggggtgttcctttagatgtggccgttatttcgtgtgcaaagagcgtgatcccaaagcattcttcaactggatgaggatcataaatagtagtagcagcatattcaagatgacatagttgtaataatagtgttttcagcgcgcatcactctttctttcgctttctctctcttcctcgttcgcttctctccccgaaatggagcagtctctgctgagaggcgaaagcagtgaccagagtaaccggtcgcggggaatattccggcgctccgatgctatcacctacggctccaactacgagaaagccgctgcgttcatcgatctggctgaagatggtgttggtctccctgaggaaattctcgactcaccaaacttccaaaattacataagattttactttatattgaataaatgcaatttaatcgaaaaagcacgtcatcaattttttactgaatggaattattaaatcatactggcaggatgctataatctaccgggacttctatatatctacagagagtatttctaattggtacttttgttttatctgtccattgaaatctgtcttgtttatcatgtattgtaatcgcaacttgttattcatacatacactgtgttcaatgttttactttggatcccacatatataggtaaaatactattaatcaattgaaggttttctctctattagtgcttgttgctgatgtgctgctctatgcccttttcttgtctccactggcttttgattttctacctttcataatggcaccttatatcagagttgttctttttgttctgaatattagggagctacgagaaaccatcactatcttggttgggatgcttgacacatacttaaatgtcttggctttgtggcttctgtttcttctttttgctagttgggtggcatatgtgttttttgaggatacaatacaggggaaaacagtattcacttcctatggtactacgttgtatcagctatttcttttatttaccacatccaataatccagatgtttgggttcctgcatacaagtcgtcacgttggtattgcctgtttttcgtactctttgtgctggtgggagtttactttgttacaaacttgatccttgctgttgtttatgacagtttcaagagtgagcttgtaaaacaagtttttgagaaggatcgtttgagaagaactatgttggacaaagcttttgatctcttggatacgcataaagttagtagtctcaacaaaaatcaatgcattaggctctttgaggagctgaacaagtacaggactttgccaaaaatctctcgggaagactttgaattaatatttgatgagctcgatgatagtcatgatataaagattaacaaggatgaatttgcggatatttgcaatgccattgctttaaaatttcagaaggaagatgttatgtcttactttgagtatttagcattctaccattcacccagctcaaagagattaaaagaatttgtgaggagtcctatgtttggatacctagtgtcctttgttctcgtaataaatctggttgctgttattattgagacaacgcttgatatagaaaacaattctgctcaaaaggcgtggcaaatggttgagttcgttttcgggtggatatatgtaatagaaatggttttaaagatttatgcatttggatttgagaactattggcgggatggtcaaaaccgctttgattttattgtcacggtgacaattgccattggagaaactgtaacttttgctgtacctgatgatgatcttcctttcatctcaaatggagaatggattcgttaccttcttcttgcaagaatgttgagattaataaggatcctaatgtatgtcaagcgataccgagcctttgtggcaactttattgactctcataccaagtttgatgccatacctagggatcatattttgtaccttgtgtatttattgttcaattggagtacagatttttggtggaatcgttaatgctggaaaccccgaattggaattaacagctcttgctgaaaatgactatttggttttcaatttcaatgattacccaaatggaattgtgacacttttcaattttcttgtcacggcaacctgggacgaagttatgacgagctacaaggaattaactgggacttcttggacttatttgtacttcattagcttctacttaattactgttttgctgcttttgaacttgattattgcttttgtcttggaggcattctttgccgaaatggaacttgagtcatcagaaacttgtgaaggaaatggcaaggaagttgaaggagataaatatcgaaagcgatctattggcacaaaaacacgaagccagagggttgatgctcttcttcatcatatgctgagtgctgaattgtgtcaaaatgagccttccagtacacaaacttcataaatcattttgcagaatgcacgaaggagcccacctcattctgatctttcatgtggtttgcatctcgtgtgggtgtaccgtacggtagacaagagagcatgcaaacatatagtaatttgcatttcccttgtttgtggaaaaagcacgttatcaattctgtgctgaatgaaattattaaatcataaagtggcaggatgctatattccacgggactactagatatctgtcttttttatttggtacatcgatatctatcttgttagtctgtgttgtaatggcaacttttttttttaatctgccagggtttgatttttgcatttatatactatcaatacagtttggtagctgcgcaaactgtttgtaagttatcttaacgtagctgtttggtgcaaccgttcaaggacatatgtgatatgtgcttggatttgattttttgcaattgaatagtaataatttagtaatataaaaa

SEQ ID NO: 11406 - DNA, 982 bp, Glycine max
  Clone ID: PAT_MRT3847_110307C.1
aattaacagctcttgctgaaaatgactatttggtttacaattccattcgggtaatcattgaaattgaaaacccgaatggaattgtgacacttttcaattttcttgtcacggcaacctgggacgaagtaatgacaagctacaaggaattaactgggacttcttggacctatttgtacttcattagcttctacttaattactgttttgctgcttttaaacttgattattgcttttgtcttggaggcattctttgccgaaatggaacttgagtcatcagaaacttgtgaaggaaatgacaaggaagttgaaggagataaatatcgaaagcggtctattggcacaaaaacacgaagccagagggttgatgctcttcttcatcatatgttgagtgctgaattgtgtcaaaatgagtcttccagtacacaaacttcataaaatcatttcgcagaatgcacgaaggattccacctcattctgatctttcatgtgttttattttatatctcgtgttggtataccgtacgatagaccagaaagcacggaacgacatgggaagaaatgcaaacatatagtaatttgcatttcccttatttgtggaaaaagcacgtcatcaattctgtgctgaatggaattattaaatcatagtggcaggatgctatattccacggggctactagatatctgcctattttttttatacatttagttttttttttgggtgcattgatatctgtcttgttagtctgtgttgtaatggcaacttttttttttaatctgccagggtttgatttttttatttatatactatcaatacagtttggtagcagcgcaaattgtttgtaatttatctttagttctattagtgtagctgtttggtacaaccgtttaaggacatgtgatatgtgcttggatttgactttatgcaattgaggacatgtagtaacatatatagtgagaaagtaaatgctttaattaaattaactac

SEQ ID NO: 11407 - DNA, 384 bp, Glycine max
  Clone ID: PAT_MRT3847_110308C.1
tttcataggaacctggcaagaaaggaaacttgagaatcaagtttgatgttatgttcccatcaaggctcacctcacaacagaagtatgaactgaaaaggattttgagcaacagtactgctgatgactagttcagtctagtatgtctattgccttttttttccctccaattaacacccttgagttgagagaggtcaatttacaatgtgtaaatatttaaatacaccttttagtcttagacatgaaaaatgtgcataatacaaataagccaagcatgttactaccatgtctgcagtgtggcgtagttttggaataaagcgatttcagctgcaaaaaatggtcttggattgtgtttaatttattatgggtgggaatatttacagtcct

SEQ ID NO: 11408 - DNA, 390 bp, Glycine max
  Clone ID: PAT_MRT3847_110309C.1
tactataaatgttacaggcttacttctccaaatcctaggatgtacattggctctggcaaggtttctgaaattaagagtgcaattcatgcattgggcgttgaaactgttatctttgatgatgagctgtcagctgggtagggccctttttcctttgttttaacatttatgtcatccatatgtgtgcttcatgcttcatgttaagactaatttttgtctgtgccaccatttattagtgaattaagggttagatgggtgggtattgagagtatgatgtatttatgttggagaatatcaatttgcaagctgttggaatggaaaggtattaagcagtcaattggtccgtttggggttgtgagtttacctgcagcatttggattttgggattgatta

SEQ ID NO: 11409 - DNA, 751 bp, Glycine max
  unsure (1)..(751): unsure at all n locations
  Clone ID: PAT_MRT3847_11030C.1
ggagcctttgcttccatgagagggaagggttatcggtgccgtagagatgctcacagagggttccttgatccatgaaatcataaacgagtatcatctcattgctctcgtaacagtaacctatgagggaaacaagattgagatgacgaagttgagacagcatttcgatctcgttcacaaactcctgctcaccttgctgagaaccgggtttgagccttttgattgcgacatgtgttgaaccttcgtctatgtagcctttgtacacgttgccaaagcctcccacaccaaccactaagagttcgtcgaagttattggtagctgctttgatttctgctattgagaagtgacggcagaggttggctggtagtgagccacccccttgagaagttccatcttttttattggaaccttcgtcgatggccacgttcttcttgcgtttgatgaggaagaaagcgacaataagggagagcataacgacaccggaaactgcgccagcaacggcggcagttatggttcccgtcctccctttgcttttcttgtttttgctttgaagaggaaattcaaaggtctttggatgagggtctgggnttcggtccagcgagattacctgttgagttggttgattttgaaaagttcaaattccgtttagttgtgcatccttgattctgcttttagggtgaggatgcagtttcagtgaataattgggtttcttctgattcaccgggatggaaactatgtagtctgtaaccactgg

SEQ ID NO: 11410 - DNA, 305 bp, Glycine max
  Clone ID: PAT_MRT3847_110310C.1
aagaagaaccccaggccttttttgatagaagagccaaccagtttttgtttaaacacaaacaaacaaagggggtaggggttaaacatccccccccctatttggaacaaaattgcccgttccgggatttaaagcctccttgaaaaaaaaaagaacattggacaacccttggggctcgatttctttgatggggccccccggcccaatggggaggggggctaaagctccctttccgggtataaattctcccaacaacgggaaaaccaaacccatttgggccaatcttcccacaaaaaggtgggttggtt

SEQ ID NO: 11411 - DNA, 120 bp, Glycine max
  unsure (1)..(120): unsure at all n locations
  Clone ID: PAT_MRT3847_110311C.1
cacgcccgtccgggaacctaagaaaatccatacagatcttcacttaccatataaagaaaatcaatggcaagtggcctagtgcaggcaacctctttagccacaatcgactgnnttgtggcg

SEQ ID NO: 11412 - DNA, 571 bp, Glycine max
  Clone ID: PAT_MRT3847_110312C.1
tgctttttgtgaatttttgctttgggacatgatatacaggggtgttcagaatttttacatgtgtgagattcggaaagacttcacagtagatgcaactttcaaaggaaatacttcacgctttttgaaccatagctgtgatcccaactgtgttttggagaagtggcaagttgatggtgaaacacgtgtgggtgtatttgccgcttgttcaatagaagctggagagccgttaacatatgattacagatttgtgcaatttggtccagaggtgaaatgccactgtggtgctgcaaattgtcaaggctttctagggacaaaaaagaaaattggcaagctagacctctattggggttcaaaacgtatgagaacatcgaaagcttcttgcattacgttagtaacagctgtttgatttgccatcaacgttgtaatgtatacaataaagtgataagctgcttatatagggatggatggtcgaatggaggagtctggttgtgtaggaatgacgggagtagaacatctgaaacattctgttctattgttgtagagggaaatgacaatttaatcggatttagga

SEQ ID NO: 11413 - DNA, 258 bp, Glycine max
  Clone ID: PAT_MRT3847_110313C.1
cccacgcgttcatctacactttctctatactaaactgattttttattaacattatagggattactaatagatattcttcatctataaatcgcattgaattttaccatatctctgagatacttttcataaataactatctaataactactttgattttattccgattcatatataagtcatactaagtaacaatctttttacatttttagtaccatttaatatcacaaatgtcatgatccaaaaacatttacttttgct

SEQ ID NO: 11414 - DNA, 486 bp, Glycine max
  Clone ID: PAT_MRT3847_110314C.1
ttttttttttttttttttttttttttttttttttttttttttttttttttttttttttttttttttttttgggggaaacctttttttaaaaatgggggggcttaccaaaagaccccattggaaaaaaacagcaatgtttgaacttttagccccaaggaagaatttttcacatttgattaggtccaaggccaccccttttacctacaaaatttatgttttttgaaccaagcaatttttcaaaaaaaaaaaaaaaaaaacaaattggctttaccttcatttttaaaggttaactcgcccccccaattaaattaaatttaaatggccaaaaaaagccgtggccccaacctttaaaatttggtgataaaaacccacccctgaaatacccttaattgaaacaaatttttaattaaggctagagggttggccgcacatatttcttttagcagggattttcttggcaggggctggaacaaaaattttttggcc

SEQ ID NO: 11415 - DNA, 390 bp, Glycine max
  Clone ID: PAT_MRT3847_110315C.1
tgcccttgtttttttttttttatagttttctaatatccatatttagtgatttccccctatgggttacatttatcgatatgaacaattctaattgttcgaattattgggaaacatttctacttatcaatactcaaccttacccttcctttaccgaacattcaaattacaactcccgaattatccgcaaactgatctattaacaacagcctatctagactacccggtgcaaattccccgcaacaaaactgcaacgcgtgagcaagcaccgtgcgcaccttcaaaacatacactgttggggactgtctacatactactaaagccttaacttacagaacagaccactcggcacgaattgtcccatttgtcgcagtgttaactgcaacacgaccc

SEQ ID NO: 11416 - DNA, 685 bp, Glycine max
  Clone ID: PAT_MRT3847_110316C.1
agattctgcttcaaagaatttaaccatttaaaattccaatgttctgttacagctggtatcaccaacatggctcttccacctaggaagaaaactgatggatacaaactgtaaggcctagtcaaattctacaaaagcagtgtaaacagtaatggaccacaacaaaagaataacttctgtagtatacaaaaggtatgctgctatttcacttccacaagagattgcaaactacaaagatggcctcagtcctcaccacaagaacaagggccataatttccaaaagatgaacatcaattaatgtatgcctataagtccatcaaaaaaatacctgaagtaggtgaatctaatgtgcacagatcaaacattactgatccacaatggtatcaagacacaagtggttaaaaacaatttaaaaaatgataacaaaagaaagtgaactcaaatggtaagagcatagctttcccctcctaaatccctatacattttttctgtcataggtaaacttccactgccagtatactagtttaacatctaatgaaattgtgttaccagatattagaactagaaactcacctgccttttctcctagacttgaaagggaaccttgaaggggttgaaggtgagtactcgacaggcaattggggtggctccaattccccactgagcattcccacaacctccttaattg

SEQ ID NO: 11417 - DNA, 292 bp, Glycine max
  Clone ID: PAT_MRT3847_110317C.1
gaacaattcaaaggaaaatcctccctaacaaaagccttccaaaaacgaaaaaaaaaggaagagcaattttcccccaccaaagaagaagaagcaaacaagggccgataaacttaccgatgaaaagatctccgagttcaaggaagccttcagcttgttcgacaaagacggcgatggtttgttctcgctctctctctctcaagttttgtgtatttgatttgatttgatttatgcgtttgtgggttttgtagatcggtgttccgtgtcgtgatagtggattaggaaaattagatga

SEQ ID NO: 11418 - DNA, 328 bp, Glycine max
  Clone ID: PAT_MRT3847_110318C.1
aaggtggacacgttttacaacgaggggttcaattatatgggggccgcatataaaaactgcgataaagtggacacgcaatgcatattacagactcttggtgcatgactcattggaagggtgaaactcacgaggaattaccatcaggcccctgacactctaatttttacaaactatcctgacaatgggagcatagcctgcatgagccacaacaccaacgcgctctactgcttcaaacagacggcggtggtgagggctttcgatgattgctacccgcatgatcctttgtcacacactatccacatggcgtacgatgcatacaatagcaatt

SEQ ID NO: 11419 - DNA, 247 bp, Glycine max
  unsure (1)..(247): unsure at all n locations
  Clone ID: PAT_MRT3847_110319C.1
ggccgaccagnnatcgaagggagaggaanncgagaaaaaggctgagaagaagctcagcggngggggctngnnnggctccaagnatgaagangccgccgatctcnncganaaagccgccaanggcnncaagcncgccaaancaggggacaaggcnggagcgacanaccngaagnnggcaagnggncannngaagnnggaaagcaagcatgaagctgcacaggcccatgtcgatgctgcacattgtttt

SEQ ID NO: 11420 - DNA, 1659 bp, Glycine max
  Clone ID: PAT_MRT3847_11031C.1
gcaaaacagaacaacaggcaaagtgataaatgtatccaaccagggctcccagtttgtgacgagaacaaggaatgtgatgaggggtggtaacatggatcaggttagctacaagaactgtgtccctaagaaagtccctgcgttggcaagatggcaacttaagcgaccacgtgctagttcagcttctggtgaaacaaagacagttgaaaccaaggaggagattgtttatgatcatgattacccttgtagaagtaatgacagtaatgatggggggacaaagacagagttggatcatcatacacttgcatcagaagagaaattgggaattgaggatgaggcaggagatatgaatgctgatcttaacttcacagagcccgaacttagagataggagctacaatgacagcagtaaccttaaagtgtgtagtggtaggacaattgaatctatgaaggaaacaagtgagacttctggtgctattgtaaatgatgacttggagtcaattctaagacaaagagcattggaaaatctaagaaagtttcgggagattcagtctagtgcaaaagctcctgatcagaaaaataaaattgttagcctggtgaagcaaccaattacaaataaacaagagggattgattcataagcctgttgtcaatgatgcagctgcaggaacaaaaattgataagcgaacccttggagaagaaactaatttgcctgatgggaggagaaatttaattgcctgtccaagaaacaatgaaaggatttcaaacatggataaagatgtatctgctaagtgtcatccagccggtgcaccagagaaggtgattgattcagacaatcctagcggaacaattactgaatcctccaattacaatactaccaatttagaattgaccaaacaagcacaaaattcttgctgtgattcacttcaaacacatgcttcaaatgaagctgccaatgcaaatttaccagtgactgaggttgatgtagaaaggaatgcagctaagacttctcatgctgcaatccagagtgttaatagcaatgacagaaatgtcaatgtttcatcagaagagaataaatcaggcaaattgcaagatgagtccaaccagggttcccagtttgagaagaaaacaatgaacgtgatgcggggtggtgaaatggtacaggttagctacaaggtctatatccctaataaagtccctgctttggctagaaggcaacttaagcgatgatcttctatctgctcttctggtgaagaaagggctttttgacgttttgttcatctttgtttgattcatgtaagggtagagacatgtgcaagaaagtatagagatgaagagattatctgttgattcatccgtgtttgaacttcaagaaatacatcaatttctctattattagctatattttattttatttttaggtaacattgtattcgtagattatttgaatgtggcctgtcacaataatattaatgcagccattgcaacatgaagaaggtctttattattaaatctttctggtggaagatgaaagaccttccctatgtttgctctgtcaaaaaaaaacaagctctctcagatggtatatcgtgcgtgtttaatcattctgtttgatgaaaatactcaagtattttttagaacttttgaaatcactttattcctcc

SEQ ID NO: 11421 - DNA, 229 bp, Glycine max
  Clone ID: PAT_MRT3847_110320C.1
cttcaatttctaggggtctgctattgctttgcctacgatccccctttctcacaaaaacagcgccttttctcttctgcttcgtatctattctttgcgtttgggttttggttgattgaaggcattcacaacctaattcgttgctgcattataatccatttatttaaccaggactgaatgtcctaatgctgactaaaggtgggaaaaagaagtctacttctatcagcactaa

SEQ ID NO: 11422 - DNA, 177 bp, Glycine max
  Clone ID: PAT_MRT3847_110321C.1
ctcgggatttggatcgaggaaagatcaattccattccgaattttttctttttccacaataacccgttggtccggggcctgggtttctctatacctaccatattcgttaccatgcctttaccaactatatcatacacttgaagctacaccaacaacagcattcttcgtgcataaccct

SEQ ID NO: 11423 - DNA, 212 bp, Glycine max
  Clone ID: PAT_MRT3847_110322C.1
cccactcgtacctcaacactttctatataatatcatcccattatcacttcatcgtcaggccgatcacgcatgcccgactagactcaaccttcgactaacccaatcctcacctttacgatcacctctcatcaacgcaagtacaacaaccatcactgttatacagtcttcttcgacgtctcaaatacaccatcaaattcatactgcctatacaa

SEQ ID NO: 11424 - DNA, 406 bp, Glycine max
  unsure (1)..(406): unsure at all n locations
  Clone ID: PAT_MRT3847_110323C.1
gagtcgaagaagtggaggtggatacgatcgtcacatcactatgttctcccctaaaagacatctctttcaantagaatatactttcaaagctgtaaaggctgcaagaatcacctcgagtgatatccaaaaaaaagattcaatttgtgtcgggactcagaataaaggtccaaataagctgttaaacaacacaagtattacacacctctttcgcatcaccaagtaccttaaatggatagctactgacatgacagctnatactaagacactagtccaacaaccaaaaaatgaagcanctnantttcgctgtacatatggatataaaatncctggagatatattanctaaaggaatgacatatgaatcacaattctatactcgacatacgtatatgataccactcagagtg

SEQ ID NO: 11425 - DNA, 153 bp, Glycine max
  unsure (1)..(153): unsure at all n locations
  Clone ID: PAT_MRT3847_110324C.1
gacagaaggaggccaccacagaaaccccagcgaaacgcgcgcaagggcggacagcaaaaaggaaggcgcaaggcaacgggccgagacacaccacacgaagccggcaaacgcancgcggaagaccccggaggccccggccagaggcgggacgcc

SEQ ID NO: 11426 - DNA, 226 bp, Glycine max
  Clone ID: PAT_MRT3847_110325C.1
cattcgatgggtgtggtgtttgccagccaacggcaggctggattcaacgcacccctaccgctaccatcctcgtcatatgggaatcatacaaccactctcagcatctacggtggtggtttcaggggcacttttaccgcgactgttgtagaatacttaaacaaggctcttaaggctgaggagccaacaacatagttagcccattagtttgatgtgatatcaggaacta

SEQ ID NO: 11427 - DNA, 330 bp, Glycine max
  Clone ID: PAT_MRT3847_110326C.1
gatcttatagagagtacaacagtcgcccaatcaagcctcagcaaatttgccaaggacaaccccgggattaaaaccgggcaatggatacttgcaatcaacgtgacaaggaatgataataaaagcttgaaccccccagtgatgagcccttttgcaaaatacagactgttcatgaatccaagatctaagaatgctgggacaatgttggcgttatcagatttcgtgtccatgagaaataatcagacgtctctatcaagtgtcgctagcaatggtgacaatggagcctatcttgcagacaagcaaggattaagtgtgactgatgccgtcatcggt

SEQ ID NO: 11428 - DNA, 243 bp, Glycine max
  Clone ID: PAT_MRT3847_110327C.1
gaattatcatcatccttatctgttgtcctagaacttgattactagaccatggcctatgacatattaggtagtccttctggaattctggacacgtacgcatttcggatcactgtcaggatagcacttgctgagaagggtatctgaatatgcgtagcaaggaagatgagctagaggaacaagagtcctcttctcttacaaatgaacccggatcataagaagatcgcggttctcatgcacgatggc

SEQ ID NO: 11429 - DNA, 2193 bp, Glycine max
  Clone ID: PAT_MRT3847_110328C.1
tcgcctatgcgtccgagaagttagaatgaatttgggctgtgtcccacatagttaacaatcaacgttatgctacttaaccctttaatttagagtgtcttatctctctcatcgtgttaaacttcaactaaaaagctttaaacaccgggacagctttttccatgacagaacgagatcgtcttgatctacgaggactgcttcctccaaatgttatgtctcctgacctacagattgaacgattcatggttgatctgaagaggcttgaagttcaagctagagatggaccttctgatcctaatgcattggccaagtggcggatacttaaccgcttgcatgacagaaatgagactatgtactataaggttttgattgccaaaatagaggaatatgcaccaatagtgtatactccaacagtgggtcttgtatgtcagaactatagtggactgtttagaagaccaagaggaatgtacttcagtgctgaggatcgtggagaaatgatgtctatggtgtataactggccagctgagcaggttgatatgattgtagttactgatgggagcagaatcttgggacttggagatcttggagttcaaggaattggcattgccattgggaagcttgatctatatgttgctgctgctgggataaatcctcaaagggtacttccggtgatgattgatgttggtactaataatgagaagttactcgaagatcccttatatttgggattgcagcagcatcgtcttgatggggatgattatcttgctgtagttgatgaatttatggaggctgtctttactcgctggccaaatgtgattgtgcagtttgaagatttccaaagcaaatgggcatttaagttattacagcggtatagaaatacctacagaatgttcaatgacgatgtgcagggaaccagctggagttgcaattgctggacttctaggtgctgtacgggcgcaaggaagaccaatgattgacttcccaaagcagaagattgttgttgctggtgctggaagtgctggaattggggttcttaatgcagcgagaaaaacaatggcaaggatgttgggtaataatgaagtagcttttgagagcgcaaagagtcagttttgggttgttgatgcacagggattaatcacagaaggacgtgaaaatattgatccagatgcccttccttttgcaagaaatttgaaagaaatggatcgccaaggactgagggaaggagcaagcctcgtggaagtggtcaagcaagtgaagcctgacgttctcctaggattatcggctgttggaggattattctcaaaagaggtactagaggccctcaagggttcaacatcaaccagaccagccatatttgctatgtcaaatccaacaaagaatgctgaatgcaccgctgaagaagcattctccattttgggtgacaacattatttttgcaagtggaagtccattcagtaatgtggatcttggaaatggtcatattggccattgcaaccagggaaacaacatgtacctctttccaggcattggtctcggaactcttctttcaggcgctaggatcgtctctgatggcatgctgcaggctgcagctgagcgtctggctacatacatgagtgaagaggaggtactcaaaggaattattttcccttcaacatccagaattcgagatattacaaagcaggtagccacagctgttataaaagaagcagtggaggaggacctagctgaaggatatcatggaatggatgctcgggagctgcagaaactaagcgaggatgaaatcgcggaatatgtgcagaataacatgtggagtccagagtaccctacattagtttacaagaaagaatgagtaacctgcagggttgataactacaatttccctctcgatgcatgtttggttcgatcaggttgttcacagaatcctgtttactggattagatgatttaaattctgaaacattatctcatagcatatttctaaaagtctagcaaacttgtattttatgtacatgatgcttcttttaaataaaaatgaaaagccaagattagtttttaatttactttttatttctgtagtgttatacttctgaatcacttaggctaatagcgaaggttttttcattttttttatggaaagactttgtatttcattcaaaaaaggagttatgtacatccaaaaaagaggagaccattcacct

SEQ ID NO: 11430 - DNA, 1474 bp, Glycine max
  Clone ID: PAT_MRT3847_110329C.1
caaatgcccttgacaattcttctctaaactcggaagcaaaacaaaaagccatagctatgagtggtgaagcgcgatcctgtgactactgtggccactccacagcacttctttactgcagagccgattcagcaaaactctgtttctcgtgcgatcgcgaggttcactccaccaaccagctcttctcgaaacacacgcgcacgctgctctgcgacgcatgcgatcattcccctgccaccatactctgttccaccgacacctctgttctgtgccagaactgcgactgggagaagcacaaccctgcgctctccgattcccttcacgaacgaaggcccctcgaaggcttcactgggtgcccttccgtctccgaactcttatccatcgtggggttttcggatatcagcaaaaaatctcttcttttttcgcctcagggaagtgtcgctgatgggttcttcggtggcgaaattgaagggctttcggatttgttcgtgtgggatgcgccttctttcgttacgcttgatgatttgatttcttcttctccttcttctcatagctttcaggccatggaggttcctcctctgcccaagaatcggaaggctgcttgtgggcaacacaaagaagagattcttagtcagcttcgggaattggccaagtctgagccattggaccttgaaccatatgtgtcatcggggaacttgtcctcgggttttgaacgtgaaccagaggctgatatctttccttctcatgagtggcatagagaaagcagcgagcctatgtatcaggttgttcctcctgacccattaatgagaacttatacagaagaaattccatttaaacattctacttctgctgttggggaaactcaaacctacggtgacaatggaggaaaaccatccatttctcttaaatctgaaaccctatcaactactcccaaagctgcagcatgtgagttaacaagccaagaaagagattctgcattattacggtacaagcagaagaagaaaactaggagatttgacaaacacataaggtatgaatcacgaaaagttcgggcagaaagcagggtaagagtcaagggtcgatttgccaagatggaacatgaacattgaaatcatggtaggctgctatgacatcataactataattcccagctcaaatcacatgcactatgtagcatatcccttgtatagtgaacttaacaaaattttccaagtgatgtattctaggattcagagctaggatataaggcagacatattcttgcagtacagtagtgtttttatcatcctttttgcttcataattgactgcacctgaggtagacaaatatgtgcagtattctgtaaatcagaatcaaatttactggggtctttggccttggattgtgtttggagagtatcttgtggacgactgagaattttttcttcttgattatcaaataataataataataattaaaaaaaaaactcaacttgagat

SEQ ID NO: 11431 - DNA, 2455 bp, Glycine max
  unsure (1)..(2455): unsure at all n locations
  Clone ID: PAT_MRT3847_11032C.1
tttcttgatttggcttcacattttattactcgattgcgccgttatgctaggttctgtcgcacattggcaagtcatgctgtgactgcaggctctgggagcaaccgcaatatggttgctagtcctacccaaagttcagcaacacccgcaacaagtcaaggaggtcaaaatgggaccagcagttctatgggaagcgcccagttgcaaacctgggtgcaaggggctattgccaaaattagcaacacaactgatggcgggtccaatccaactcctaatcccatcagtggcccttcaacatttatgcctattagcattaatacaggaacatttcctggaacaccagcagttagacttattggggattgtcattttcttcacagactttgccaactattgctctgctgctttttttttcgacggacacaacttcctcgctatattaatagaacatgtgatacaaatatacaaaagcctcaatctaatactcctgctcctggcaaggtggaggagattgcanaaccagtttcagctgtggttaagtcagatgatccacgcgtccggtcaggctggtcgagttagtcaacttgtgcctgcatcaaaaggaggtgaagaaccatctccagggcgttcaagaattggtactggaaatgctggcctaggatatacatatgaagaggtcaaggttctttttctagtacttatggatctatgtcgccgaactgctggcttgcaacacccgttgccagtttctcaggtggggagtaataacatacaggttcggctgcattatattgatgggaactacactgtactgcctgaggttgtggaagcagcccttggcccccatatgcagaacatgccccgtcctagaggtgctgatgctgctggtcttctactacgtgagctagatctccatcctccagctgaagagtggcatagacggaatatgtttggtgcaccttggtctgatccagatgatttggattctgcaaatgatgcaccaaaacttgttagtttaaatccacttgattccagctcattggaaaattgtgatgtctactatggagccaatggcttatggccaaggaagcgcaggatgtctgaacgagatgcagcttttgggttgaacacttctgtgggcctgggagcataccttggtataatgggatctcgaagagatgttgttactgcattgtggaaaactggccttgaagggatctggtacaagtgtataagatgtctgcggcagacttgtgcttttgcctcaccagcttccaccaatcttcccagtcaaaatgaccgggagatttggtggatcagccgctgggcttatggatgtccaatgtgtggtggaacatgggttcgagttgtatagctggcttcaatacaaaattgtcatttgagtttctcttttggtgagggaagaattgcttgtattttacctgcagaaactgaaggtggatggaattgtacaggagaggagacatgtagattacctgacaggttctttatcagtatgttgtcattaaaagtgaccaaacgaacttggatttgagtattattctactgatcactatgtaaagttccaagagttatcaactaattcacctagatctcaaatttctttggaattatgatcatgtgattcgtgttacaccgccaaaattaggtattatccttgtgatgtttgtagttgttactgcaacgtggaaaactggccttgaaggggtctggtacaagtgcgtaagatgtcagcggcagacttcagcatttacttcaccagatgctactgcttctcctagtcagaatgaccgggaaatgtggtggatcagccgctgggtacatagctgcccaatgtgtggtggaacatgggctcgggttgtataaatagatggaatgctgactggagttgtacaggaaaaaaggtgtggatttgcttgacaagtttcagatctcaatttttttgggagtaaattattgtcaagtcactccacaaacagtaggtgttaatttatccatggagtggtttataattaactccttgcagattgtcaatcctctgtaaaaacactactgtatcctgcatgccgtttcatgcatgctgatgtgggtgggtgccttggaagttgctgctggtgaatcagagattaggagcttatattagttatcactcattaatccctgagaaatctctgcataaacttcttagactttcttcacttgttggttgtattatgtaaatgatgctcaccatattgttagattagcttagcatcttattatcttctcatgatacctgtaaaattgatgaaaatttttgttttatttcattggggtacatcaaaaaaagatataattcaatgtactggacctacataaagcctggatttttgtatttgtcctccctgcttaggggtctccttaacattatgcagtttttagtaaatagtttagacgc

SEQ ID NO: 11432 - DNA, 661 bp, Glycine max
  Clone ID: PAT_MRT3847_110330C.1
ccctcgagccgattcggctcgagcggctcgagcacagcccattctgctccgtataccagaaaaaaacacatttgaagcatgaattctcagcagcagaagcagccttgcaccccaccccctcagcctcagcagcagcaggtgaaacaaccttgccagcctccaccccaggaaccatgcatccccaaaaccaaggagccctgccaacccaaggtgcctgagccctgccaccccaaagtgcctgagccctgccagcccaagattccagagccctgccagcccaaggtgcctgagccctgcccttcaacggtcactccagcaccagcccagcagaagaccaagcagaagtaatgtggtccacagccatgcccttgaggagctggccactggatactgaacaccctactccattctgcttatgaatcccatttgcctattgaccctgcagttagcatgctgtcaccctgaatcataatcgctcctttgcacctctaaaaagatgtcccttaccctcattctggagggctcctgagcctctgcgtaaggctgaacgtctcactgactgagctagtcttcttgttgctcgggtgcatttgaggatggatttggggagggatcaagtgaaccatccctagtcttccctcaataaataacttttaactcc

SEQ ID NO: 11433 - DNA, 288 bp, Glycine max
  Clone ID: PAT_MRT3847_110331C.1
ccaaaagaactacattttcgtttatatatatatatgaatatgatctacaaatactcatgcttataattgaagagaaaaaagaatttcaacccaagtgttaacaaaggaaaatcaaaacaaaggtgcatcttgcaaagtagtcatatcattgttgtcttgtcacttgtagtggtgggtgggtatatatgcttttgaagaagtcctctcaattttcatcttcctctatgcaaataccattccttccactcataaaaaagactacatcttctcatgatcaaaattacaatg

SEQ ID NO: 11434 - DNA, 319 bp, Glycine max
  Clone ID: PAT_MRT3847_110332C.1
aaatgtttaatagaataaaacatctgggaaagctaaggagacggggcgcttcacctcaaacttttttttaaaccatagttttcttttggtttggctatggctataggaaactacattaaaggaatctcctgctcgttctcaaaaccaacaatttttggaaggggctttacttcaaataaaaataaaaaagactatttcaattaaagcttattttcaatcttacacttatcttcctccgtaattgaaaaaaaggcaaatctcacatctaacgatggcacatttctcggcactattaaaagctgggatttatcttcatcaa

SEQ ID NO: 11435 - DNA, 530 bp, Glycine max
  Clone ID: PAT_MRT3847_110333C.1
ggtcgactctagagttgcattgtcccattcaaaaggctactatagtttactgtgacaatgtgagtgcgacatacttatccggcaatcgtgttcaacatcaacgcaccaaacacattgagatggatattcacttcgttcgtgagaaagtggctcatggcgaagtccgtgtgcttcatgtgccgtcccgttaccaaattgctgatattttcacaaaagggcttccgcgcgttctatttaatgatttcagggacagtctaagcatacgagagcctcctgcttcgactgagggggagtgttagaatatatttagcatatattctcttattagttttatatatctttatttgcctacttaatattcggtaccatattttcagccattaattagctaatttgtagcctatcttggggcttggatcttgtatatattactctgatttgtaatgcaatagacacggaatcaatttccttcacataatcttgttggattcccaaaaatatgaagataataatatgttttgcatttgtgt

SEQ ID NO: 11436 - DNA, 376 bp, Glycine max
  Clone ID: PAT_MRT3847_110334C.1
aaaaaaaaaaaacttaggtggggatttaattaatcaaagggggggcgggtttaaacaaaagggacttaattggtttttaattgcaaaccgggggccaaaatttttaaaaaaagcccaacggggggcaaaatccaaaaatttggtgtttttttggacaaaccaagggcctttttaaagaaaaactgggggttttggttttttttaataaccaaaaagggtgggaagttttgcccataaacagggccctaaaggaaccaaaaagaattttttttgttggccttttaaagggaattttttccagggaaaacattctttgcaaggccaaaaacaagactcccaaaatttatccgcgggttaaaattggagtgggttgggg

SEQ ID NO: 11437 - DNA, 274 bp, Glycine max
  Clone ID: PAT_MRT3847_110335C.1
aaagcgacgcctgcagaccgtccggaataccggtcacccacctccgcacgctttttaagtttaaacacttgacacatcgggtgactttattccatttttgggatctgctttctgattagtccccagaacactgcgacagtaaagagctgagatcaggtggaccccagtgggacacacacactgatgtcacacctgaagatcatgaagaatcttcgcccccaaacggtttgcaataatgaccctcaaaagcgtgatatgtggttggatcatcacg

SEQ ID NO: 11438 - DNA, 612 bp, Glycine max
  Clone ID: PAT_MRT3847_110336C.1
aacactttggataataagttggaagtggtagaaggaatgaagttaaccagaggctacatatctccttattttattactgatcagaagacccagaaatgtgaattggagaacccctttattctcatccatgacaagaaaatttcagacataaattcactgctgaaaatactggagctggctgtaacgaaaaaaagaccactcctagttgttgctgaagatgttgagagtgatgcattggctatgctcatactcaacaagcatcacgcagggcttaaggtttgtgctgtaaaagctcctggttttggggataatagaagagcaagtctagacgatcttgcaattcttactggaggagaggtcatcactgatgagcgtggtttggctcttgataaagtccaaccagaaatgcttggcactgcaaaaaaggttactatcaccattgatgacactattattctacatggtggtggggataagaaggtcattgaagagagatgtgaacagctgaggacagctatgggggagagttctgccacatttgataaagaaaaagcacaagaacgcctatcaaaactatcctgtggtgtagctggttttcaagttgggggggct

SEQ ID NO: 11439 - DNA, 246 bp, Glycine max
  unsure (1)..(246): unsure at all n locations
  Clone ID: PAT_MRT3847_110337C.1
gntcaactgangtgatggctttnantttncnttctnccgcccaantnaagcncttatttttntctncaaataactccacaaaacttccaggtngcttntntttgaagagaaangatagtnacacaacagtagaganacgagtntntngctctgccgctgctcaatcaccaccaccagcatggccaggnacagctattcccganccttctgangtcnagacatgggatgggcaanancctatgnntg

SEQ ID NO: 11440 - DNA, 186 bp, Glycine max
  Clone ID: PAT_MRT3847_110338C.1
tcaaggggacgggagaagtgatcgagtgaacgatacatttatgatctcgctctttctcttcgcctaaagtcctcatcctcattctatttttacctttcactctcgctccataacgttgatggtgattccttctgttttagcgactgccatcgatgccgctcatgaacgaactcatggatctccaga

SEQ ID NO: 11441 - DNA, 241 bp, Glycine max
  Clone ID: PAT_MRT3847_110339C.1
ggataaatgtaaaactcattttgttgcctcattccatgggatggtacattgcaatttgaaggtcatggtgctatccaaataattatcaagacatttggttactatggaacttaataaacctcaggaacccaacatattgtaaggtttagattcatcctataaggaaacatgtatgcgcgcatctagtattttgaatgtcaacatccacacgaattgatggatcactaatccttattaggac

SEQ ID NO: 11442 - DNA, 1131 bp, Glycine max
  Clone ID: PAT_MRT3847_11033C.1
cctacccaaagttcagcaacacccgcaacaagtcaaggaggtcaaaatgggaccagcagttctatgggaagcgcccagttgcaaacctgggtgcaaggggctattgccaaaattagcaacacaactgatggcgggtccaatccaactcctaatcccatcagtggcccttcaacatttatgcctattagcattaatacaggaacatttcctggaacaccagcagttagacttattggggattgtcatttccttcacagactttgccaactattgctcttctgctttttctttcgacggacacaacttcctcgctatattaatagaacatctgatacaaatatacaaaagcctcaatctaatactcctgctcctggcaaggtggaggagattgcaaaaccagtttcagctgtggttaagtcagatgatggtcagacaggtcgaactggggcaaaaggagctgaagaagtaccctctggacgttcaagattgggtagtgggaatgctggccagggatatacgtttgaagaggtcaaggtgctttttatgatgcttatggatctatgtcgccgaacagctgggctgcaacaccctttgccagtttctcaagtggggagcaacaacattcaggttcggctgcattatattgatgggaactatagtgtacagccagaggttgtggaagcatcccttggtccacatatgcagaatatgccccgtcccagaggtgcagatgctgctggtcttcttttacgcgaactagaactccaccctccagcagaagagtggcacaggcggaatatgtttggtgcaccttggtctgatccagaggatgtggattgtgctaatgatacacctaaacttgttaattctgacccacttgattttagctcattggagcattgtgatgtttactatggaactcatcgcttatggccaaggaagcgcaggatgtctgaaagagatgcagcttttgggttgaatacttctgtgggcttgggaggttatcttggtataatgggttctcgaagagatgttgttactgcaacgtggaaaactggccttgaaggggtctggtacaagtgcgtaagatgtcagcggcagacttcagcatttacttcaccagatgctact

SEQ ID NO: 11443 - DNA, 1548 bp, Glycine max
  Clone ID: PAT_MRT3847_110340C.1
atttcatttatcgtcttattgggcacgcccccatcctcggcttctccttcctggagcactctcactccgtcacccaacacatccaggaactaatttggaatttattagaaaggaagacaaggatgggattcatgtttgtaatttgagcttgaaactccatctcttcgtgcttaacttatttggagcttgaatctggaattccagtggcttttaatctatcaaggaaaaaaaaaagtaactttgcatttggatttcagcattgcttgtttttaatgtgcgcccctgtgctcccgcccttgccgccctgcgtgctgccgggtccgcgcacggaggctggtaacgtggcggccccgtgtcctacgctcatgtcctcacctctggttcatctagttagttctccttccgtggcattcctcctcttgttgccctcgccccccatcctcggcaccgctttcgtccaggtcatggatgttccactgccacgggataaattggctttagatttgattaataatgagccctcccctgcaaacacgagcaacagcaagatatatgtaattctggtggcaactggaagctttaatccacctactttcatgcatttacgcatgtttgagcttgcaagagatgcattgaattcagatggctactgcgtaattggaggttacttgtctcctgtgaatgatgcatacaagaaaaagggcctaatatctgctgaacatcgaatacaattatgtcatttagcctgcaaaagttcagattttataatggttgatccatgggaggcaagtcagagcacatatcaacgcactttaactgttctctccagagtccacaattcagtttgtgagacagggttggtatctcaagaatccctcaaggtcatgcttctttgtggttctgatctccttcattcttttagcattcctggattctggattcctgaccaggttaaaactatatgcaaagattatggagtagtctgcattcccagggaaggacaagatgttgagaagactatatttaaagatgacattctgaatgagaataaggataatatcaaagttgtgaatgaacttgttccaaatcaaatcagctcaaccagagtaagggattgcattgcaagaggactatctataaaataccttaccgcggatgaagtgattgattatatcagagagcaacaattatacttgaactaatgataaattattactactgtttttcattacattctgtagacatgggtctttgcaagaaccactgtgcatcgctatccgagccaattttctataaacagatgatttttcatttttgtgttgtaaatttgcagataaataaatattacataatttatgtaatcgaattgcaaatactactgttgaaaatgcaacctagtgcttttaagactttgggttagatgtagtatattaagtttatttgtaaagggttgatggggatctctgcaatttgtttgtgtaaaaaaaataaaaattgagccggggatattcttgattggagccctgatatattgaaatttattcaagt

SEQ ID NO: 11444 - DNA, 306 bp, Glycine max
  Clone ID: PAT_MRT3847_110341C.1
cgttccaaaaaaaaaaaaaaaaaaaaaaaatttaaaataaaaaaaaaaaaaaaaaaaaaaaagggggggggcaaaataaaaaaagggtagggaaaagggggggcccttctggggagcccctctttttttccccgccctgccgccctttaactcccctttttgttggcacctcaaatttaattgcatgacccctgtttttacacagcatacttgggtaaaccccgggggttctctccctaagtgccttgctaaaaaaccccctctttccaagcgccttaaaaataaaaagggccccccccttggccc

SEQ ID NO: 11445 - DNA, 435 bp, Glycine max
  Clone ID: PAT_MRT3847_110342C.1
tacggctgcgagaagacgacagaagggaacagtaaaaaaacataagtaaactaaaattaaattaagggttagttgtttaattttgttttttaaatgttttttttaataaaaaaatgtaatttctgattttgtttaaaacaattccttttttgatttatttaaaaagaaaatcatatttcctccttaaaaaaactttaaaaagaatttctattaaaattgtttttcttttagtttaaaaaagtcaccctaatacccacaaaaatacaaatagttataatcgaaatgtggtgtatgattaaaggataaatatagtagaacaaccaaaatgttattctatacttagtgagagaaaaaaatacactgagagaaaagatacatattataagttatatgatgtcataatctctcataattaaaaggagtactatagtaaaa

SEQ ID NO: 11446 - DNA, 162 bp, Glycine max
  Clone ID: PAT_MRT3847_110343C.1
ctttttggcctattgcaaccagattcctccatgagggattctcactgctttgtatgcattttacaaacatgacatgtcaagaagaatattatccttaactttccttcttgctgtgcttaaactcttgaacatttttcacatgtgctcactgcctgcttttta

SEQ ID NO: 11447 - DNA, 322 bp, Glycine max
  Clone ID: PAT_MRT3847_110344C.1
cccattcttccgcccacccttccgaaaaaggttcagttggttccttggaaaatgaaggcttgcctggtggggccccgaatcaattaccttgcatgtgggttttacctgggccagctttaagggtcttggaggctaaggaattaaaatcggaagggtttcctttcccaggacctttaaatggggcaattgttgcggtatgagcttaaagagcctgcctccgtggttgttccacagggaaaagtggctggtttccctttacaaattggggcctttcaggagacccaggagcaattccatccattaccaaccttttttctgtggg

SEQ ID NO: 11448 - DNA, 277 bp, Glycine max
  unsure (1)..(277): unsure at all n locations
  Clone ID: PAT_MRT3847_110345C.1
ggacctttaagcttcctaatgcgatgtantagattgagtagtagcttgagctctctcaagacttctgtatgagtgtatgaacagctttattgtaattaagatgaagccctgactagctgtaagattattacatgnttaggattaatgagagggaatatgttgaggtagggatagagaattgttggaataattggagagtaatggagtgatatgcttggagagtagagaggtgaaagtaggagctttaagcttcgtaataggatgtagtagattgagt

SEQ ID NO: 11449 - DNA, 389 bp, Glycine max
  Clone ID: PAT_MRT3847_110346C.1
tttacgcgtccgtctattatttattcctgcccgggtgactcaagaaacaattctctaggtatcacccttaccattaatcaacgatctccctccgatcttaatctcctccatcctatcacgaggaagagagagagagacatttagttctcctgcaacttcaaccttgatatggccaaccggaggtggaccggggcggcgggtttagagaactctgggcactctacgaaaaacccggatcggggggttgacatgaacgagagtaccgtgacggggaaccatataggagaagaacatgatgaccgagaaaacagcgaccagccaagagagggagcgatttgacgccccaccacgcgccgactcttggggacgtacacggggctcctgaaaca

SEQ ID NO: 11450 - DNA, 392 bp, Glycine max
  Clone ID: PAT_MRT3847_110347C.1
gccggtagcgacagaaagaagaaaaaggcaaagatagttagtgggggtggtggtagtttgaacaatttgaaggagattttggaggatttcatgaggcaacagatgcaaatagaagcacaatggatggtggcgttcgaggcgagggagaatgagaggaggttgaaggagatggagtggaggcaagccatggaggtgttggagaatgagaggataatgatggaagaaagatggagagaaagggaggaacaaaggaggattagggaagaagctagggctgagaagagggatgcactaatcacagctttgctaaacaagctagagagacaaggaatgtagtggagaggactttgttctatcacacaaaactcacttcgatgatctgttcggactta

SEQ ID NO: 11451 - DNA, 404 bp, Glycine max
  Clone ID: PAT_MRT3847_110348C.1
gaagaaggttgccgcacgcccaaacgcagcgcttgtcggatacccgcggcgatggtgtgtcctccgccgccgaagaagaagtcggcggcttacacggcgagacagagggtcccacccaagaacggttactttgtgccgccggaccttgagctcattttcagagttgcgccaacaagagaagcttttacttagttcatctaaaaattgctgtatacttactgtgaccctttagaaatgtagtcacaaatttaacagcattttaacctagttagtttaatttctctcatgtatgaggagtttgaactctgaagtatgcgtttacttctgagtttttttaaaaaaatttgtttataggagaaaaaatgtgattcgtggaattatatgaatgtacatcttctttatct

SEQ ID NO: 11452 - DNA, 1055 bp, Glycine max
  Clone ID: PAT_MRT3847_110349C.1
gacagagaaaccaatcggaggaaaatgaaactagtttggtccccagagacagcatccaaagcatacatcgaaacagttcaatcttgtcggattttccgggaatccggggtggcggagctggtgtcggcgatggcggcggggtggaacgcgcagctaatcgtggagacgtggtcggaggggggagtgatagcgacgagcgtgggtttagccgtggcgagaactcacacgtgcgggaggcacgtgtgcgtggtgcccgacgagaggtcgagggcggagtacgcggagagaatgggggaggcggggatgtcgccggagatcgtggtgggggaggcggaggaggtgatggaggggttgggcggcgggatagacttcatggtggtggattccacgcgcggaaacttctccagagtgctgaggctggcgaagctgagtaacaaaggcgcggttcttatatgcaagaacgtgaactccgccaccaatattgcttcttcttcgggtttcagatggcggagcgtgctcgaagaagggtcagggtcgcgtcgtgtggttcgttcggtgtttcttcctgtggggaaggggcttgacatagcacacgtgtcggccattggggggggctccgctgctaagagatggttcaagcatgttgaccaacaatcaggggaggtgcacgtcattagacgatgaatttgtgcatatttcatttgcagttatgaggtgcattttcaatgcagcttcaacgaataaaaactaaaacaaatgttctgattctttggccgaatgagttttgtctcataattattttgtaccagatttttaacatgttctttgtctcactagggttacgtacgtttttagttttagcagcacttctattagggacagattgggacaaaagttaagtatagttgcctaggctttctcatgtccgtaactagtattcaattttgctctttcttgtgtaaatacgctgatacaatacagcatgaattgtgtatgccacagaccatcctatttgttttatgattcgttataatatagatatatcaccttactct

SEQ ID NO: 11453 - DNA, 208 bp, Glycine max
  unsure (1)..(208): unsure at all n locations
  Clone ID: PAT_MRT3847_11034C.1
atnctangcacgcgtacgtatgctcggaattcggctcgagtctcanaagctnaanctcanacggnagtttaaaaanaanacaacggntnacgnnntntnnttctcaacatgatnnncgtgcntagnnncncgtcgngcacgggaatgnnnnnngatcgangccnaacgacgacgnttcggnnntcgaagggggcttttcnagatnngg

SEQ ID NO: 11454 - DNA, 297 bp, Glycine max
  Clone ID: PAT_MRT3847_110350C.1
ggggatcattggcaacaaactaccagatccatttttagcaaactcccaggtcaatacaaataaaaaggataccttatcctttaaccaaaaacacattttgggccctttttttttttacacatttctataaattttttttcttcggggggggctactaggaaagagcaaacaaagggggtcgacccgagtaaatacccgaaccaccacccttgttttgggtaaaaaatccaaacccgacccaaaaaagtctgggatcctaataaccaggcagggacttttttaacccacgcgcggttc

SEQ ID NO: 11455 - DNA, 235 bp, Glycine max
  Clone ID: PAT_MRT3847_110351C.1
catggccatgcttcgaacagcactgcctggttgtgatgatgggtcatatagtcgtgtcttcaaggctttaatgcctttggagaaagataaaaaaaagaggataattgaccatatcaacaaaatatcaacaattagaagatgtagcttcttgtcagctgcctctgacatctttagtgcaaagatttctggtacctttaaaaggagtgagcttacccatggaaggaagattttaatg

SEQ ID NO: 11456 - DNA, 1013 bp, Glycine max
  Clone ID: PAT_MRT3847_110352C.1
gtgttcttttgattagtacatccctctcttgtgtcgtttgctcccgccccatactattcgctggaccggtgtaatcctttctcagctgttcattgatagtcactgtctacatccgaacattatttccaccacatctcattatttacgctccctatatatatgaaaataagcacatttaatatttctaaaatgacataaatgctgatttcactcaaaagcatcatcgtacggagaaccgggagcaaaaaattaatcaagatcatatcgcgttcaataatgccagagtaagttctattgttcagggaaatcttttgataagtagatccctattttttaatgatttctcacgatccaaacaattggctgaaccggtgaaatcatttcatagaagttcattgatattaaatatatatatcagatgatgtgaggttccgttacttgatctttagcagtttgagctttcaatatcttttgcaaggcatcgtgacatctccaaggaagatggtcaaggaacatggatggtgaaacaataatatctttgaagctttctctatttgctatgtaagctctataacattttcccctctctagcattctccacgatgtcttaagatcagtttgaggtcttttcttctccagtacaacatgaattacaaaaccaggcagatacagctctgggggatcatctgcggatggattttcagaattcggaacagtatctataaactgagacactggatcatgatttgaatgtgcatctatagcaaatggatttgtaaattcggcattgtcaatttcaatgatatgatcccttgccctagtgtcagaccaaagtgaacattgttcatgctcattattgaggcaatcttcacttccaaaaggattcatatattcaccatagtcagcagtaacaagatcctttctaatagcctgaacctcttgttcgatgctacctgctgcaatgatggaagaacacacgatttccatcactcattatagtggtaaaaatatgt

SEQ ID NO: 11457 - DNA, 394 bp, Glycine max
  Clone ID: PAT_MRT3847_110353C.1
tctgtctagaggacgacatgcgcagaagacacctctctctctctctctggcagcatgatgacggacactccgcttatattaccgatactcctcatcttcctctatctctctcacactacctaatactactacatgagataattcccaccaagcatgtaccatcgttgaacctgatcctgggcacacacaacttggaatttcaagacaaagtttgaaggctattgagaaaataaccaaccccattgcatcagaggcagagattgtgccgtatcgtcccgagaaacctctcaagcttaatcaactattctctctttcttcctaccaagggcaagttgttgggcacatgcgtgacaccacgacaaatagaagatgggttggccgaacacctataaat

SEQ ID NO: 11458 - DNA, 3360 bp, Glycine max
  Clone ID: PAT_MRT3847_110354C.1
cccacgcgtccgcttgttctgtttcgcgctccttgcctataaattaacacctcctccacttcattcttcattcattcatttcattttccccttcaccccttccttttttgcgttcattctgttttcataggcttcttttttctcttgttgcagtgacgaacttctgaagaaatggcaaatcatcctttgacacactctcactctttccgcgagaggtttgatgaaactctcactggtcacaggaacgaaattttggcccttctgtcaaggcttgaagccaagggcaagggaatcctgcaacatcaccaagtggttgcagagtttgaagaaatccctgaggagagcagaaagaaactccaagatggtgtctttggagaagttttgagatccacacaggaagccatagtgctgccaccatttgtagctcttgctgttcgaccaaggcctggtgtatgggaatatctgcgtgtgaatgtgcacatgcttgttgttgatgagcttcgtcctgctgagtatctgcgtttcaaggaggagcttgttgagggaagttcaaacggcaactttgtgcttgagttggactttgaaccgtttaatgcatccttccctcgcccaactctgaacaagtccattggaaatggcgtcgagttcctcaaccgccacctttcggccaagctcttccatgacaaggagagcatgcagccactgcttgagttcctcaggcttcacagttataagggaaagaccatgatgttgaatgacaaagttcaaagcctggattctctccaacatgttttgagaaaagcagaagagtatctgatttcagttgctcctgaaacaccctactcggaattcgagaacagattccgggagattggtctggagagggggtggggtgacactgccgagcgtgtcctcgagatgatccagcttctcctggaccttcttgaggcacctgacccttgcaccctcgagacattccttggaagagtccctatggtcttcaatgttgttatcctttctccccatggttactttgcccaagataatgtcttgggataccctgacactggtggacaggttgtttacatcttggatcaagttcgtgccttggagaatgagatgctcaaccgcatcaagaaacaaggccttgatatcacccctcgtattctcattatcactcgtcttctccctgatgcagtaggaactacctgtggccaacgtctagagagggtatatgatactgaatattgtgacattctcagagttcctttcagaacagaaaagggaattgttcgcaaatggatctcaagattcgaagtctggccatacctagagacttacactgaggatgtcgcccttgaacttgccaaggagttgcaagccaagccagatctgattgttggaaactacagtgatggaaacattgttgcctctttgttagcacataaattaggagtaactcagtgtaccattgctcatgctctagaaaagaccaagtaccctgagtctgacatttactggaaaaaatttgaagagaaatatcatttctcatgccaatttactgctgatctttttgcaatgaaccacacagactttatcatcaccagcaccttccaagagattgctggaagcaaggacactgttggacagtatgagagtcacactgccttcacccttccaggactttaccgtgttgttcacggtattgatccatttgatccaaagttcaacattgtctctcccggtgcagacatgggtatatacttcccatacactgaaactgagcgtaggttaacagaattccactctgacattgaagagcttctttacagctcagtggagaatgaggaacacatatgcgtattgaaggaccgcaacaaaccaataatcttcaccatggcaaggcttgaccgtgtgaagaacatcacggggcttgtcgagtggtacgggaagaacgcacgcctccgcgagttggtgaacctggtggtggtggctggagacaggaggaaggagtcgaaggacttggaagagaaggccgagatgaagaagatgtatggcctcatcgagacctacaagttgaacggccaattcagatggatatcctctcagatgaaccgtgtgaggaacggagagctctaccgtgtcatctgtgacacaaggggtgcctttgtgcagcctgcagtttatgaggcctttgggttgactgtggttgaggccatgacttgtgggttgccaacgtttgccacatgcaatggtggtcctgctgagatcattgtgcatggaaaatctggttaccacattgatccttaccatggtgaccatgctgctgagatccttgttgagttctttgagaagagcaaggctgatccatctcactgggacaaaatctcccagggtggactcaagcgtattcatgagaagtacacatggcaaatttactcggacaggctcttgacactcactggtgtgtatggcttctggaagcacgtgaccaatcttgaacgccgtgagagcaaacgttacctcgagatgttctatgctctcaagtaccgcaaattggctgagtctgtgccccttgctattgaagagtaaattcatgtttgaagagaacatcaatggagaaaccggcttttggtcgtttgaagtcttatggagctttcataaataacgccattgattttgattgtgatcagcttttggatttaaagagtctaaaaaaaagtgtcgtttgtttttatattttgcttaggttttgggtaaaaaaagtaaaaaaagaaagtcttttttttttaaaattctttttgttgttgcaatattgtgtatgattggaaatctttaaattcgggttttccaccccatcaattcaatttaaagatatgccttcttccattcaatttcggtgtttactggtccacatttcccctccaactttatcatttatagatccttttatatctttatctattcgagcaatgtgcataaaaaaataatctatttgagctatgctatataacatgggcttggatcagtaacattcttagtggcaattgaaaaagggttgttgctttctgttccccaaaaattccttcctacacctttccagaatactttttaaatttctgaactgttcaattcggaagctattactttttttacacgtgtaattaatttggaatgtaattttacattccagattgaccccaaaagtcaaaaagggtgaagtaactttttggtgtaggaaacaatagtcatgaaaaagaagtccttgtcagctagatttcatgtttttgggctatgtatgtatattacacgtcttgtgattatgacattgagatttgttacggccgaacgcgtgggtcg

SEQ ID NO: 11459 - DNA, 3438 bp, Glycine max
  Clone ID: PAT_MRT3847_110355C.1
actaagatctagcacggtctctgtgttacaaccattggatcagagtctgagacataatcctgtgtttctagtacttcgttttcaattctagttctgttttggggtgctgtctttgttgagtttttggctcattttcattggaattaccattctgcacttcatgcttggtttctgggaagaccgttctgaacttttgtcggattgccctttttcattaaattaaattgaattaataacaaatgaaaatgaaataaaaatttattttttgtctgcagactggtcttgaactaagatcttctttgttagtttctcattgttatgttatggttatgttttggatgcatgctgttactggggtttaagagttttttgatcctgcaatgatcaatataaaattttaaaaatactaacatttaagatcttagttcaattaaggtacaggatctggaattaaatttttttttttggacctgtggttggtgagagagggtacttactggtcggtcttggaatccaatacagtcttctagaaagaaaagaaaaaaaaataattccacattgttttggttttgatttttgacttttggtgactaatccttatccttttttatggtggcttgttgcattcaattctaatcagtttcttcttatgcttcttttcttgttgcagtgaggatcttctgaagaaatggcaaatcaccctttgacacactctcactctttccgcgagaggtttgatgaaactctcactggtcacaggaatgaaattttggcccttttgtcaaggcttgaagccaagggcaagggaatcctgcaacaccaccaggtggttgcagagtttgaagaaatccctgaggagagcagaaagaaactccaaggtggtgtctttggagaagttttgagatctacacaggaagccatagtgctgccaccatttgtggctctggctgttcgaccaaggcctggtgtttgggagtatctgcgggtgaatgtgcacatgcttgttgttgatgagctggttcctgctgagtatctgcgtttcaaggaggagcttgttgagggaagttctaatggcaactttgtgcttgagttggactttgaaccgtttaatgcatccttccctcgcccaactctgaacaagtccattggaaatggcgtcgagttcctcaaccgccacctttcggccaagctcttccatgacaaggagagcatgcagccactgcttgaattcctcaggcttcacagttataagggaaagaccatgatgttgaatgacaaagttcaaagcctggattctctccagcatgttttgagaaaagcagaagagtatctgacttcagttgctcctgaaacaccctactcagaattcgaaaacaaattccgggaaattggtttggagagggggtggggtgacatcgccgagcgtgtcctcgagatgatccagcttctcttggaccttcttgaggcacccgacccttgcaccctcgagacattccttggaagagttcctatggtcttcaatgttgttatcctttctccccatggttactttgcccaagataatgtcttggggtaccctgacactggtggacaggttgtttacatcttggatcaagttcgtgccttggagaatgagatgctcaaccgcatcaagaaacaaggccttgatatcacccctcgtattctcattattactcgtcttctccctgatgcagtaggaactacctgtggccaacgtctagagagggtatatgatactgaatattgtgacattctccgagttcctttcagaaccgaaaagggaattgttcgcaaatggatctcaagattcgaagtctggccatacctagagacttacactgaggatgttgcccttgaacttgccaaggagttgcaagccaagccagatctgatcgttggaaactacagtgatggaaacattgttgcctctttgttagcacataaattaggagtaactcagtgtaccattgctcatgctctagaaaagaccaagtaccctgagtctgacatttactggaaaaaatttgaagagaaatatcacttctcatgccaatttactgctgatctttttgcaatgaaccacacagactttatcatcaccagcaccttccaagagattgctggaagcaaggacactgttggacagtatgagagtcacactgccttcacccttccaggactctaccgtgttgttcacggtattgatccctttgatccaaagttcaacatcgtctctcccggtgccgacatgagcatatacttcccatacactgaaactgagcgtaggttaacagagttccaccccgacattgaagagcttctttacagctcagtggagaatgaagaacacatatgtgtattgaaggaccgcaacaagccgatcatcttcaccatggcaagacttgaccgtgtgaagaacatcacgggacttgtggagtggtatggcaagaatgcgcgcctccgcgagttggtaaacctcgtggtggtggccggagacaggaggaaggagtccaaggacttggaagagaaggccgagatgaagaagatgtatggcctcatcgagacctacaagttgaacggccaattcagatggatctcctctcagatgaaccgtgtgaggaacggagagctctaccgtgtcatctgtgacacaaggggtgcctttgtgcagcctgcagtttatgaggcctttgggttgactgtggttgaggccatgacttgtgggttaccaacatttgccacatgcaatggtggtcctgctgagatcattgtgcatggaaaatctggttaccacattgacccttaccatggtgaccgtgctgctgagatccttgttgagttctttgaaaagagcaaggctgacccatctcactgggacaaaatctcccagggtggactcaagcgtattcatgagaagtacacatggcaaatttactctgacaggctcttgacactcactggtgtgtatggcttctggaagcatgtgaccaatcttgaacgccgtgagagcaaacgttaccttgagatgttctatgctctcaagtaccgcaaattggctgagtctgtgccccttgctattgaagagtaaaatcatgtttgaagagaacatgaatggagaaaccggcttttggtcgtttggagtcttatggagctttcataaataaagccattgaattttgattgtgatctgtttttggatttaaagagtctaaaaaaaaaagtgtcgttgatttttgatattttgcgtaggttttgtgtaaaacaaaaaacaaaaaaatagttttttttttattcttttcttttttgttgttgcaatattgagtatgattggaaatctttaaatttgggtgttccaccccatcaattcaatttaaagatatgccttcttcaattcaatttcggtgtttattggtcccc

SEQ ID NO: 11460 - DNA, 1341 bp, Glycine max
  unsure (1)..(1341): unsure at all n locations
  Clone ID: PAT_MRT3847_110356C.1
tttaggtaccaccgcgangaatcaatatatcttgcacttagatcttgaggcgccaccccgggaaaggttggaattggctaatgcagtgaaagctgatcccctattgacacaggtcgtggggtggagagtgtgcgcgtctcggctcacccaaatctggtcccttaaacgtgtccgccttcctgtgttggtaccctccaagctagcgcgacaccatcgtggcgaagtccccacgaggaccagcgtatgcacctcgtttccccggaaccccctctgatggcaatcggagatttgcttcatgtttgctcaaatctgtcaagaaatatcaatttcattgaacacacacgcattgctggttggacccggaaccaaagagcaagacccatcattattgaccctgctctttacttatcaaagaaatctgatttagcattgactactcaacgaagaacacttccgacgtcttttaaactgtttactggctcagcttgggttgtactgactcggtcctttgtggagtattgtatatggggatgggataactttccacggactatgctaatgtattacacaaattttatctcctcgccagagggatattttcacactgtcgtttgtaacactgaggaattccgtcacacggcggtaaaccatgatcttcactacattgcttgggacactcctccaaagcagcatcccatctctttaactatgaaggactttgacaaaatggttaaaagcaaggcactcttcgcgcgcaaatttgcaaaggaggatccagtgttagacaagattgacaaagaacttctggggcgcacacatagattttcacctggtgcatggtgtgttgggaacacagatggtggggctgacccttgttctgttcgtggcaatgatacaatgtttaggccaggacctggtgctgagaggctacgtgagctgcttcaggtgctgttatctaaagaatctctaagcaagcagtgtttgtgacaaagacgtaccctccaagtaggatgaatgatgtcaagtgtacataagtctgattatagatcatatatatctgatgtaaaaggtcagaattttgtgttcaatataggttcatattaacaatcaacaagcactcacatcagcagttttggtgcttgtttcggtctaggcatgcttttggttgcagtgccgggcaaccatttatgcaattacaacattttttgttgagttacaaaatggccattaaatttcagtggacttttggttggttatctattttcttatggatatatacttaggtaggcattacttacacttcatacaatttaatatatacatgtgttaagttgtttagat

SEQ ID NO: 11461 - DNA, 657 bp, Glycine max
  unsure (1)..(657): unsure at all n locations
  Clone ID: PAT_MRT3847_110357C.1
tgggtagaggtaccacccgaggaatcaatatatcttgcacttagatcttgaggcgccaccccgggaaaggttggaattggcaaatgcagtgaaagctgatccaatatttcgtggggtggagaatgtgcgtgttatgtctcaatccaatttggtaacttataagggtcctacgatgattgcttgtaccctccaagctattgcaatattgttgaaggaaagttcagagtgggactggtttattaacctcagtgcctcagattatccccttatgacacaggatgatttgcttcatgttttctcaaatctgtcaagaaatctcaatttcattgaacatacacgcattgctggttggaaactgaaccaaagagcaagacccatcattattgaccctgctctttacttatcaaagaaatctgatttagcattgactactcaacgaagaacacttccgacgtctttaaactgtttactggctcacttgggttgtactgactcggtcctctgtggagtattgtatatggngatgggataactttccacggactatgctaatgtattacacaaattttatctcctcgccagagggatattttcacaactgtcgctcgtaacactgangaattccgtcacacggcggtaaaccatgatcttcactac

SEQ ID NO: 11462 - DNA, 262 bp, Glycine max
  Clone ID: PAT_MRT3847_110358C.1
agcattcaaacacttaaatgattctttcagtttaacctcaatcaaaggcgtatatactgaattcgcgtgaaccttactctttggttttaccaatattagttgagccataacctataggaagttaacatcggatgcggcacttgatcctggtgggttactaacatttactatttaccacaaattggcgcggtggtgtacaatttctattgagaccaacatctgtaataggcgtgtgaaccctgctatgacgtgtgaattagct

SEQ ID NO: 11463 - DNA, 775 bp, Glycine max
  Clone ID: PAT_MRT3847_110359C.1
cggagacagaagaaactaatttgctacagcagttgtctgatgcctgcctggttgttgatgcattagagccttctgtaagggaagaattggtaaataatttctgcaatagggagcttacatcgtatgagcaaatttttgaaggagctgaacttgcaaagttggataaaactgaacgaagatatgcatggattaagcgccgaatgagatcaaatgaagaaatttggaaaatctttccttcttcatggcatgtttcttatcgtctctgtatcctattttgcaagaagacaaggaaacaactagaggacattcttggtaatctaaaggaaaagccagatgttgggaccttgttattggctttacaaagaactttagagtttgaggatgaattagctgagaaatttgggggaggcactcaaaacagagagattggaaatgagattgaagaaataggtaaagggactaattctagtagtagtgccatggatatccggaagaagtatgaaaaaaagcttgctgcacatcaaggaggtgacagtgaagtatgtatataaataaaaagatggaagtaaagatttggcagtgcctggagctgggttcaacttccgtggaattgtttcatcttgctttgaacctcacttaacagtatatgtagaattggaagagaagacactgatggaaagtctggagaaacttgttcaggaagagacatgggatattgaggagggaagtcagagctggtttttatccagtaacatgcagttgtttcttataatca

SEQ ID NO: 11464 - DNA, 276 bp, Glycine max
  Clone ID: PAT_MRT3847_11035C.1
ccctacagtctaaatactcattccattacactgagcacttgcttcctatctctctctctctgaaagatgtggagggggccatagtgagtagccaaagagcaacacaacaaaatggtgacgtttcgatagctttgtgagcggagaaagtgtgagacatgccaaaagcagagaaggagttacagagattgagcaagataatgaacagccagatacaacagaacaagaaaggccgcatagactcataacatgaacatgagagctgtctcaatgatgatg

SEQ ID NO: 11465 - DNA, 486 bp, Glycine max
  Clone ID: PAT_MRT3847_110360C.1
ggctcgaggtagctagctagggtgcagaaatttaaaaataaaaattcatcagaaaaatgggactggggatgtttaaggcattgttttgctgcagcaagccccatgaaattgacattgcagactcctgggactcatctcctgatcatacccccaaacaacattctaaaccaaagccaaagccaaatgctgcacctactcattccaataataaacaaaccaccacatctacacaaataggagcaattctagggaaaccatacgtgaacatacaccaaatgtacgagatgaagaaggaactgggaagcgggcagtctggtgtaacatatctgtgtgtggagaagacgactaagcgagagtatgcatgcaaatccatctctcggtcgaagctgctgagcacgcatgagattgaggatgtgagaagagaggttatgattctgcagcatctttcggggcagcccaacatagtggaggtcagaggggcttatg

SEQ ID NO: 11466 - DNA, 417 bp, Glycine max
  Clone ID: PAT_MRT3847_110361C.1
aagagtggtaagggggagggcggcgggggtgcgctttggagacagagctggtgaggacgccggagactgagccacgacggaggttaccaacaatgcggcgactagcgtcaacacgacggtggtgcaagccattgtagaaaagagagaaagctgaaacagagattgtgaagtgtttttccagtgactaagtcccaatatttgttgttgaacaaagcctatttccagtgaccaagcctcatctgttgttgaacaaaggctctttgtgtgagcatttggcagcaccagaaagaggaaaatggtggctagtgaagacatatatggtggggaggaagtttctcttgtccaaccagaccctgtggggttgcagattgatcgtttgcaaaaccaactcacagaaaaggttaaagaactggcaac

SEQ ID NO: 11467 - DNA, 265 bp, Glycine max
  Clone ID: PAT_MRT3847_110362C.1
tgacacaagatggaaagatggaagtgagtagaagtagatgcagtccagctgaaggtcatgcaaatcgagctcatgacgttgtaaatcatgcatctcatgaaagcctcaaggatcaaattcctgctgctgagaagaggtatgctactaaggataacaagtcagccatcattatgaagcttagacaaagagttgttggtgatcataaacttcttactgatagtaaagtgtatcagggtacagcttactccagtatctgatattagtg

SEQ ID NO: 11468 - DNA, 351 bp, Glycine max
  Clone ID: PAT_MRT3847_110363C.1
ggcacaagtgagtttgttgatcgagataactagaaacagtgtgatgaaaatgaaggtccttgttttcttcgttgctacaattttggtaccatggaaatgccatgcttacaaaatgttccctcttcgaaggaacactggatatggtgcccgtactccgggtgtgaaatgcacaatttggaggcttgctgtggaagcacacaaaatctttggctttgacaccattcctgaagagctgcttgaaccaacaagggaatacctccaggggccaacaatatatattagactccaaaacagttaaccaacagtcttacttttatgccagacacctcaatgtccatcccaaggaaacat

SEQ ID NO: 11469 - DNA, 271 bp, Glycine max
  Clone ID: PAT_MRT3847_110364C.1
aagagatgaggatgtatgagtaagagccatttggtttggaaagaggcatcctattagttcagctgctctgtctctagatgccttagtcttctgagaggctcctccatctccattgtttgagcctatagagttaacatcatggtctttctacagagcaagcttagcagaatttgtggccactttgttgtttctctatgtgactgttttgactgtgatgggtgttgctttatctcccatcttgtgctccattgttggtgtccaaggcattagt

SEQ ID NO: 11470 - DNA, 765 bp, Glycine max
  unsure (1)..(765): unsure at all n locations
  Clone ID: PAT_MRT3847_110365C.1
gccaggggggccggtcctgtactcgagccgaatcggctcgaggtttatggcaattctcatgctctggcgaaggcatttcagaaagggaagaccattagaagcctttatagtaactcctcccccaaatcgaaatgctgtagaacaactgctgacattacaagaggccattacacagtttgaatcgcttattcaagctgcaaatattattctcctaaaattgagagctcttctacttgctatattaccacaggctacagagaaggttgcactattacttgtattcctagcagcagtgtttgcttttgttcctccaaaatacatatttttggtggtattcgttgagttttacacaagggagatgccatataggaaagagagcagtgatagatggataaggaggattagagaatggtgggacagaataccagctgctcctgtccagctcgttaagcctgttcatgaatccaagaaaaatgagtccaagaaaaaaaaatgatattgccttacgcgagtcaattggcatttctcaccccctcgccgtgtcaccttgcttttgctttcctttctcttgtcttttcgtctggttcccttccgtttcgggcagcaaagttgtatattctcttgcctcttctatgcttcctccttaccttatactcgacgcgggctggatgggttgttcggcaccgcgccgtgccgtctcatacttgcacgtaccgatttctaaatctaatgtaatagaaggaattactgtgtnaaaaaaaaaaa

SEQ ID NO: 11471 - DNA, 246 bp, Glycine max
  Clone ID: PAT_MRT3847_110366C.1
ggaactcggacggaatctatcagggtgcttgtcaaaaagttgattggaatggcatgggtgaaccaaatacttcatacaactgtacttctcaagtaactgcaaacctgttgctgaaggtcaactagaaggacttcgggacttgaacaagcatgtcaaggtgacaacaacggaggcaaagttattgcctgatggatctctcacacctcagagattgcttccttatcgccattcacgcttcactgttaa

SEQ ID NO: 11472 - DNA, 685 bp, Glycine max
  Clone ID: PAT_MRT3847_110367C.1
tacggctgcgagaagacgacagaagggggtgcccctcaaaaaatgtaactataaataaaggcaggcacagactccattcttcggccataacaagctctgaaaagaagagagagaaggtggatagggtgatacagattacagagtttgtgtatccatcttcgttcgtcgcttggcttgttcgccttcactctccgacattcacatcattcatcagagactggagcctgcgaagaaaagaataatttatggaggacggcgcaggaagaggtttggaatgccagaagactatggatgggaaggtgagtaacagtaatgggccagagaaggaaattccttcttgttgtctgaaggccaaggcttcaatccccgagtcagaggcaaaattccattccactgttgtttctgggtggttctcagcttctcaaacttgctctgggaaatctgggaaagctgtttatttcaacaacccaatgtggccaggagaagcccattcaatcaaagtagaaaagatcttatacaaggaaaagtcggagtaccaggaggtcttggtttttgagtcatcaacttatgggaaagtgcttgtacttgatggaatagttcaattgactgagaaggatgaatgtgcttaccaggagatgatagctcatcttcccctctgttcaattcagtcccccaaaactgtttt

SEQ ID NO: 11473 - DNA, 450 bp, Glycine max
  Clone ID: PAT_MRT3847_110368C.1
accaggtgatacacactgtggcttatgtagatgatgttgcaagggtaagtgtggatacagttatcgatcctgacgctgagatcccctattcagtatgtgaagcaggcccttcatacatttgtagcttggcccacaaaccttgttaaacttgtattagatgaggatgaagaaattattccgcacaaagtgtatgcacatggagataagccggctaatgtggatgcagatgatccaatgtgtggcctgataaagtacaactttgatatttacgacaacccagtggaattcaaatttgatgggagtaaatttggaattgtagatgcacctacatcgatattcctaacatattctgatgttagtgaaataatagcaggagacaaaagtttgaacatatctgtacaacaattatggttgatgtatatgcatgagtggagtgaaaccttgggtcga

SEQ ID NO: 11474 - DNA, 280 bp, Glycine max
  unsure (1)..(280): unsure at all n locations
  Clone ID: PAT_MRT3847_110369C.1
cttttnttnaagtatacttatttagnaactctatttatttttatttccattaaggcactgaaattaattaagttaatatctctatcttgttggagctggctacttaggtagtgagactgagggaatggaaatctttgttgggttgttttgtttctaaagaaagcttctnccaacattatctgcngcattttntttntttcnccaaaaagnggaatgattttnncncnaaacctnggaaanggctatttttngaaaacggtttgtnctttaaaacccagtg

SEQ ID NO: 11475 - DNA, 876 bp, Glycine max
  Clone ID: PAT_MRT3847_11036C.1
gggattgaagagtaaacataggatccacgatcaactcgattttatacttttgtttctatttctctggaggcagctagctagggtcatactcatggggagcttgaaaggagacagtggacatgccaatggcgaaaatcttaccgaagctcttttgccaacacgagatgcacaacaacaacatcaaacagacgacgaggaacaaagatttggtgacaagctctggcttgaaaccaggaagttatggctcattgtggggccctctatattcagccgcctcgcgtcgttcaccatgaatgttgtcacccaagccttcgccggtcacttgggtgatgtcgaactcgctgccatttctatcgccaacaacgttcttgttggcttcaatttcggcctccttttggggatggcgagcgcgttggagacactgtgcgggcaagcgtttggggcgaagagataccacttgttggggatatacatgcagaggtcatggattgttctgttcatgtgctgtttcctgctgttgccgttttatgtttttgcaacgccgcttctgaaattcctaggacagccagatgacgtggcagagtggagcggggtggtggcagtgtggctcattcccctgcacttcagtttcgcgtttcagtttcctatgcagagattcctacagtgccagctcaagacagcagttattgcttgggtttctctgctgggtttggtggttaatgtggtcacaagctggctcttcatttatgtctgggattttggactctatggcgcagctatttctttggacatttcttggtgggttttggtttttggcatgtatgcttacattgcctatggtggctgccctttgacttggaatgggttctcccttga

SEQ ID NO: 11476 - DNA, 683 bp, Glycine max
  Clone ID: PAT_MRT3847_110370C.1
agttttcctttagccttgctggatcgcagggtaggctatcgccttctaaaggactacgaagatgtttgtccaaccccgccgacgtgttctctgccgaattgccctatgataccaacattcctcgaatgtacagtgaccgtattggtcgccgaccgatactcgctacgaggtccgattatgcggtgttatctataactttcccatccgactatcccaaatagtccagcttacactgctgtctcctcataaatatgataccccgaggcatatcctgaggaacgtgtttgcatatattatcttcatcctcctgtagagggtccatatgcctatgggcttgagagtagattgtgacacctctgctcatatcactcttagagaatagaatcgctgatgatactccttgcttaccacacctgaatagatcgtagtctactcgtgcaaatgtgactgcatgtgcagggacgattagatatgagatcatcatctcaagagagaggatggccgagtgctcaagtgactctgaagaaatggtgcgactcgtcgcctatgcctcttactggtgcggctgttagggaactggaagagatatatctgtgtaatgggtggatccgcctgctactgatgatgcgtatgataatcgcattggctacgaccacgatcctgctctcgtcgcatccatcatg

SEQ ID NO: 11477 - DNA, 152 bp, Glycine max
  unsure (1)..(152): unsure at all n locations
  Clone ID: PAT_MRT3847_110371C.1
cgcaactacaccatcgccatgcttacaccttgccttntttcgtttcactaatacataaatancactaatatattgatattaatacatcgtagaccaaatcagaacaatcaaacagcctttttctgtgtctcttccacacaacatacgnctcc

SEQ ID NO: 11478 - DNA, 307 bp, Glycine max
  unsure (1)..(307): unsure at all n locations
  Clone ID: PAT_MRT3847_110372C.1
ccataataaggacactannaatggagtggagtttanggcagcaaaaagttaacatttgtgtaacttgcagaatatccctcctgggaggtattcatgcataatagttttccacggaacaaatacaacggtgacaaaaaccagaattacaaggcacattaatgggaaggactatctctaagggcaggttcggtattttagggtggactggcgatccaccacaggaggggtgagcgccatagcttctggaggttttacagggttgaccaaaggcgggttaaggtagcttggattggcccatgaggctcat

SEQ ID NO: 11479 - DNA, 285 bp, Glycine max
  unsure (1)..(285): unsure at all n locations
  Clone ID: PAT_MRT3847_110373C.1
ccatcccatcccaggcgctcccgcaaannanaccctccggntctcncactcnattccagactcctcctgtgnagaataggctttttggtcacttcaccacctcaagtctccgtcttctcttnaaaatcancagcaaatcntaaatggcaggaaacgnttggntgaagcagcntaccnttgaatcggtanttgacgtngggcttggctgggacgatngccaantcnnntnggtncntcnganggngaggcaggtnnagncctantccnaaattggngagaggtnat

SEQ ID NO: 11480 - DNA, 387 bp, Glycine max
  Clone ID: PAT_MRT3847_110374C.1
ataaatacaatccatatgagttgaactaaacaacattgaacttatatcctacattatacaaggcatgggatggatcagaagacctatttaaacaaattcaagatagtactgtatttcaattgtcattcaatgaagtgtaagtacaggaaagacaattatccaaataaagctaggtacaaaaagaacacgaggattacacaggtagcaaattttggcctatttataatagtttaatatttagtcccacaaaaataaggtcattggttaataggaccatgaattggacattaattcatgggttaaggcatattcaaaatactaagaattacaggctaacaaatcataaaaattggactattggagagacccttttgtctgaatcaacct

SEQ ID NO: 11481 - DNA, 304 bp, Glycine max
  unsure (1)..(304): unsure at all n locations
  Clone ID: PAT_MRT3847_110375C.1
ctttctcttcttcctcctctcttcgttttccctcncgtaaatctacaatagcggactgacaaacttttactttccacgcgcctatcaaccatctcctcattctcatcatcaacaccttctactccaacacagagattttccttcttgaactcatcatcaacacctcctatactctttacaacattctattttataattttacacataatatcacactctatactcatccacagctgttcattcatattatttcacacaacactaacactacacttaccataccttacaccactattttcattac

SEQ ID NO: 11482 - DNA, 719 bp, Glycine max
  unsure (1)..(719): unsure at all n locations
  Clone ID: PAT_MRT3847_110376C.1
ccccgggttccgaacccaccgcgttcccgcctttctttccttctgtttgcacctttccccaactttagacaactccaaaagccaaacacctgaaaatcacttcccgtaacgaacactaagccttcctcttctaaactcctgagtttccttaaccttccttcagactttgactcccactccccaagtcacttcttttgaactcccccctctcaagtgtcaactttcctaacaaacctttctaaggaagcctggaccctgcctactccagtttgaaactttggaagttgccagttaaaagtgttcctttggacggtaaatttggtgctttcacgttcttgggtgaaaacaggactcctgagtttgtgaataagtttttagtccaaaanagtaaaggtttttcacccaaaaaaaagaaaaagtccataagtaggcagtgaaaggtataatttggattttgcattattttaaattgataaatgacaagggaaagatctgatggattgcaaaagaaacatttaatgcttccgtttgtggtgtggcaatctttcttggtttctattatgtgtaccattggatccattcattggttcttcagaattagtgggttcgtctgcactttgaatatggcagcaagtcattgaaaagacttgnggcatcatatttttgngtgcagatgatgatgctgatagcaagcaagatgaatcttcatcaagtattat

SEQ ID NO: 11483 - DNA, 714 bp, Glycine max
  Clone ID: PAT_MRT3847_110377C.1
tttgaagcatttctagtgcatctggattgtttgaataaagagactcctcgagacttctctttctctcctccaagggttttctacagtgtcccactctgattccaaagtcaataggtaattccttttagcttgtacttgttcattcaactggtcaatgtagaagtcaatcgaatgttggttattaaatgccatttcagctgtttcattcatcaactccaactcttgttcaagatgcgctagttctgaagtccttacagatacttcatcaacaagttttttctctttttgtttcaagactgtcaaaggtccatccccaatatgaaaagggttctcttcatttccaaatgaacctcctccagcatcaacctgcccttcaggtggttccttctcatttaatacacaatcaaattcatccttgataaaaccttccatcctagagctggactcatctttgttggcccgattgatggagacatcatccttggtaacctctatttcaagtgtctggggctccattatgagatcatttaatgtgctttcaagtttcaactatataataatcaccaagcacaccttcatcatcttccttttcagttgagtcctagaaagagcttcataagttaccttctcttagtttgtttctagcaaactttcacacgactctgaaatccttcagatggatgcaagaaaagccacaagcagaagatatagtct

SEQ ID NO: 11484 - DNA, 441 bp, Glycine max
  unsure (1)..(441): unsure at all n locations
  Clone ID: PAT_MRT3847_110378C.1
atgggaggcccanctctaaccgggggcaggggcgtttntgatttnctgcatgggggacggggcccaaccctgaggagccacttgtgcctgagattgcgcacatgtgcaaaagcgagaggggcaantgtgaggggacagcgcgcgncgnggcccanaantatncgatgggatnagccggtggagtttttangtgtgcaatgaggctgcgaaatcataatttatgtgaaagagacaaaagagattttnagacgggtttnagtgcgttcttttattattagtgagactccacaatgggganaggagagccnggtncgaatttntgagtattttctttncgatgggggagtgtgatgtgatgcgaacttttctgcgatgggagttnagattccaaaagtgagaaatgcgancattaccaattaggcgctanctattttttatgcg

SEQ ID NO: 11485 - DNA, 180 bp, Glycine max
  Clone ID: PAT_MRT3847_110379C.1
tttgcacatccaatgttctctacaaagacagaggaatacgtggagttaaacatagcaaaaaaagaaataaaagattgtgaaattggcattaaaaattccattggaacaataggaccattggactcattactaaacttgggggggattaaattgaaccaaaaattaatacccacaattaaa

SEQ ID NO: 11486 - DNA, 460 bp, Glycine max
  Clone ID: PAT_MRT3847_11037C.1
gaaaaccagcaaacccctttggtctctttaaaagactaaaaaggacaaaaagggcaggacggaaaaaacagaaatttatcttgttatttatttaaaaaaaaaaaaaaaagaaaacagaaaaaaaataccttgttttgctggttcctcccaaaaatcacaaaaaccccaacaggcggaaggggggagttgtattggttttttggccacataaagcagggggggcagggacaggcaaaccccaaaaaaaaaaaaaaagggggtgccccccctccccccccccaaaaaaacaactttccttaattacacataaaccgcattggcgggaagggggaactccccacacgccgacaagggaagttacaaaaaaaaaacaaaaatcttggggggggggggaggctgaattagcctgggtgccggggcaaccggaaaaaaatgaagaaccatccgcccccctttctct

SEQ ID NO: 11487 - DNA, 1343 bp, Glycine max
  Clone ID: PAT_MRT3847_110380C.1
ctgaaaaacaaaactcaatttctttaactatttatcccttttaattattgtgtcttatctatatcttttttttagggggtcttatctctatctttaaattaattttaagatttttttaatatcaataacctcatatcataatttaaattattctaaaatataatttatatatttaaatatttatttattataaattttaattatataaagataaacatttatcctgtaaaaataacctaaatttctagttacaataatattttaaaaataatttaaaatagatagttaacgattatgatgcatggcgtgaataacttcttacatcatgttatatttttattacatgtaaatatttcgtgtatttcatcaatatttatattcaagttcaattttaaaaaaatacatattaagacaagttaagagattaaatttttttaaaataagtaaatagcgtacaattatttccgtaaaatttaaagcatatattaaatgataaattaataaatggtaacagttttttacttatggagtgtaaatctaacatcctccccattatgagaaatgctttttatataagtattttttaagaagtaaaaaaatataattttctaaacaatcatactaacaaataaaaaatttatgtgttttactaaaataaaaatttatttcaatcaataaatttaaataagtgaccctatttttgaaatgacgcgtttacttacttaattgttaagttactcgtgtccatcacaatcgggttaagacacggattttcttttgattacttttgctgaagtggtccatttcttgtgccgtcgtgggtttgccatttacttatccgcgtctgtgtttgacgacgccatccaccccaacccaaacgccatttgcccgttaccggtagatccggttgcccactacttttccttttctttcacttttctgcatttcaaaccaaacaaacagagcagagagcgcacaaaaaccgtttttcagtaattagagtgcgattctgctccttttcaactcccaaccctattcctagggtttttcaggttttccattttccatttccttcgcttattcttgctattcccttcgttttttgtttttccgagaaaaatttagcgcggaaaagaaagcttttcgatctcgtgcttttcttttcgtttcgtttaaattcaagtttctgaactgtatgaagcttctttctgtctgaatcgtgtgatcttctgtttatatgcggaatggtggttcttgtagtttcacttgctatgcttgtagcttcttgtagcatttcgtgtcttttctgaacatggaaggtaattgtcatactgcaggcatgc

SEQ ID NO: 11488 - DNA, 896 bp, Glycine max
  Clone ID: PAT_MRT3847_110381C.1
gagtttgatctgcagacaagaaaatggcaaaaaatacctaacatgttccctgggcgaaatggaggaactgaggcgactgagattatgcccaacaagaggtaaggagatatgataaagacaataatttgtgggtcactattggaagattacctgaccgaatagtctcaatgaatggctgggggttagcctttcgtgcatgtggaaatcgcctaattgttattggtgggccaagagctttagatggaagggtaattgagatcaatgcttgtgtcccaggtgaaggtgtgccagagtggaacctgcttgctagcaggcaatcagggagctttgtgtataactgtgcagtgatgggatgctgaggcatttgcttttggtgaatagtgctatatggatttattctgaatggaattaacattcttcactttcaaggagagatgattctggctcttgggtaatcagcccacctttgggggtaaatatttactcctatttagagtaacagatgcagttttagaaggttcacaaaactgagtcttttcattttaagttatcatgatggtttttcaaatgttgacaccatgacaggtgaataattagctcatgttggggttgcaatcacctttttcataagttcaattgaagtgttgcagaattgtaaaaaaaaaaaaaaaagactcagttttgtgaaccttctaaaactgtatctgttactctaaataggactaaacatttaccccaaaaggtgggctgattacccaagagccagaatcatctctccttgaaattgaagaatgttaatttccattcagaataaatccatatagcactattcaccaaaagcaaatgcctcagcatcccatcactgcacagttatacacaaagctccccgattgcct

SEQ ID NO: 11489 - DNA, 509 bp, Glycine max
  Clone ID: PAT_MRT3847_110382C.1
attgccttcatttctcttacatacgtggtggtgggatcacagtccagatggcttgcaatatatgctacagtgattggaagcttgataatgctctctacaattggctccatgtgctattgtgtaattttgcacaggatggaggagacaaaattgagagccgagagtcgatcgttctccatgtctcatgcatcagaccaagagattttgaacagtgaatacaagagaatgtacgcactgtagtctgtagtgtagttgatatatctgaatggaatggcttgtatttctagcatattcttgaagtgataataggtagtttacactatcggcatcagattacgaaattagactacagataccgtgagaaaagagggaaaggaagaaaatgggtggggaattctcgtcacatccactcgtaagtataaaggatgttgtcaaatttagcatgacgtcagtgaaatgattatggtgttaaagaatgaagacttgagatgatatatccatttgtattt

SEQ ID NO: 11490 - DNA, 1326 bp, Glycine max
  Clone ID: PAT_MRT3847_110383C.1
cgaaattaatggtttggatagaagtatggtacttgatagaacattatggcggaagttgatccatgtagccgaccccacctagtgggataaggcattgttgttgttgttgttgttgtaggattgtaaagttatatctgtgtttcttttttataaaaaaattactattaaacactatgaaatctattaaattatgtaataagtaccactaattaatatgtacatgtagtaacaatctatcgaggctagaaagcagtcgtagacatcttattcacagaggacgaggaaggatgattggtgtagtaacctgaagatgattcatgttcagctgaatgtcttctcattctgccatgcataaaaaatgctggttctagagggaatggcatttcaaatgaaggattgctaagatatgaaacaattgttcccattgttggcctgtcatctggattttcttgcacacacaataaaccaatctgcatacacttttccacttcgtttggaacataagattctagcagagttgaatccagcaattgatatggtgattcatccctccagttattccatgcataactcaataggtcatcaacacgacatgattcaaaagaacaagagttcttcttgccactaataatctcaagaaccataactccaaaactgaatacatcagacttctcagaaaattgtccatgcattgcatattcaggagacatataaccatatgtgcccacaactctattcgtgcatccttgaatttggtctgtagctaccatccttgccattccaaaatcagagatttttggattgatgccattgtccaatagaacattgcttggtttgatatcacggtgtataatcttaagacgagaatcttcatgtagataaagaatacctcttgcaattccttttacgaagatgggatgaaagctttggtgtagattgccgaaacatagtccaatgggcaaaattacacattgatagtggagatatacagggtattatcgaccccttgctgcggaatgactatgaccttcaatcgatgtggaaaataacaaagaaagcattcatgtgtgttcagccccacggacatatgcggccaacgatttcagaagttataaaggagatccaagatgcaatatctattgagagacaggcataagcattaagagaaggcaattcagatgacatgtcaaaacattcttttcattctgccatgaacatggggtcaatggatctaggtggagctgagagttacctgtcaattgatgaatcaattgcgcagcccacagcaagatagatctctcttgtaaacaaaagcaaatttttctt

SEQ ID NO: 11491 - DNA, 278 bp, Glycine max
  Clone ID: PAT_MRT3847_110384C.1
tttttagtcgtaacgccactaaccctatgctggggcgacttcttgagaactggacgagtattaaatatatggttgatgaggggccttttgcatctgtgaactaggatgtaatattttattcacttaaataaagcgcattactatgtgcaccgagtgaggttaaatttaaaaaaaaaaaggctttgaaggataaaataaaacaggcgagaacttgattcaaagggggcaacgttttaaagtgatcaccaattacctacacgtggatcgaagcaaatact

SEQ ID NO: 11492 - DNA, 1379 bp, Glycine max
  Clone ID: PAT_MRT3847_110385C.1
tcgtctcccgaaatacactggatttaggactgataagaaaggtcaaactgccctacacatggctgtgaaagggcaaaatgaagaaattttgctggaattggtaaaacctgacccagcagttttgagtctggaagataataaaggaaatacagcattgcatattgccacaaagaagggccgtactcagaatgttcgctgcttgttatcaatggagtgtatcaacatcaatgctacaaacaaggctggagagactcctcttgatgttgcagaaaaatttggaagtccagaactcgtctccatattgagggatgctggggctgccaattctactgaccaaaggaaacctccaaatccatcaaagcaactcaagcagactgtcagtgacataaagcatgacgtacaatcccaactccaacagacacgtcagactggcatgagggtccagaaaattgcaaagaagctgaaaaagctccacattagtggcctgaacaatgcgataaactctgctactgttgttgccgttcttattgctacagttgcttttgcagccatcttcacagtccctggtcaatacgttgaagacaaaacacatggattttcacttggacaagcaaatatagcaaacaatgcagctttcctaatattttttgtgtttgacagcctggcattgttcatctctctggcagttgtggtggttcaaacctctgtcgttgtgattgagcaaaaggcaaagaagcagctcgtttttgtcattaacaagctcatgtggatggcttgccttttcatttccattgccttcatttctcttacatacgtggtggtgggatcacactccagatggcttgcaatatatgctactgtgattggaagcttgataatgctctctacaattggctccatgtgctattgtgtaattttgcataggatggaggagacaaaattgagggccgagagtcgatcgttctctatgtctcatgcatcagaccaagagattttaaacagtgaatacaagagaatgtacgcactgtagtctgtaggatagttgatatatcagaatggaatggcttttatcctccagcatattcttgaagtgatatgtagtttctactatcagtatcagattttaccaagacaagctgtctatgttagactacaggtaccgtgagaaaagagggaaaagaagaaaatgggtggggaattctcgtcacatccactcgtaattataaatgatgtcaaatttagcatcatgtcagtgaaatgattgtggtgttgaagaatgaagacttatatccatttgtatttactctagtattctattataaactaaacttcataaaagaatctaattcaattggtttaagagagtctctgaatattat

SEQ ID NO: 11493 - DNA, 504 bp, Glycine max
  unsure (1)..(504): unsure at all n locations
  Clone ID: PAT_MRT3847_110386C.1
tgaaccaaaaaaagggaagcatgctgtattcgattcnagnntgaatgaanaatacacgcagctacctgctcagtggccgccctttttttttttttttttttttttttttttttttttgaagtcaaatgatattatctggtggacaggtgatttcttacagcgccccaccaaggaacaaaatgtccacatgattttaaaaggttaaaaggtttttgagttttgttaactctaaagaatctgttaaataacatataattcattctttggaacttgagactggttaagatgttgttgtgcccggggttagccaaatgatctaggatggtttggtttgggcccaacacctgtgacgagagctttatcaacatttcccaaaattgccaactttaccaacctttcttttttaattttcttgagctataaatccttctagggcttttcatttttaccaaaacctaatgggttgtacaaaggttcttctggataaacttgctcaccagaacc

SEQ ID NO: 11494 - DNA, 2184 bp, Glycine max
  Clone ID: PAT_MRT3847_110387C.1
tgcccgcacaacacgaaacacacacatgacacaacacagcacgctgcaagaacaacaacaacaacatagccacaacacaaccaaatgacacccacaaagagggagacaaagagagacgctactacttcttcctcctctctgctcgcagaaccctgaagctccagaagattgacacaacacgaaacacacacatgacacagcaacaacagcatagccacaacacaaccaaatgacacccacaaaggaggagagaaagagagacgctactactactactactactactacttccccctctctcgcacagccctgaagctccagaaccccgttttggaattaattcgcttctctttaatctaaattcgttgattctttccgttgacatgttggagggtccaacctttcttgtttcgagggacttaccgagctcatgtgagcaagagaccaggtggatttacaattccttctgtgtgatggagctcgcgagcaataagcgtcaactggaactagaggaagaagctgtgctgacaaagtcatgcaagctttcagatgctccagaggaaggagaaacgaagatgaacttccaaaatctttccctatcagtcaaccaagcaaatgatcaaaaccattcaagtgatcagtctgactcaagttcacttatcttccaacttggtcgggacatctcaattaattgtctcctacgatgctcaaggtctgactatggttcgattgcctcattgaaccaaagttttcgatctcttgtccgaactggagagctttataggctgaggcgacagatgggtatcatagagcattgggtttacttctcttgtaatctccctgaatgggaggcattcgatccaaacacccgtcgatggatgcgcttgcctagaatgccctctaatgaatgctttatctgttcagataaggagtcattggctgttggtacggagcttcttgtctttggaaaggaaataatgtctcctgtcatatacagatatagcattttaatgaatgcatggtcatctggtatggaaatgaacattcctagatgcttgttcggttctgccagccttggagaaattgccatattagctggtggttgtgatcctcgtggaaacatcttgagctcagctgagctttataactcagaaactggaacgtgggagcttctcccaaacatgaataaagcaaggaaaatgtgttctggtgtatttatagatgggaaattttatgtcattggcgggattggagtaggtaattcaaagcagctaacatgtggtgaggagtttgatctgcagacaagaaaatggcaaaaaatacctaacatgttccctgggcgaaatggaggaactgaggcgactgaggtatcatctgctgctgaggcacctcctttggttgcagttgtaaataatgtattgtattctgcagattatgcccaacaagaggtaaggagatatgataaagacaataatttgtgggtcactattggaagattacctgaccgaatagtctcaatgaatggctgggggttagcttttcgtgcatgtggaaatcgcctaattgttattggtgggccaagagctttagatggaagggtaattgaaatcaatgcttgtgtcccaggtgaaggtgtgccagagtggaacctgcttgctagcaggcaatcggggagctttgtgtataactgtgcagtgatgggatgctgaggcatttgcttttggtgaatagtgctatatggatttatatctgaatggaattaacattcttcaatttcaaggagagatgattctggctcttgggtaatcagcccaccttttggggtaaatgtttagtcctatttagagtaacagatacagttttagaaggttcacaaaactgagtcttttcattttaagttatcatgatggtttttcaaatgttgacaccatgactggtgaataattagctcgacatgttgggttgcaatcacctttttcataagttcaattgaagtgttgcagaattgtaactggtctcagtttttgtcttttttttttttttctttctgttacccccccttttttaaatatgtattctaattgtcttcagatcttccccaaaccctgtttgtgttgcctgttattttctttttcctcccttttatggcagaaaaaaatgagacataaggaataaccttttctt

SEQ ID NO: 11495 - DNA, 340 bp, Glycine max
  Clone ID: PAT_MRT3847_110388C.1
atcctcgtggagacgttcggtctgataagcacacacagattgatcgatgatggatacgttgaccacatcttgttctgcaactcttccatggtcttattgttgctttgacatttacgcttcaggaagagctagcctttatgcttccatgactatgcaatatcgcttaccatacggcaagcgtgacgatgcttgtgattcaaactccagagaactgaacaagctatcaactcttagtgatcgctgtctctctgttacccctctttacaaagatgctgagatggggctgcagctgagtgctgcgacagtctgaggatggaccacgtgtgcagggatggaaggc

SEQ ID NO: 11496 - DNA, 520 bp, Glycine max
  unsure (1)..(520): unsure at all n locations
  Clone ID: PAT_MRT3847_110389C.1
aattgaactccgaatccattaagcaattcagtgaagctgaaggtatatgcggaccgcatgtcccaaccatcccgtgcgattctcatattttacaagtattttctcttattatctttgcttttcctttcttattttatttttggaatttgaatttggtctctgccgcatgttagagtgaatggaatagattttgaggatgtcaaagtcgatttatcccaacatcaccagctatctccccaattccgagtgattaaccctttaatgaaagtccctgctgttgttgatggaaggttcaaactatttgagaggtacttcaacttcatttttcatgcaattctgctattgatttatcttcattcttcattcttattaatttgtgtgttattttcttctttgcacttgcagtcatgctattctcatatatcttgcttatgcatttccagataaatatattttacagttgcatggtacaagtatacaaagagttttttcttacanaaatcgatattgcagaattaat

SEQ ID NO: 11497 - DNA, 500 bp, Glycine max
  Clone ID: PAT_MRT3847_11038C.1
tataggtaatgctggctcgcctgcctgcaccggcccggccttactggctggaccgacccacgcgtttttttgacagaggagatgaatggggcatgcgttgtggagcagcgctctcagcgatttgcaggagcgattaaaatgagatgctcatgtagatatagcctagagaaataacaagctgagccaggctactgcgctatgaatagtttctacaaggctgcaagccttttgtgactttgagagtgtctggtgtcgagaccgtaattagtggacatgtgcatgcacagcctcacttactaggttataaaatgcaaagctgtgtacctgggcatgatgctagcattactgagggcgtagacaaaactagtgcgacatcacaagtgacactggatggactgtgagaccatctcaagaggaacattgagcagatgactagatgtattgcctgtgactactgaggacccaggaagtatagggtcacgaatccactaaattctatg

SEQ ID NO: 11498 - DNA, 148 bp, Glycine max
  Clone ID: PAT_MRT3847_110390C.1
ctaccacatctgcctctaaattatatgctccatgtgtcgttcatattattaacaactctataaactctttattaatcctatagattctctttctacactacatatctttttccattaactccaacatccacatgcactaccactaatt

SEQ ID NO: 11499 - DNA, 310 bp, Glycine max
  Clone ID: PAT_MRT3847_110391C.1
acgagctggtgccgggtttttttttttttttttggataatttttttttataatttcatttaatttcaaaatacaaaaaagaaattttgtgagaattcaccattctacaaacattttaaaatttacaagaacctaaaatggtctggcatgctataaaggctaatatctacttttttttttatatgggggaagaaaccacaacaccttgaaaaccacatgataaatctgttgaggaatggacattgtgaagttatccttggctaatttatctgccacttgattcccctctccaagagaagcaagctgcttga

SEQ ID NO: 11500 - DNA, 466 bp, Glycine max
  Clone ID: PAT_MRT3847_110392C.1
gcaaagaagacccgataaacaaaaaacgagctctgaactctgaactctgaactatagctactctacccattacattacacacttagctcaacaacaaccatatttccaacggtgcatggcaatggtgatctcttctgttcatgccacactatttgccagggcctctttcttttgccaaagtagtggcctaagaagctttagatcgtgtttacctttctcatcttcagctgcttctgtctcctctcacaatctttcacggaagaaatggaggcagccagtgttgtcagtgttggatcttggcggagtcaagataagcagagaagatgtggtgagggatgatccggcaaacaatgtgccagacaatatattttcaaaacttggagtgcagcttcaccggagggatcaacaccctcttgggatactgaagaatgcgatatacgagtattttgacactaattattcaaat

SEQ ID NO: 11501 - DNA, 260 bp, Glycine max
  Clone ID: PAT_MRT3847_110393C.1
caacggcagggcttggtcatactgatccaccacacacggcgtcctactgtctgttcacgctacgatctctatctctgtctcttcgtgcgttctcggcttacgtacacgtgcgtccggagacttggctattctaatgtgaatccgagagccatggacacggctcgccggctctgacggcataactgcgaagactgggtcgatgcatgctttaagcacgactctgacagtacggatgtctgtagatggtgcactaggaacaa

SEQ ID NO: 11502 - DNA, 657 bp, Glycine max
  Clone ID: PAT_MRT3847_110394C.1
gtcgagctcgagccgattcggctcgagcaaaaaacgagctctgaactctgaactctgaactatagctactctacccattacattacacacttagctcaacaacaaccatatttccaacgaattgagttatttctaattagcctcccatccagtgaggcaccggattccgtaggataaaatagcttgtcaagagtagagttgccttgtgaaatctgtttctgtcttctgtcaagtgcatcaaatatagctggttaagattctccacgcaggtgcatggcaatggtgatctcttctgttcatgccacactatttgccagggcctctttcttttgccaaagtagtggcctaagaagctttagatcgtgtttacctttctcatcttcagctgcttctgtctcctctcacaatctttcacggaagaaatggaggcagccagtgttgtcagtgttggatcttggcggagtcaagataagcagagaagatgtggtgagggatgatccggcaaacaatgtgccagacaatatattttcaaaacttggagtgcagcttcaccggagggatcaacaccctcttgggatactgaagaatgcgatatacgagtattttgacactaattattcaaataagttcaacaagtttgatgatctttgtcctatt

SEQ ID NO: 11503 - DNA, 452 bp, Glycine max
  Clone ID: PAT_MRT3847_110395C.1
gctctctggatcgcactgtccaaggtcctgtcacaaaaaacaaaaacaaaatggcgaggctacgcgggaatacaattactagtaggctacccagaaggtaagcccagtggttaagcaaccagtggtggtggttatttgaattgttccaacgcgtagccggttaattagccgggtggcacggtggtccacgcagcatatatgtaaaccgggtatgccttagtgggggctggtttgacacacaaccccgagtaaaataggtaacgagcagtagcagtggtacacccccaaagcgagagtacgccaatgtagcaacgttaggcaacccgttagcgtgcgtgtggagtaggtgtgtattaaatgaggttgttgtaatagccgcaggcctagcacgtgtaaagacaggtgacagcgtaacaaacaacaggggttaagtggataccagcgacattttg

SEQ ID NO: 11504 - DNA, 197 bp, Glycine max
  Clone ID: PAT_MRT3847_110396C.1
tcatgcgagaacataaatgcacaagcactcaaatcaacatgatctgttatgtaactatccaactctaggatacaaatgccaacattaaaatcactgttatctatattactctaatcatgactagacaactctcattttacgcatcttaatcactacccagcatatcataggatcatacagacctttttctacccatc

SEQ ID NO: 11505 - DNA, 282 bp, Glycine max
  Clone ID: PAT_MRT3847_110397C.1
aaagagaaaaaaaaagtaaaatataattaaatactaaatactatatatgtgatatcatgcacctaccgaaatgtaaaacaaaatatatatatatatataaaaaagcagctgccgaagttcttaaaggcttgcttcgcgagtctgtctattttatagttctgcttattttagccatgtgcaggaaaatatatactatgtgcaaaagaaatgtttgatgcaaatctagaagacttttgatgttttaataaaataacaaaacgaacaagttagtgcactttcttg

SEQ ID NO: 11506 - DNA, 148 bp, Glycine max
  Clone ID: PAT_MRT3847_110398C.1
tattaacataaggattcgtacagcacttgggaagggtaagaaaattggtttgcttactacagtagaaccttttccagtcgctatactggctgatcttttggctgttaagaatgcacttttgtgttcataactcgcttactccatatgc

SEQ ID NO: 11507 - DNA, 183 bp, Glycine max
  Clone ID: PAT_MRT3847_110399C.1
ccacgcgtccgcggacgcgtggggttttaactgttcagttcaagtttgggctcaacggtgcaatgacatcaacacttttagcatattggattcctaacattggccagcttgtgtttataatgactaagtgccctgacacatggaaaggtttctatttcttggccttcaaaaatcttttggcct

SEQ ID NO: 11508 - DNA, 373 bp, Glycine max
  Clone ID: PAT_MRT3847_11039C.1
ctcaaaaaaagtcagaaaaataattgattatttataggggggcccactatttatagcgcattcatgcacatatattaatttctttgaatgcctagaccccatgtttttgtgccactgcacatgttggataaatgagattcgtcagtcaagtttgaacatgaagtacatctgtgtcgtttggctttctaaaaacacatgcccttcttgtacgccatcgtagctccaactactaataaccgatacacttatttaattcttactactaatttctccccctattattagtattatttattagtttataatttgtacattattccatttttttcacataactttcccataatttattctaaaataaaaacattttaaa

SEQ ID NO: 11509 - DNA, 444 bp, Glycine max
  Clone ID: PAT_MRT3847_1103C.1
cccacgcgtccgacatacttgtgatgataaatatgtgacaattataaaatatttttatgagagtaatagtcagtgcaaagaaagactattatttgacaaaactaattgtcaatatttgatcttgagagtaccaattataaaataatttttctattcaaagattaggaactaacgttgtgccgagtatcttgtggtgagtctattatttaaaatattagttgtcttgtttatatatatatatatataaacttgtttgttatttgtaaagatgttaaatattaggaatgattctttgttattgactaagtagatatatgacttatgacagaaataatgtcaatgtacaaaatattgattttgatacaatattagtatatatcacattatctatgggtgtaggtggtttggaaattaacaatgactgatttcattctactttttttt

SEQ ID NO: 11510 - DNA, 316 bp, Glycine max
  Clone ID: PAT_MRT3847_110400C.1
ctgatgctcgctcatgtagtatttcatcacaatgaaatctttaaaagatagaagattcttgttcgaagaaaaagccgaaataactgacttagcatctgccgtttaatttaacacgtttgtttgtgcttgaatgcgattgaacgtacaaaagatatgaaacacgggaatatttgtggactgcactgtgttgggcacaatattatttgacctgaggggaggctgggcaattgatcccatgttgttatctcaatttagtacgatgcgcttcgaaccctgaagaactacaacggcgtttgaaactgcaaaaattatgggg

SEQ ID NO: 11511 - DNA, 392 bp, Glycine max
  Clone ID: PAT_MRT3847_110401C.1
gctgcttgagatggtataaatacgcatacaccatgttttttatctagggacacgcttaaaggagttaccacggactgttataatttggtcactactactagcggctgcacatattgtgatattacatgaagaaagtacatacttagccatctacctttgaggtgtgacatcagatctatggcttgtgcctaagacactttatgcagaggtacttggtaagatggtcgctccttccaatagagttgcacctgttataacacccaacgagctacctgaaagctgatggcttattgctcgtgttccccaaagaaactagactgaggggttggcaatacaaaactttgatagatgcatctgtatgtctgtggcgcacacaggcactagctggtaag

SEQ ID NO: 11512 - DNA, 312 bp, Glycine max
  Clone ID: PAT_MRT3847_110402C.1
ctcgtccaaagaaacctgatgaatcggatccggacaacgcgaggggcgcggctaaatcgcaaggcgggagagcccttacttctcagataagggatatggcgttgaaggcttcgggagcgtacaagcattgcgcaccgtgcacggggccagcgacgcaggggcgagttcggagcaacgccaccgagttggacgcggattcggaccggttccggtggtcgtaccggagaacggggagctcgagctcgacgacaacaaggacgtgggggaaggagatggaggcgcggctgaaggggatttcgagcggggagggaa

SEQ ID NO: 11513 - DNA, 206 bp, Glycine max
  Clone ID: PAT_MRT3847_110403C.1
tccaattcctaattgtttaaacctaattcttatttcttcatcgttcgattcttcgtctcctaaagatgcagatcttcgtgaaaactttgaccgggtagaccatcacccctgaggtggaatccttccgaaacatcggatactgtgaaagctaaggtttcagacaaaggaggggttccccctgaccagcggaggacttatctttgcgg

SEQ ID NO: 11514 - DNA, 489 bp, Glycine max
  Clone ID: PAT_MRT3847_110404C.1
attatctattttttttttttttttctttgtggatttggtttttttttacaccaaaaagaaaatctggtgatgacaacataaatagaacatatatagatgcccctaatgaatccccggaatttttcaaaaggtgaaaaaaaatgccagtggaccgctacgtacgaactgaaggaagctattatcttcaaaatggctgaatcacagacctatatccacagggagggaaaccggaacgaaaagctttgaccgggatgactgacagtggcccaccacccaagggcggtgatgaaaactacgtgccggtagacaaaaggcaaaactaagcgatagttcccaggcccaaccacgaaaggacacaggtcccctggcgctggctaagggccatgctggctaaccagggcatgggccgaaaaaactttgttcacccatgaaatcactggccatggataaataccaaacgggtgaacgagaaccgcacactggggggaa

SEQ ID NO: 11515 - DNA, 1097 bp, Glycine max
  Clone ID: PAT_MRT3847_110405C.1
cacgaaggaggactcggcgggggagtggcagcttgccaagatggcactggacgcgacggaatttaactatcaacagatataccacttcgtgcacacgcacggagtgtcgatcccgatccaggtcgagatgatgcgtagcatggcgaaggaccacccgatctacgctctactagactaccatttctttggcaactttgatttcgaattcctgagcggaatagtcctttttgcggctaatacaccgtacgacgagtcgatggcgttcggggcgagcggctctattcgctgcctctacgacgagtactcaaaaacgtcgctagctgaagactttcccgctgaaattgcaaataacggtctccagtatctgccaaaccaccgctacgtcaaatatggcgcgatgtactactccatcatcaagaccttcgttactgcgtacgtgaaagcgtactacgtctcagaggataccattaaaaacgattcggagctacagacttgggcagctcgagcgactatcgtctggggcgtcaacgacttcccttcttccttcaagggctatgatgatctcatcaaactcgttaccaatctggtgtttcaaaacgcggtgaaacaccacttcatgaacggaagagtgtcgtggcacagtcaagcggcaccgttccgtactggagcactttataacgcaccacttccgactaaaaaaggggtgaacgtcaacccgttcgactacgtcattccgtccgacctgttcccgttgctgtcctccacggtagtacaattctaccgcccgatcccgctgtcccagtccttgctgaatggctacacaacggctccattctccaacgaggccatcctgaccgatgccatcacccaattccaccaagccatgctagccatggaaacatcgatgagcgcatccgatacaaagaagcattacctcgacacgtttgtaaagccttcggtgatgccgtggttttcgtacgtctgaagcggtaagaatttttttacttccaatagtaagtaaaaatggttttttgaaacaacgctgacccttttgcatttttgcccatttcttaaaatggctaataaaattttcaatc

SEQ ID NO: 11516 - DNA, 470 bp, Glycine max
  Clone ID: PAT_MRT3847_110406C.1
ctcacacttaataatctaagacttttttaaaatatcatacaaactcttatacaggtgggcttatattaaattatcttccaactcccttatttacacttcaccaatcctcctcctttcctctaaaatactatacacactttatgctatctcacatattatcaaataaaccatcctatcaaatcatttatccatctcacctttctatcccatcatataaaactactaataccctatttacacacatctctttatttacatgacacttattccatcctattttaatacatttactcacatttatcccatgtctaaatatttttcaaattttatttaatctatcattatatttaatattatccaatattattataccctatctctctataataatattattattttaatctatatttaattttatttaaacatattatcattttatcttcatactataatcatattatattatt

SEQ ID NO: 11517 - DNA, 872 bp, Glycine max
  Clone ID: PAT_MRT3847_110407C.1
aagtttcccgtttagaaagaacaccagaagaaagaagattcagaagctggatcaagtggccttgctggcttccagaagaaggtatttgacctgttatacaagatcgcagatattcccttcctgagtgcctacaagcttaaaatatacgatgtcattgagaagggtcaagagcaaccaaatctcaccgttggaattgttgtcgccgttgtggttgtcatcttgtcaattttcttgaggctcatatttggagggaagaagaagccaacaagggtggagaagacaaacccagaacccgcagaaactgcgagtagccaaggcagtggtgagaatgaagaaaacaaagagaaggaggaatcatctgcccctgcacgtcggaagccaacaaggagagacaattgaaatgattgaaacttgacacagacaggggcggccattaaagaacactaccgcacataaattttgagcttagtttgggcattaggccaaataccgtagtaggtagcacgttcttgtcatttgtctcctgcacctttcgaaagatgatattgcataagggagtgtagatcagatattttgtgtcgtgctgatgatcactttggagacttgagcattttaagctaattgaggctgtacaatcacaattatttttctagtaatgtagcacagaaatcaactcactgtgttacatttccatctttaaactagaaccctggtttgagtgcacgtgtgacgtgatccaccataaagaatacgtgggaaacatttccgctgtgtgaatcttgactgcaatcaggcagaatccttacttctctaataatttttcggaaatgttattaacgaatttactttaaaaaaaaaaaaaaaaaacgaaa

SEQ ID NO: 11518 - DNA, 1271 bp, Glycine max
  Clone ID: PAT_MRT3847_110408C.1
aatatcccggcgtcgacccacgccgtccgaaaaaacctgaggactgggatgagagagagaaaattccagactcaagtgcagtaaagccagatgactgggatgagaatgcacccttggaaattgttgatgaagaagctgagaaacctgaaggatgggacaatgaacctgaggagatagatgatccagaggcaacaaaaccagaagattgggacgatgaggaggatggtgaatgggaagccccaaagattgagaacccaaaatgtgaagcagcccccggttgtggtgagtggaagaggccaatgaagaggaatccagcttacaaaggaaaatggcatgccccactaattgaaaatcctgcttataagggaatttggaagcctcaggacattccaaaccctgactactttgaaattaaaaaacctgattttgagcctattgctgctattggtattgagatttggacaatgcaagatggtatattgtttgacaacatcttgatagctaaagatgataaaattgccgagtcctaccgggagactacatggaagcccaagtttaccgtcgagaaagaaaaacagaaggaagaagattcggaagctggatcaagtggtcttgctggcttccagaagaaggtatttgacctgttatacaagatcgcagacattcccttcctgagtgcctacaagcttaaaatatacgatgtcattgagaagggtcaagagcaaccaaatctcactgttggaattgttgtagccgttgtggttgtcatcgtgtcagttttcttgaggctcatatttggtgggaagaagaagcccacaagggtggagaagacaaacgtagaaccagcagaaactgcaactagccaaggcagtggtgagaatgaggaaaacaaagagaaggaggaatcatctgcccctgcacgtcggaggccaacaaggagagataattgaagaaatgattgaaacttaacagacaggggcggccattaaagaacactaccgcacataaattttgagcttagtttgggcattaggccaattctgtagtagcaggttgttgtaatttttcccttcaccttttgaaagatgatattgcgtaaggagtgtagatcagatacacaattatttttctttatttttctggtaatgtaacacagaaatcaactcactgttacatttccatccctggtttgagtacacatgcgtgacgtgatccaactttaagaaaacgtgggtaataaaccctgtttcccctgtgtgaatcttgccggc

SEQ ID NO: 11519 - DNA, 1022 bp, Glycine max
  Clone ID: PAT_MRT3847_110409C.1
gtgttctcgccttcgccactgggtgcgtgggcgtgccagccctcacttggtccggctctgcccccctctctccttccctttgggtgtccaatcttccccctactctccccgtggttcgctcctgcctctctaccttggagtgaaacccacccattctcgtcccttctccccccggtgctttcctgcccggcctcgggatgcccctgcatttagcgttccttccctccatggcttcgacaggggtcttccgcacttgatgcacccccagccttcgagctggaggtccgcccttcctccgtttgtcttttggcgtgccacgtgtcgcttggcggtgctccctgtggtacgtggtgaactcggagattacaatgttgaggtgaaataaagggtcacaaaggaaaaagtgaagctgccagcatgatctagctttggttagtgggagcgagatagtgctaaccctcactaggtcatgctgtgctagcctcactccttcctatttggagaccaatatattcctaacaatctcaaagatacgaaccttgctatctacctaaaagtaaaaggtgagtatatctgtgtaaggcacttagtaattcagtatagtctattctttatttttctgaatgataaaaaaaagtatagtctattcttctttctgcgtttctattatgtcaggcacgcatagtctattcttctttctgcgtttcaatcatgattggtgtcgggaagtctttgcatttagcgttccaaccaacaaattaaacgaaatgtgtgttgctcatttgaagtaccccaaaacatggagctggagatctgcacaagttttatatattaattagcttgggacttgacgctaggggatgttctttttgtaacggttttgttgtgcttttaaacaatgtcaagtgcgtttagcagttgcatgacatctttgaacatcgtaatatataactgcatagatagtattcatttgtaaaaaaaaaaaaaaaaaaaaactcgagactagttctctctctctctcc

SEQ ID NO: 11520 - DNA, 886 bp, Glycine max
  Clone ID: PAT_MRT3847_11040C.1
tcgtacggatgcgagaagacgacagatggggattgaaagatgaaataaccaactataccttgcttctattggtaacggtcaccaaacacactacaatgctgaaagtgaaaccctacatttgcacaacccattaccccttttcaatttcagatcaccctctctcattcccaatctccattctcaatccaatttctcttcgcctttcgcaatcgcatccaactcccacaatcccatgcgctaagaggcgcggctggtcccaaccatccaatcgaaaaattcttcaactggcttccaccgtcgcgttcaatctcaagatcctgccggagcccttcaattccctcgctggcgaaatcgcgcgcggcgattctcagactctgagctttctcgtcggtggtggccggagagggaaaatagcccccaacaggagggtaacgaagaagaaatcggcgtggttcgcattcgtgttggtctgcgttgcgggtggcctctggtcgtggaggattcaagagtttgacctgttcctgagggcgttgtcgttttgtctcgcggggatttcgttgcttcgcttgtggttgggaaagaaagccgtcagggaatgggttttagggtttttctttggggttgctttgattttgagttccagattggggaaagaggacgtgaaattttgggttcacaaactcgcgtcttctccggttacgcaaattgtaactacgatcaaaagaagtagaaatagaaatagtaggagaatatttaaatgacatgccttgttgtttctgcattctgtgtaaaaatcctctcttctttgattcaatattattgacccaagagtaccaaaaaaaaaaaaaaaaaaaaaaaaaaaaaagcggccgctctagaggatcca

SEQ ID NO: 11521 - DNA, 268 bp, Glycine max
  Clone ID: PAT_MRT3847_110410C.1
ggacaacactagtactacttcatttggaactaccataggtagtgaggcattatatttacgaggatcaggagaactatggtggtcacagagagaagagaacgacggcttggcgagagctatctttctgggtaacttctccgaattcatcactggcaacttcatctatcaggtgcaggcatccattcggtcaaaaatgtcatccaattagcccggtacagagaggttattttggagacagatcaatggtagagcctgtagtcatggaatt

SEQ ID NO: 11522 - DNA, 223 bp, Glycine max
  Clone ID: PAT_MRT3847_110411C.1
caccaacagaccgcacacacttatagtgtttagtagaagccaaaaaatgagactaggggggttcatataagaaccgaggtctatctctcatcattgtctatggataacacaggtgagcttcaggtgaccaatcagcgccaacgtatttagagaagacagagccattgcatgttagatcagatcaaatagagacttgttgacatggaccacctaatccaatgac

SEQ ID NO: 11523 - DNA, 338 bp, Glycine max
  Clone ID: PAT_MRT3847_110412C.1
aagataaagggccatctgagcacgcaccaaacctaacaacaatctgtgttaagtatttgactgacgttacacatcacatccacgctaatataccttaaggctaatttctattaaagaccaaaaagactgctactcctccgagggaacacgcacataaaatctaccaacgagaggctactgcataacaagtgcactacatgcatgtctgtcgatcggtctggggaacgatgcattaacggtatgtataagacctcacatacgctgatcaaagtatcgcgacttgtcattgcgggaagaaaaaacccatctactccctgagcgagaagatcaacagcttg

SEQ ID NO: 11524 - DNA, 296 bp, Glycine max
  unsure (1)..(296): unsure at all n locations
  Clone ID: PAT_MRT3847_110413C.1
ctcagtagtgtcattnacgcttctcttctctgcagcaactatgcctaaccctanggtcttcttcganatgaccatcggnggtcntctgctggcngcatcgtgatggagctttacgcngaagtaanttccccgnaccgcngagaanttccgcgcgntttgnaccggccnaaaagggcnnanggcgaangnaaagcccctccantacaagggntcntccttcaacgggtgatcccgaatttnaggtancaggtgncgatttnacgcgggaanggaaaccgcggcgaattcgnttatgg

SEQ ID NO: 11525 - DNA, 383 bp, Glycine max
  Clone ID: PAT_MRT3847_110414C.1
gaaatgaatcgtgatctgcctatgagaaagaacctatcttacttacacgcgtacgggaggtactatttcttgtatattgtaacatatagtaaattgggtgggcggagatacacataggccggaatgataactgagcttggccaccaaacgtaccctgctcgaattacacctttgttgatgcagattttttgaaatacaagaggcgcggatgggtcgccatttcaaaaatatgcgcaaactggatggtgagaggaactctctatgttgtggatcataacacccggagtgtgtggttatcacacacagcatgaccgattcacttgacagctccttagcgcgcgctacgctcgataagataccttagttgctacgaacagacacac

SEQ ID NO: 11526 - DNA, 126 bp, Glycine max
  Clone ID: PAT_MRT3847_110415C.1
ggagagctctcttaaaagggaaaactccaagctttattctgttgtcaaggcacgaaagcacatctaagtctttatccaaccccattcttacagtccccagggcagactcgggtacccctccctccg

SEQ ID NO: 11527 - DNA, 591 bp, Glycine max
  unsure (1)..(591): unsure at all n locations
  Clone ID: PAT_MRT3847_110416C.1
caaacatcttcacaaactagtaatattattcttcgaatccattttattattcataatgggtattttcacatttgaggatgaaaccacctcccctgtggctcctgctaccctttacaaagctctagttacagatgccgacaacgtcatcccaaaggctgtcgaagccttcaggagtgttgaaaaccttgaggggaacggtggccctggaaccatcaagaagatcactttcgttgaggatggagaaagcaagtttgtgttgcacaaaatagaatcagttgatgaggccgttgaggcctaccttttggccaatcctcattacaactgatccaattcgatcttcagtattcagtgatctgcaaagaccttgttttatattatatacaagagttttcttgccttgtgtggagtgttattcaatcactttgagtgtgtggtgtggcttccaattgatgtaacgagtgtttcctttcttatttcctttttccacagaattgtgagagccagttgatgtctttgtatgtcacttcatcaataaatcaatatgttataataataaaagaaagcatcatttataaaaaanaaaaaaaaaaa

SEQ ID NO: 11528 - DNA, 118 bp, Glycine max
  Clone ID: PAT_MRT3847_110417C.1
gcacggagtgatactgaagtgcaaatcgttcgtctgacttaggtataagggctatagactaatcgaaccgtatagtagctggttccctcggaagtttacctcaagatagctggagccc

SEQ ID NO: 11529 - DNA, 850 bp, Glycine max
  Clone ID: PAT_MRT3847_110418C.1
cccacgcgtccgttcacgcgtccgaacatcttcacaaactagtaaatagtaatattattcttcgaatccattttattattcataatgggtgttttcacatttgaggatgaaaccacctcccctgtggctcctgctaccctttacaaagctctagttacagatgccgacaacgtcatcccaaaggctgttgatgccttcaggagtgttgaaaaccttgaggggaacggtggccctggaaccatcaagaagatcactttcgttgaggatggagaaagcaagtttgtgttgcacaaaatagaatcagttgatgaggcaaacttgggatacagctatagcgtagttggtggagttgggttgccagacacagtggagaagatcacattcgaatgcaaattggctgctggtgccaacggagggtctgctgggaagctaactgtcaaataccaaaccaaaggagatgctcagcccaacccagacgacctcaaaattggcaaagtcaagtctgatgctcttttcaaggccgttgaggcttaccttttggccaatcctcattacaactgatccaatattcaacttaattatcatcagtgtcttgcttatcatatacaagagtttccttgcgtggagtactgttatttagtactttgtgctcaagttttaagttggctttcaatgtaatgagtgtttccttttattttcttttgcctcagaattgtaagagctagtcgatatctttgtacctccttcatcaataaataaattataataaaggaaatcatcacttgaaaaaaaaaaaaaaaaaaaaaaaaaaaaaaaaaaaaaaaaaaaaaaaaaaaaaaaaaaaaaaaaa

SEQ ID NO: 11530 - DNA, 1022 bp, Glycine max
  Clone ID: PAT_MRT3847_110419C.1
gcgagcggttgacctttttttttttttttagttaaaatgatgcttccttttattaaaatttattgaagtcgcatacaaagatatcaactgactctcacaattttgtggcaaaaggaaatgagaaaggaaacactctttacattaattggaaggcaagtttttaacttatgcacacaccacacacagtgattggataaagctccacacagcagcaaacatctccttctcaaactagtaatatatactattattcatccattccattctatatatttcataatgggtgttttcacattcgaggatgaaaccacctctcctgtggctcctgctaccctttacaaagctctagttacggatgctgacaacgtcatcccaaaggctgttgacgccttcaggagtgttgaaaacgttgagggaaatggtggccccggaaccatcaagaagatcactttccttgaggatggagaaaccaagtttgtgttgcacaaaatagaagcgattgatgaggctaacttgggatatagctatagcgtagttgggggagatgggttgccagacacagtggagaagatcacattcgaatgcaaattggctgctggcgccaacggagggtctgctgggaagctaactgtcaaataccaaaccaaaggagatgctcagcccaaccaagacgacctcaaaattggcaaagccaagtctgatgctcttttcaaggccgttgaggcttaccttttggcccatcctgattacaactgatcctcttcatcactattcagtcagcaacgaccttgctttatattatatacaagagttttcttgccttgtgtggagctttatccaatcactgtgtgtggtgtgtgcttaagttaaaaacttgccttccaattaatgtaacgagtgtttcctttttcatttccttttgccacagaattgtgagagtcagttgatatctttgtatgtgacttcaataaattttaataaaagaaagcatcatttaaactttaaaaaaaaaaaaaaaaaac

SEQ ID NO: 11531 - DNA, 829 bp, Glycine max
  unsure (1)..(829): unsure at all n locations
  Clone ID: PAT_MRT3847_11041C.1
ccgggaagctcaaaacgacgccgtgtgtgttgctgttgcaggcttcttctctctctcttcttcttcttcttcttcttctcacacattgttcctttccttccatcaatcaaaggtggagcagctgaagacgctggtggggagggagctgacaatgggctctcaccatggccactcgaaggagtttctggacctcatcaagtccatcggcgaggcccgatccaaggccgaggaggaccgcatcgtcctccgtgagatcgaaaccctaaaacgcctcctcaacgacgccgacacaccaaaacgcaagatcaaggagtacatcatccgcctcctctacgtcgagatgctcggccacgacgcgtcgttcggctacatccacgccgtgaagatgactcaccacgacgccctcctcctcaaacgcaccggctacctcgccgtcacgctcttcctcagcgacgaccacgacctcatcatcctcatcgtcaacacaatccagaaggatcttgcctccgataactacctcgtcgtttgcgccgcgcttaacgccgtttgtagactcatcaacgaggagaccatccccgccgtgctgccacgtgttgtggatctgcttaaccactccaaggacgccgttaggaagaaggccgttatgtcgctgcaccggttttacctgaaatctccgtcctccgtttcgcatttgctttccaatttccgtaagcggttgtgcgataatgatcccggagtaatgggcgcttctctgtgcccgctttttaatctcgtttccgatgatgttcactcttantaggaccttgtcgttagctttgttatattctta

SEQ ID NO: 11532 - DNA, 255 bp, Glycine max
  Clone ID: PAT_MRT3847_110420C.1
gcaattagcaagctcaatcgttgttgagtatactttcaatctcacgctaactctcagcaaaacggctgcgttagcggtcatctgaaacttttcgcggccaacgtatgacgaccatcagttcctgaatgatatcaaaggttaccaaccttatcgatgctgtcaacatcggccaactcggcatcgttctcgtatacagtaccgcttttccctcagtcccaaacttaatgcgatacttgccgtcataactgaccttaa

SEQ ID NO: 11533 - DNA, 1140 bp, Glycine max
  Clone ID: PAT_MRT3847_110421C.1
ctttttagggcaaggatgggcattctcaccctgggtcaaggctaatggtgagttgggattttggctcaagaggcttgcagaatggccggacatgatgtatgtcagggtgttggtttggccagcggttcaaagataaaggggatgccccacatttatttccatgacacacatacacacaaactagtaatattattcttcgaatccattttattattcataatgggtattttcacatttgaggatgaaaccacctcccctgtggctcctgctaccctttacaaagctctagttacagatgccgacaacgtcatcccaaaggctgtcgaagccttcaggagtgttgaaaaccttgaggggaacggtggccctggaaccatcaagaagatcactttcgttgaggatggagaaagcaagtttgtgttgcacaaaatagaatcagttgatgaggcaaacttgggatacagctatagcgtagttggtggagttgggttgccagacacagtggagaagatcacattcgaatgcaaattggctgctggcgccaacggagggtctgctgggaagctaactgtcaaataccaaaccaaaggagatgctcagcccaacccagacgacctcaaaattggcaaagtcaagtctgatgctcttttcaaggccgttgaggcctaccttttggccaatcctcattacaactgatccaattcgatcttcagtattcagtgatctgcaaagaccttgttttatattatatacaagagttttcttgccttgtgtggagtgttattcaatcactttgagtgtgtggtgtggcttccaattgatgtaacgagtgtttcctttcttatttcctttttccacagaattgtgagagccagttgatgtctttgtatgtcacttcatcaataaatcaatatgttataataataaaagaaagcatcatttataaaaaaaaaaaaaaaaaaaaaaaaaaaaaaaaaaaaaaaaaaaaaaaaaaaaaaaaaaaaaaaaaaaaaaaaaaaaaaaaaaacaaaaacatgcaataaaaataaaaaaacaaatataactaaaaagaataaaaaagaaataccaaagataaatggcatcccatttaaaaatcctcgacatcacctaacgacttat

SEQ ID NO: 11534 - DNA, 793 bp, Glycine max
  Clone ID: PAT_MRT3847_110422C.1
ttcttcgcgtccgcccacgcgtccggaaacatcttcacaaactagtaatattattcttcgaatccattttattattcataatgggtattttcacatttgaggatgaaaccacctcccctgtggctcctgctaccctttacaaagctctagttacagatgccgacaacgtcatcccaaaggctgtcgaagccttcaggagtgttgaaaaccttgaggggaacggtggccctggaaccatcaagaagatcgctttcgttgaggatggagaaagcaagtttgtgttgcacaaaatagaatcagttgatgaggcaaacttgggatacagctatagcgtagttggtggagttgggttgccagacacagtggagaagatcacattcgaatgcaaattggctgctggcgccaacggagggtctgctgggaagctaactgtcaaataccaaaccaaaggagatgctcagcccaacccagacgacctcaaaattggcaaagtcaagtctgatgctcttttcaaggccgttgaggcttaccttttggccaatcctcattacaactgatccaatattcaacttagttatcatcagtgtcttgcttatcatatacaagagtttccttgcgtggagtactgttatttagtactttgtgctcaagttttaagttggctttcaatgtaacgagtgtttccttttattttcttttgcctcagaattgtaagagctggtcgatatctttgtacctccttcatcaataaataaattataataaaggaaatcatcatttgaactcttgtttt

SEQ ID NO: 11535 - DNA, 152 bp, Glycine max
  Clone ID: PAT_MRT3847_110423C.1
gacgtggcggcaaacgtccggacaaaaaaaaagggaagggtataaactctttgaaagatacttaacttcagataatcatactcctatgtaagccgcgccaaagtccttaaaccaaacaatgtaatttcccctgctgctattaaacctttttt

SEQ ID NO: 11536 - DNA, 848 bp, Glycine max
  Clone ID: PAT_MRT3847_110424C.1
ggcacgactgaggcgcctctttgtggcgcgaatctgaaccaccgtcacagaaaaaaacgaagatggctagtggtagtttgaagaacatgttgagtgaagcaatcaataaaggagtggtggaatcacgagccaggatcttcggccaccaattgaaccccactggccagcaaactcctcacaagcttctccgcatgaagctctttggtgaaaaagtcgctcagtggtaccctcacgacatcactcaaagcgatccgctagtggtagtttgaagaacatgttgagtgtagcaatgaatcaaggagtggtggaagcacgagccaggatcttcggccaccaattgaaccccactggcatgaaaactccacacaagcttctccgcatgaagctcttcggtgaaaaagtcgctcagtggtaccctcacgacatcaagaaagacgaccctcttgtcatggcccgtcaagaacaagaacgcttatcaaagcttgaaatgttgaagcggcgaggaaaaggaccacccaagaagggccaaggaaggcgtgctgccaaacgcaacaaataaattatactttcatctctctctctcctctctctcagctctctctctctctctctctggaattattttgtgggtactcttttgagtttaagacaagtacttgtttatttatgtgataacactttgagttttacttttgttatcagaatgtaaactcatgcattttagagtttgaaaccactagcctaatttggttgagatctctgtcctctttgtgcaattaaattttctgatattggttcagtctatcttggaaatttggaatgcaaccacaaggttatgaatcaaaaaa

SEQ ID NO: 11537 - DNA, 407 bp, Glycine max
  Clone ID: PAT_MRT3847_110425C.1
ctaactctttgctttatccttgtcttcattttctttctctctttcctttgttgttgtcaccaaaatggctacgagtacactcagccatgcagaagaagtacttcccaatccagcaaaaaatactgatcagaagcaaatccaagttactgaagatcataccaacaacattgactatgtacaaagggcacagtggcttcgtgcagcggttttaggagccaatgatgggttggtttcggtttcttcattgatgatgggtgtaggagctgttaagaaagatgaaagggctatgctacttgctggttttgcaggattagttgcagggacttgtggcatggcgataggagagtttgtagctgtgtgcactcagtatgaaattgaggtatgtcaaatgaagagagagatgaata

SEQ ID NO: 11538 - DNA, 1722 bp, Glycine max
  Clone ID: PAT_MRT3847_110426C.1
ctgaggtaattgctgtcaaacggttgctgtggcggcccgggcaaggaaatacgacccacaagaatgaagtgcggtgactctcgtcgtaagtatgctacaggaagcatgcctacttcaaattttcaaatcacatacgggtttacagagtgcacacctgatttgtcattgcaagagtgcactcagtgcttgggtgaagctatcgcggatatcccagtttattttaatgggaaaactggaggtaatgttttaaaacccagttgtagaattagatttgatccctactccttctacggatctacgctgaaattagacccagatgcaccgccaccagcgaccccgctaccatcaccgcccaccaacaacaattcttcttcacaaggaaagagcaacacatcacgaattatcattgccatagtagtaccagttgctagtgttgttttggtgctcattcttttctgcatctatctaagagtgaagaagccaagaaaagaaaatgagattaaaagagaagaagataattatgaagatgaaattacatttgctgagtcattgcaattcaactttgacaccatacgagttgctacaaatgaatttgctgattcttataaacttggacaaggcgggtttggagctgtttacagaggtcagctttccaacggacaagagattgcagtaaaaaggttgtcaaggaattctgggcaaggagatatggaatttaagaatgaagttcttttagtggccaagcttcagcaccggaatttagttaggctacttggtttctgtctggaaggaacagaaagactacttgtctatgaatttgttcctaataaaagccttgattacttcatatttgatccaataaagaaagcacaattgaattggcaaaggcgttacaaaatcattggaggtattgctcgaggcattctctacctccatgaagattctcgactgcgtattatacatcgtgacctcaaagcaagcaacattctcttggatgaagagatgcatcctaagatatctgattttgggatggcaagattggttcacatggatcagactcagggaaatacaagtagaattgttgggacctatggatatatggcacccgagtatgcattatatggtcagttttcagcaaaatcagatgtttttagttttggtgtactagttcttgagattataagtggccaaaaaaacagtggtgttcgtcatggggagaacgtggaggatctattgtgctttgcatggagaaactggagggcaggaacagcttcaaatattgtagaccccacgttaaacgacggttctcaaaatgaaataatgagatgcatccacattggattattatgtgttcaagaaaatgtggttgccagaccaaccatggcttctattggtctcatgcttaatagctattctctcactctcccggtgccttcagaacctgcatttcttgtggatagtagaactagaagcctttcagagcatgactcaatggaaacaagaacaagtgaatcagcaaatcaatcaacacccaaatcgataaatgaggtttcaatcactgagctatatcctcgttagattttggtgagtcattagcctattcaattaaataaaacatcaattcctaaagtaaattacaatatcttgaaactcgcctagtttattggtgtgactttgtgatctcttatttaaatacaccgatatcatctaaagtagccgtcc

SEQ ID NO: 11539 - DNA, 274 bp, Glycine max
  Clone ID: PAT_MRT3847_110427C.1
tggcgtccccgtcaccggcaccggcctcatagactgcttcagtgaaatgctcatcgacttcatccccaccgtatctggcgtgtcactgatcgaggcccctggcttcctcaaggcccccatcggcgcccccgctaacggctccatctgacggtcgcgccttggcggcaaagccgtcttcgtcggcaagctcggccactactagttcagccacatgctcgccggaatcctcaaggaagacggcatgcgcgccgacggcctaactttgaccagggcg

SEQ ID NO: 11540 - DNA, 411 bp, Glycine max
  Clone ID: PAT_MRT3847_110428C.1
ctcaagcagggcgaaatcaggatcgtccaagccagtatgcgcggcagtatcttgtccaacattctgctcgtgctcggatgctgcttccttgctgctggcctcacccagcacgaaagccgtttcaacgagaccgtcgcatctaccatgtcttccctcatggccgtcgcatccgcctcgctcatcgtccctgctaccctctacgcagttatgcacggcgacaacaaaaaggacaacctcgagactgacaagaacattcttgttctctcccacggcactgccatcatcctgctcattctctacatcctatacctctacttccagctctactcgcaccacagcctttttgccgacgtcgagaaccaagaaggtggcgataacgaggaggaggcccagatcctgtcgcccgtcgct

SEQ ID NO: 11541 - DNA, 1156 bp, Glycine max
  Clone ID: PAT_MRT3847_110429C.1
acgcgtacgtaagctcggaattcggcgcgagcacttacttgtagttgcgaaatcatccaaacacattccatctattaagattttagagagtgaaaatggattggcaaagcatgatgggcaacctggacccattccaaagaacaatcttaatcctcgtcccactaacactactcctgctgctgttactatctcgtacccgtccaagaccgccctatccaccaggccctaagggcttcccaatcataggaaacatgtttatgatggaccagctaacccaccgcggtctcgccaacctggccaaacactacggcggaatcttccaccttcgcatgggcttcctccacatggtcgccatctccgaccccgatgccgcgcgacaggttctccaagtccaagacaacatcttttccaaccgccccgccaccatcgccatcagctacctcacctacgaccgcgccgacatggccttcgcccactacggccccttctggcgccagatgaggaaactctgcgtcatgaagctcttcagccgcaagcgcgccgagtcctggcagtccgttcgcgacgaggtcgactccgccgtccgcgccgtcgccaacagcgtcggaaaacccgtcaacatcggagaattagtgtttaacctaacgaagaacatcatctaccgcgccgcgttcgggtctagttcccaggaggggcaggacgagttcatttcgattcttcaggagttctcgaagctcttcggggcttttaatgttgcagatttcgttccgtttcttgggtgggttgatcctcaggggctcaacaagaggcttgtgaaggcacgtgcctcgctggatagcttcattgacaagatcatcgacgagcacgtgcagaagaggaggagtggccacgacggcgatgaggaaagtgacatggttgatgagttactgaatttttatagccatgaggcgaagctgaatgatgagtccgacgagttgctcaactccatcagcctcaccagggacaacatcaaagccatcatcatggtacgaacatccctgccacactatttattttcaaatgtctaatacatcaaagccatcatcagggtacgaacatccctgccacactatttattttcaaatgtctaatacatcaaaattattttattatttaa

SEQ ID NO: 11542 - DNA, 237 bp, Glycine max
  unsure (1)..(237): unsure at all n locations
  Clone ID: PAT_MRT3847_11042C.1
tccttgctctactcagcgtgtcttcntctatcacgtgaagtcaattctgaaaccagaaaggatagcttataaagtcctatactaactgatcataagtccaagagttatttatctttgcngttggatctgaaatgattacagatgttcattgaggaggttatggagctggtagagttgaacttactgagggaagctttggttggtttacctggtgtgagtngtctctccactgaacag

SEQ ID NO: 11543 - DNA, 218 bp, Glycine max
  Clone ID: PAT_MRT3847_110430C.1
ttttcgatcaccactttttatttaagcaaacaagggtagttccaagctttatatatgtaaaggacactcggcgaaacgagagattcataactctaaccttacgtaaagataagcgcgtgtcctatcacatacaaatagtgcatgtccgtgggctgtgcgtgttgtaaagactttgagtgcgggaccctcccccgctgctcttttaaattcctcaatcc

SEQ ID NO: 11544 - DNA, 157 bp, Glycine max
  unsure (1)..(157): unsure at all n locations
  Clone ID: PAT_MRT3847_110431C.1
catttcgtgagttcagactaaaannntggngtatatctttaaaactttttccagagtacataaagagtgagactaatgccaataagataagacaaagttttaaagatatacaccatttcgtgagttcagactaaaaannaaaaaaangggnggccgc

SEQ ID NO: 11545 - DNA, 376 bp, Glycine max
  Clone ID: PAT_MRT3847_110432C.1
ctcaatctgacttgcactcttcaactctactgaatcagccctgcaacagacacatcacaacgtcattacatacggcgaccactgatcaaagacagcacacacggacccgaaaacgcgccaattattatcaaaagtatgccttagcgtgacggtaatggatactcgacaccaccctcacacggtggtgactaactagcacttgttcttcatgatccatgcgatctacacgccaatatacatcccgttttcagaattgcggttcttccacaaattgttattctacaaacccttattaacatgctaactactggtctgcgcttgaaaatctccatgtcactgatgctttcatgacagccatctccaaaattgctcattc

SEQ ID NO: 11546 - DNA, 408 bp, Glycine max
  Clone ID: PAT_MRT3847_110433C.1
ggaattcggcacgaggctgagctcaatgaaatattgaaacatttaatcgagcccacatgggtggcaactgggttagaaattgactttgaaaccttggttgcaggatgtgagatcgcatctagtaagattggtgaaatagtatctctggatgatgagaatgatcagaaaatcaactcgttctcttttattcctcacgaattttttgaggatatggagtctaaatggaaaggtcgaataaaaagaatccacatagatgatgtattcactgcagtggaaaaagcagctgaggccttacatatagcagtcactgaagattttgttcctgtagttgctagaataaaggctattgtagcccctctcggaggtcctaacggagaaatatcttatgctcgggagcaagaagcagtt

SEQ ID NO: 11547 - DNA, 409 bp, Glycine max
  Clone ID: PAT_MRT3847_110434C.1
tccacacgctttctccagagaccttcttcctagatacttcaagcacaacaatttctcaagcttcgtcaggcaactaaacacttacgttgcagctgttgcttggacaagaatctatggtagtgatagcaatcgttatttactcaagattattcagaagccgtagaatggatacgaattcgaagtagctggtctccaagaatcataactgattgttgcttttgaaccaagatccggttggtggttaaccttgtcggtttgattttttttcccctctatacttttcattgcttgagacttcgtcatgtggcttgaaattccacgtgtggcctcgttttatttcaagccacatgacgaagtctcaagcaatgaaaagtatagaggccacacgtggaatttcataatgttacat

SEQ ID NO: 11548 - DNA, 229 bp, Glycine max
  Clone ID: PAT_MRT3847_110435C.1
ttattattttccttaaggaggaaagaagaccggagggcacttttaaaaaaggggcccgggcaatacaagaaacaagagcaaaagcccaaagagcaggggacaccaataggaaaaagaaggcaaatagcaagaaacaggggcaaaaaaaaaagctagcacgagaacccctaaaatggaagaagacgccaaaaggtaatataacagagccaccaaaagggaaagcccgaaa

SEQ ID NO: 11549 - DNA, 337 bp, Glycine max
  Clone ID: PAT_MRT3847_110436C.1
cggacccaggcaggctttatttcacctacattgcatgatcggtgtactgagatgctgcatgggaacgcaaaagataacgctgcctatcagagatggtaatgacaagccatccactatagccttacatcctgaatcagaagcatactcatctaagacacactagataaactactctcgtacaaagtggctctggcagtgatcatgtatacacaccatctgaccctattgaactatgcaactcaaggccatggaatacatattaagaactaatcagggtcacaaacggcttcttaacacaaaatctttaggactacagaggatccgactgggtgaataa

SEQ ID NO: 11550 - DNA, 297 bp, Glycine max
  Clone ID: PAT_MRT3847_110437C.1
tccccggtttagtttttgtaccatgtgctgctgttggcgagacctaaagcaacactccatcttcattgttggaactctggttagcaaaaagacagttggtttattgtggtatattattggttggatgtattacgttgtccacttcgttaattagcccctagagaaagatttgtcggagggaaattctacttccgatatataaatacgctctatattggtaaatgttctctttactaaagcacattctgctagtggaaaaaccttcaaacttgatataattaggtgctggattacatt

SEQ ID NO: 11551 - DNA, 113 bp, Glycine max
  Clone ID: PAT_MRT3847_110438C.1
gagcttgagccatgcccgtcgtgctcggattcggtgagagaggagtgttgctatgggatgatgtgatgataactgtcgcgacttgtaatgtggagagcaattgacgtgcctcc

SEQ ID NO: 11552 - DNA, 338 bp, Glycine max
  Clone ID: PAT_MRT3847_110439C.1
attcatttggagggagttccattgccaacccttattacaagggcccatggaatgcaaacataatcaacaaccccaaccttaacctattagggctggaccataacgacgacgcgccccatatcctgtaccccgccctccacacagattgttctacctgcatgcagctgtcacccctctcctcatagccactctacctactgaccaaagtggtggccgttaacagatactcggaccagaacacctgtctgtcctaccgcctgctcaaggccagcgagcctacactcttctcgttggatcttcacactggcgaagtgctcacgtcgcgagccctgctagac

SEQ ID NO: 11553 - DNA, 169 bp, Glycine max
  Clone ID: PAT_MRT3847_11043C.1
gagcgagaggctgggggcctaatttttaccggcggccgctgatttttgatcaaggaaatgggtcaaacgctgagttgcgtgcaacagcacagaggaccatcggtgttgctcttaccctgcacatcgcaaactggagaattggaggatgttgaggccatggcggaggaag

SEQ ID NO: 11554 - DNA, 183 bp, Glycine max
  Clone ID: PAT_MRT3847_110440C.1
gggttgttttttttttttttttttttttttttttttttttaaacaaccttactcaatgataaaagtaaatttcgaaaataatgtaccattttttctcaaccccctgcggaaccctctttgaaattaaaatacaatattgatggggtcaacccaaaataatcccagttcccttaacctagaaaa

SEQ ID NO: 11555 - DNA, 285 bp, Glycine max
  unsure (1)..(285): unsure at all n locations
  Clone ID: PAT_MRT3847_110441C.1
tcgaccccacgccgttntcgatttgcaacaaaaataacttctcntgatgccatatatatgcttcggtcaacgggggggattcggacattcgtttgagtaagcggtacgcctctnnctgattggacaagaacatttgcacattaaaaaagaatttgtcttattcacattctttaaccannaggagaaaccagacatttaagaaactgaaatttcgcttannacaggaaagctttcagnncaccgaaaccttaagttagactactttggctttctcgttttgcaaaa

SEQ ID NO: 11556 - DNA, 3381 bp, Glycine max
  Clone ID: PAT_MRT3847_110442C.1
atgtctggcgatgatcagctggaacactctcttattcagtcttttaagacagtaaggagacaaatcttttcgtggcaccaccatcagtggcaagctattaaccctgccttgtatctacagccgtttttagatgtaattaggtctgatgaaactggtgccccaattactagtgttgctttgtcatctgtttacaagattttgactcttgatgtgatcgatcataatactgtcaatgttgaggatgccatgcacttggttgttgatgctgtcactagctgcagatttgaggtcactgatccttcttcggaagaagttgttttaatgaagatactacaagttcttctagcttgtatgaaaagtaaagcatctataatgctgagtaaccaacatgtttgcaccatagtgaatacttgtttccggattgttcatcaagcaggaagtaaaggtgagttgttgcagcagatagcacggtacacaatgcatgaactttttggtttgtcaacgagtccccttatactttcgatggtgtgtagcattgttctcaatttgtatcatcatcttcgtacagaactcaaattacagctggaagcatttttttcttgtgtcattttgagacttgcacaaagcagatatggggcttcataccagcagcaagagactttcagacttcctggagaatcacaaaagatacatagggtgcttgaagctttctctgagagatattatgaacaatcgccacatatcctagctaacaaggatgctgctcttgtgttatcatactcaatgataatgcttaatacagatcagcacaatgtgcaagttaaaaagaagatgacagaagaggattttatccggaataataggcatataaatggtggcaatgatctgcctcgagaaatgctgacagagatttaccattcaatttgtaagaatgaaattcgcacaatccctgaacaaggtgttggatttcctgaaatgacaccaagtcggtggattgatctaatgcataagtccaaaaaaactgctccatttattgtatctgattctaaggcctaccttgatcatgatatgtttgccataatgtcaggcccaacgattgctgccatctctgtggtatttgatcatgctgaacaggaagaggtataccaaacatttgaggaaccagtccttgcctttggagatgacatgaaagcaagactagcaactgtgacagtattcactatagcaaacaggtatggggattacatacgcacaggttggagaaatattcttgattgcatcttaagactgcacaagcttggtcttcttcctgcccgtgttgccagtgatgcagctgacgaatcagagctttctgctgaaactgtgcatggaaagcctattatgaattctttatcctcagctcatatgcaatctattggcactccaaggagatcctcgggattgatgggtagatttagtcaactcttatctcttgacactgaggaaccaagatcacaacctactgaacaacaacttgctgctcatcagcgcaccctacaaaccatacagaagtgtcatattgacagcatattcacggagagtaaattcctgcaagctgaatctctattgcagctagcaagagcactcatttgggctgcggggagaccacaaaaagggaacagcacacccgaggatgaagatacagcagttttctgcctggagttgctgattgcaatcactttgaataacagggatagaattgggattctttggcagggtgtgtatgaacacatatccaacattgttcagtcaactgtaatgccctgtgccctggtagagaaggctgtttttggactcctgcggatttgccagcggttgcttccctacaaggagaacattgctgatgaacttctgaggtcattgcaacttgtcttgaagcttgatgcccgggttgcagatgcatactgtgagcagattactcaggaggtcagtcgccttgatatcggagagatgtggttgagactagtacaaggtctaaggaaggtatgtttagaccagagagaggaggttagaaatcatgctttattatcgctgcagaagtgcttgacaggggccgatggcatttatctaccatacagcttgtggttgcaatgttttgatcttgtgatcttcactgtgcttgatgacctgcttgagattgcacagggacactctcaaaaggactaccgcaacatggaaggcacacttatcttagcaatgaagctcttgtccaaagtttttcttcaattactcccagaattatcacaattgacaaccttctgtaagctatggttaggtgtactgaccagaatggaaaaatatataaaggtgaaggttagggggaaaagaagcgagaagcttcaagagacaatgccagagctgcttaaaaactccttgcttgttatgaagatgaggggtatactggcgcagaggagtgccttgggtggtgatagtctgtgggaacttacatggctacacgtgaataacatttcaccatcattgcaacttgaggtattccctgagcaggattctgagcatttgcagcacaagcagggcgaatcaataggaggttctatgtcgctgctacttgaatcagttttcctgtttataaccatacacacaatccctgaccttaaaatactgattgtgcagaatttgtggatcatattcgcatcctaaattttggttttgcccattgatagaagccgaaaggtataataggaggaaagtattagttttaaggcaaagacggtgtaagtcatctagttaatcctcattgtcacctgtctgttggcatttgccctttcccgttcccccttaagcttcttgttcccgtaatttagatgaaatatattgtagtttgaattgagatagatttctacatttcagcggggtactgtagggcttccccttctacctatgaagctgcgtcaggcataggaagcctaaatttcccaaaaacatttatacagaacctcgattttctcttaatgcagcttgcatttcaatgggtaagacggcagatagttctcattttgcaggctttcgtatccattggagtgtctgtgatgaaccttggtgcgttaatgcgtggcattagacatatgaatggtggttgggtttgtagctttgtgcctttgtatttagtatttacatcctggtatttgccttttttttcctgagccaaatattgattcttgacttttggcctgcgcacagatttgagatttacactcctaaaatttgtggactagcatctttcctttgcgaaaaactagttcccgtgtaattggatgtcaaacaatggacactagacaatgtcattcctaacagaattacagatcacatatatatgctttgagt

SEQ ID NO: 11557 - DNA, 5166 bp, Glycine max
  Clone ID: PAT_MRT3847_110443C.1
atgggacgtctgaagctgcaagctggtatcaatgcaatagaggaagaggaacctgaggaatgtgatgctgcctaacccaataaaacagcttttgcatgtttgatcaattcagagattggtgctgttttgtcggtcctgggaaaaaatgttagatggggtggtagtgatataactagcgatgatcatgtggagatatttcttatacagtcgttcaagacagtaaggagacaaatcttttcttggcacaactatcagtggcaagctattaaccctgccttgtatctacagccctttttagatgtaattaattcggatgaaactggtgcaccaattactagtgttgctttatcatctgtttacaagatgttaacttttgatgtaatcgatcataatactgtcaatgttgaggatgccatgcacttggttgttgatgctgtcactagctgcagatttgaggtcactgatccttgatcggaagaagtggttttaatgaagatattacaagttcttctagcttgtgtgaaaagtaaagcatctatgatgctgagtaaccaacatgtttgcaccatagtgaatacttgtttccgtattgttcatcaagcaggaagtaaaggtgagttgttgcagcagatagcacggtacacaatgcatgaacttgttcggtgtattttctctcaccttcaagatgttggcaacacagaccatgcattggttaatgggagcactaatttgaaacaggagaccggaggcctagataatgagtatgcgtttggaagtagacaatcggagaatggcagcatgacttctgaatatgataatcagtcattatctacaaactctgctcccaatgctgcaagtgttgtgaaaacaactgtgatggacgaaaacacagcgataactattactggaaaggagggtggaccacatgacatgcatctcatgactgaaccatatggtgttccttgcatggtggaaatatttcactttttgtgttctttgctgaatgttgtcgagcatacaggaatgggtcctagatcaaacacactagcatttgatgaagatgtgcctctctttgccttaaatttaattaattcagcaatagaacttggaggaccttctatttgtcgtcacccaaggttgctgagcttaatccaggatgaattgtttcataatctgatgcagtttggtttgtcaacgagtccccttatactttcgatggtgtgtagcattgttctcaatttgtatcatcatcttcgtacagaactcaaattacagctggaagcatttttttcttgtgtcattttgagacttgcacaaagcagatatggggcttcataccagcagcaagaggtagccatggaggcccttgttgacttctgtaggcaaaagacatttatggtagatatgtatgctaattttgactgtgacataacttgcagtaatgtctttgaagaccttgctaatttattgtccaaaagtgcatttcctgtgaattgtccattgtctgccatgcatattcttgctttggatggtcttattgctgttatacagggaatggctgaaaggatagccaatggatctgtaagctcagaatattctccagttaatcttgaagagtatactccattctggatggttaaatgtgagaattataatgatccaaatcattgggttccttttgtccgccgaagaaagtacataaagagaagactgatgattggtgctgaccactttaatcgtgatcctaagaaaggtctagagtttctccaaggaacacatcttttgcctgacaaacttgatccccaaagtgttgcctgcttcttcagatacactgctgggttggataagaatcttgttggtgatttccttggaaatcatgatgaattctgtgttcaggttcttcatgaatttgctggaacatttgatttccaagacatgaacttagacacagctctgcgtctattcttggagactttcagacttcctggagaatcacaaaagatacatagggtgcttgaagctttctctgagagatattatgaacaatcgccacatatcctagctaacaaggatgctgctcttgtgttatcatactcaatgataatgcttaatacagatcagcacaatgtgcaagttaaaaagaagatgacagaagaggattttatccggaataataggcatataaatggtggcaatgatctgcctcgagaaatgctgacagagatttaccattcaatttgtaagaatgaaattcgcacaatccctgaacaaggtgttggatttcctgaaatgacaccaagtcggtggattgatctaatgcataagtccaaaaaaactgctccatttattgtatctgattctaaggcctaccttgatcatgatatgtttgccataatgtcaggcccaacgattgctgccatctctgtggtatttgatcatgctgaacaggaagaggtataccaaacatgtatggatgggttcttggctattgctaagatttcagcttgccatcatcttgaagatgttcttgatgatctggtggtgtcactttgcaagttcactacacttttaaacccatcatcagttgaggaaccagtccttgcctttggagatgacacaaaagcaagaatggcaactgtgacagtattcactatagcaaataggtatggggattacatacgcacaggttggagaaatattcttgattgcatcttaaaactgcacaagcttggtcttcttcctgcccgtgttgccagtgatgcagctgacgaatcagagctttctgctgaaactgtgcatggaaagcctattatgaattctttatcctcagctcatatgcaatctattggcactccaaggagatcctcgggattgatgggtagatttagtcaactcttatctcttgacactgaggaaccaagatcacaacctactgaacaacaacggctcgagcagcagcgagaagccgacagaagggcatacagaagtgtcatattgacagcatattcacggagagtaaattcctgcaagctgaatctctattgcagctagcaagagcactcatttgggctgcggggagaccacaaaaagggaacagcacacccgaggatgaagatacagcagttttctgcctggagttgctgattgcaatcactttgaataacagggatagaattgggattctttggcagggtgtgtatgaacacatatccaacattgttcagtcaactgtaatgccctgtgccctggtagagaaggctgtttttggactcctgcggatttgccagcggttgcttccctacaaggagaacattgctgatgaacttctgaggtcattgcaacttgtcttgaagcttgatgcccgggttgcagatgcatactgtgagcagattactcaggaggtcagtcgccttgtgaaggcaaatgcttctcatataagatctcagttaggatggcggacaattacatcactgctttccatcacagctagacacatagaagcatctgaggctgggtttgatgcactattgttcataatgtctgacggtacccacttgcttccagctaattacattctgtgtgtagatactgccaggcagtttgctgagtctcgtgttggacaagcagagcgatctgtgcgggcactagatctcatggcagggtctgtcaattgcttggcccagtggactagtgaggctaagggagcaatggaggaggaacaaatgtctaagttgtctcaggatatcggagagatgtggttgagactagtacaaggtctaaggaaggtatgtttagaccagagagaggaggttagaaatcatgctttattatcgctgcagaagtgcttgacaggggccgatggcatttatctaccatacagcttgtggttacaatgttttgatcttgtgatcttcactgtgcttgatgacctgcttgagattgcacagggacactctcaaaaggactaccgcaacatggaaggcacacttatcttagcaatgaagctcttgtccaaagtttttcttcaattactcccagaattatcacaattgacaaccttctgtaagctatggttaggtgtactgaccagaatggaaaaatatataaaggtgaaggttagggggaaaagaagcgagaagcttcaagagacaatgccagagctgcttaaaaactccttgcttgttatgaagatgaggggtatactggcgcagaggagtgccttgggtggtgatagtctgtgggaacttacatggctacacgtgaataacatttcaccatcattgcaacttgaggtattccctgagcaggattctgagcatttgcagcacaagcagggcgaatcaataggaggtacggtgcctgatgaaaaggtttccatgccttcaagtgaaacagcaagccgtgaagatgctggcattgttggttgattagaggttctatgtcgctgctacttgaatcagttttcctgtttataaccatacacacaatccctgaccttaaaatactgattgtgcagaatttgtggatcatattcgcatcctaattttgttttgcccctgatagatgcagaagtattataggagggaaagtatagttctaaggcaaagacgtgctagttcatctagttaaatctcattgtcacctgtctgttggcatttgcccttttccgttcccccttgaagcttcttgttcccgtaatttagatgaaatatattgtactttgaattgagatagatttctacatttcagcggggtactgtagggcttccccttctacctatgaagctgcgtcagggatagtaagcctaaatttcccaaaaacatttatacagaacctcgattttctcttaatgcagcttgcatttcaatgggtaagacggcagatagttctcattttgcaggctttcgtatccattggagtgtctgtgatgaaccttggtgcgttaatgcgtggcattagacatatgaatggtggttgggtttgtaagaaaaaaaaaaaaaaaaaaaaaaaaaaaaaagcggccttgccagagtattcctgagccaaatattgattcttgacttttggcctgcgcacaagatttgagatttacactcctaaaatttgtggactagcatctttcctttgcgaaaaactaagttccagtgtaatggatgtcaacaatg

SEQ ID NO: 11558 - DNA, 327 bp, Glycine max
  Clone ID: PAT_MRT3847_110444C.1
gggggccaaaacaggaaggggattttttaaaggcaaaaactttttttatgagggggttcaaaacctaggcccaaatttttctaaatagaaaacacaccccccaaccaaaaaaaaaggaaaaccggagggggcccaaaaaagcattatttcaaccaaaactcccacaaattttttttaaaaaaggcctttttaaaaccaccccaaaatttgggggggcaaaaacctttttttttaaaccctttttttttaaagcattttgactttaaactcccaagtttaaaggtcctcggctctttctttaaaaagggtttttcaaaaccgtggggg

SEQ ID NO: 11559 - DNA, 540 bp, Glycine max
  unsure (1)..(540): unsure at all n locations
  Clone ID: PAT_MRT3847_110445C.1
ccacgcgtccgaactgttgcattttgtatcgatggctagtgctgtcagtaaggtttccggcgacctgaagtcgtcgagtttcgatcgtgtcagagaagcaccgccgccgcctcctgattcctcccttcttttggctaccagacctcccagacaagcggtgtcatactggacatgctcaaagctttgtgcattttgttttgttgctggagcggttttcggttactcgctcaggggacgagttaagcgctgggcttccaagatgctcaagaagctcagctgaaactaacataattcaatgattctcgttaaaggtagtcatttggtttggttagacttcaccttcatagattacatgtaaaacaatgatatcaattttgtgaaatttttagacgctccgtcattgtgcttcatacggctcacaattagttacttacataaaagccttgttagtttcgcgacttgtttcaagccatttggcacaatgtcaccacttgttatggcttttaaaaaaaanaaaagaagaaaagaagagagagaaga

SEQ ID NO: 11560 - DNA, 546 bp, Glycine max
  Clone ID: PAT_MRT3847_110446C.1
ccccccggggacaattaacattgaaccttttttgggggggggtttaacaaattttatgggggaaggggggaatttaatttttgaagtaaaaaaaaaaaaaaaaggtaaagggggaggggaaaaaaagagttaaaaaaaactaattggttttttttataaaaaaaaatgggaaaaacacccttggggtgatttttttaaggaaaaccaacttttttttggggggggaaaattaattgttttttataacttgccacccttaaaagggttaggaacagttggccccatttttatgttttttgttctccaaaaggagcccactgggggaagttgattttcatttggtttaaaggccaaaaaaaaatcaggcaaggggggggctgtctccatgaccctttaaaaaaagaaaaaatcggggttaattcccaccttgcttgaagtttcctaagaaattttttcaaaaaaatttttcacggccccccaggggggggaatttctgaacaagggaaatgctgggttaaacgccaaacacaactttttacttttttg

SEQ ID NO: 11561 - DNA, 251 bp, Glycine max
  unsure (1)..(251): unsure at all n locations
  Clone ID: PAT_MRT3847_110447C.1
tnnnntnntnnnntttttttttgggcacattcaatacaaaacggtcgtttttagccttaaattttggggacttcggatacacaacatgcaggttcattaaaaattgttttaacatgtaagactaataaattttaattccttgaaaaacatggcataaactttttttttttttgggcacaattcctcgttttttacattggcttgaaaaatttggccgtaattttaccccaaatattggttccaaccaagtg

SEQ ID NO: 11562 - DNA, 296 bp, Glycine max
  Clone ID: PAT_MRT3847_110448C.1
gatacacgcccgatgggacattcaaacacaatggcacgttcttgcacgggaggggcggcaagcatgggaaagatccgcatggtatgcggggcaagggtatgcacaaggggtggcagggaagacaccatatgaatcttctgtacctgcaagcccgacgattggacgctgctggacaccgccttcatagtcaactccaccgtgttcagagggcccccttacgcctggggcactctcgccaatgtcggcatagaaaaagatggctcatcgggggaatatgacagtattatagagtgtgc

SEQ ID NO: 11563 - DNA, 756 bp, Glycine max
  Clone ID: PAT_MRT3847_110449C.1
aattcggctcgagatttgatggtcattgggtttagctagcggcgctggcacgcacgcacgcacacagttgttaccagccaccggctctgtgttctttcgttgccccgtctagcttcttcaacttcacccacacacccaagacgcaccgtgtcacagttccctcctgaatcgcatcttccccaacacccacaaacaaaccctaatttctcaaaatgtggtctgcaacatcctccccttccatcttcctcccccattcccttcttcgccccctccctcgccgccccctctgcgcctccctctcttgggcctctcccgacccacccgacggtctcggcggctgggccctccccgacatcccggcccagcccaacaacaacaacaaagttgcagcgtttccttcttatgccattgtgggattcggcacttcgctcgcttttgttctcgccgtctttgctgcctcaaggaaaggttttatttttcgattcccgaggccgatgtggagcgctgtggagacccgacacgatcaaaacgacgctcgggagtttgacgtttctggtgggagcaagtcaacgctgtccgaggctgacacggaggacaacaacgttgctgttacgcaaactgataaatctgtagttgtagaaaagcctaaacgtgttgtcatcccggtttgtgtggattctacccaagaagaagcgttgtcagtcttaaagtcattgaagataattgaagatgatgtggaagctaatgaattgtgta

SEQ ID NO: 11564 - DNA, 246 bp, Glycine max
  unsure (1)..(246): unsure at all n locations
  Clone ID: PAT_MRT3847_11044C.1
tatctctcaccaacttccgctacancctactccaaccacantcttttttcccgcagtcancgggcaaggtcaagatcggaatcaacggatttggaagaattggccgtttggtggccagggtggctctgcagagagacgatgttgaactcgttgccgttaacgatcctttnattaccacggattaccntgaccatacaggttnaaaaacgaagntnttcaggggccanggaancctccnggttttcc

SEQ ID NO: 11565 - DNA, 286 bp, Glycine max
  Clone ID: PAT_MRT3847_110450C.1
aaagactagcggacaagaaggcaccgctagacaagcactttctattcacgggagcagctgctgcacagagctttgctaatcaacggaaggggggggggcaactgatccactctggtggtaacggccaatacagggagaatctggctataaacaccggcgaccaaagtggcacagatgcagccaaatggagagatgatgagaagactaactgagactacaacaccaaatccggagcaggcggagcgtgtctgcactgacacgcaggagggctggaaagactctgtgc

SEQ ID NO: 11566 - DNA, 382 bp, Glycine max
  Clone ID: PAT_MRT3847_110451C.1
ttcggacacagactattcctcttaagcttgctaccgagtttccacaatcgctacctgtagggcttccaagggacactccaacgtgtgggatgctcacccgaaaaagctcagatcaacattgtcgcgcttgcccatggggagcctagacgcatcgaccaccattagcaagatgaacatatctgctgcggagaaagattctccagggcatgccataagaatggatgcacctgcgatctctaagagaaaccatgacattatctgaacaaaataatctggcaccccaacgaagcagtgtcaacatcatggtgtagaaaaagctagacttgctatgtttaccttctttgttatgagactcatgaggggagcaccaaaaagatgtatt

SEQ ID NO: 11567 - DNA, 834 bp, Glycine max
  Clone ID: PAT_MRT3847_110452C.1
ctcgagccgaagaaagagtggtttggttcgaaaaacagagccacccatttacattgtgtatgctttgttgttgttgttgttgttgttctgctccaattcaatgtacaaccaaccaagaactcaactcaaacccacaactctctcttcccacttcaccccaaaatgccctctccatcagaatatccttctccttccatcctggaagcccgccaagcccaccatctcggcctccctccctccggggcccacctccggcccggcccaaaccctaatctcgctcctccgttccatcccggactgggccgatgccgtgcaggagcgcggcatgcataataagcgcgccctctacacccaccagaagacgacagaagggggaatccagaaagtttgataaatgagtgattgtgtgactccaaaagtttatgcactttggaaaggaattttctgtctcataaactctgttcaaaggattttaataatttgtttctggcttagaccattccatgattgctctcctttcttgggggtccatttttttttctcagtttataattataataattgaagcttttgaaccctctcatgtttcattaaattctgtgccctcaaaggggtactgttgaaccattttttttaatctatttacttggctgcggattgtccactcagaatctttacaaagctttatctccaatggatttgattaccactttgattgtcttcctttatgatgctttagcttctttcagtgctaatccgagttaacaagaccaaattttaaaattaaaaaaatggaaaaccagtgacatttgttggttgagaatcacaatgaat

SEQ ID NO: 11568 - DNA, 606 bp, Glycine max
  Clone ID: PAT_MRT3847_110453C.1
gatggcgagaagaggccaaaatgtggtgcagcagcgaaaatgtcagggaaaggacctggtttcttctctgagatcggcaagagaggcagagatatcctcacgaaggattacaattccgatcaaagattcaccatctcctcctccaccaactccggtctcgacctgaagtcaacactggtgaagagtagaggactttcctctggtgatgtggctgcagaatttaagtataagaacaaggcggttaatgtcaaagttgatactgaatcaaatgtgttgacgacattcactgtctctgatgttgtgccatccgcgaaaaccattgcttctattcgtctgcctgattacagttctggcaaggttgaggttcagtatcttcatgagcatgttgcttttactcttggtgttggtttagaccgctcccctgttattgatttttctgggacgatgggtactcctagcattgcctttggagcagaaaccagctactccacaagtgttggcaagtttatgaaatacaacgctggtctgtgcttgaaaatgccaagttccaatgcttcagtaattttaggtgataagggagactccatgaaggtgtcatatttacac

SEQ ID NO: 11569 - DNA, 409 bp, Glycine max
  Clone ID: PAT_MRT3847_110454C.1
accagaaaagataaagagataaaagaaccacaaccacacttcagttgaggccacacagccatcgcttttgtgcttatgtggattttttttcagagtttggctgtatccccccaagtttatggtgtggctgcttgcaagtgctccacgtaggagcattggcaatcacagtgagtgtagtgttcgaacgtattcttcgtcttttgtttctttcctttggttgctgggtttgtttgtgcacctttgttctccaacgacttcactttcaccctttctcaaagtgataattttaaacaattgggtactatatattgtaggtgttaggcatgaaaaaatatgtttagaagccatctattataccaattaatgactaatttaagttgtagattttaattttaaaaaaaatagttca

SEQ ID NO: 11570 - DNA, 347 bp, Glycine max
  Clone ID: PAT_MRT3847_110455C.1
ctcgagccgttgtgatcaaatgatgcaacagaagaaatattctgtcgatgaaagaactgctagcttgctttgcgaatcttgccttaaaagaatatacgaccaagattctactgaggttcaagatagcataaagtcaagggttgaaacagctgaagcagagaatccggatggactgacagataaggttccaaaagatttacagagtataatggataaagcaatcacgagagaaaaggaactagagaaagtttgcaagaagcaagctgctagaattgaagaactaaatcaattggtggagaaatttaaaggagaaatggaagcaaaatcttccatcattgtgtatgatc

SEQ ID NO: 11571 - DNA, 508 bp, Glycine max
  unsure (1)..(508): unsure at all n locations
  Clone ID: PAT_MRT3847_110456C.1
acatccctctcattgtgtccattacatccattatcttgtnncctctttctttagttgttagatcatatccctttttgatgaatcgaaacatcatatgcatgaacgagggtgagtgatatatnnataccaannnaatgtgtgagcttctttaagaaccatatatgtagatctagttgagtttaagatagcnncgttagtcgcttgcatgtcgatatgccctttcatgtgtgctatgatatcatatgagatagggccattgtccttccaacgcattctttgtatacccagtgttcacaatatccttagagatggaaggatattcacatcaatgaatagtggcatccaccaatagtcacttttctccaaccatcaccatccacttccaatgcaagacctcattgacatcccccggttttctccaaagttaaagtcccctatgcttcctgccacatagagaggcaatgacaacaatggacttaactcgagttatgagaagattgtgatccct

SEQ ID NO: 11572 - DNA, 528 bp, Glycine max
  Clone ID: PAT_MRT3847_110457C.1
gttttttcttttgtcgaagaatgctggttggatctcatgagatcgtcatgtacttatctgatttttgaattaatattttttttttattcgaactttaaatctataagcaatattcaatatatccaattttgtctacctctcagtgtcgccacctaactttttttttattcatcttttttcatatacacatctaacaaataaaaaaaagttaggtgattcaaaatcattgtagtcccaactaattttattgcatatacatataataaaataaagtgttattagttttttcttaaattaatggtctcaattaatctttatagacacataattaaatattaatttttttataaattaaaaatcttaaatacatgtcatacataaattggccagaatcataaaggcagtgttccataacaatctaataattttccctgaaagttacattccaaaatcaatgaaataacttttttgtaattcaatttttctgtcctaggttagaaattacactcttcatctaattcatttgat

SEQ ID NO: 11573 - DNA, 519 bp, Glycine max
  Clone ID: PAT_MRT3847_110458C.1
aggctgtgccagacagaagacaggcttggcgtacatttgtaaaatctgcaaagactatatatgagatgattcaggcaacatttacactggaggatatgattaagacagagtacttgaggaatgactggtggtactggtcatcattctcagcagctgccaaatcttctactttgccttcccttgcccttcgcatatactcccttgatttagccattatatatgagaagatgcccaattcaagctttactgacagctctgaaccttctgtcatagcggaaccaaaaccactgatgaatgtggacacagaaaaatccaaagcaagccggaagtcaaccaggaaaaggaaggaatcagatagttgatctcatacttatactcttggctcagaaaatctgatagctgattggttttatgtggtgtgatgtgatcatccactggtatgattgggccatggggcagccacagctggtgtctcttgcatgcttgtacatataggtaaaactgacctgctaactcaga

SEQ ID NO: 11574 - DNA, 287 bp, Glycine max
  unsure (1)..(287): unsure at all n locations
  Clone ID: PAT_MRT3847_110459C.1
ngtagnngcacgagtacgtnagcacggagttngggtcgaggttgaaagttccgaganaaaagtgcnnntagacancngngngggaggnngtngnagacngagggnngngaggagngncggggaggnggtngcggggnngcgagggagagggagggnggnggcggannngggggnngngggnggnangnnnggggaanaggggagnggagggnnggnnnaagggggngngtcagnggngtnagangagaggttggatcanaaggnnngggggnnagnngaggnnngng

SEQ ID NO: 11575 - DNA, 268 bp, Glycine max
  unsure (1)..(268): unsure at all n locations
  Clone ID: PAT_MRT3847_11045C.1
ggtgatggcgcagttgggctagttatcctgagtttnagcctctctcaccctaatgtttntataagagatttttttccccggtaatcaggagagtctctttggtctcctgcatcaaattcntactttctggactttatntacttattttggctcttgacaaaaaaacccatactgtacaaattttgattctttcgaaaacagctaggaatggnataaaattgactattccaaatcttaatcacctttctctactcgcaaataaggatgt

SEQ ID NO: 11576 - DNA, 337 bp, Glycine max
  unsure (1)..(337): unsure at all n locations
  Clone ID: PAT_MRT3847_110460C.1
tacggctgcgagaagacgacagaagggggctctagagtctgtgattgttgcgactccnactctcttcgacgctatcttcttcttttgacgattgcgagattgatatttctctcacctgaaaatgtcttgctgctgtggtaactgtggttgcggaagcgcctgctactgctgcaacggctgttgaggctgcaagatgtacccagacttgagctactctcgagtcaccaccaccgtgacctttgtcatgggagtggcaccacctcatgctcaattcgagagtgctgaaatgggtgttccccctgagaacaatggctgcaatgtggagctaactggacct

SEQ ID NO: 11577 - DNA, 337 bp, Glycine max
  Clone ID: PAT_MRT3847_110461C.1
gagaaaggggattaattaattaaggagaggggctaacaattccgatttttaaccgctaaaacggcgacaaattctattgcttatatttccctctgctcttcttgaaaagaggctctggtggttaatataacaatggcatccccacttcctttgaaaaattgccaccattatagcaaaacccagctttaattaccccttttgggctgctagggatttcctcatactagcccttgctaatagccctaccaagccccgaccatatttattggcctataaaagttatagaacttcattacaacactcacctactttcttcttgctaattttgagaacactt

SEQ ID NO: 11578 - DNA, 378 bp, Glycine max
  unsure (1)..(378): unsure at all n locations
  Clone ID: PAT_MRT3847_110462C.1
accggcccggaaaccccgggacgacccacgcgaccgttggaacctgtgacgcagacgaacacagaagcaacngagggaactaanaacgccgcnaacgacagcgccccggngnggcaacaccaagacgcagaccnccgacccggagccggccaagccaaagaacngccggaacacccggaaagagagcccgcnaacgaaccaccagcaganacgagaggccagcacaccgccgaagacaagccacagggaacaagcaagggggcggcagccgaacaggcaaccaagaccangggcaaaggcggcaanccaccagacnnngngcngcgcaccggagacgacaggaccgacgaggacacgccagagagcaacccgaggaca

SEQ ID NO: 11579 - DNA, 1044 bp, Glycine max
  Clone ID: PAT_MRT3847_110463C.1
accgcggcctttcaaagcgtccctttattgcgtttcaagagtgcctaactcgtgtgcctggtttagtgtggccgggttggagatctcatgttcgacttctcaactgctacgcctaactactcggtggtggggtcgtggcattgcctgtctgctctccgcccagacggtgtcagcccttctgctctgcgatgcgtttttcgggcctcgcgcgttgcctggctgggcacggtctctgtttcccggtctctcggtcgcgcacatgcacaatttcctgacaagtgtacatccagaaggagatattcgttcagctttgctaagtgttattcaggccttgcatgttgccaagaatggcactgacatagtttccaggactcaaatacacacacattttccttgaccaaattgattcaacatattttctagattggctcgcaagcatggaggagctaagattggggttttctattgtggaccatctaaattagcaagagaattgaagaagttgtgcaccaaattttccaccaaaaccacaactagatttgttttccacaaggaaaattactaaacttgtttctgatggaacatatctgttgaagcaattccttaattaggaaagcagttcagaatcttggacagtttccttctattttgccagagaatttgtaaatatatttgctgctctggtgtctccgacataccaacttcgaagaggattcggcaattgaaaaatgaaagaaaatacgtcagtcttcattgttcgttgcaagttgagtatgtgtatccatgctatttcggtatttgctatacacctcaggtagcaaatcatacttttaggagaagtataaacaaaataaattttacaaaagtacgagagtgactattctattacaaacatactccgtaattatctggtctttactttaaatattaatctaggtccatctttttttctacaaaaaaacaaaaaaaaaacgcgagactagttttcttgtattacaattctctcatatgtcaaggcagcaaactttatagactgagcttatg

SEQ ID NO: 11580 - DNA, 713 bp, Glycine max
  Clone ID: PAT_MRT3847_110464C.1
gcactctctatactctactttctcgtgctctgtgactgtcactcactcactcaaaaaccaaacatgcccttaacccattcaccttctatcttctttgttgttgtacccacgcgtccgcttttttttacgtgtggtggcaatggaagttgcgttgttgttggcttttgtaggcaagttgagaaggcactttttgttgcttgttgtgggtatggtgcttgtgctgttcctctctccgtttgtttcacctcttggtgatgaaggacaagcattgatgaagattaagtcttcattcagcaatgtggcagatgttctgcatgattgggatgctttgcataatgatgacttctgttcctggcgcggagtcttgtgcgacaatgtcagcctttctgtgctttttctgaatttgtcaagcttgaatcttggtggggagatatcaccagccattggtgacttagtaaacttgcaatccatagacctgcagggaaataaactaactggtcaaattccagatgaaattggaaactgtgctgagcttatttatctggatttgtctgataatcaactatatggtgatatacctttctccatatcaaacctaaagcagcttgtgtttctgaatttaaagagtaatcagttgactggtcctatcccctcaacattaacccaaatttcaaacttgaagactcttgatcttgcacgaaatagactcactg

SEQ ID NO: 11581 - DNA, 341 bp, Glycine max
  Clone ID: PAT_MRT3847_110465C.1
aaaaaacatacaaaaaaacaaaaaaaaaaaaaaaacaaaaacaaaccataaaaagggctaagatacactaaaattctatctctcattacattataatacaatcagattgacctcttcctttattgcctctatttaacattttagactaataaagacgcctctaaattcatactatatcattgcccaaaatttattcatctctccccattcttattatcttcaaatgtattaccctcctgacatacataccaacacggtgtatttagcacaacttatgtaatcattccatgctgtgaacatatcaactttcaataataaaacattaacatgaatatcgacaa

SEQ ID NO: 11582 - DNA, 473 bp, Glycine max
  Clone ID: PAT_MRT3847_110466C.1
acggctgcgagaagacgacagaaggggcctggccaggagtccagccttctcctttgaggggaggtgaggcttctacagcccaggagcctcagccagagctagaggttgctcatgaggccactccagaggcgactccacaggtttcacatgctatttcacctgttgtggaggtctctgagggtgaagaaggcgccgatgacatcgactatgcagtagatctataggcagtgcagagtacctgggatccctggcctacagcagcacaggagacacctcagccagcctaggatactccttcttcacccatggcaagcctgcaccagctcaggacgagcccactgctgctcaagatgattgttgacaggattttcatttatttttctgctttagatacatattattttcaatttatgtttttagtacagtttttatgttcagttatttagttagaaaattctgaaagcttgttgaac

SEQ ID NO: 11583 - DNA, 559 bp, Glycine max
  unsure (1)..(559): unsure at all n locations
  Clone ID: PAT_MRT3847_110467C.1
gaaagttagaatttagggttgataaaaagacctaaaaagaaaaagatgacgtggggaagtcattgaagccaatgagcatgacctcggcacgcaccttcgcgtgacaggtgcactcccgccacactccatcgccacaatacaatacaacccaatcttcttttctctctcttctgccctaattcccattttcccaactcctccataaccaattccatcttcaaatattccaattccaattccaattctattcctttcgattcctcttcctcttccccccacggttaggaaattttgttgctggaagattgcttaagggcatatagctggttttgtgcacatgggatcagagagtgtggctccaatggttgagacctcgaaaaacaggtcttcttctggtaaaatgaaccaagggaaagtccccaggaaaattcacaaggctgaaagggagaaaatgaagcgtgagcatttgaatgaacgctttgttgatcttgccagtgcacttgatctaaatgagaacaatggaaaggcttctatactgtngtgaaactgcaagttgctg

SEQ ID NO: 11584 - DNA, 420 bp, Glycine max
  Clone ID: PAT_MRT3847_110468C.1
cagagtcaaatcaacatgggtgactagaaaaaatcaaatcgacatcaatgtgtgtacaccaaattgtttttcaccaaacaataataataataaaagtaatacgaagcagtaaccctattccaatagatctagttgcttattttgcttgggctagttgtcgattgagttattcaaataaaccggaatggcagtaacaactccaccagaagacgacgaacaatcattttcagcagcagccggggggaccgccaccctgacggagaaattaacgactccgttttttttgccatcccaatccctcaacctgtaacacaaaaactgcaagctatgatcaggcaccgaccctccaaaaaaaaccgaaaccgctattttcgccactccgatgtgttttaccactccgggctccggcttggactttac

SEQ ID NO: 11585 - DNA, 247 bp, Glycine max
  Clone ID: PAT_MRT3847_110469C.1
gttgcatacccactgctaccacgacaagacaccttggatgctaacctaggacctcccctagtgtgcgtggcacgagcaagactattcctgtgggctatatccctatccgattatgacagaaactccacggttcaagacctcatgagaaagacgacacccgggggccaccagcgcttgagccccgagtaaaagaaaaaggctttgatggataaatactggaggctcgtttgcacaaaagaggaggctt

SEQ ID NO: 11586 - DNA, 448 bp, Glycine max
  Clone ID: PAT_MRT3847_11046C.1
gctgtgttagtaatggtgcaaataatatctttagatacactattcgatgtgatgccatacttgagtgttaaaaactacatatgattcacagttctacaaaggagtctcctagtcattttgacatagtttatctctttctagtgattgagttgttcagaatatcattgaatttcagttgttaaatcattggtgatatttatgaacttggtctctaatattctcaaacagaacagcagaagatggctattttgcatttctgtaggctcagtgcttaatccttgaggactcgtgctttggtgaagttccataaaaaaacgagattctgctttggtagataattctcggttatgtttggtatataatctgtgtcactctatttacaagtcttacccttttgtcattgttgagtgataagtgagtgctttgtggaaaaaacacttttctggct

SEQ ID NO: 11587 - DNA, 174 bp, Glycine max
  unsure (1)..(174): unsure at all n locations
  Clone ID: PAT_MRT3847_110471C.1
aaagaccctnggcgaccacaccaaaaacataaacataaaaaagcataaaagcacaaaagggcataataaagggaaaataaaacatgtttaagtcatatatgcacacttgattaagggctgtcgtcccttgagacagatgcatgaggtgctaatacctaacctgtgcgtaaaaac

SEQ ID NO: 11588 - DNA, 266 bp, Glycine max
  Clone ID: PAT_MRT3847_110472C.1
aggctcgagctcataatcccaaaacgcttctccaagtccaagccacctacactccacaagacccagctgcaaagtcttcgtctttatcccagacttccatctgggtcaatcccagaagccccagagtcaaacacctttggaagaatccctatcatgccatgtcttcatctctcaccaaactcgccaagtctctcgactcctgaaaccccacccagcaacgcgtctctcaaatacttcaagttttgggggacaaattttcgcatccg

SEQ ID NO: 11589 - DNA, 173 bp, Glycine max
  Clone ID: PAT_MRT3847_110473C.1
acggctgcaagaagacgacagaaggggaacctatatctattgatttttcaaatacaacatcactagaaatactggagctcactccgaagaacattaaggccctcaattccaaaaaaccttggaacgcctcacatcatatgtcgatcccgtcacttttgaaaaatcaacttact

SEQ ID NO: 11590 - DNA, 2290 bp, Glycine max
  Clone ID: PAT_MRT3847_110474C.1
cggaaagagagagagaagctagagagagaaagagaccaaactaattagtgtagaagaaacagggagtctgtgtgggtgtgggtgtgggtgtgagagagagagggagagagaaagcagagaaaatccgaagcagttttctcacactttttgatcggaacctctcattccgcgttcagattgcgtcccccatttggtccttacaatggagcggtacgggcgggccagcgaagggtcgcagtctgatccgtcgccggaatggaccgtggccgccgacgccgacgccggcctcgaagagtcgtcgtggcaactcggattacccggtgctgaatcttaccctatgcgtcccgatgaggcggattgtatctactatttgagaacgggattttgcggttacggcacacgctgtcgtttcaaccatcctcgtgaccgtgccgcggttattggagctgcgccgaggactggaggagagtttccagagcgcgtgggacagcctgtgtgccagtactatatgaggacgggatcatgcaaatttggtgcgtcctgcaagtaccaccatcctaggcaggtgccaggcactgctacccctgtgccactaaattattatggatacccattgcgagtgggtcagaaagagtgttcctattacgtgaaaactggacagtgcaagtttggtgcaacttgtaaattccatcatccacagcctgcaggcgtccaagttctagcaccatcaccagttcctccagtttcacctctgcctgtacctgtaccttcaccaatgtatccaactgtacatcccccatctggtccttcacaacaacaatatggtgtacttgttgcaaggccacctatgctacctggctcagtagtccagggtccctatgggcctatggtagtgtcccctaccatggtccctttttcaggctggagtccttatcaggctcctgccacaaaccctctacttccatccagcactacatctaatgttggttctacacagctttatgggataacccagctaccttcatcagcagctacttatactggaccttatcaaccttctggttcttcaattggtccttcaggtgctagtcagaaggagcatccatttccagaaaggcctgatcaaccagaatgtcatcattacatgaaaacaggggactgtaaatttggcccgttgtgtagatatcatcatccaccagacaagagtgcaccaaaagcaaatgtaacccttagtcccgtgggtcttccattgcgtccgggggcaccaccttgcactcattatacccagcgtggagtttgcaagtttggttctgcatgcaaatttgatcatcctatgggatcactgagttatagtccatctgcctcttccctagctgatatgccagttgcaccctatcctgtgggttcctcaattggtactcttgccctgtcatctttgtcatcagagttgcggcctgaacttggtgcaggatccaacaaggagtctgttgcatcgagaatgtcttcaatgagcacatcgactggatcggttggcttgaccttgtcaagcgttggtcccatttctcactcaagcacccaaccatctgctcagagttccagttctccggaaactaccagtgctaccacaagtagcactgtatctcacacctcaagctaagcaatgtgaatgaattcctcattattactcctttttatgtcaatttttcaaccggccatcattactcgaggttctcaaataggttttatttttcaattatcccagctccacattcaggtctatagcacacattgcaccaattgtctgtgttcatataatctttttgtggccatccctttgatcttgaataaaccatggccaaccttgagaattttagcaacccatacacgcaccttgcttttgaataacttcaaaagaatctgcaactccattatgcacatgtccattcacatctccaattttcgtagtttgttgtgcttatctatgcttcaatctttttttatatgagaaaatttctgcccggagtttcattgacagtgtaatctctcttcacctgaaccctttttttgcaagtgggaataatctctagttctgcctggaaggtcctgtttgccactgttcccaacttatctaaggtttgaagtgaagagaagtaatcaggagactacaatgaggcttcacattgctatcttttgtgattttagatacacggtgatgttgtgacaagtaaaatgcttgacttggtactttattacacaatacatatatgaagaaacacatttaaattaacac

SEQ ID NO: 11591 - DNA, 271 bp, Glycine max
  Clone ID: PAT_MRT3847_110475C.1
ccacacccgtccggttggtaaaagggggctggcgtttttttaccttggcaggactgatcaaaaaggaataccttgccgcttagtggttggattagttcctattaaaattggggtggaaaaagttagtaagatccatattggggggatgcaccatcaaatttttttacattaaccactattttcgaaggcccaacacatttttaaaatcggggaataatcaccttaagaagttcgggccaagggcaaagatccggagggacaatgcgaccat

SEQ ID NO: 11592 - DNA, 572 bp, Glycine max
  Clone ID: PAT_MRT3847_110476C.1
cccacgcgtccgcccacgcgtccggcaaaggaaaggaaaaaagagaaaggaaaggtgtctctctctctctctcttggactgattcgcctcaaacgcatctatctcttcctttcccacctctttctactaccacccactactcttaaggcaaagttggtgaaaacaaagaaaaggatgatggtggtgccggtggcttctttctcaacagacacaaacaccatttgttccatttccattttcttctgattccttctctttctacccatctcatctcatttactatattttttttttggtccaccctcatattgaagactccgccttataggggcatctttatttctctttcattcttcttgtgtgtttgtgattattgccctgtcctctgacattgctcattcctttaattcccccacccatttcccacctttctctcactcttccttttcttctcgcaaacaaaactcatgggcgccgttcaagctctatatccatccattgtacttttctctaacacataatatgcgctatcagtacatctgattactgacacataatgcaatatcaacagc

SEQ ID NO: 11593 - DNA, 304 bp, Glycine max
  Clone ID: PAT_MRT3847_110477C.1
cgcaaatcccaacggtgaaagtgtgagcaattaaatttcaaaaaccatatccaattttcatgaaaatccaacggttaatgaaactaggatcgtagttttaccgagacagttttgggtttctgcgggaaaataaaaggctacaatgtgaagggtttttctctaagctcagatatggttttaaaattcccaactgtgagaacgtttggacttgggttgtgaacgcgctactaagatttcacggtgatccacggtgaaatgcgtccgagatcatcatttttttgagacaggttttgtgagctgcgtg

SEQ ID NO: 11594 - DNA, 391 bp, Glycine max
  Clone ID: PAT_MRT3847_110478C.1
gatgcttgatttttctttttttgttttctctttttacacttatgaggttattttggatttttcatttttgaaaacacacatgtattagctgtacagaaatctgatgagtaaggcccacagggatatgatatgattccaccctagcttggaagacgaatttcacaaactgagctgaagcaaagccaaaggaaaaatcctacatggggacattaaccttgcacaccccttcccggaaaaaaacccccggggattacgctagagtttgaagccctatcccggcgaaaccccttgcccaaagaacgccagtagccttcaaccaaccatcaccatctttagcaggaacaccttttgggaaaagcgctgtatcgaacagggcaggttcgctcgagcc

SEQ ID NO: 11595 - DNA, 381 bp, Glycine max
  Clone ID: PAT_MRT3847_110479C.1
attatgcgcataggggtgctcataggagagctggaggcagctcagcctgcaaagctacatggatggatggtacccttgatgggacaaatgagccgtcgattgagcagttgacagagccaggcacatgagcaggcttcggtctggtggaataatgtacacattgaggcctacattgagaccttctacaaacttatcctcacagttgtactacctgctgtgtaacctgacgtgcagtaccactgcaaccagcactggcaccagtctgcactaaatgtgccaatgattgtccgggagactgaccctgacactgacgatgagttcatgatcaagagcatgaacaatgaaccgcaagatgaggctcttgagacagatctggaggcc

SEQ ID NO: 11596 - DNA, 563 bp, Glycine max
  unsure (1)..(563): unsure at all n locations
  Clone ID: PAT_MRT3847_11047C.1
ggctcgagaaaagagtcaagagtatctcggatactgtgtttttgtttattctctttttcttagatgaaaagaaaccattcctcagtctatattgattccagcagtgttatcaatggcggaaggcctaaattctgtcatataaacacgtcagggcggcctatggtgccaccatagtgggcttccctttacaaaatgcctatggcagttggcaaaaaatctgccacaccattccgccatggcagctatggcacctacatttaactacggatttgggagaaaaattctaggacaaatctgctggtaaaattctcttttgaagtatttccattgtggtcagtttaattgccaaattttgggtttgtgaaaggtttcttaatttcctcctcatttccaaccaaaatgaatattttggtaactcaaatggattaatntaatcatatttgattttcccccctatgttttttaaatttgaatttaattttgttccgtggtcaatctataagatgttttcactttatacaanntatttgtgatgcatctagaaaaagtagacttgacactac

SEQ ID NO: 11597 - DNA, 193 bp, Glycine max
  Clone ID: PAT_MRT3847_110480C.1
gtaaagcaccggattaagcgggagcctctttcgggggggtcatggggtacaaaccaaagggggccctaaccttgccagccaccgccagaccactctgtaccaaaaagaaacccaaacagaacccaaggcactgaccaacacatgccccggggaggaggcgaaccaagcccaaaaacacgacaggaggcccaaa

SEQ ID NO: 11598 - DNA, 676 bp, Glycine max
  Clone ID: PAT_MRT3847_110481C.1
ctcataaccattggagataacaaccctttttccctcaaccttagaatccaaataggtaggaaccaaagaaggagattcaaactgcattgaattaacagaattgagaccacaccaaggactcacatccctactaagcatcagcaaactcattgcaacctcttcctgctgcacctgctcatgatgagcctcagaaacaagggacacagaagaagttgaaggggccatgtaccttgtccttctcctcttggatcttctccttcgattcggagccgtggcctcattctcagagtggctatcatccatcgacaccatcatcttctggctctggctagcattggtggtgttattaccattccacgaatcttgatcctccaataacaagctgctgctgctgttgttgttttggtacactttctcagagtggcacttcatgtgaccaaacagagctttccaagattgaaaccctttgccacactctttgcacaacttgtccaacaccaacaaagttgtgttgttgttgttgttgtcctcactcgaatcattgaaccgccaagtcttctttggattctccctcagaccataccctcctcctccattgttagttcctccttcagaatctcctcctccattgttgttgaatgatgaaagcttatctgcctcggttgaaacattggtg

SEQ ID NO: 11599 - DNA, 895 bp, Glycine max
  unsure (1)..(895): unsure at all n locations
  Clone ID: PAT_MRT3847_110482C.1
ggcacactgagaatcctttgaaaattggaggaaactagaagaatactagaaacaactttccattcaaggggaaggggaagggggcaggtgggtcaaaatttaggttcctgaaatgacatccaaccatggcagatagtaactatatcgtagacaaggattatccacttgagacaaggctacatcgaaaccaacaaatgccgagtccattccaatgcacgttgatccctgtcagctttattttcagataaacttggtcatttgtggtacaagggtttctaaatctagggaaaactcgaactgatacaaaacaaaatgtgtttaaacaacatcaacctcctgtaatcaacaagagaataaatcacaagagaaacatcacgaaagtctatccactaggtgccactactcttttcaagcttttcaatctcttcatgctcctttctttcagcctcttgccgttctctttcagcatcttcctcttcctcaatctcatcaagatcatcaaattccttggttgctgccattgctctcactactgggtctcttagctcagatattatccccccaccgaccctgtactcttcttcattcccaattagatacaaccgctggtctggaccagaagccatgggaacatcaacagccagcagcttcatatgatactggcccttctttttcttgacttcaacactgactagaccctttttctcagaccctcttatggggaaaatgagaaaacaccgtcggcccctctccctcgccgtgaacttctttacagtgagcccaccccctgacatgacatngnntctcaaatcagttccagaaagnnnngcacccataactnnnnnnaatcccaccgacgtgttaagnttcgtcatgnnnantctatnnnnnntat

SEQ ID NO: 11600 - DNA, 517 bp, Glycine max
  Clone ID: PAT_MRT3847_110483C.1
aaaaacgaggagtggaataggcccgcggggcaccccatctagagtcgcttgactttaagtacgctctctcacactctattcccaatcaattttttttccggctaattaaaaccttagtcaccaagaaattaaaagagcatcatcaccgttgaagctaaacgtgttgtgtgtgtgaagaacaaaacaacatcctctgcacacacacacaaacatcattattttttttcttcctcttcgaaccactaaaaaaaatgtttgatccacgaagaaaccaacccacaatttcgtttccattgtccaatgaaataggacaaataactcatggttatgacacatggggtgccacaaacactgattttatggcatcaaagaaaccaccaaaaaattacaagaattgtcacagctacaacgacatggaagtgcaattgggaacaggatcaaaggtggatgataatgaatctggtatttgttcacctcctctatggactacaaatccaccaaagagtcctcatcaccg

SEQ ID NO: 11601 - DNA, 508 bp, Glycine max
  Clone ID: PAT_MRT3847_110484C.1
ccactggaattttcactttagaacaggtggggtatatgtccgttatttagaatagtgcttcacatgtactaattttaaaatcagaatagagaaacggtactattttagtcactaacaactatttcactgtggaattccacagaataaatgtatgcattaatagcatattcatcataaaatcaattacacttaaaaaaaaatcagttgaggctttgaccagctgattgatatgttttggtgagatcaagttgttaagtaagtggaaattggaatgtcaaatggagtaaaagggtacctttcctcgagaaggtaaacagctaacaaaatgagtcaaaatattgctttattttgtaaggaagtccctccttctttttaccagtctttttagccattgccattattattattattattattatctttctcctgtcttccaccaccacccttgaactaataatcatcctaataaaaactagttcccccagaattgttctttggaagcacactc

SEQ ID NO: 11602 - DNA, 441 bp, Glycine max
  Clone ID: PAT_MRT3847_110485C.1
cttcttcttttttttttttttttttttttttttttcttttcttttttttctcccacaacaaattctatcctagcgggcttttttgccctcaaggacaagaaggtgcccctcccctctattaatggcccccccctttttccctcatatttttatccccaggaaaaaaaaaaaaaaaacgggggggggcgggttcaatttctcccccctaaaaaacccccccccccccccccaggaaaaaaacgccggccccacccccctttaaaaaaaaaaaaaaccagtcggtttcaaatcaagggggcctggattcacccccaccccaaggccatggttgccttctaacaaaaccaccctcccccccaccaattttggtttaaaaaacccctccttctcatggacccgggggggggaaaaacccccccggcccccccccccccggggggc

SEQ ID NO: 11603 - DNA, 333 bp, Glycine max
  Clone ID: PAT_MRT3847_110486C.1
caatcttctatatctaaaatggaggcagtcctaaattatctaatttacactgccattggaattcttgggataagcgtcaactttggggggggggcggagcacttcaaatacgcattatgtataaaagacgctcccattgttgcacgtgcatgaactatatttgttcacataccactattgagtgaaatatagacacctaatatggtactgggagcttttgctgaaatgtgtggaccaatattgcccatcaactatggtgactaaaacgcttcgataatcaacaactgggaaaatactatagaatgcttaaccaaaaacgacatcgacgatacg

SEQ ID NO: 11604 - DNA, 364 bp, Glycine max
  Clone ID: PAT_MRT3847_110487C.1
tttcgcgttttcgtgggccccaatcaacctactgtctaactgttacatattattaagcactcaccactcttcttataaactagtctaacacttaggatttgaagggcacacaaaattaatttcatggcttgtgtgaaaatgcaaatgaacagtaatcggatgtcgagttcatgtgcaaagggtgtaacggagatcgttacataagaccgagtttgcaacggatgcaagaactcagagttgtatgctaatgccactgagctccttgctaagttccatggccgtgcaggacctatgaacctcatcaactctggtgctgaaaaccttcatcatgataatttttgatccatgttatactacggtttgc

SEQ ID NO: 11605 - DNA, 666 bp, Glycine max
  Clone ID: PAT_MRT3847_110488C.1
ccaataatccaccttatcccttggtgaaaccaatggttccggaaagaacggtgaagggccgttatttaaaggtaaaaaaaacctggctttattgaacaaacacagaacctccaaacttgtcctcccagagtaattatacaataacagcacatacagagcaaaacaacaaaacagtgatttgtaagagaaaacttaagaagaaaattacataagatccagccagtttaatgacaatattgaccaatctgacaccattgccttgcatgcatgtcctactgtacaaaaatgtaataaataaaacagacaactagaagccagaataagtgtcaaataaccccttcaaagtttcaatgtcaactcaggtgtcgagttctccaagtcaactggtggaagactcgaaccaacaaaactcaaatttgaacttccactgagtgtgaaattctgatgagtatggcctccctcagagggaacctgatggtagctaccttgccacaagagttcttcctcatcctcctccaagaatattggaagaccaacatatccttgctcaaatcttgcactgcttttcgttgttggcacaaaaccatggtgcagagaagagtgtgcctttatccctaaggacctgaaagaaccattaaaggggagagatgctagactttcatatct

SEQ ID NO: 11606 - DNA, 1921 bp, Glycine max
  Clone ID: PAT_MRT3847_110489C.1
cacgcgtccggctttaaacccacactttcccatccccttactcctccaaactttcccggttccatttcgccggaataatcgttccttctcatgcttccgaaatcagttccctcagcggtaccccaacccaaaacacttgcttccaaaatcaccctaacttcttccctcacctccctcctccaaccccaaaaccctcgcacatggatcctcttcaccgtcctcttcatccagatcctcctcctctgcaacctccatagcttcccttcctcaattccccctcccctctctcccatccccgccgccaccgacaccgacaccgacaccgacaccatcaccaccaccgtacaccactccacccgcaccctcgaccaatgcggctccggcaaggtcttcgtctacgacctcccccaaaccttcaacaacgaaatcctcctccattgcgacaacctcaacccctggagctcccgctgcgacgccctctccaacgacgccttcggccgaagcgccgctgcgctcgccggaatcgtcccggaggatctcctcccggcgtggcactggactgaccagttcgtaaccgaaatcatattccacaacagattaataaaccacaagtgtagggttatggaacctgaatccgctacggcgttctacatgccgttctacgctggactcgcggtggggaagtacctctggttcaactccaccgcagaggaacgcgatcgccactgcgacatgatgctgcaatggattcaggaccaaccgttttttaaaagatcaaacggttgggatcattttattagcatgggccgcatcacgtgggattttcgccgctccaaggacaaggattggggttctagctgcctctacaagccagggataagaaacgtcacgcgccttctcatcgagcgtaacccttgggactattttgacgtaggtgttccctatcccaccggattccacccccgctccaaatccgacgttacgcgctggcagagcttccttcgagagcgtcagcgccacgcgctcttctgcttcgccggcgcgccgcgccgcgccttccccgacgactttaggggacttctgctgagtcagtgccgcgactcgggcgagtcgtgccgcgccgtgaactgcaccgggacgcggtgctccaacggcacgtcggcgattatggaaacctttctagactcggatttctgcttgcagccgagaggggacagcttcacgcgccgctccatttttgactgcatggtggccggttcgattccggtttttttctggcggcgaaccgcgtatttgcagtacgagtggttcttgccggtcgaaccggagagttattcggttttcatagaccggaacgcggtgaagaatggaaccttaaccgtgaaaaacgtgctcgagaagttcacgaaagaggaggtgaggaagatgagggagaaagtaattgagtacattccgaggttggtttacgcaaacacgaaacaagggttagatggtgtggaggacgctttcgatgttgccatcgaaggagtgttcaaaaggattaaggaacaggaacaaccgcagtttcataagtggaaataacggcgatgcaatgcttcttcgttcgtcttagatttaggagaattattataaataaataaatgaaaaaatacgatatgttttattcaggtgaattccctaggatagagtttcatttttttttctttctattttcttacacgtgttatttatatataggtgcacaatgagatcgatgtatgtaccatattaatattgatatttatattgcgattcttttcactacgatgaattatgtatttatggatagagacatagacatagtattattatttatggagttaattttgacaagatataatggttgataatcggaccggatgatcgtaccattttttttagc

SEQ ID NO: 11607 - DNA, 429 bp, Glycine max
  Clone ID: PAT_MRT3847_11048C.1
ttaggatatgatggaagtatggaatggatctaacaagtaaaagccatgaaatgatgtttttgaagggaaaagaagcatgatggaagaacaggcaaaggaagagttgaagctgcttgaagcccaatatcctaaccatcatgagcatctaaagaatgagctcaggtcctttatctttcaactccagaccaatcaccatgattctgaacagcttccagaaaacaataacttcagcactcaccttgctttctttgatactgaagaatccactagcttggaggagctaaggaagaggagtgactatgatttggaacttggtttggcagacagagtagtgatagagaagattgatggaagttctaagcttgaaactcccaagagtgttgtagtgaagcatttctcaagcaggaagaacaagagaaaagatagggt

SEQ ID NO: 11608 - DNA, 895 bp, Glycine max
  Clone ID: PAT_MRT3847_110490C.1
ccacgcgtccgaatagctagtatttatatcaatgttaaatgtttctttgggttaagtggttactacctcttcatggtaattgtcatctttgttctgtgttgatgttttatgattttgggaatattgtgcatggtacactatatgccttggctgacagacttgattggtgcagttcccaagtttactatacccctttaattcctgattatttaactatactttaagggattgatgagtctgttctgctgttgcagtattatttcgacacgttgtttcctcgcatccctgttcctgtattgcggcaggttgtgtctaatcttgaaaagttgaagctccccactacacattctggttcaacaggggaaactactcgtcacggttctgatgatactgcccgaagaccaccttctgttaaagctgccctttctgtctcaaaaacaaaagtgaaagctcccaacacatggttcaacaggggaaactactcgtcacggttctgatgatactgcccaaagcccaccctgttaaagctgccctttctgtctcttttggtcagcgggctccacatcgggcttccacaagggattcttcacctattcgccgtacattaccttctcatgaaaaaaatggcagtgatgacataagaagatctccaagtaatcgccgcagccagagccgtgaatatcctgatagggatagggaacgagaccggtcacggtccagagacagggatagggaacgtgatagggacagatactgtgaccgagataggaacagggagtgggagcgagatcgagaccgcgaaagatacagagatagtgactcggacagagatcaggatagggacagaataagaagggataaggagcgggcccttctgtcgtcttctcgcagccgt

SEQ ID NO: 11609 - DNA, 1877 bp, Glycine max
  Clone ID: PAT_MRT3847_110491C.1
cccacgcgtccgtacggctgcgagaagacgacagaaggggccgttacaagttgcgttccgagtttgcccacgcaaacgtatcgagccagcctctcaagctagggttcttcaccgcgctccaaccttcttccctctcccttcgtcccctccaattggaatgtgattgtgacttcatatgctggtagctgacattttgaaattgtaactgtggtgggagcaataatatattttgccatcatcatggagatacagacttgtggcaggccgattgatctccttgctagagaaagtgctttgtatgaatattctctcgtctgattacttcaagcgagctctatcgattgaaaacgtatcacgaagttattgatgagatctacaatcaagttgatcacgtggagccatggatgacggggacattgtcgtggtccttcaactgcattctgtcttctgtacaagttttttactatgaagctcacacgtcaagcaaatgcatgggctagttaaaacacctcgattctccttacataagagcggttggatttctctatctgagatattgtgctgatccgaagacactatggaattggtttgagccatatgtaaaagatgatgaggaattttctcccggatctaatggtcgaatgactacaatgggtgtatatgtccgtgatttgcttcttggacagtattatttcgacacactgtttcctcgcatccctgttcctgtattgcggcaggttgtgtctaatcttgaaaagttgaagctcccctctacacattctggttcaacaggggaaactactcgtcatggttctgatgatactgcccgtagaccaccttctgttaaagctgccctttcagtctcttttggtcagcgggctccacaccgggcttccacaagagattcttcacctattcgccgtacattaccttctcatgaaaaaaatggcagtgatgacataagaagatctccaagtaatcgccgcagccagagccgtgaatatcctgatagggagagggatagggaacgagaccggtcacagtccagagacagggatagggaacgtgatagggacagatactgtgaccgagataggaacagggagtgggagcgagatcgagaccgtgaaagatacagagatcgtgacttggacagagatcaggatagggacagaatcaggagggataaggagcgggaaagagagagagagaggagttttgattatgacaagaggtctaagtacacagagagagaaagcagccgggattatgacaatggtagtaagcactatcgtaggagcaggagtcggagaagtagaagtcggagcctgcaagctggcactggtcggtatgaatcacgatctagtcctcagagagaggagagtaagagaacttctgcttcgagtaatcttgctaaacttaaagatatgtatggtgatttaggggatagtaaaggagatgccaacatggaaagaattcctagaaaggatagtggaggtgaagaggttattagacttggcgggtctacttggaaggattagttatcatggaatgcttgtatcaggtgttggatggctttcatggagaaaaacattgggactagcccttttgttgccagatgtttagattggtgaatgctatctatattagcatcatagataatgtatactaaaatttattcctggtgcattgaatttcatgttttgtaatcgcaagttttagactaaaagatcattttatgtcctgaactatcatgtttacattaatggtttaaactttgatattttacttcgtttccgtacatataaataatttaagaatactgtgtattttgaaacgccttcaggaggaagatcgataagatatatgatgccttt

SEQ ID NO: 11610 - DNA, 319 bp, Glycine max
  Clone ID: PAT_MRT3847_110492C.1
cacacctaaacaacgtcatgcacgcgtctaccaatcgtggcccacctgaaccaaccatcacactcacttgtctggcaacgactagcgcaaaacgcctgccttgctctcaaggactatcaacatttcttcctgactcccgaatatcgtaaaactgcacaagtctttggatattcgacaccttttgcggcacatctcactcatcgggtttgctacaaaaaacgctggtcggaccggctaccttacgacggactcgacgaggtcgatccattaactttaaacatcattacggagacttattctgcgctcaaactttctttgc

SEQ ID NO: 11611 - DNA, 454 bp, Glycine max
  Clone ID: PAT_MRT3847_110493C.1
atggagggaagggttaatgagccaatcttatgagctggatgagtttgactgctgtagatgcttgtcagatgaagaagaagaaattgccaatgaatctggtaccaataggttttcaggtcctcaagtcaacattgaaacaaatgatggtaaaaaattgaacagtgatgttggaatcactgaaactgaggatactgaacaggaaattcacggccttgacaaagaaaaaattccagctttgatgtcatgttcaggtgctgagtccataagcactgatggtggtggtctagttgcttcaggggattcagactggactttatgccacgtgaacaagtcatttgaagtgtgagtctatcccttcattgtttgatccatttatttataaaataaaacttcttgtcatgtaacaccccttcatgtttgatccatttatttttaaaataaacttggtgtcatg

SEQ ID NO: 11612 - DNA, 352 bp, Glycine max
  Clone ID: PAT_MRT3847_110494C.1
gccacacgtacggagagagaccgggtagggtcactggaagagacgaaggatatgaagagggcttctggcagcgcaagggagcaacagagggtgcgacgctaatccgcaccagatgctacctccgacgctcctgctaggaaacaagatgtgaagaaagatgtggctcaggttgttgctgataatgttggagatcataaggagttggctgcaaggcgggctgctctacaggagactcgtgtagagtatgatagagggaacgattttgtgagctatttgaagcaccatgccgagctcaaagacgttctggaatcagatacgaatgtggatgccgacgatatagtcaacattctac

SEQ ID NO: 11613 - DNA, 156 bp, Glycine max
  Clone ID: PAT_MRT3847_110495C.1
ggaggcgtgaccagacaaccccagcttatgccattgaggatagcactggaagggatcgtatgcttaaatatacttcagaacacatgcattgcctggctatgtgatggggccctcttgcttatcctaacactggggtatgagcctttcaaaacttat

SEQ ID NO: 11614 - DNA, 245 bp, Glycine max
  Clone ID: PAT_MRT3847_110496C.1
tgggacttgagcgatgcaaccgcaggagtaaaccacattaatgttgaaccggaacgcgaagctatcttggtccaattcaccatttcctgcccaaatattgagaaagacacatcactatatgtcatcggcagcactacaaagttggggcagtggacagctgaaaatggactaaacctcagctattagagtgaatctgtctggaaagctgaatgtgtgatgcaaaggagtgctgttccaatcaaata

SEQ ID NO: 11615 - DNA, 390 bp, Glycine max
  unsure (1)..(390): unsure at all n locations
  Clone ID: PAT_MRT3847_110497C.1
gcctttcctgatttcttggatgatttgtcctataggataatttgtgaaacaaccaagcccgcttatcttgtttcataagatgatgttacacgngcncgnaancagnngaaatttttactttttcttctcttattttgaacatgcccagnggctgtttatattgtncgtcagctttttttttaccgncgaagaattctaaccgcngaatttttttctataattgatgctttttattccacnacaatttttctttttgcgaaccgatttatctttgacaaggatgtttttattgcttccacgttttctattcattgnnngcctttttacaactttttcctactctttacccactggaaccgctattaatttattatatttttttttgcctca

SEQ ID NO: 11616 - DNA, 190 bp, Glycine max
  Clone ID: PAT_MRT3847_110498C.1
cgccgcgtcgtagctctaattcagctcagaccaacacaccaaccagcatttgcattaccatacacaatgggacctggggacttcggcggactattcctaccaaacctgtaatgcgccaatcccaccgctcgttcccaccacgaagggcagccctgtcggcctcacaacctgtccaggcacttccttgtca

SEQ ID NO: 11617 - DNA, 2427 bp, Glycine max
  Clone ID: PAT_MRT3847_110499C.1
cgataatttcatttataaataagcatctgcagatatcgatcatgaccccctattctgcgtctcatcgaaatgggagaacagaatgacattacgctgacatgggagaatttggaagctactgttacaaatggaaagaaccgaaaactaattcttcatgggcttacaggttatgcccagccagggagacttttggctataattggtccttctggcagtggcaaatccacacttcttgatgctttagcaggaagattgacatcaaacataaagcaaacagggaagattctaatcaatggccacaaacaagaactggcttatggaacatcaggctatgtaacacaagatgatgctatgctgtcatgtttaaccgctggggaaactttatactactcagctatgctccaatttccaaacaccatgtctgtagaagagaagaaggaacgagcagatatgacactgagagaaatgggtctacaagatgccatcaacacaagggttggagggtggaattgtaaaggcctcagtgggggacaaaggaggagacttagcatttgcattgagattctaacacacccaaaactcctcttccttgatgaaccaactagtggacttgatagtgcagcttcctattatgttatgagtggaattgcaaatctaattcaaagggatggaattcaaaggactattgttgcttccgtccatcaacctagcagtgaagttttccaacttttccatgacctttttcttctctcttccggagagacagtatattttggtcctgcctctgatgcaaatcagttttttgcttcaaatggttttccttgcccacctctatataatccttctgatcactacttaaggatcataaacaaagatttcaaccaggatgctgatgaaggaattactactgaagaagcaactaaaatccttgtcaattcttataaatcttctgaatttagcaatcatgttcagagtgaaatcgcaaaaagtgaaaccgacttcggtgcatgtgggaagaagaagaaaatccacgctgcattcattactcagtgcctaatccttataagaagagcttcactgcaaatctatcgtgacacaaacaattattgggcacgtttagttgtctttatcttcatatctttaagcgtgggctctatcttttatcacagtggcggcccggatttgcgatcgattatggatagaggatcgctgctttgttttttcgtttcagttgtgactttcatgacacttgttggtggaatctctccattaatcgaggaaatgaaggtgtttaagcgagagagactgaatgggcactacggtattacggcttttctcataagcaacatattctctgctgttccttacaattttttgatgtcaatcattccgggagctgtggttacttatctttctggactacataaaggagttgataactttgtattccttatttctgttttatttgctaccgtgacttgggttgagagccttatgatggttgttgggagtgtttttccaaactatgtcatgggcgtgatcgtatgtggaggaattgaaggagtcatgattttaacaagtggattctatcgacttccaaatgatcttcccaaaccagtgtggaaattccctttctactacatttccttcctcacctatgctttccaaggactgttaaaaaatgaatttgaagacttgccattttcttcggaagttctagctgacacttggcacgtgcaaatgggtcactctaagtgggttgatcttgctatcatgtttgccatgattgttctgtatcgagttctattcttggccatcagtaagtgcaaggagaaatcaaaacaagttagtgttggcattaaacccgaaactaaaattttctccagaatcaacatcagtgaactccaaatgaggggaattgatgatcataatgctgtctaagcagtagttcgacttcagctcggggttaacagtctctacgttactattgttaagcttcttttaaagtgaaaaaaaagagtgtgaatttatagttttctttttgttgtacaatagtcctaacaaggttaaaacctagaaccttgtgtagactacccagacactgcattaagccaaccctaatgggttaaataacaaattgaatgaaatagaaaagtaagaatgtatcaaactatcaatagtactggtaacatggttaaaacctagaatcttgtgtaggctacccagacctttccttattagaccgaccctgatgtgttaaaaaacaaactgtatgaaatgaaaaataaggatgtactcaaattagttaatgatgttattcaagattataaggtgctttagttttatatatataaatcctcatttgatatcttcatatacatagtcaatcaaaacaaaaataaaattgtcatttgaaatttacaaaaa

SEQ ID NO: 11618 - DNA, 419 bp, Glycine max
  Clone ID: PAT_MRT3847_11049C.1
aaattagaacggtatcttaatcttttgggggcctcttaattttatttttgattaataaaaacatcctttgcaaaattcttttaaatttttctttttttataaattcaaaaattttaccttttactattaaatactaattccccccactttcccttttaatcattacttccatccccaaggccaacacaatatgatcagaatcctttggtgttattccattctaatttttacaaaacattggctttcttttagcactttaatttttttaaagtaacatcactctatgtacaaccctaccagttaattaccttatctcatttccgttaaaatgtactagccaaccttttcacactgtatgctaacctattctatcccaacccaaattccaactaccagctttttaacttcaacaacttaaa

SEQ ID NO: 11619 - DNA, 620 bp, Glycine max
  Clone ID: PAT_MRT3847_1104C.1
cccggcattcggagcagccatccacattcatactaagatttcttatcatggcttcgggatcaccttcctcttcctcttcctccaattacgatgtgttcctcagcttcagaggggaagacacacgtcttggttttactggccatctctacaacactcttcagagcaagggaatccacactttcattgatgatgaggagcttccaagaggggaggaaataacaccagcacttatgaaggcaattcaagattccagagttgccatcactgtgctctctgaacactatgcttctgttagcatatcagaggcaacaagcatggcatcaggaaacaaagacatgaagcagaagaaagtacaggaggtgcagatagcaaaaaagcccaaaagaaaggttagaaggccagcttacttgaaggactacgcgtaagggtaaattgggaagcatcatcagcccagaaatcaccatacactgcttgattgtagcttgttccccatagttagacaaagataaccgtatagaatattctgtaggcagaagagtacaaattctgttattagaaactcttatatatatatccatgtaataatcaatcaggcatatatgaatacaacttttccttgc

SEQ ID NO: 11620 - DNA, 696 bp, Glycine max
  Clone ID: PAT_MRT3847_110500C.1
ccacgcgtccgcttaaaattaaagctaaaagaagaaaaagaaaaggaaaaagctgcggcaatagagagtagagagtaaacagaaaatctgaggcgcgagtggctggtgaaggcagcgactgcgagggaagggaagcatctttagctccaaatccaatggcggatacctcaagccgatcaagagacctcgacaagctccttctccgccctggcaatctcgtcggtcctaggttcgaacctggccctgagttgcgagatgaccttcaggccttcgccaattcttgttcagacttgaagatgttggcaaacccaaagccgaggtagctgccaagcgtgtcatggagagaattagtggtgtggaaatcgtgccgcacttttgcaggatcgaggacaaggaaattgaattttacaacaattttaacattattgcccttggtcttgattccattgaggcccgcagttatatcaatactgttgcctgcagttttctagagtacgattctgatgataatccacaagaagagacaatcaaacctatggtggatggtgggactgaaggtttcaagggccatgctagggttatcatgccagggattaccaccatgctttgagtgtactatctggctttttccacctcaagtgagtttccttttgtgtaccctggctgaaaccccctagactgctgctcactgtattg

SEQ ID NO: 11621 - DNA, 688 bp, Glycine max
  Clone ID: PAT_MRT3847_110501C.1
ttcggggatcttctggaagaaatcctaagttgcgattatcaaaagctagtattacgcatcaaggaaagaatctgtacatgcaagctccccctgtattggaagaaatgactcgatcaaacctgagtctctctctttttaatctcatgggtagattgcccaaggatgttgtgcatgtgaatggtacaacaatcaagaacgaccaaaagttctcctgttcgagaaaattacgtgttgttttcaagggagttgacggggttacagatatggatacagctggaggagcataacttacaacatccaaacatgttttgctgcttgaatttttttggctctataagcataattaatgttagatatcacagcttgtttccaatattggtcagggtgtagaattttggcaactccattttatcatatgcgcttagattgatggagcacagttagactatggatatctgatgcaattaagttgcttaattgtttctaagtgcccgtatttcatctctgaaattctgaagccggacttaaaatatcttgatggagatggactgtaaatttattgtggtagagaaatgtgtacgtgagtatcatttggcagtgaatggttgagaattttgaacattctgattacaagttgttattattattattaaagtgaggtcaaggcgcctatttaggctttggaatg

SEQ ID NO: 11622 - DNA, 1932 bp, Glycine max
  Clone ID: PAT_MRT3847_110502C.1
tttttaaatcataaggtcaaaattctcaaccattcactgccatttgatactcacgtacacatttctctaccacaataaatttacagtccatctccatcaagatattttaagtccggcttcagaatttcagagatgaaatacgggcacttagaaacaattaagcaacttaattgcatcagatatccatagtctaactgtgctccatcaatctaagcgcatatgataaaatggagttgccaaaattctacaccctgtggggcaacaaatccacagcatcaagtgttacagttttgctcgtctatgaataactttgacaggtagaaactgtaaaaccttacctgaccaatattggaaacaagctatgatatctaacataaactatgcatatagagccgaaaaaattctagcagcaaaacatgtttggatgtggtaagttatgctcctccagctgtatccatatctgtaaccccgtcaactcccttgaaaacaacacgtaattttctcaaacaggaaaacttttggtcgttcttgattgttgtaccattcacatgcacaacatccttgggcaatttacccatgagattaaaaagagatagattcaggtttgatcgagtcatttcttccaatacagggggagcttgcatgtacagattctttcctcgatgtgtaatactagcttttgataatcgcaacttaggatgttcttccagaagatccatgaacttttgcaatgtgattgaagtgtctagttcaattcgtataccaggaccacacacaagacagtccttgtccctttcaaatcttgccacttcagtatggaggccttctgatccattatacgttaaatagttcgacaaaattttgctgcactctgttgcaatctttaatgtttctagtgcacatgcagccgatataattgcatttgttgaagctatagctggtatagccgagatgttcttcacgacaccctgggtaagagaataagtaaccccaggaatgccaaaaagctcagccctcttgacagcctcgtcatagacccatttcatatgctcagggttatctggatcaaaagccactccgccatgaacctcattccacttaatcaagtgggcgtattcaatacagtgagcagcagttctaggggtttcagccagggtacacaaaggaaacttcacttgaggtggaaaaagccagatagtacactcaaagcatggtgtaatccctggcatgataaccctagcatggcccttgaaaccttcagtcccaccatccaccataggtttgattgtctcttcttgtggattatcatcagaatcgtactctagaaaactgcaggcaacagtattgatatagctccgggcctcaatggaatcaagaccaagggcaataatgttaaaatcattgtaaaattctatttccttgtcctcaatcctgcaaaagtggggcacgatttcgacaccagtaattctctccatgacacgcttggcagctacctcggctttgggtttgccaacatcttcaagtctgaacaagaattggcggttgagattagtaacctctatgcgatccatatcaatgacctcaaggtttcggaaaccagagagggctaaatccttcaacaactcacaacctaagccaccggcccctaccaccaacactttggcgaaggcctgaaggtcatctcgcaactcagcgcctggttcgaacctgggaccgacgagattgccagggcggagaaggagcttgtcgaggtctcttgatcggcttgaggtatccgccattggatttggagctaaagatgcttcccttccctcgcagtcgctgccttcaccagccactcgcgcctcagattttctgtttactctctactctctattgccgcagctttttccttttctttttcttcttttagctttaatcggacgcgtgggg

SEQ ID NO: 11623 - DNA, 507 bp, Glycine max
  Clone ID: PAT_MRT3847_110503C.1
ttgcttttttcacaattcactaccttcatagagagtaatagataaagaaaaacgatagagacaaacagcacaaggatggcgctttctcaacttgggtttctgtaaagaatcctggattacccttctaccttaggtgtcttcataatccagatccatgggtgacaagaggagggcttttcaggtgattctgcatatggttgggaacctacttgaacacaatcatgggggagggaaccttgtatttctagttttcccccaaactacaattccgggaacgagtgacatatggcgatcacccttcagaccattctctaatagtggggacgcaaaatatcccaaggtgaaaacattacacggtaaccattctgaagctgggagctcaatttcttcaggattcgggggcaggaaatataacagagatcggtttggtggcagattgagcctcagcatttgcaacagggtagtccatgagagttccataatggctatcatatgtatgcatgaaca

SEQ ID NO: 11624 - DNA, 293 bp, Glycine max
  unsure (1)..(293): unsure at all n locations
  Clone ID: PAT_MRT3847_110504C.1
ggaaaaagttgtattgaatttctccaaactnncancagcttgtnggggaaagggcgtcaaatttggctgatgacnccatnnattttgaaggcttttcccaacaagctggtgcagtttggagaaatttnaggncgnnaggtggtatggaaattctcttgtgaaaatttccnagtncnagatagtgagcggaagnnntttgnaanttnttctantganaaaaaaattcgtnnggnacnggnaggtgtggnagntttccgngnnntgggtggattagggcttggcgaatcaantgt

SEQ ID NO: 11625 - DNA, 472 bp, Glycine max
  Clone ID: PAT_MRT3847_110505C.1
attgttatgtgtaggattttggaaaagcttggatttgtgtggcaaaatgaggaaaggatcagagctcaagaaggaaaagagatgttgcaagcttgatgaggatgtgctctcagatctataagtacccctcctcccccattggattgaggtaggaggtctcactccggcccgagtgggggagggcacattgttggccgtctttctctcggttttggaggaggcacattgggagagcatctacaagtgatttcggagtggagagttcatcatggttcttgtttgtgggtctttgttgagctttgagagagtcatgtaagtggagtttgtaaggtttgagtcttattttataatgagtttttggttcgatttgtatacattcaaggatggccaaggcctagaatgggatttgagttcttgaggtgatccttcattggaggttatttaaactttcatcaatgaaatgttttaattg

SEQ ID NO: 11626 - DNA, 295 bp, Glycine max
  Clone ID: PAT_MRT3847_110506C.1
gtagtacacaacagcgtcagatccggctcagtcattgctgcatacaacgatgagaggatggaagtagtgcgacgtggagtgtcagtcttgatgcgcactgagtgatctgtaggacgtcttttaaagagaggagtgcatacagagctggagtgcctatggtgccagatcaaagtgatgctagagcacaatattacgtcacgaatttagtcggctatgcaactgtatacgcactatgatgagaatgcttctgcaaagcctaggtacacccgtgaaaatagtgatggtgattactaca

SEQ ID NO: 11627 - DNA, 466 bp, Glycine max
  Clone ID: PAT_MRT3847_110507C.1
aaaaaagtacgtatgcatgattcatctagctacttgtacttgatctcatcttggtcctgataattgaacacatgacatgggtacattactaaaaaaactagcctgtcccgatgaagtagcttctccactactcaatttcatgaaagctgaataagtaccagattgagataatgaggggggatcaggtacagggcacaaaccatcaagcatctgagccaccttagtcatggaaggcctcaaactcacgtcatcttgtatgcaccaaagagcaattttaagagcagactcaaccctttcatccttctcatcaatatctatctttggatcaagaacctctttcagtttcccttcatccatcattctgaacacataagaaggaaaatgtgctttctctgccccttcccattgatcatagttcttcctcccttcaattatctcgagcaagagcatgccatagctgaacaca

SEQ ID NO: 11628 - DNA, 340 bp, Glycine max
  Clone ID: PAT_MRT3847_110508C.1
ttttcaatgaatatggcgcaggttttatgcccataagtattcgactgctgtaaaatagatgcttcttaaccagtacttataactactaggaattaattggactaaaaaccttctactgttgttattacagctacttagactgtagaacatgaaataaaactacaactgattaagttcaatcatcaactacaaggaccatcatttaaaataagaaatcatctgtacgagacttgatatcagagccataatcattgcctattaacatatagatattatccgcccacggacgaatcctatcacaacatttgataatagtcatccctaattaatcaatgttaac

SEQ ID NO: 11629 - DNA, 333 bp, Glycine max
  Clone ID: PAT_MRT3847_110509C.1
gtcatatcttctggtagaccttcctctctgggaactgagtatcactccaatcgtgtgaaccggggcacaaccatgcctgtagtacattatatgcacatcattacaaaaaatagctgtgtcggtgagttcggtcttttgtaatacaaaggtgattcacccctgccactggagagctagtctatcaatgacataatatgtgctcagagcctcgttgcatacgctgaaagcatatacttaaacacttcatagctgtgcatgattattgacattcatgttccctcgtgtgacccaaagagcattcatcggttgacctaactttgaagacgctggcat

SEQ ID NO: 11630 - DNA, 490 bp, Glycine max
  Clone ID: PAT_MRT3847_11050C.1
tctctctctctcactgcaattgcaaagcaccaccattccttttctccacttcgaagcaccgcaccattctctctttgcgaggttgaagtcgtcggctttcgatatccgccctaactctttagatgacttggcaacgttgtgtgggaaataaaagttgagaactcaacacaacaattaccagaaccaaaattgagcggggcaggaaaggttcaggactgtaaccagttcttacttactataggggagcacaaggaatcattctagtgggattggatgactccaaattcaaacagagtctgttagtcaaggatctcaccatgcaaacgacattgtttagtcatcctctattctgtttctcttgcagaaacatcagtacaaatgggaagactaagtgctctgtaaaatttcgtacatcatacccctctcaactggatcggaaatgtgaattcaatgggatacctcatgtttataattctcccagccccataaa

SEQ ID NO: 11631 - DNA, 178 bp, Glycine max
  Clone ID: PAT_MRT3847_110510C.1
acggagggggaccacactcttaacacccactctaaattcctttctgcctggtgaattagcgcacttttccaacctttaattttaagcttaattggattccttttttttcttttccaaatggccacggttaaggttgcccttcaaccaccaccaccggttccggaaattgaaccacccg

SEQ ID NO: 11632 - DNA, 525 bp, Glycine max
  unsure (1)..(525): unsure at all n locations
  Clone ID: PAT_MRT3847_110511C.1
actgagcatcgtctagctatctcgatcgaactgtccaaggtcctgtcacaagcccggtggtgggcgccatgggcgcgtgaaggggccatggtatgacgttgtggtgctaggtgcgcttgggttatcaccattacgccagcggttaggtcctacaaatgagtcggtttatggcccgtggggcagtatagtaaagatcggtaagccnaccagagtgcaacaaggctagatggctagtggcgataacggatatgccagatgccgtggttacgttaaacccgtagatggcgggccgtatggtagtagcaatagaaacagccggttgccatcaggtagtgccgtataggtatgcgtgggggagggagtggtgtaaaacgtccacgtatcagcacagacaggggcagcggtggccccaatacaataccataattggataggggctaaataaagcgcggtattccacataaccgcatacacactaaacaagtgggtgtccagggcagttaataaactagattatacagatgt

SEQ ID NO: 11633 - DNA, 285 bp, Glycine max
  Clone ID: PAT_MRT3847_110512C.1
ccgaaccctcgatcactctcacgcgctcctatattcgctcctccaccgtcgctctctcgaacaaccacaacaccatcttcatcacatggcaaacgcagcatctggtatggcagtccatgatgactgcaagttgacgtttctggacctggaggcaaaaaggacacaccgtttcatagtgttcaagattcaggaccagcaggagcaggtcattgtcgagaagcttggtgagcctgcacatggctatgaaggtttcactcgccagcttcctgctgacgggtagcgtta

SEQ ID NO: 11634 - DNA, 428 bp, Glycine max
  Clone ID: PAT_MRT3847_110513C.1
aacataaaacaaggacgcctgccactcttgatcttatatatataattcactgccacaaatttatattattcacttagcaaacgttctaaagttttatactatccggtatgttatccctataaacacactatcaagtcttttcgcagcacataaggctaaaacagtggatacaaaatggccattgtgcttaacctcaccataagaaaaaaggagagagaactagccatatgctatctcctgaagcacttgaagtgtcttccgatgaacccactccaaatgttgtgcagtgatgccagaatctgttccagcatataaaccagacaagaccttggagacagtctcaagaaacatgccagggcgcactggaagtgtcttctctcccgttactagtggccttccaagaaattcagctggcctcgagccgaatt

SEQ ID NO: 11635 - DNA, 349 bp, Glycine max
  Clone ID: PAT_MRT3847_110514C.1
ttttttttttttttttttttttttttttttttggcaaaaagttgaactggtagcattaacccaaccaatacacaattttttggggtttacactaatcagcataatttgtatattattgggatgcttctaagatcaatccgaaccaaaaaaaaaaaaaaagaattaaagaattctggaccaaagaaagggaaaaaaatgaatttacaactccactggttcctacgatgatgggggttttagctggttcctttttgggcagccaaatttgggtttgaaaactgaaaaaaaaataatggtgatttttattcgggggcaccccttttttttgatctttttttttttgattgaa

SEQ ID NO: 11636 - DNA, 707 bp, Glycine max
  Clone ID: PAT_MRT3847_110515C.1
cggaattcccgggtcgacccacgcgtccggctttctgttaatttttaaaattaaatgtgatggttaattaacacagcagtgcacagaaatagcatgggaagggtcacagcagaagccaaatcctaaaagtatggtattatgactgaaacaaaattatgaagctttttgaatgtcactcgctcagtctctccagtctcaactgtgctccgcggcacggcagagtccattgctggcgaagaagcttcacgcacaaatcataaaagctggtctcaaccaacacgaacccatccccaacactctcttaaacgcatacggcaaatgcggtcttatccaagacgcactccaactgttcgacgcattgccccgccgagaccccgtcgcatgggcctccctcctcaccgcctgcaacctctccaaccgccctcaccgcgccctctccatctcccgctcccttctctccaccggcttccaccccgaccacttcgtcttcgcctccctcgtcaaggcttgtgctaacttgggtgttcttcacgtcaaacaagggaaacaagtccatgctcgcttcttcctatcacccttctccgatgacgacgttgtcaagtcttctttgattgatatgtacgcgaaattcgggttgcccgatacggacgtgcccgtttcgactccatttcttccttgaattcattttcttggactaccatgatatc

SEQ ID NO: 11637 - DNA, 303 bp, Glycine max
  Clone ID: PAT_MRT3847_110516C.1
gccattaattttcttttaaaaataaaaataatgcacactgaaatactatcttactacaaacttataaaccaccgacggaaaggagaacaaaacgattgctgttacttactcacacggagtgaggcaaatcatcatcgacaaggacaaactaaataggcgatgaacattctgagtgactaggcgtcagcaatgcgggtaactacgtgtgcaaatagtcccgaactacattcccctgttaaaggtacttctacctgacgtggggacattccaggtcacacccggtgaccacgaaatgaaggggac

SEQ ID NO: 11638 - DNA, 547 bp, Glycine max
  Clone ID: PAT_MRT3847_110517C.1
aattttatgttcacattttttcaaaagaaaaagaccacatgtcaataagaaatcagacagattttttccacaaacacatgttctacgcaaatccgtacacacgtagttattatcatcgttgtattacatgcacagtatttgacaaattagatataaaaaaatttctagaaacgaacctctgcagaagtggattacagaattgagaattcagagaaaacttgcacgtaagaccaataataaagaaatagaagcaaataagcagacaattggaggaatcataaagcgatcaatcacgagtttatcacaaaaagaatgagtaaagcaaatcgcagaataacagtcacaattaaaaggttgaaagcgccagggaggatcaaacggaaaatgaaaacgataccaatctcttattcaagttgagacggagacaacgttcggagagtaatgctccggtgaacgtgttcgtggccatggaggttggtgcaaagatgcaaagataatcgaaagagaattgagaaggtggcggagaatgcgaagagcgcggctcgag

SEQ ID NO: 11639 - DNA, 1336 bp, Glycine max
  Clone ID: PAT_MRT3847_110518C.1
cggcttcaaactggaaatgtaggaagctgttccccactagacaatagctcagctgcaccaaatacagagacaatgcacaactttccatctcattcaaatggcactccttcaaatcaaaaatctaatgggagcaacaacatcgatgacagggcctccactaatacatatcttggcccccaatctgatacttttgacaacatcacggacattggatgcgtgaatacatatcgtggcaccaaacttgatacttttgacaagaagccagagtctggaagagggattggctcgtttaattctcgtgaactccaaactctgcagaagaataacatctgttcatctcagaagaaaactactgcccgggaagaatatacagaaatcattaaagaatcagtaggaggctctgaacatggattccaagtcgagcacacttactatcagcttcaccattataatcacattgcccataaagctgcagtagatctccaatcagatcatgatctcttactgaaaagctcaactcagcaatgtgtatcatcaaatgcatttggagggccagcagaaagtaatgctgcaaactatggtgtggatggaaatgcagcggagagtgatcatgggagcaataatggacaggatggaagcaacaccttgacaatcagaatgataaatatggaaatggcaatgtggctgctgggagcattggaattggtggcattgataggaaaagctttgggaatggggcagatgaaggacggcttgcattgagagaggctgccttgaccaaatttcgtctaaagagaaaagaaagatgctttgagaagaaggttcgatatcacagcaggaaaaaactagcagaacagcggccacgtattaggggacaatttgtcagacgaatagtgtctgaaggcaaagaagaaaaagataaacaaagtgacaacctggttcctggggataattctatcgacattcctcaatagcaccagacaaagtggtgatcattatttgactgattccgttccattaactgcctctagcttcttgctagcagaccagcttttcacacgttcacctaggaaggagcttggaggtttgtgttagaggaatctgtgattaggtagtttaattttatctctattgtgtgaaaatcagacatttaatttgaatcttccaagacaatgttctagattctgtttatggttgtctgaactttaaaactccaaatggacccatggaagtggttacctttggataggttaacctctgatgaaataaaatttatcatgttagctttcaaaaaaaaaaaaaaaaaaaaaaaaaaaaaaaagaaagaaagggcgag

SEQ ID NO: 11640 - DNA, 504 bp, Glycine max
  Clone ID: PAT_MRT3847_110519C.1
aactggaaatgtaggaagctgttccccactagacaatagctcagctgcaccaaatacagagacaatgcacaactttccatctcattcaaatggcactccttcaaatcaaaaatctaatgggagcaacaacatcaatgacagggcctccactaatacatatcttggcaccaaacctgatacttttgacaagaagccggagtctggaagagggattggctcgtataattcttgtgaactcctaactgtgcagaacaatagcatttcttcatctcagaagaaaacttctgcctgggaagaatatacagaaatcattaaagaatcagtaggaggctctgaacaaggattccaagtcgagcacacttactatcagcttcaccattataatcacattgcccataaagctgcagtagatccctaatcagatcatgatctcttactgaaaagctcaactccgcaatgtgtatcatcaaatgcatttggagggccagcagaaagtaatgctgc

SEQ ID NO: 11641 - DNA, 465 bp, Glycine max
  Clone ID: PAT_MRT3847_11051C.1
ctcgagcctaattggatcgagattgaccttctcggtggatgaatcttaatggacaaaactggagattggatcacactcatacagaattctacaattagtgacttgtggtgagttgctgcttggaagaatggctgcttaatggtcaagattgtgaggtctgggaatgcaacattcaaaatggagtgattgggcctgattggtacaagcgttcttaacatacaccaacagtacatagcattttgatgcatgttagtggtcaaaatcagaaccacattcctggtaattgatcttgccaatacacgtatgtggtcctaattatggctttgagatgtggagttctgagtgggcaaatcaaacttcatggcgtttgagtttgctgattgtctatacacaacagactaccgtttctgatatgctgttgagaatctctcaaaattctgaaattgctggtaatactcttatgcc

SEQ ID NO: 11642 - DNA, 453 bp, Glycine max
  Clone ID: PAT_MRT3847_110520C.1
caactccgcaaataaatataaatttttccttgcgtatagtccgagtttgacaagcaggccccagccggagtgtggtcttattggcatacggcacatggcacgtgagagagagaagcgtgtgaagagaaaagccgaagcggcgaaacacctcttctttatctgttcgctattatcaaatggaggggccctctcttgttcgtgctacaagagacagatcccaggatctggggccccttcctccttccccttgtcgagagttgcggggaccacatctctaatcagcgagagagagggggcgccataccagccattagctgctgtattattattgattacggatgagtgaggtgcttgaatgagaccaagcactccggcatcgctcttgtgtgtcaccattgactctggcgttcttaatctccacgacagctgcgatctctagcatatacacgatca

SEQ ID NO: 11643 - DNA, 229 bp, Glycine max
  Clone ID: PAT_MRT3847_110521C.1
ggctaccttgatagctgataacaatcactctccccatgaagatgctgaagctttcagataggcttttgaaggatggggaactgatgataacactgtcatagcaattatgggttatataattgtgtatcagaggcagcatatcagaacattttatgaggtaatttatcctgatgatcttgtgaagcgcctaggtctgagatctatggagacttttgataatcccgtgtac

SEQ ID NO: 11644 - DNA, 439 bp, Glycine max
  Clone ID: PAT_MRT3847_110522C.1
caaaggggggcccggccccctttttttaaaaaaggccccctcccagggattggttttgaaaaggggtgttaaacaaatacaaaacccccacccgggggggggggggaaattttggttttttgttgaataaaaactaaaacataaaattcatctaaaaacggggggaaaaaacaaaacaggggagggccccccccatttattatgttgggaatctcttaggaaaggccttccttcaacccaaaaaaaaagcccggcttttaataatggttttaacaaaaaaactttcacctttgaaaaattgaaaaaaatatcttctatccccaggaaaaaaaagtggaagttcacctttcccccccctttgaaaaacgggggggggggagaaaaataatttgcttttaaaaccccctttgcccagggattgcccccagcactttaaacc

SEQ ID NO: 11645 - DNA, 566 bp, Glycine max
  unsure (1)..(566): unsure at all n locations
  Clone ID: PAT_MRT3847_110523C.1
tatttctcctcctatctcattgctagtcatctctttctttgattttccttccccctttcagttacttcaacgctgtaagtatccatgataaacctctgtttcaaacccgaggaagatcacactgatccctgcgcatgctgccgctcgtgtgagatctaaggatatcgattgngtcgtacatatctgcgtcaaccctgaactttttgtggacaaagaagcaaaaaaggcaggagtgtactagaactttgctaaagcacagaagacatgctgatgcatttcctgaggaagatgtgagcgacacaactcctaatattatgacctccatcatctgctcctttgctgcaccccagtatcaactataatccttatgattactcaaagctacatgagaaatatgcacttctattatggttaaaaacatatttgatactgcttatatataacaaaatgccgtggatgatttctctgaccaagaatcgtggatgctgagcctgataacagcactactcgagtatattgcattaaggatagcagctgtgtcaatgccttcacattaaatattgtat

SEQ ID NO: 11646 - DNA, 440 bp, Glycine max
  Clone ID: PAT_MRT3847_110524C.1
aaaaaaaaaaaaaaaaaaaaaaaaaaaaaataaaaaaaaactaaaacaaaaaaaaaagagaaagaaattaataaaacgaacatgccactcaataacatcttccatagtaacacctaaatactcttctctccccgacactttacaacctgctttctgtgaattcatttgaccctccatatttattttccttgcatcacacttccccttcgcctactacaatattacactaaaacgccctcacacatctcccttcctaatagttccgctacattgaacatgcattggcactctccctgtacctctacaaattaaccccaacatttgttttggccacgtgcaccgtgacctctacttttgccacttccctagcggcaacatcttcttctttctttgcttcctttatttcatcgtccatctgctttcctcgataagctcttaat

SEQ ID NO: 11647 - DNA, 385 bp, Glycine max
  Clone ID: PAT_MRT3847_110525C.1
ggagagtgcaaaaatcagcaaatggttaaatcttctagtgtatatactgctattgcttaaagcagaaggatctcttattccattgactttaataaataatacagaatcaaaaagagctatttatttaaataaaaaccccccagcataccactttaacaggcaatttgaataaaggattaagaactagattattcacatggacagaaaaaaatgatgcaacaatatagagacttacctttaccagagaaatagtcgcttgaattcatctaagcggatgaaaaatctttacttttctacaatgctaagcaacaaacaatactataatccagatttctacaattggaatagagtgaatattaagtatggtaatggatcatcgtttact

SEQ ID NO: 11648 - DNA, 302 bp, Glycine max
  Clone ID: PAT_MRT3847_110526C.1
acgagaagaattgcaggatgatgcaaatcctaactttgttgaagaaattgtgactcttcattaccgtgattcgtcgcggcttatctcaagcatagagcaggctctcaaagagaggaaccctctggatttcaacaagctggacacacttatgcatcagttcaaaggaagcagcttcaagtcctaattttaatggggggaaagggcccctccctaataaaaaaataaaaaaaagggtggggggccttttcgaacagagtgtaatctgttcagagaatattgcagggcaggggaaatgcagaagg

SEQ ID NO: 11649 - DNA, 420 bp, Glycine max
  Clone ID: PAT_MRT3847_110527C.1
cccacgcgtccggaaaccttgattaattgctacaacaggttgaagaagcatgaaaccggtggcaaacgcattggtttctggaaaagacgaatcagacgaggatttggtacttgcagaagtacgaactggtaacgaaaagaagatcgctctctgaaatggacacagagttgcacagtcatatacacaggcacttgtaattcatgaggtgaacactttcttaatagatatgcgaactcgaaggagattgaaactagaatgtgtaaattaatacccagttgatggaataagaaggaaagctgatggaacattggagagtgctctgactatactatgtgggataaactgattggagagaataccctatttatgaccgaaggctcactttatccaaataaccgatccagatagacggagaaaggg

SEQ ID NO: 11650 - DNA, 494 bp, Glycine max
  unsure (1)..(494): unsure at all n locations
  Clone ID: PAT_MRT3847_110528C.1
ctcgaaacttaattagaactcaaaatatagaaaaataagacaacatattaattcgtcgtgttcctcatcatgttcctatttgaggatctctggtccctcccgcgcctcttctcagtctttacgcgaatcctttacgagctcgagctgtgacagaacggagtcggagcaatgccgcgacgagtcggcggcgatggttctgaaattcgtggcggtggcgtcgattctggtcgccggattcgggggagtctcgattccgctggtcgggaagtcgcggcggtttcttcgaccggacggcgacgttttcgcggcggcgaaggcgttcgcggcgggggtgattttagcgacggggttcgtccacatgctgagggactcgtgggacgcgcttcgggagccgtgcttggggacgcactcgcgcgcgtgggcgaagtttcccttcaccggtttcttcgccatggtgtcagcgctctttactctactggttgactttntagcga

SEQ ID NO: 11651 - DNA, 795 bp, Glycine max
  Clone ID: PAT_MRT3847_110529C.1
ctcgaaacttaattagaactcaaaatatagaaaaataagacaacatattaattcgtcgtgttcctcatcatgttcctgcttcaggttctctgctccctcccgcccctcttctctctcgttccccggtccctcccccgcctcgtcccgggtccgttccgtgtcccgctaatcctgcggcgccccgactcccagcctccaaaaacttcaagtgcaagtcttttattcttcttttaattttcaggatctctggtccctcccgcgcctcttctcagagtcgcttaatttacagtctttacgcgaatcctttacgagctcgagctgtgacagaacggagtcggagcaatgccgcgacgagtcggcggcgatggttctgaaattcgtggcggtggcgtcgattctggtcgccggattcgggggagtctcgattccgctggtcgggaagtcgcggcggtttcttcgaccggacggcgacgttttcgcggcggcgaaggcgttcgcggcgggggtgattttagcgacggggttcgtccacatgctgagggactcgtgggacgcgcttcgggagccgtgcttggggacgcactcgcgcgcgtgggcgaagtttcccttcaccggtttcttcgccatggtgtcagcgctctttactctactggttgactttttagcgacggaatattacgagcgcagagaggcgcgtgggcgcgtggagcgagggcaggtgttgataatgatcagagttgatcatagctatgacgtcatcggcactgcgcttgtcggtcctctgtaaaatgtttt

SEQ ID NO: 11652 - DNA, 1674 bp, Glycine max
  Clone ID: PAT_MRT3847_11052C.1
tcgtcccactcgtcgcccatgacccttcaagctgattcagcaccagtaccaccaccgccaccggattccgcagccaccaacggcatctcccccaccgcagaggaagccccacaaccaccgtcaccaccaccgccgcatccaaccccacctccagaactgcgcgtcccaatatggtggccggaagacgggaacctcagcatggattgggtggacaacctgatgcggtgcttcgattggtcctctcggaacgtcccaccctcggagctcccttcggttctccccgtcggagtcttcgattcgctcatcctcgtcgcctccaagatgctccacaaggagcccaattgcgtcaccgtagaccccttccgccctagctccgatgatgataacactccctccgctgcctcctctgttgtcgtcgtcggcgatgttcacggccaactgcatgatctgctcttcctcctccaagatgccgggttcccctcgcgggatcgcatctttgtcttcaatggggattacgtggatcggggagcgtgggggcttgaaaccttcttgctcttgttggcttggaaggtattcatgccacataacatatatttgctacgagggaatcacgaatcaaaatactgtacatcagtttatggttttgagaaagaagtaatggtaaagtatggcgataaaggtaagcatgtgtaccggaaatgtttggggtgctttgaaggtcttcctttggcttctataatagcagggtgtgtatacacagctcatggaggacttttccgcagtgtaactgtgatgccatcaaagaggttaaaagggaagaagaaccgtaagattaatgttaatcatgagagcaaaattctatctcttggttccttggaagaattgtgtaaggctcgacgatcagttttggatcctccttgggaaggcccaaacttgattcctggtgatgttttgtggtctgatccatccaaaaatcctggtcttgctccaaacaaagaaagaggcattggcttgatgtggggtcccgattgtactgaagaatttttgaagaagtaccaactaaagttgatcatcaggtcacatgaaggtcctgatgctagggaaaaaagggatggttttgagggaatggatgaaggttacactattgatcatgttgtagattctggaaagctggtcactgtttttagtgctccagattacccacagtttcaggcaacacaggagaggtataacaacaaaggcgcctatgttgtccttcaacccccgaattttgaaaatcctatatttcatggattttcagcagttactccaaggccgaaggtgaatccctattatgattacaaagaggtgatagactccgatgaagaattggatttggcctccatggtaacttcctgaggattttttgaggaaaatgttaaagttgtcagatttgtaaaattgtattgttattttttgaaatacagcttttatcattaacttatatgattattaattatattatccgatttattaagtttgtgaaatcaattgatcccaaaagtagctactggatagttcagttatggcacaatattctaaactgatatctgtaaaaattgtaaaattatgagttacagaaatctgctggttctcaatccagtgcatgttttcagttaaaattccttggtacca

SEQ ID NO: 11653 - DNA, 545 bp, Glycine max
  unsure (1)..(545): unsure at all n locations
  Clone ID: PAT_MRT3847_110530C.1
ggctcgagatttacatcttcgtatttccctttcctcgaaacttaattagaactcaaaatatagaaaaataagacaacatattaattcgtcgtgttcctcatcatgttcctatttgaggatctctggtccctcccgcgcctcttctcaggtacgttacgtttgccgttaatcttgcagaattgaaaattctaacctaaaaagagagagagagagagagaattgaagttccaattcaagttttgcaattcgaaagcgattctaaagtctaacgaagtcgcttaatttacagtctttacgcgaatcctttacgagctcgagctgtgacagaacggagtcggagcaatgccgcgacgagtcggcggcgatggttctgaaattcgtggcggtggcgtcgattctggtcngccggattcggggagtctcgattccgctggtcgggaagtcgcggcggtttcttcgaccggacggcgacgttttcgcggcggcgaaggcgttcgcggcgggggtgattctagcgacggggttcgtccacatgctgagggact

SEQ ID NO: 11654 - DNA, 304 bp, Glycine max
  Clone ID: PAT_MRT3847_110531C.1
ctggcgtgatgagtagcatctccataacacgaatcggatcggaaagttttgggctttcgatttggatgcccctggtgctggcgtgactgataaaagaaaagttcgcgagatgggtgtgagcacagcagatgccacattccacaatcttgattcatcggaaatttccctctctgacgtcagacattactatgacatctactccacttagctgggcaaactctaaggaaagacgggaggaagccttcgtgcatactttgctgatacaacccacaccactgctgtggtacgtgcgctttttgagacg

SEQ ID NO: 11655 - DNA, 310 bp, Glycine max
  unsure (1)..(310): unsure at all n locations
  Clone ID: PAT_MRT3847_110532C.1
gctcaaaatagctggccgtttattgaaaagaatcaaatgttcagagtatcatcaacagtaggagtaaacttaatgagaatcagggattatttctaccttacaacaaaatattgtgctgcatttgacccggactaatttaatgatgatgcagcatngagcctaccggacttgcttaacacactactcaaaacatgtacaggggttcactgaactactagccttcggtctgtattacacctggggaaagaggacaccttgttaattggtggatggaaggtgcccttaccgttctcaaagacaacttgactaa

SEQ ID NO: 11656 - DNA, 343 bp, Glycine max
  Clone ID: PAT_MRT3847_110533C.1
tctagctatctcgatcgaactgtccaaggtcctgtcacagtcgcaagctcgagaaaccaaaagaacaaaggactcgtaaaagcgccgcgcggtactctgttgagcgtttttcatactgtcccttttcctctcgatgttcgcttaacacatcctctcctctgctcaactcggtcccacaacaattttgttcgtcgcagtccgccacggatccacagtagcgttaatgtctggagatttattataatcacggtcttcgggtactttagagttgggctgcgtaaccagcacacaggtgctggcgggcagccactttggcataagggcccaaatggcacataataag

SEQ ID NO: 11657 - DNA, 163 bp, Glycine max
  Clone ID: PAT_MRT3847_110534C.1
gaaccggctcgagaaacacaatggacctccgtgaatcgataagcaaccaaacctacgtggccctgagtcatcatcaaagctcctgttgacgaaagatgctcgcaactaagaacctgcgtgtattcttcgctcacagtgcatgcagatcttagcatcaaagact

SEQ ID NO: 11658 - DNA, 296 bp, Glycine max
  Clone ID: PAT_MRT3847_110535C.1
caacgggatttacacgcctaacttagatacccttgcattgggaccgaatgatgagtagcgcggtgttatgtcatctctttatactttgtgccttcaccacctcatacctaccttaaaccattcctgatttcgcgctatataatgaactgtaaccatttttaaaacggaggcacatattatatcttggcagacataacaacgtatatcggactaaaaccagtctgaaccggaaatcaataacgccttgtcacttgtgatgcactttctcaatgagctctacaaatgtattggaacaa

SEQ ID NO: 11659 - DNA, 347 bp, Glycine max
  Clone ID: PAT_MRT3847_110536C.1
tttaccaattcattctcccttatcaagaggtttttttttttgggaaagcataaccttatattgcattttgtttggccatgaatttaattttgggccccacttgaaagggtgctttattgaaatttagctatagcgacttcactgattacaatggcagcttaaaactttttaagggtttaactcccacccgttaataacaacattaataattatgtttcccacaattggcttaaattaatatcctatttgggtatttaatgcagctaactagatcagttgctttaactaatttggcaaactttttttgtcaagatcatccaatggcaaaaaaactttattcaaacaag

SEQ ID NO: 11660 - DNA, 455 bp, Glycine max
  unsure (1)..(455): unsure at all n locations
  Clone ID: PAT_MRT3847_110537C.1
aagccnggaactcggntcgagcacatacgcaaaaaacccaaactcttttgcttttttttcgaaccataaggcgggcacggggactgcttcgtagaccgcatggaacaacaggcagattcgggtgctgtgcggtcaacatcctatccgctgaacgccgttgggagctccagggacctcgacagcacgagcagtcttactacaacgaacttgaacacgacgcacaggaatactcgaactttaatgaagggacctggaaaccaccgaccatgatgacggagaatgtaccgcagaggctccagctagcgctacgacattgtcctgaagaacaccgacgaggactgtacgtgatgaaggtctaagagagcagactaggcgcaaatgatgcactacagatacggcgccgctgagaaatacatgggagccgacgatacgcgcgccagagggaacgaggtcca

SEQ ID NO: 11661 - DNA, 226 bp, Glycine max
  Clone ID: PAT_MRT3847_110538C.1
ttttacgcgtgggcaaccgtgcacacgggtggacttacgttaacagcggagaccccgctatcgcaccttgacatcaagaagcactcaattcctatctacttctatgggctcgacagcttaagggaaagacaatctctctgtgcgctggtcacagacttcgtgaataatttcattttccacgtcatttatattgtggaaacactgcagctacacaatataggaccgg

SEQ ID NO: 11662 - DNA, 231 bp, Glycine max
  Clone ID: PAT_MRT3847_110539C.1
gatgaaactagcaacacaagccatgggtaactttattcccgtatcgaaattttcttaactcatttatgaagtaacattctaataaaacaatgcatcaaaagactaatctatcttaaaaatcatcaattctttcataattgccatcaggagctctcacaaacacatcatattaaaacaaaagatttatcaaaatcgttcactccacattataataaaaaacatatttcatac

SEQ ID NO: 11663 - DNA, 934 bp, Glycine max
  Clone ID: PAT_MRT3847_11053C.1
actctcactgcaattgcaaagcaacaacattccttttctccacttcgaagcaacgcaacattctctctttgcgaggttgaagtcgtcgtctttcgatatccggtggtgcatccctctcttcttcaattcgttttgtgtttgtgtctccatttgtttccttcttgaattactagaattcaccttcatatagttctaattttagtttattggttttttttttttgttaatttattaatttcatgcggaaaagcctacttcatttctcaatcgcggatccgtactcagactggttaatcaatgctagggtttagcttgtgaatctttgacttctctctggatgagtcggatagttattattattatgtgaaaaaagtgaacctgattcctttctgttacttctaaacatcagcaattttactctgaattgttcaaaagtaggctgctaatcaagtacatgtgctaagagtttgtattagctcatctatatcatataaggtgttgctccacccgacgtctgtttagtggtgcaatcattggttattttaatttccaagtgcatttatgaaaataattatggttgcagccctaactctttagatgacttggcaacgttgtgtgggaaataaaagttgagaactcaacacaacaattaccagaaccaaaattgagcggggcaggaaaggttcaggactgtaaccagttcttacttactataggggagcacaaggaatcattctagtgggattggatgactccaaattcaaacagagtctgttagtcaaggatctcaccatgcaaacgacattgtttagtcatcctctattctgtttctcttgcagaaacatcagtacaaatgggaagactaagtgctctgtaaaatttcgtacatcatacccctctcaactggatcgggaatgtgaattcaatgggatac

SEQ ID NO: 11664 - DNA, 323 bp, Glycine max
  unsure (1)..(323): unsure at all n locations
  Clone ID: PAT_MRT3847_110540C.1
gcggccgcgcgtggtttgtgtcttccgacgcgcttcgtactacttatcataacttgagcagctgcccgaagcaaacagattagactccagaggaaagtcccgctattggctacaagagacagccgacccacccgcctcattgggcccggcccaagcctatcaccggaccacgccgagattcgctactgatgcgtacagaaacgcccctggggccggtactccgtcgagaaccgcgatcccggcaagaaaacccgaggctggttcggcactttaagacaccgacgaggaagccgcgcgcgcctacnacaccgacgagcgtgtag

SEQ ID NO: 11665 - DNA, 281 bp, Glycine max
  Clone ID: PAT_MRT3847_110541C.1
cattgttccaaaatccccatcctttggtcgttgcagctattttttaaattggatgatgcaaaaacgcaaattgttgattaaaccaccttcttcttctcttcacacgaattccctctagcactcgtccaagcagaggaagagagagaggagaccaagacaagaaaagatagacacataggagaacaaagaaacagaacaaagtcccaagtagcagtgaagaggagggaagaaaaaggtggcaccataatcaatctcagatctcacaatcagaacctccccag

SEQ ID NO: 11666 - DNA, 752 bp, Glycine max
  unsure (1)..(752): unsure at all n locations
  Clone ID: PAT_MRT3847_110542C.1
aattattagggaaatagctaggatgctggcaaatgattacaagaagcgtgtgatgattgttgacacctccaatgaaattgggggtgatggcgatataccacatgctggaataggcaatgctcgacgtatgcaagtccctaactctgatatgcaacataaggtattgatagaagcagttgaaaaccacatgccacaagtgattgtaattgatgaaattggtacaaaacttgaagcaatggctgcgagcacaattgcacaacgtgggattcagcttgttgccactgctcatggaatcacaattgagaatctcattatgaatccttcattagagatgcttgttggaggaatacagagtgtgacactaggggatgaagaggccagtcgcaggggtgttcagaagacagtattggagaggaaaggcccatctacatttagttgtggagtagagatcatttcaaagacagagttgcgcattcaccgtagccttgaagcaaccgtggatgctattctttctggtcgttttccaaatgtagaaatacggaagatgaagtctcaagaacaggaagagattttacaagatggacttgttagtgacagttcacttcaaaagaatggtgaaatcatgtttganaaagctacaaaggggttctgatgaccaaaccaaccaaaatgaatcacttttaaaggtgcctattgacttgggggaagattcctggcagcttaaattgccacttaacctgttttgttatggg

SEQ ID NO: 11667 - DNA, 420 bp, Glycine max
  unsure (1)..(420): unsure at all n locations
  Clone ID: PAT_MRT3847_110543C.1
ngnggggggggggggggggnngnnnngnnnnnnnggggagagacggacacaggagagacccaannggaaaaagggggcaangggnacagacccnaggcacactttacancannacaagannaggaaaaggggggcggggaancaacccgaggccaaaaannggggggggggggggacccaagggaaagggccannaaanaggaaanaaaaacccannaggagacaaccaccacancagcggncaaaggacccccggagaaagggcaggaaaanaaaccgggacaaggaccaacagcagcccagggacactnccttggganaaaggaagccccaagcccnncaaacccgganngggagaaccacannngcgggaaggagccaagggaggccaananacnacccccaanccaaacactaaac

SEQ ID NO: 11668 - DNA, 160 bp, Glycine max
  Clone ID: PAT_MRT3847_110544C.1
caatgcagttctacgctatggcatttctcacccagttgtcaatgatggagacatgtatctttggcggaagttgggtataaactcatggccaacatttgctattgttggccccaatggtaaggttcttgcacaacttgcaggagaaggtcccaagaagggt

SEQ ID NO: 11669 - DNA, 712 bp, Glycine max
  unsure (1)..(712): unsure at all n locations
  Clone ID: PAT_MRT3847_110545C.1
attcctttctctccagaaaaataaaaaacccttgaattgatgccttgatcccaattccacacataatgagtaattaccagagagcaccccaagatccctattatcctcctccaggctatgcccctccttatcccccacaacagggttacccgccaccgggttacccgtcagcgccgccgcagcctccgccggggtactcgccgtacccgccgccgccgcagtacgaaggttaccaaggctatttcaatcaagggtatcctcctccacctcctcccaattaccactgccaccacgttcagcatgataaccccggttttacttccttcttccaaggctgcttgacagcaatttgctgctgttgtttgctagaggagtgttgctttttctgataatcatattaaaagttgtatctgcagtttggtgtacttggttggttatggctctctggataaatgttgctctaattgtcttactcatatgtgcgggacctggcaagtgttagtcattcttgtaactcttagtctttaccgttgncctcactcatttctgggttggtcatacattgtgatttcatctttgtatgagtgcataatggatattggaaattgtaaaaaacagccattttatgtggaataaccaactaatatactagtccttaaaaggcttggaaactgattgcttcctatgaaggattccctatgattttaacccc

SEQ ID NO: 11670 - DNA, 388 bp, Glycine max
  Clone ID: PAT_MRT3847_110546C.1
atatgatattgatttgctacaaagggactgataaaaaaaaaggaacaaaagaccgagcggatccacggatggggacatgaccacacgcacacttttgggcccattggaccaacaaaagggacaaaaggggagtgaaaacccacgcggagaacacaagcacaaatgaccgctcgaaaaacccagtacacaagactggaaattcccacagttaaagcggcgcctcccattacgagcaacctccgtatacttcacccctgctcagcccgcaaacgtgcaccaaccttgcgtttacaaatggaaaccgaacttcttggtgcgggcgctgtaggagtcggcgacaaacatctgcgcgccgacgcacactgaggcgcctccgacaacgtcggaa

SEQ ID NO: 11671 - DNA, 346 bp, Glycine max
  unsure (1)..(346): unsure at all n locations
  Clone ID: PAT_MRT3847_110547C.1
attcnaaaaatcatttgggggctttttttacaaataaacaaacccttttcattgcaggaaacaaaccaaaataccctctttttcctttaatttatgccataccccacctctaaaccaaactccatgctaaaacaaaaggactttcccaccccaaaactactacaccatcccagagtgngnancaagaccaaccccccttttgctccctccaccacactaattcttggcgactaacaaaaaaccaacccccgtttttacccctgactccaccaattcctttattgctaaataacaccaaaacccttatcctcatccaccactgcaccaaaccccaaatcttaaaaag

SEQ ID NO: 11672 - DNA, 552 bp, Glycine max
  Clone ID: PAT_MRT3847_110548C.1
gaagagacttgattgtaaatgggagaaaacttgaaggatccaattggtgcaattgaaatctgagaaaccaaaattgcacaatcatgataccgaagagactaaaaaatcaattaggcaaaaattttgtcagtgttatgtgtagccattgggagtgtaggggagctcaaaacaagaagctccgcccctgctccctagttttatgtaatagcaaattaacattagttgttatctatacagtggctgtacatggcacattattaaaatttgtaacctaacaagagctgcaattgatttagttccaaaggcataatagtttgatcatacacaagtgactagagtttcttataatctcagtaacatcacaaattattattctttatgatagctttcactgaaactgaaacttgtttggttactgtgggtgaagtggtataaacataaacccatagtagaaagcatatgtttgttgattgtaatggtaaatatcccacctaacccaaaaccaaatcagaatggagtgaaagtgtgacaggaagtaatgaagcaggattt

SEQ ID NO: 11673 - DNA, 473 bp, Glycine max
  Clone ID: PAT_MRT3847_110549C.1
cctgttcttgcactactattttgtttctcaaaaccctatggtgttactataactatagttgggaagctggtgtttgcgatatatacacgttacaactttcattcatgtgtgcgtcaagacttttacattatcaacgaaataaaaaccaatgcaaaagataatggctaatattgctattataaaacttaaaaattatatatatatatatatatatatatgattaaatgaaaaaagataagtctttaggatatataatagaattttgaacggtagaaagtgagaataatttacaggtaaaaagtccatgcttatatgatgactaactctaaaatagggtccattgtctgggcagacgaacaaaagttgcactgcttgagtgccagttagtgaaagacacattattaaatgtactgggatcgtactaaaagcaacataggctgctcttagagcatataggtgcatgtgaaggaaag

SEQ ID NO: 11674 - DNA, 447 bp, Glycine max
  Clone ID: PAT_MRT3847_11054C.1
tgcattggttttggtttatctactgtttctggtgttcttcttcatgctctgtcctgctctaattgatataaatatgcatgtgagtacaaaagtatttataattgtctgcataaatcaaataggcaagtgagggattgttatggaaggctctatagaaaaatatgactgtatcatatgtatccaaattataaaggatatgaatgatgaatcagcaattagtctgcaagttcatgaatgtgtcacagaagattttcttaggaataggcatgctgtttgcaccaagagtaaacttttgcatccattctatttagattaacataagccgtgcttattaggtacacccaagagctaattcttcaatgcatatttttgtaaatgatataatcctagttaaaaagggaaccgaaggggtaaatttaacctaaagctgcttaaaataaaaggttt

SEQ ID NO: 11675 - DNA, 195 bp, Glycine max
  unsure (1)..(195): unsure at all n locations
  Clone ID: PAT_MRT3847_110550C.1
atcgtttattcagcatatgtctcaaaggcccacgattcctcactcttcttccatggcctacggccttctctctcatctcctggtctccagtgagatgaaccctagctccaattggtcccattcgttacctctttcctgctctcatgatagccattctttctcgttcacacagcatcatggccgtcanaggttttg

SEQ ID NO: 11676 - DNA, 346 bp, Glycine max
  Clone ID: PAT_MRT3847_110551C.1
cgatagtgcaggttcggagtaaaccattgacactaccgggaaccatttgggaatggggaaaaaaaagtcaaaggcgagtgcagtgggacattgttatccctttacacatccacacctaatactggaatgaccacatgtgggccaagacaggggtgagcaatgagtgaggtgactcacaataagtgcgttgagctcactgcccgttacacagtcctgaaaccaggcgagccaaatgcactaatgaattgggcaacgcacggggagaggcggtaatgcaaatgaagcgacccttaataagatccctacagcaaaacccccgataacggagtgttgatccgcgaattcc

SEQ ID NO: 11677 - DNA, 394 bp, Glycine max
  Clone ID: PAT_MRT3847_110552C.1
ggcgctgagttaaaacccaaaactttaacatgttgtctgaacaatggtgaaaatattcacgagttccaactacaatggacattgaactaactgtcactaaaaaagagcttcctttgggctcgcacccccacataatacacacttcaaattacatggccaaaggttgccaccaccccggcggcgatagcactaccttaaattatgatcccgtcagctatgcccacacctattagacatgttgaactaccctaaacagcgccggcccggacgacaagaagcaaacttcctccatccaggctgcgttccaactagctaactatacattgcaccccctaggacgccaacgtgcattcagatacactacaaaccggatatggaactcgatccttgctgg

SEQ ID NO: 11678 - DNA, 232 bp, Glycine max
  Clone ID: PAT_MRT3847_110553C.1
ctgatactatcttagaatttgggctaaggacctaattcaatcccataaaactgacttgttaggtgagactattaagctttataagctctatataagccatatgtctagttgatataagactacacaccgctcttgaggttgtaattatggtagtcctcatagaagttgcaactatggcgggtgccttgcagcatcttacaataatttacagcttctgaaattatctttgagg

SEQ ID NO: 11679 - DNA, 397 bp, Glycine max
  Clone ID: PAT_MRT3847_110554C.1
aattcggctcgagctaaaggttgctcttgatcatggaaaatcatcatgtgttataaagacacacgatcgagtcgttgattgccagacagtcggggacgcatacgcagttaagattatcgcgcttgaacgattaagtgcattgatctaactacagcttacgctttctgttttttgctcttcaagttttaggccggagctgatcattctgctatcaatttttgagggtatcgtccaccgactttggagactatttatattctgtgattgcaaatgaatgttgggctaatgattattacatgatgttgaacttaaaaaccacacggaatatgctgtgatgcgaattgtttgttttaagtcttttacatggagaattggaaacaaacaaaaaaaacataaa

SEQ ID NO: 11680 - DNA, 859 bp, Glycine max
  Clone ID: PAT_MRT3847_110555C.1
aattcaggtggcccatgggatcgagcccagaaacaaaaattaatgtgaaagtgagagaggacacgcgtccgtacggctgcgaaaagacgacagaagggggaattgatcgtgttcgtggacgacataatggaaaccggaggcagaaaactgaaaagcagagaaacgatggcctttgaatcggtgacgcagtcagcacctcctccgagatcaagaggaagaatcaccttgctcgaaaaccccaaaacacccttcgcccttgctcttctctttgccgacgccgtcctcgtctctctcataatcgccttcgtcccctatacgaagatagattgggacgcttacatgtcacaggttaccgggtttctcggtggagaacgagattaccgcaacctcaagggtgacactggtcctctcgtctaccctgctggctttctctacatttactctgctttccagtatcttaccgaaggacaagtttaccctgctcagattttgttcggagtgttgtatatcgttaacttggcaatcgttctcgccgtctatgtcaaaactgatgtggttccgtggtgggcactttgcttgctttctctgtcgaaaagagtgcattctatcttcgtgcttcgtttatttaatgactgtgtggccatgacactttttcatgctgcattgctcttactcgtgcaccgtaggtggaatcttgggttgattttgtttagtggagctgtttcggtgaagatgaatgtgcttctttatgctcctcctttgctgcttctcatgctgaaggctatggacatcagtggcgtgttattggcattatctggtgcagcactggttcaggtgagtttctcttgggcttcaacat

SEQ ID NO: 11681 - DNA, 241 bp, Glycine max
  Clone ID: PAT_MRT3847_110556C.1
agtaaccgggatgggcgaagttgaagaaagaaaaatgagacgactcctactagtcaaggtcttagatcttgcctcacactactcggatacttgaccagtaaagccagctctagttaggcctatgaacagaagctggtgctctccgtgccttaataggattaaaatgctgcctccaaacctaaaaaggaagctcctacaaaaaggggagcataaaaaggcttcctcatgattctgttgcgtg

SEQ ID NO: 11682 - DNA, 2283 bp, Glycine max
  Clone ID: PAT_MRT3847_110557C.1
tataatacattgattgcagggcttatgcgatgcagtaggattgaagattcaaggcaattgttttatgatatgcaggaaaaggattctatttcctggacagcgatgattgcaggatttactcagaatggtttggaccgagaagcaattgatttattcagagagatgagattagaaaatctagagatggatcagtacacatttggaagcgtgttaactgcttgtggtggtgttatggctttgcaagaaggcaagcaagttcatgcttatataattaggacagattatcaggataatatatttgttggtagcgctcttgttgacatgtattgtaagtgtaagagtataaaatcagcagaaacagtttttaggaagatgaattgcaagaatgttgtatcttggactgcgatgttagtgggttatggacagaatggttacagtgaagaagctgttaaaatcttttgtgatatgcaaaacaatgggattgagcctgatgatttcacccttgggagtgtaattagctcatgtgcaaaccttgcaagcctagaagagggggctcagtttcattgtagagctctggtttctggcttaatttcttttattactgtttccaatgctctagttacattatatggtaagtgtggaagcattgaagactcccataggctttttagtgaaatgagctacgtggatgaagtctcatggactgcacttgtttctggatatgcacagtttggtaaagccaatgaaacattaaggttgtttgaaagcatgttagctcatggtttcaaacccgacaaggttacttttatcggggttctttcagcttgcagtagagccggactagtacagaaaggaaatcagatatttgaatcaatgattaaggaacataggattataccaattgaagatcattacacatgcatgattgatctcttcagtcgagctgggaggttagaagaggcaaggaaatttataaataagatgcctttcagccctgatgcaattggttgggcatccttattaagttcatgtaggttccatcgaaacatggaaattggcaagtgggcagctgagtctcttttaaaattagaaccacataacactgctagttacatcttactttcgagcatctatgctgctaaaggaaaatgggaagaagttgccaatttaagaaaagggatgagagataagggcctgagaaaggaaccaggatgtagctggatcaaatataagaaccaagtgcacattttctctgctgatgatcagtcaaacccattttcagatcagatatattctgaacttgaaaaattgaactataaaatggtacaagagggatatgtgcctgacatgaattctgttttgcatgatgttgacgattcagagaaaataaagatgcttaatcaccatagtgaaaagcttgcaattgcttttgggttgatatttattcctcctggtttgcccatacgagtagttaaaaatttaagggtttgtggggattgccacaatgcaactaagtatatatctaagatcacccagagggagattcttgtaagagatgctgcccgattccatttgtttaaagatggaaggtgttcgtgtggagacttttggtgacaggtcgagtttgaatattctctgaagtcttatagaaaactaagccaaaagtgactactaaatagagggttcttcagtaagaagagacatacaagaatagatccctttcttcaaaaagtcagtttaattaccacatgtgcaatgcagttgtattggctatcctgtaattttatatggacttgaagtcttgaaccactcctcctgattaccattatctgtggtcttaatttgaggggggaaaagaatcataagcaccaatgaattttttaccatgtattgaagaattttgacataggctcatcttccatcacatctgttaaaaattttcactatcccctgtaaataatttctgttgtaggatttgtggaacaattttatcatttaaaacagctattcgttttcttttttcagtacaccggaggtaactttacttttttattttttttggatacaaatttggtgtgacaccatctaccctaatatgtatataaatgggaaaaacatatataaaatacagaatctaatgaaataaattttattcaataaaatcttaagtaaatctacgtaggtaaaatgttcacattcgcctcattggttcacattcgcctcattgttatcaaaaaaacttttcagaaacatttttgatttaaaacaaggtcgttcaagttt

SEQ ID NO: 11683 - DNA, 206 bp, Glycine max
  unsure (1)..(206): unsure at all n locations
  Clone ID: PAT_MRT3847_110558C.1
tgtgcggcgctcgaggcggcccggttcattntgcttatcgcttttctaagattactataagtgccaatttgagattttaatcagtagtagactttttttgtttgatttgattcgtaattgaaagaatggtcttgggttgatccttttgtgtattgaagtggcaagatgtattgattatataggaacgcagtattgtttagtattac

SEQ ID NO: 11684 - DNA, 327 bp, Glycine max
  Clone ID: PAT_MRT3847_110559C.1
gcgctatcagagaaaaagagagaggtagtagaaaatccaatagactctattttgctatcagtggcgggggatgcaccaacccacaatggtgcacctttactccgttatgttcctttattaccccgatgatcgatggtgccgacgcagcggcggagccccaaacggggcgttttgacaccgagcggccgagcagaaacacctttaccaaaggagacttatacacaacggtcacttttgcctaccaagcgtagggtatggcccacaaagacggtcgtgggccaagcatttaggacgtattgatcaaacaacccgtgattgacgcatata

SEQ ID NO: 11685 - DNA, 501 bp, Glycine max
  Clone ID: PAT_MRT3847_11055C.1
gtgactgcaaagggacttaggaaaagagaacgtatttggataactaattacataacgcgcctatataacgatggttccgtaccttaggtatttcttagctagcgttgtatctagtgcaaaataagaagtgaagactgggcgctgttctaccacaatagaggagggaccagttgaccaaaggacaggatgctcaaagaagagataggctttttaaaaatggccaagggcaaacgagggcaggacataaagcaccagaaaagggccagagtggaaaagattcagagaaccggttaatattatgaggatcatgaatggagaaaccctaatgtgagtgagtttttttcgcaggatgtattgagcatcgaaagaatatccgtcgctaactagtacacaagtgcacagctagttgatgcagaaagagccttcggttgagtcgtacatgataagtacatcaagatccagtgatccactagcctgaacaaacttgtagtattctgatgt

SEQ ID NO: 11686 - DNA, 765 bp, Glycine max
  Clone ID: PAT_MRT3847_110560C.1
ccacgcgtccgctgtggtgatggtgatgttgtggaggtggctggtagcttcaatggttggcatcaccgaatagaaatggatcttcaacagtcaacaagtgctatagaccttgatggatcaaggagttccagatgttggtcaacaatgctgtggctttatcctggtgtatatgagataaaatttgtcgttgatggcaaatggataacagatcctcaacgggagtcagtaacaaggggtcacatatgtaacaacattctaagagtagatagatgatgcattctggttcaggtcactattgctagatgtatataaaatgcaatatggaaaggaggggagacgcaagcaagcatgcaagaatgagcagaatctaaatgagattcttttgctaccgtcctgtttgtacatttgggtctttttttttggtccaagtacatttgggtctgaaattagagaccatgacattatctaggactgtgcaagagttaattagaaattaggaatttagggtgggacagtgcagggggatttgggtagtccgtaagaggttgtagcttcagaccatgctatcattgtatcaatcgggagaaatgtagcctccttcgtttttgtattcctcatttcttgtttctgttattcttttggtggttagaaccaggataaaagttcgttttgccgagctttgtaaattcaacgagtgatatttgatgactgcgttttcatgtttggcacgaaagaagcgagaaattcaagcgaagttattatcag

SEQ ID NO: 11687 - DNA, 635 bp, Glycine max
  Clone ID: PAT_MRT3847_110561C.1
ggtagcttcaatggttggcatcaccgaatagaaatggatcttcaacagtcaacaagtgctatagaccttgatggatcaaggagttccagatgttggtcaacaatgctgtggctttatcctggtgtatatgagataaaatttgtcgttgatggcaaatggataacagatcctcaacgggagtcagtaacaaggggtcacatatgtaacaacattctaagagtagatagatgatgcattctggttcaggtcactattgctagatgtatataaaatgggtacataaaaattgaagaaaatggtttactgcagatttctaataaaatcaccacgtttgacagcaatatggaaaggaggggagacgcaagcaagcatgcaagaatgagcagaatctaaatgagattcttttgctaccgtcctgtttgtacatttgggtcttttttttttggtccaagtacatttgggtctgaaattagagaccatgacattatctaggactgtgcaagagttaattagaaattaggaatttagggtgggacagtgcagggggatttgggtagtccgtaaaaggttgtagcttcagaccatgctatcattgtatcaatcgggagaaatgtagcctccttcgtttttgtatt

SEQ ID NO: 11688 - DNA, 1127 bp, Glycine max
  Clone ID: PAT_MRT3847_110562C.1
agctaacatttccagtgttcccatgtctcctgcccactgaagtcgaacccctaatggcttctcaagttcttcttcaagtttaactcttatctcttcatttaatctgaaaaaccctaacattcttttatttatttatttatttattcccctactgattcggaaattgcattgcagcaggcactgtttgcccccaagctaagtttcccttcttcttctcgtaacgtcgcgttaatttctagggttccttccaccccaatttcatggcgttgcactcctctcattgctaagcctagtttcgctgtgagagctgactccaacgtcgaaggcgctggtgaagccaccgaggatgttccttcgtataatgttgatgaagtttcggaaggcgaaggagaacaagtttcggattctgaagctccaaaatctcccagaaaaccccgagtcaagctcggagacatcatggggatactgaatcagagggcaattgaggcatccgagaagcaaagaccaactccagacattaggactggggatattgtcgaaatcaaattggaggttcctgagaacaagcgtaggttgtccatttacaaagggattgtcatctcaaagcaaaatgctggtattcacacaactattcgaatccgaagaatcattgctggcacaggggttgagatagtcttcccagtttactcaccaaacatcaaagaaatcaaagtggtaagtcaccgtaaggtcaggagggcaagattgtactatctgagagacaagcttccgagattctccactttcaagtgatactcggatacccacttttcctcacgttattcgtcgaactagtctgctgatccaggataagtgctgcggagctttaatttttttaatttcaatttgttctgttgtagaatacatcatttttcttcccctttgtgtgtcttcccttaaatcgaaacaagtgtactgaaccttgatagtattgagaaatttgaagtgtttcttctgcatcactatagtttataaggtagaaatctaagctatgaagaaaatattactttagtttattaaaatggagattataacagcaaaggtttaaaatctaccgtcataatgtaataatcatgttctggattggg

SEQ ID NO: 11689 - DNA, 209 bp, Glycine max
  Clone ID: PAT_MRT3847_110563C.1
gcatgaattgggattcaccatccggaggggtgttggaactggagattgtgttagtggtgaactatgacgatcttggtcaatgatagtggatgtgggggacatgcttcttggtgataggtggcatgatgtctttggtggttaaggctaagacagaggattctgcgaaatgtgaaggtgttgacggaggacagctcaagtcaaggacacat

SEQ ID NO: 11690 - DNA, 113 bp, Glycine max
  Clone ID: PAT_MRT3847_110564C.1
tacagctgcgagaagactcagagggggagaaccacaaaataccaactttgcgggtgctcttgtgcaaatagcgcggtgcatctggctcccaatcattcatatttttcgccaaa

SEQ ID NO: 11691 - DNA, 524 bp, Glycine max
  unsure (1)..(524): unsure at all n locations
  Clone ID: PAT_MRT3847_110565C.1
gttagctttatcataccttgttgcaacatggaaaaacacacatgcaaaggtagcttggactgccataaataattattttgcaagaaatctgagtttgngaaaaaaaaaaaaaaaaaaaaaaaaaaaaaaaaaaaaaaaaaaaaaaaaaaaaaaaaaaaaaaaaaaaaaaaaaaaaaaaaaaaaaaaaaaaaaaaaaaaaaaaaaaaaaaaaaaaaaaaaaaaaaaaaaaaaaaaaaggggggcccttttaaaagatccaaattttattccccgggcttggaaagatataattttttttttggggacccaaaattaaatttattggccggggttttaaaaagggggggaggggaaaacccggggggtacccaaattaattggcttggaaaaaaatcccttttttcaaattgggtaaaaaaaaaaaaggccccccccaattccctttccaaaaatttggccaaccttaatgggaaatgggaccccccctttaagcgcctttaaaaccgggggggggggggggtttc

SEQ ID NO: 11692 - DNA, 735 bp, Glycine max
  Clone ID: PAT_MRT3847_110566C.1
caaaataactcaggttcgaaggaggagctgcaggctctaatggagcagaggaagaggaagagaatgatatcgacccgcgaatcggctaggcgatctcgaatgaggaagcagaagcacttggatgatctagcatcgcaggtgactcagctcaggaacgagaaccaccagattctcacatcggtgaacctcactacccagaagtacttggcggttgaggctgagaactctgttttgagagcacaagtgaacgaactcagccactggttggagtctctgaacgagatcatccacttcttgaatgccactgatggtggtccaccaccaccaccaagctccttctttgagcccgatgctaccttcttcaacaaggcttatctgagccagccgattatggcttcagcagacatgttgcagtactgagtgtgatggttgttggtttcttttaggttttagtctgttagggaaaattgtaatcgctggcagatagtgagtacgataaggaataatgatgaatgtgtaacatatcataaagcgggtaagcttgttggggcccctgtagtcttcagagatcagatcaccctattattgttgcaactgcacttccccatactagacttattatttatgtcatatcaccaaatcatataacattaagtttaatttagtgtcaaagtaaaagaatttatcaaagtggacttggaaactttaatcaaaattttaggtttatttttgttt

SEQ ID NO: 11693 - DNA, 961 bp, Glycine max
  Clone ID: PAT_MRT3847_110567C.1
caaaaacaaaaattattaataggtaagagaatataacaaaaatttacaaaattgaaacaataaattacttctacgatagacccccaatgccttgttcaagtagatatacatacaagctcaacaaaaagtaaagatgaagagtggatttctggagtaggactctagcattggcatttccgtgatggtctcttcctcttgtttgtagtgcttctcatattacaagcagttataagtttatagtcagaagaatgcatttcgttcaacttcccaaaccttgtttcgtagaagtcccatacctcagaccagaatgctaggaactgatagggctcatactttccataaatctcttcaagctctctctcaattgttttagaggttgtatatctggaatgaacctgttttaagtgtctaacagtttcagaatccgttggaatgacatggtaatatcccaagcacataagaacattggcacgagtaaatgggccatatcccctaatttgcttcagctgatcatcaagctgtttatagttggataagcttgcatctttcgagagctcttcaagctgtcctaattgaattttgccttcaacaatggctcgcgctagctctattatataacctgctctatacccaagtccgcatcgctttgccagaaaactctcatcaaggtttgctagctcacttggggatggaaaatttccagtacgactaaaatactcatttccattagagaattcatgacatgaatcatgtgatcgtagctcttccgaatcaccattatctgttgtaagcaaggttgtcgcggttgaacttgaagcaaccacgtggtcaatttgcaaatttccatccaattctaatttcttcttacaaaacataccctttgttgaaaccttgtttctcctggtctctttagaagctggtgttttggggatgaatccctcactctcaccttttgaattcc

SEQ ID NO: 11694 - DNA, 568 bp, Glycine max
  Clone ID: PAT_MRT3847_110568C.1
tgtgtaggagtgctacctgcttgggggggggggggggggggggggaagttattgagttaataaccaggatggagggagaacggccacgaaattttcatgaccgaaaacccacaaacgaaattcgagcgagagtatgccggagagaaatatcagaatatgaatatacagctaaattatgacatatggcgatggaactagctggtataaacgtaggagtagagtttaggagttaatgagacatcactctggtagattgattaagtggtttaatgacgtgcaactgggcaccgacgaaaaaaacccctgactagtagcgagtattactactgacaacatccgaataaaggtggatacctctagcctctagcctctattaggagcatagggttatgacacaacgcaataaattagacggagattattaaggttacaacagatagataactgttaacagcatgccaggggagggagtatttgtgcgttattagaaacagctggcgggagtggtaagtaattacatggcacactgtactaaaggtgggcgacgactaattggtagtaagaggtg

SEQ ID NO: 11695 - DNA, 250 bp, Glycine max
  Clone ID: PAT_MRT3847_110569C.1
gtctgagaaaaggaaagtggagtaccagtaggaccttccgcctgtttcttgttataagctctctctctctctctctctctctctctctctctctctctcatacacacacactgtcctcgagatcttcatctacaacgagattcgcaacgctgacacttacactgaccacgatcaccgtcagaccgacactgtcatggacgtggattacgccctcaacatgcagaggaagagcctctacctctacggcggc

SEQ ID NO: 11696 - DNA, 396 bp, Glycine max
  Clone ID: PAT_MRT3847_11056C.1
cctgccatgccacaacgccagggcgcccatggtggaactcccccctttttcgttttgtttttaaaatctcttttaagggttaacttcatacttaaaacatatcaggcccccatttcattacttgtatttgctccttctctcgtgaaagcgtgaaacctagggtttcacatgtcttctctcttgtgaacctcttgagctttggcaagcttttccaatgaacaaatctggcaacctataacttcttccttccacttctttctttttccctgtttattcttcacctgttcatttcttcagatgttcctcatctctttttctctcttcttttttttcttagtgtggctgttcttgttcttcatctcttctatatttttgtgctctgttttttcaaagttt

SEQ ID NO: 11697 - DNA, 241 bp, Glycine max
  Clone ID: PAT_MRT3847_110570C.1
ctcaagttcaatgtgatgaggcttctctgaccaagaagaggtagtggtgtgagccacagtgattcagacattgaaagctcaactcctacctaaaccccctccatgatgatgatgccaataggcctcccaaggagtagttccatgcttcttgatgttgatgcattatgctgagcttgtgatgaggaatgttgagtatgacttgttgggcatgacgttagtgtcatggagaagaggtactgtg

SEQ ID NO: 11698 - DNA, 550 bp, Glycine max
  Clone ID: PAT_MRT3847_110571C.1
aaaaacgagaaaagtgcagccgtcgcaaaaaagatgaaccaaagacattaatgtgctattctcaagacgagacatacgaaagtcgactgatcttgatccataacccaaccagagaaggttctttcacactaaacaaatgattgaacagggccgcagctcaattcattctgctgattcgctcattgatggaatactgccggtctccaggatcacctgcctagacatagaggattgtcctcttctttaacccacccaaaggagccttgagcttaaatggccaaaggtaagatgatagcctacttaaagtgaggccctacagagatgatctcatggatcacatctctgggggaaacgatctcatattggcccaccgcctgctcaaagaaggagtggtaacttagagcagccctctgataggtcagctatccataccctgttttgacaaaaagccctctcacattcttaagacaagggcatccataagcaacattagggggaactctgtgcacaatgcccactgcggctttgagaactcggagaaatcaccgtg

SEQ ID NO: 11699 - DNA, 806 bp, Glycine max
  unsure (1)..(806): unsure at all n locations
  Clone ID: PAT_MRT3847_110572C.1
cttgcatgacctgcagataagggtttcagtgggatcgcatttgatatataacgggtaaacaagaagcagcccaggcatctcaagcatatatatacaccaaagtgattgtcatgttaaccttgcattgccaaaagtttgtaagaattatacaaaggtctgcatgtcatgtcataagtattaatgattattatttggagcgtattgaatagtaaaattaagatattgcaatgaagtagaaaatcttggatttgagcgaaatttcaggtataagatagcaggatataaatatcctatccaacaaagtattaaagttgagaaccatgctattcctgaatcctggtatacaaaattaggaatgttctgatgtaaaccattgtcaacggaacctaacccatatacatgcaaaattattgaagagaataataaacaagtagagtacaagagattacatccaaaaacaaaaaataagaagataacagaaccaaggtggctaaaaattacacatccttgtcacagtaggtcaatatgcttttgtttaatgtacaacaaacggatcacagggaaaatggttgatcaagcattacattgaaggaaatagtataactagtatacagatgaaaatgacaaatagttaatttgtcttaaaggcaattaaaaaaaacgatttacctctcgaaaagttttatgttttctgcacagatttcatcaggagatacagacacctggagtttctagcatcgtaccctgtgagaaaaaatacacgctcaagaaccccanattgttgcatacttaagaaaataaaatag

SEQ ID NO: 11700 - DNA, 218 bp, Glycine max
  Clone ID: PAT_MRT3847_110573C.1
gaagtatatgcatatgcagctattgcgtctggtagctgtacccctgtgggcggtaattgcggcaccatgtgatccaggcgcgaacatcgctttgccagcacccatccatgtcagtttctcaacagaggaagatggcaagggggaagaacgacatcaagccgactgaatacactatcactggcactaatgcaatttgcaagcgcaagctcgtcttgatc

SEQ ID NO: 11701 - DNA, 219 bp, Glycine max
  Clone ID: PAT_MRT3847_110574C.1
ggtcatagtattatcattcattctcatctttctctcttctctctccacccataccctaagtcccgaccctgttcccctctcgtatccgtcatgaatggaggaaagtccaagactgaatctaagagagccgatcccaaacttgctgtgaataagatgggagccgccatcaaggctaggaaacgcgccggcaaagggaatgcagcgaaagaccctaacaag

SEQ ID NO: 11702 - DNA, 147 bp, Glycine max
  Clone ID: PAT_MRT3847_110575C.1
tgtggcatgcagtggaaataactgcattggtatcactaaagataatgataaataataagacactgaacgatgaaatgcacaggctacatcatgtgagcagtttaagagccaacaagatttttcacatcatcattgctactgggaaca

SEQ ID NO: 11703 - DNA, 946 bp, Glycine max
  Clone ID: PAT_MRT3847_110576C.1
ccacgcgtccgaagagaggacccgtaattaggaaaatacaattgtcaattgtttcatcatccattattttttccgatttgcttatgctgttattgtttttgttgttattattttctgttgagatcttctcacttcaaagttgaaacctttctgtgcacaacaattagaatatctcagcctctcgtctcaagcatactctgttatctaaatttgcattcttttacccgacaaaacaaaccccaaaaatacaagaaaacataatctctcagaaaaccaccttaaaccggaataaaccactctttccccaaaattttcgcccgaaaaccgctattgtgccttgttcctccgtacccacatcaccgaaaccggttttccgataccaagaagcctcttttcacggccaccagtcatttttattccgtctttgacggtcttttggtcgccggagagtgtggtggctttttaaaacgaggacggcgtttgctaacgtgagccgggtgcataggatatcattaaaaaaaggttgttgtagttttttatcagaggcgtgcacgtgtacggtgatgagaacggaggtgatggggaggtggggcacctgggaagagctcctccttggtggcgccgttctccgctacggagcccggaattggaaagtcgtcgccgccgagctacgggcacgaacagtttgtccctacatcattacacctgaggtctgtaaagccaaatatgaagacttgcaaaagcggtactctgggaacaaggcttggtttgaggaacttaggaagactagagtagcagagctgaaaagagctctggaggtgtctgaagattctattgggttagttccatttatttatttttctcttcaagatcagatttttgtgagaagacaacaaagtattcattcttaaacacaagtttcaatttctgtgagtttttttctttg

SEQ ID NO: 11704 - DNA, 433 bp, Glycine max
  Clone ID: PAT_MRT3847_110577C.1
acgcgtacgcgtacattcacacgtacagtaacaatgcacatcctacaattaatgctccttcatcctatgagccatggactccagtctaaagcgtataaatggctctccgcttcttgcggtaggctgctgctatgtacatgttcgcatgactgctgatcagatcggcacatagcacaatactcaggggacatcttcgttcagcagatagatttgtacggatcatgtgctgccaggagccgaccatcatctcgtccacgcctctgccaaagagctagcagaacttgatgtagacgctgtaactgcgtgccacctgacactgctgctaaccaagaattgtgaccctgctatacaagtttgactactcatagaggcaaacgcaagttcccttagacttaattggaccactaatccatgcatgcctatgacttatatt

SEQ ID NO: 11705 - DNA, 646 bp, Glycine max
  Clone ID: PAT_MRT3847_110578C.1
ggctcgagatgggttcagagaagcaatccaaggcggaagaagaagaaggtgaaatcccggtgctaacggtgctgaagaacaacaccatcctcaaaaacatcttcatcgtgaacaagcccccggaggaacaggcacgtgccgatcacgtgaacgtgcttctcgtgggtcgtcaccccgactgcgacctcatgcttactcaccccagcatcagccgcttccacctccagatccgctccaatccctcttccagaaccttctccctcctcgacctatcttccgtgcacggaacgtgggtgtccgggaggaggatcgaaccgatggtgagcgtggagatgaaggaaggtgaaacgctgagggtcggggtttcgagtagggtttatcggctgcactggattccggttagtcgcgcgtatgatttggagaacccgttcgtggcgcaattggattctgttgcggaagaggaggaagaagaaaaagaagaggaggaagaaatgcagaacttgagctgctgtcctgctgaaatggaagaaattgattcaatggattcaattgttgagggatatgagtgctttattccttgatgagaatgtggaactaactgtgaaaggagaaatagctttgggacctttggatgtttgtaggacat

SEQ ID NO: 11706 - DNA, 438 bp, Glycine max
  Clone ID: PAT_MRT3847_110579C.1
gcacgcgtacgtcgcctccgaattctgctcgtggttctgacggtagagatacacaagaaagagctgaagacgcgactagtgtgaagagaggaatcttgcccgccacactagatcgttcaatcgcgcacccgggaatcagaatttcacttcctcacatttccccctaaattcatatcccataagccctacattatatacattacagatacttgcacctcaatgaaactgtgcttgcactttccatggaacacttacaagtagccctgattctccctaggtctcgacgaaacgcccccccattcccccatgcatccatctacttctaccgccgacctacacgtctctgactccgatcccgaatcccgaccctacccgacgtgccccctcctgagacgcttccgccgcgacctaccgacgccgtgcctagacgccgacgac

SEQ ID NO: 11707 - DNA, 324 bp, Glycine max
  unsure (1)..(324): unsure at all n locations
  Clone ID: PAT_MRT3847_11057C.1
cgnagaagtccgaaatatttgcaaacagcgcagcgtatcaatactgaaccttacccttgctttccctaacatgcatgttacaactcccgaattgttcacagacccatatattcacaacgcctagttctaactaccccgggcatgttcccctcaccaaagctgcaatgggagtgtgtgatgcgggttcatcttcaaaccatgcgctgtatgacactgtctacgtacaactatggccttaagttctctaacccaatagacggccctaattttgccatgcctcgcagtggtaactgcatccctaccaaatgtcgatgtagcaggcac

SEQ ID NO: 11708 - DNA, 549 bp, Glycine max
  Clone ID: PAT_MRT3847_110580C.1
cggacgcgtgggaaaagaaaatagtgttcctgcaaaaaaaaaaaaaaaaaaaaaaaaaaaaaaaaaaaaaaaaaaaaaaaaaaaaaaaaaaaaaaaaaaaaaaaaaaaaaaaaaaaaaaaaaaaaaaaaaaaaaaaaaaaaaaaaaaaaaaaaaagggcgcccattttggggggcccattttaaggtcccagtttttgcaacccaaaatcttttttaaagggtctctaaaatgaaacccaaaggccaattttttacaccgctttaaaaaaaaaaaccctgggaaaacccattttattcccctttaaaaaaaccccctttaaaacaccttttttaaaagcaaaaaaaacccaaaaaagcccctttccaaaaatttttccaaaaaaatggccaaatggaacgccccttgaaaccccccttaaaaccccccataaaggggggtaacccccaggttaaccccaaaatttcccattcccttagccccccccttatcccctttttttttttcttttttccctacttttgccgcctttccccgcaaattttaaaaa

SEQ ID NO: 11709 - DNA, 471 bp, Glycine max
  Clone ID: PAT_MRT3847_110581C.1
ggtcacaatgcctcttagcagtagaacagttttgtattcacgagtgctcttggagtagaagactaaggcattgttagtgagtaggagcaagtccctgaaaagttctacactcgacttaattgtctggctgctaattcttgaccttatagtgtcaaagtccatatgttgccggatcattttcttgtaccttcctctcttctgactatcaagtctgcgtcggaaagccggagcacctttagtttcaaatataaaatccaaaatctccatcatgtcttccaccctatccttttttaagttcctattttgatcatctacaccacatgatttggcaacttcaccacagttgctggtcgaactttctttacaccatgacacaatgtcagccgaatctaacaagtcactttccccaacacttgcttccttcatatttctgccacaatccttcctcttcctcttccctctccgtttttt

SEQ ID NO: 11710 - DNA, 512 bp, Glycine max
  Clone ID: PAT_MRT3847_110582C.1
gttgccgtcccaccttatattaaggcgaggaaaaccagagcgggaccagggaaagaacaaagttctgagagagggggagatgtaaacccgggccaaaacaacacacaaaccgaaccccaagaaaaaaaaggaaggccggccgaaccaaaaaaaaaaccaaaaccaaaagaataggggggacagcccggggggcaaaaaaaaagacaaacctgccaggccagggaaagaatcgacccccccaacgccaggggagaagcgggtagcgaactcgacgaaaggaaggcttcacccccgcggaaagagaagggcaacagtggcctcccccggagggcctggttataaaaaagggaaaggggccagtctagtttggcccaacccacaaggccaaaaaagggtgggagggagcggcccccccggaaaaaacccgacctgggaaaagcctgatggggggccccaaacgggggaaccaacccaaagcccggaccggaattgggaaagcaccgcaccgagcc

SEQ ID NO: 11711 - DNA, 541 bp, Glycine max
  Clone ID: PAT_MRT3847_110583C.1
gtaattggttttttttattaatatggattcgcaaacaataaacaatgaaattgaccgtgttaaaaaaccaatggcagatgtaacttctacaacatgtagattgaagtattccgaaaccataccaggttcgaatactggtaccctttgcccaggcgtttatgttttaaggttcccacccattacaatagcggctataagggggaacatttgcgcggaaagacgtctcaccattcaactcttgaatgaaaaacaatgatcgacactcatgaggaaagatgattgtagctctctctaaaaaatttcttaaggggatgatccccgttcgaccgatacatgcttggggtgagaaagtatcagctcgctgaactgatttgttagaggcgccgccaatacgaaaacagcttacggctagatgggctagagtttgtggatccctggcatccttgttaagagctgcccccaaaagggtctgagcttcggggaatttgcccatatgcatgcagaaaacatgcttcccattcaagaacaagctgggggactg

SEQ ID NO: 11712 - DNA, 270 bp, Glycine max
  Clone ID: PAT_MRT3847_110584C.1
tcgacacagctgactagtacttcggcctctcgtctcgatgctcggatgtgcctaacaggtatatacctaagctgacacctgtaagcctgtccagagggcaggacacccacattgtgctctacccttatgcacgtgtgtcctacttgagattattaccagattgtggaacgtatttttaattgaccatgttattattatgtgaataggagcacagaactgtgaccctttactctatggagaacatgggcagaaagaaggacagtgactcct

SEQ ID NO: 11713 - DNA, 401 bp, Glycine max
  Clone ID: PAT_MRT3847_110585C.1
cccacgcgtccgaaacagtttctagtttctgggctatagtactagggtttcttcttcgcgtggcttcctccgctaacacatacagtagtacttttctgcaacttaatctattctcaccagatcaatccaaacagttttgttcatgagaattagctctctctaacctaacttgtttcttctatattttaggatgcgtttgcttctatattgttgatcatgaaccgtcacgaccaatttcagaaacgtatgcttttcttaattcaccttaaacggataacatttttgttcgtcttcatcgcattgctggaattttgcaacattctcttcaacttgtattccaattccgattctctactgtcaggaaatcatgcattcacggctttttttttttttttttttta

SEQ ID NO: 11714 - DNA, 146 bp, Glycine max
  Clone ID: PAT_MRT3847_110586C.1
taaaaatcatcaaactactccaatgaacatttctaaaaccggtgcattcttcaatttcatcatcatatctccattatcctctacaaacaattcactaaacttaaactactattcaaaaacattccctcatctttaattcatatctt

SEQ ID NO: 11715 - DNA, 328 bp, Glycine max
  Clone ID: PAT_MRT3847_110587C.1
ccacattactctattactcctacataaaactatacacatttaaactttctatatacaactaacttttttctacggaaaaaaaaaaaaaagggggcgcgcaaaaaaaaataaaaaaaaaaacaaacaaaataaaaattgcctcccccctactaattaccatctcaaccccttaattaattcccccccatttccttcacccttcccaacattccctaaaagtaatccaataaaaccttctcataaaactatccatacctcttacctattaaaaatacttaccccttcacaattccacacatcttcccaccctcaaccataaattttaaac

SEQ ID NO: 11716 - DNA, 1402 bp, Glycine max
  Clone ID: PAT_MRT3847_110588C.1
gaactttgtgaaaagcaagctacccttaaaaaatctcaacgaatttccattactgtctatacataaagtttcgctaattgctaaaaccaaggacttaagatgagtgtctgaaaaatgggatgttcttgtattcatgattcatcatctactatatgacacagacaatggtggtagaggtagtggtagtggtagtagtatttacatttgaatctgtggatttggtgtcttcacttgttgatttcggcttcgatgaaggctcctgaggctcttgcaaattcaatgacgtgtaaactgacatcccagagagagcaacaacagcaccaccaatactcacaaccccaggatctgactcaaataatagataccctcccaacagaatcacacatgttttaaactgtcctaaaacaacatgggttgtagcagaagtggcccccaatgccaatgcccctgaccactgcaagagaaaaccaaggagagcagatacaaaaactgcagttgagttgttcacatcccacttgaaggataggactcctggtggatctatccacggcatcaatgccccgaggaagaaaactgtgatcggggttgtcttccacatcaatgccagagctgtccagttgccttgctgttgtaaagtagaccataaaatcttatttatggcacttgggattatccatgcaattgcaattagagcaccaaataagttgaactctaaatctgttacagttgcaacagctacacctgctgacacgacagccaaagccaaaacctttttaaaatcaatggtgtttccaaaaagaatgaactccgcaagaacaatcgttggggtaacagcaatcttagccatttggtagaaaccaacactgttatacttgaggctggtgtttgcaaggccagaggcaaaggccataacaacaccaagtgcaaataaagaagagaatggagttgttttagatggaggggacacaggaagcactgagagtgtcttgaaaatggcaaggagaagccatgcagtgatgtagtgtacaaatgtgaggaaaattggaaagttgaagccaactttacccatcaccaatttgtttgccatgataatcccaacagaaaccataaaattgaaggacagtgccaccactggtccacaatatctttgctgttggcgcttggctccttctgatgttcggatctcattgtagagagaagctctgagttcttccagtgctttacctgcatcgccagcatcactgtctttccttttaataaactttcgtcctcttccccacactgaatccaaccaccccataacaatctggcctattcatggacttggatcacatatttattcaaaatgctagacactctttctaaaacactattctataccaattagattaaaagaagccgc

SEQ ID NO: 11717 - DNA, 197 bp, Glycine max
  unsure (1)..(197): unsure at all n locations
  Clone ID: PAT_MRT3847_110589C.1
gngcccgaggncgngccgancgccnccangnggnnangcncnnanncanntngnntgngacntggcgnnctgncnngnctngcgcagncgggagtgcagtnaacgncgacncacaagtgcggaggccagaccgatgcaaggtnctgatcgnngacagganaccctgacagnctntgtgtntgntggctgnncccngt

SEQ ID NO: 11718 - DNA, 1280 bp, Glycine max
  Clone ID: PAT_MRT3847_11058C.1
cttaaatgtcaaagttctttcaaaaactgaactaatgactattgaatctttgaatttgaaggacttaaacatggattcactttatcatcttaatctgatatcatatcattcgagctctgaatgcttctctctccataataacaaaaccaacaccctctttctctttctctcttcttcatttccaatgctgcagcaatctgcaagcttcataggcactacgacagacccaattgaattcccgagaaagaattgaagagaaaaaaccgtaaagttaggatcttttgtgtgatttcgatgggtgcgtacagagcggacgatgattacgactacttgttcaaggtggtgttgatcggagactcgggcgttgggaaatcgaacctcttgtctcgtttcacgaagaacgaattcagcttggaatccaaatccaccattggcgtcgaattcgccacccgcagcatccacgtcgatgacaagatcgtcaaggctcaaatttgggacacggctggccaagaaagatatcgcgcaatcacaagtgcatattacagaggagctgttggtgcactgcttgtgtatgatgttaccagacatgtgacttttgaaaacgtggagagatggttaaaggagcttcgtgatcacacagatgccaacattgtaatcatgcttgtggggaacaaggcggatcttcgtcacttgcgtgctgtctccacagacgatgccaaggcatttgccgagagagaaaatacgtttttcatggaaacatctgctcttgagtccttgaatgtcgataatgccttcaccgaagtgctcactcagatataccgcgttgttagtaggaagactcttgagattggggatgaccctgcagccttgcccaaggggcagaccatcaatgttggcagtagggatgatgtctcagctgttaaaaagtctggatgctgctctgcttagtttcacatgcccttttgcagcagaatagaataatatctatatgtgcatgattcaaccaattctcaacattttggagtccaagtgaaatcttttaatacctacacttctctttttatgtagtttttcccacatatcttggcaagtttattgttttctctttttctttttcttttcttttcatgtaagtgtttggtcataggaatgatgtcttgttgttcttaaatatacaaaatatactgtttgtattgagtgaaagtgatatttggttcttagattgatcagaagttacaatctcatcatcttcctcaaaaaaaaaaaaaaaaaaaaaaaaa

SEQ ID NO: 11719 - DNA, 413 bp, Glycine max
  Clone ID: PAT_MRT3847_110590C.1
tttccttttcgtacgggaagacactgttcactgggcgacaaacataacatgtgtgacatgtatgggaaaggatggatcatagagatgtacggatactcttttggtgctgcagaagttggactacggcacagaatcaaggttaacttaatgatctacccaggttatgttccttgcgagggaattgagccaattctttttcactatggggtgccatttagtgtcgggaattggacattcaataaactggctcaccatgatgacaggattgtatatgaatgcaaccaggtttctacagaaccttcttacccaaaagaggttagactgctggaacttgatcctagatcgaaggcgaggactatatgtaagctgatagcgcataaacattatagatgagggtcacctattacatcatg

SEQ ID NO: 11720 - DNA, 383 bp, Glycine max
  Clone ID: PAT_MRT3847_110591C.1
ctcggaattcggctcgagcttaaaaaaacaaccatcgaatgacaaaatgtatagaagcttttaatcttgcgcccccatggcggcagaacttgggagagtatacatcaccagcaccccaacatatcttatccttctatcctaaatcactttgatatactattctctaaagatctatacctatcaagaagaaaaatttaacatagaaggtatcaatcatacacctttactctgactaacataaattactatctgactacacatatcattctaactctagacataagatttcatacttatgacattatattactactactagaccactgtttggcttcacttatcttctcacaaattataacatttttaaactttccatttcaata

SEQ ID NO: 11721 - DNA, 315 bp, Glycine max
  Clone ID: PAT_MRT3847_110592C.1
gaccataaagcaacaaatgggttttatacatattaaaattgcaccacactgacgctggctagtcacttatttacagccagtcattaatcattctgctgccctgaatattaacaacggattaaaatccattgggtaatgggggcttgtcaaactgctccgcgaccccattgattaattaaggtgctccatccctgataccaacccgggacagcctggagctataccacgtgagttagaggatgttcagcagttgtggaccattgggctatgcctcctctagcagctaaccatcaccaactacgccttttaatccat

SEQ ID NO: 11722 - DNA, 534 bp, Glycine max
  unsure (1)..(534): unsure at all n locations
  Clone ID: PAT_MRT3847_110593C.1
ctggaatccggcttgttgtgatcctactatctgcttgtcaaagtcccatctactgctttctcatcgggtctttttatcagtttcagggttgcttccactagtgtcactgcttcattgcaattctccacttgaaatcttctgaacacttcttgggtataccttttctggtgaaggaaaatatctatcttggtataaacacactctagaccaaggaaataattgagaacttctaagtcagtcatctcaaattcaaacttcattctccccttgaattcctcaatttccaagtgatcactacctgtaacgaggagattatccacatatagacagaccaaagttaaatctacattattctttgctttcacatatacttcaaatcccactgaacactttgaaaatccctactgatataggaaaacatttattctttaattccaagcccaatgagcttgcttcaagccatacaaagcttccctcagcttatacactncgtgtactactaatatcacctcaacacctggggatcgaacaagc

SEQ ID NO: 11723 - DNA, 274 bp, Glycine max
  Clone ID: PAT_MRT3847_110594C.1
aaaacagagacaattttctcttaattgcaactttgtaaacaacaggggatttattcactaatgtggataaaggcataaaacactagccctcatgacaaaaaaacacggggaactggctatgacaaatggggaacaccctaaataaaccttttactgtatgcaccttaaaagaatctcaattttgcttcaggaaccccaattattaaaggtcctttaaaaaaattaaaaccaatttcattaacatacctttttcatacttgggacgggcctttgc

SEQ ID NO: 11724 - DNA, 292 bp, Glycine max
  Clone ID: PAT_MRT3847_110595C.1
gttcgtaagcgcgcacgtccgctcgcggaacaacagggaatgaatttccttcatcattatctcaccatggcaccattcactccgtcgaagttgcttctgttaactctggttttcacgttgagccagaaacagagtctctgttccacgctcaagagcgaagaaggtttggcgctgctggcgttgagggagcgagtggtgagtgacccgcagggggctttatcaagttggagtggcgaagatggagacattgatccttgctcgtggttcggtgtggagtgttttcatggttatg

SEQ ID NO: 11725 - DNA, 387 bp, Glycine max
  Clone ID: PAT_MRT3847_110596C.1
atgcggttcgggtttccacataggatggttgttgcagtcaaattatttaatttggaccttgaattgggatcaaggagctttagtgtagaatgtgaagtaatgcggaatctgcgacaccgaaatctcatcaagatcatttgtagttgctcaaattctgattacaagcttttagtaatggaattcatgtccaatggcaaccttgaaagatggttgtattctcataactattatttagacttcttgcaaaggctaaatataatgatagatgtggcttctgcattggaatatatgcatcatggtgctcgccaactgtggttcattgtgatgtaaagcctagtaatgtcttattggatgaagatatggttgcacatgttagtgacttaggca

SEQ ID NO: 11726 - DNA, 385 bp, Glycine max
  Clone ID: PAT_MRT3847_110597C.1
agcaactcgacggacactgcaagtatggcatgtcttgagatgtggcatgaacaactttgactactatctcattgctaaccttatattttgcccgaaggctataataactatgagggtaagccgtataaaatggtatttaagttcttacaggtacagtgctaaggcgggcattatatccaggggaaacaaacatggtgaccgactatgtttgtggaataacttatagtgcgaggaattttgatcttacaattagtggtagttactaggtctacaagagcgccagaaagatcaacatgcgatctaatcagatcccactgaattcacctcgcctatttggctatggaactcatcatttattgccacacaaatattcgtccatcgcatg

SEQ ID NO: 11727 - DNA, 368 bp, Glycine max
  Clone ID: PAT_MRT3847_110598C.1
aaaccccaaccaaaaggggttgccaaaatgaaaaaatcaacccaaatccaagggcctaaaaaggaattttccccccttaaattaccaaaatttgaaagaaaatccccacaatcctacccccccaaattcgaaataaatcccaaccctaaaaaaaaaattcccgagggggaaactaagctttgagcgggaaacgggaaaaaaatgggaaaacgggggtgaccatgttcattgggggggggaaaagtcccaaaagggttttgtttttggcccggggggggcaaaaaagttggcccgggaggggcaaaagggttttggcttgagggcttggggagtgaaaaccggaaaacgggggaataattttggggagg

SEQ ID NO: 11728 - DNA, 237 bp, Glycine max
  Clone ID: PAT_MRT3847_110599C.1
cttaaaaattgattcctcaagctataaaaaccagggtacaaaaacactggttcgacatagcctccattgacaccccccacattgaacccttgcacatgggcacatggtattttcccacttgtaatatgggtggggacaacaaggctatttaaacataatcgacttgaacaactttgtattgttaaacttcagataaggaattttccataagggcttccaccatagatcattccagga

SEQ ID NO: 11729 - DNA, 323 bp, Glycine max
  unsure (1)..(323): unsure at all n locations
  Clone ID: PAT_MRT3847_11059C.1
nattcatncancgtacgtaanctcggaattcggctcgagcctaattnnaacaatgccgnncatcnnccggcggngganacgcggcnnctccaccgnagangacnnattantnagaatcgcaaaaccgancaaaccgnccgcggatcctccggtcctctcaaagnacgcncncaagaagctngncaaagnaacagaggtttgaggcgaagaaggcggagnagaaagcnncggcgaaggnncataancnaanagacgnagagngaangcncnaaggnttggaaaaanacntcncncgggntntctaangngganaaagcaatttt

SEQ ID NO: 11730 - DNA, 278 bp, Glycine max
  Clone ID: PAT_MRT3847_1105C.1
gattaattccgcgactcgtcacagtctcactaggcatgcggcctgcccttcaaattttagacaaaagccggtcctgctaagactaatgttcaaagccaaagcttaaggttgaagatggtttctttggcacttctggaggatttggttttactatgctaaaccagctctttgcgggtcctgttgctctgcttggttttacggccttttttgctggggggaggaataactgggaaaggaattctcagcccaattaaacctggaaactggaattcccattt

SEQ ID NO: 11731 - DNA, 2171 bp, Glycine max
  Clone ID: PAT_MRT3847_110600C.1
cagaaaaatggtagtaaccattgtagcttctcattgtgttgtaacaaaccaagaaacacccaaggttcgtttatggttaacagataccgactccgcatacgatccaagccatttacaaaaatggtaaccattaaagcatcttacacagtccttccaaatgaaccaactccggagggccttttatggctatctgatattgatcaagtggcacgtctacgccacacacccaccatctacattttccatgcaaaacacaaccatgatacattaattgagaggatgagaaactctcttagcaagattttggttcactactatccaatagccggtcgattgagaaggatagaaggtagtggtcgattggaattggattgcaatgcaaaaggggtggtgttgcttgaagctgaatccacaaaaacattggatgattatggagactttttacgtgagtccatcaaggacttggttccaacggttgattacacaagccctatagaggaacttccctcgctactagttcaagtaacaacattccatggtggtaaatcctttgccattggagttgccttatgccatatcttgtgtgatggtggtttggtgccattcagtttatcaactcttgggcaaagttagctcgaggagacacattggagccacatgagatgccatttctggatcgaacagtgctcaagatccaacatcctcagtcgctgcggagcctgaataagaatgcagttcaagaattagcgacataaatttatagaagatgacaagatagttgagtaaaactaaagggttgtcaattagaggctcgtgctaagaatacaaatgatgatgaagcagaagaaggtggccaatgttgtctcaaaagtagaagggtcaagactttatagcagatttgaagctattgctgcacttatatggagatgtgcctctaaggctcgtaaaatagataagaatcaacctactctagttcggttcaatgccgatattcgcaatagactaattccacctctccctaagaattattttgggaatgcttagtcattaacaactgcatcatatcaggtaggtgatgtcatatcaaattctttgagttatgctgctcagaagataagggaagcaattgaagtggttacatatgagtatatatggtcacagatagatgtgattagaggtcaggagcaactggataatgcaagggctttgttctttggacaaaatgaaggaaaggatgccttgttttatgggaaccctaaccttcttattacaagttggatgagcatgccaatgcacgaagcagattttggctggggaaagcctgtgtatttaggtctaggaagtgtatctacacaagatagggcactgattattcaaagccctgatggtgacggctctattattctgtccatacactttcagatggaacatatgcagcttttcaagaaatatttttatgaagatatgtgaactatattcacatcgctactatcttgaacttcttgtatgggagcttaatttacgtgtgatctgcaatttctcatgtttaataaatttagttaaccatgtgggttaactataagcttgaatatgactgattagctataattttgttcataattccattgtcttttaatctattgggaaatatgtggaaatgttttaattaactttgaatataaattaaataatttaaagacactttcatgaaatattctgttagctgtgttttgattactagttttttggcatgttaaattgtttttaatttgcaacggtttttctattaatgtatattggcaaagagtcaactttcatttttaaaactgtggttgcaatcaggatcgtcatgagtcaaaatctttccattatggataattacggaaaaatatgtctgatgccatatcaattccggtcataatatgactgtcaagtgtcaaaataccttggcgttacgatcacaatttcagtcgtggatcagaatttaaaaccatgactactgtgtaattgaggacttctactatgtttgcagttctattttaaagtctgtttccttgtttttagatgttgataatgtgttgtgtgtttttttaatttacatgtgatctgtattccatgtgatgaataatgttcttatattgcaaatgcgctggaaataacactcgtgaatg

SEQ ID NO: 11732 - DNA, 221 bp, Glycine max
  Clone ID: PAT_MRT3847_110601C.1
ggaggcgtccatcttcatatagtgtgctgtcaaaatgattgtggacgtgaaaaatcagatgagtatttcttttttattttctttcaaggccagcttgttaatggaaacttttaattgatttctatctcccttgtacacattgtattttactttaatgatattttttttttaaaaaaaaaaaaaaaaaaaaaaaaaaaaaaaaaaaaaaaaaaaaaaaaaaa

SEQ ID NO: 11733 - DNA, 251 bp, Glycine max
  Clone ID: PAT_MRT3847_110602C.1
ggccggccttttttttttttttttttttctataaaaaaatatggggtcagcccttatatctggtgtgtttgttgggtacaggtggctcctgttggcgaaacatgctttgctttaacctcctcgaggctcactgtgtaccaacataccaacttcatagagtcgttacccaccctccgaaggtagtaacgactgcggactgatgcagaccaggaattccactctgcctcagccgaaacctcggtggtacctgc

SEQ ID NO: 11734 - DNA, 202 bp, Glycine max
  Clone ID: PAT_MRT3847_110603C.1
tattaatagcctagaacaacacattagaactttcctcgcaagttcccaagacaatgtaataaaccaaatacctactcaaatacaagagcttacattccctaaatctacacaacctattaagaagctattaaagaaccaaagacaatcctactttataaatactcacgctaataacaaataagacgagaataaaggaacaaaa

SEQ ID NO: 11735 - DNA, 187 bp, Glycine max
  Clone ID: PAT_MRT3847_110604C.1
gaaggaaaggaaaagaatgcaatgactcaactccagatagtagatagttagtgagtgcagctaaagctacaaaaacaacaaccacacaaagatactcaattctcttctggtcttagtttggcttttactcattctctcattctcaacaccaccaaaatgggccttttttaccaggatgcgctcaacc

SEQ ID NO: 11736 - DNA, 718 bp, Glycine max
  Clone ID: PAT_MRT3847_110605C.1
atcttatcaaaatttgtgctcatttaaaaatttaaggaaaatgcaaggtgctctggatcagtttccttcaatcggttccaactttttgtataccaaggttaaagaacaatacaaaatagtttctctaatgccatataaacgcagatgaattacaaaaacaaaacatttgaataatggaaacgaaaaaattccgagcccaaccaacaaaaacaccacaatttgcgactgccattccaacagcttccacagacaccaagccgaagaagtagcctctaactccacaacacattttaagaaacaacaaatttagttagagtgatctggctttaagaacacattccaggtaatcaaccagaccaaaaagggtatgtttaagggtttaagagaggctatgaggggggcaaaaaggaaaaatatgttgtcactatactttgtaaaacttagttttagtccttgtacctccctatcaaacattttggtcattgaactattaaaaataagtgtttttagtccattaagacagacattgttaacaccgtttcctatgtggcatctgtcctaagggactaaaatcactgatttttaaaagtttaggaaccaaaatgttcgacggtgaagtattgggactaacaccaagaattttacaaaatacaaggcctaaactttttttttttcaaaaaaaacaataaatctagaaatattagttagtttgcatcat

SEQ ID NO: 11737 - DNA, 204 bp, Glycine max
  Clone ID: PAT_MRT3847_110606C.1
gatcgacatgaatgctaaaaccatgagagtggtgccaacatgttcctgatgtgcagaattgacaaatgtgaaattttaacacaccctgaagcttatttacagtgagctcggaaaaaaaacaatgaaagctcaaaaatttcttccacccaagaaaccttcgcagctttagaacaagaaaacgatgaagtagaactagaaatagta

SEQ ID NO: 11738 - DNA, 484 bp, Glycine max
  Clone ID: PAT_MRT3847_110607C.1
acagcatagtcctcattcaacagatatcaacatttcattatacataaaaatgccatcattaaatgaagaaatgaacaatagacaacctgagccaaagacggatgagcatcagcatcaattgctgccacagtaacaacacccttcaacacagtagctgccttctcccatataggagtcagagcctgacagtgtccacaccatggagcaaagaattcaacaagaacaactccatttgaattcagaacctgcgaagaaccttgatatcagtcaccaaaactacaaccacaatatcaaacttggcatttacatgcccagatggatttcaagagcaaagatgcgaaatttaacgtttatacgcaacactcatttgaaaaaatggcaaaaacagtgagatcacaaaatgaggtaatggagaaaggggtaaaaaaataaatttgattcaccttggacttgaagttagagggagtgagttgaagcacgggtg

SEQ ID NO: 11739 - DNA, 358 bp, Glycine max
  Clone ID: PAT_MRT3847_110608C.1
aaactgaaagctaataagtttgatggttaaagacaaggctcagatcatcattatgacggctgggcattgtggaccctgaggagacaaccaccattaacaagctgaggaagactgacgcgctgaaagaagctccagtgcgatgccatatgagggcatgcacatacggccttagaggggatccagattatgatgtcatcaaaataatatggaaccctattgactgagtgtcatcatgagtgtgtgaaagatgctagatatgctatggtaaccatctatgagacgagagtgttgatgaacagatccatgctgatgtattgctatccttgatcgttaatgcatgcttcttatcttctgtcta

SEQ ID NO: 11740 - DNA, 170 bp, Glycine max
  Clone ID: PAT_MRT3847_110609C.1
ccaacctttccttaagtaaggtgttaacagttctggcaatggagttgtgtgaagggtctcatgctgcctgcctgcccaccaccacattgcatgttgcaccaagacctgtcaagcagaagcctttcctggagttttgttgagtgggtgtgccctaaaagcgtggtcttgtc

SEQ ID NO: 11741 - DNA, 548 bp, Glycine max
  Clone ID: PAT_MRT3847_11060C.1
ttttttttttttttttttttttttttagaagccaaccatcggtaatctgttattaatttgaagagtagacaaactctagttatagcaagtaagtagcaacaacctcaagctcatatatcatcactatggccaacacaatcctaaacctcacaacaattattattctactcatctctttggctctacacaattcccactttgttgtttcttcaactgatatagatcaagatcatgactttaatgaagaggaagaggaagagtatgttctagacactccaataccccatctaggaccaagaagcaggttcttggcgaccataataaagaaaggaagacagtgtgatcgtgagactaataatatatgcaacggggttcgagcgaacaaggggagagaccttcttttctgctgcaagaagcattgccgcaatgttcttagtgacaagaacaactgcagggtgtgtggcaacaagtgcaagcaaggagaaagatgctgcaatggggtttgtacccatgttttatccaatgggcgccactggggcaagtgcaac

SEQ ID NO: 11742 - DNA, 395 bp, Glycine max
  Clone ID: PAT_MRT3847_110610C.1
gctatatatgatttgatttaattcatcactggcgaaacgattaagaagaagctaaatggaagcgtccctctaagctgtgctggcatggccaagaatactggaaggatggtgaatagaccaatgcgttctccgtcaacggtgattgagcgtgacactgaaacttgaagtttaatgattggattattattcctgagaccaactagtaacaactatggttggcactaacgaaccggcagcatatatatggaaattgttttctgaaaacactggcggcgcgttacactatacaagactaattattaattttaggataaatggtagtaagtgcaactatcatccaattactaacatggtgtagaaaagttgatacattaaagtacatgatcaatcagaag

SEQ ID NO: 11743 - DNA, 235 bp, Glycine max
  Clone ID: PAT_MRT3847_110611C.1
gcaagagttgttcccctcaacaacatggctgagatgcacctcggcgactgaccgcacgaatatttccctcgctgctattgcagagcttgctcatctaactggcggtgggctcattaaccggtctggtctagaaggacgctccctcgaatgtggctcgttggctgatactgttgaggcctatgaaattcttttggctgatggcactcgtgtgagacccaccaaagaccatgagttc

SEQ ID NO: 11744 - DNA, 2254 bp, Glycine max
  Clone ID: PAT_MRT3847_110612C.1
ggtgtattaaattacgaatcaaggattaatttcataatcaatccccaaactgagttccatagttaaagagtcaaacttgtgaagataacttaagattttacaggagaaccaaataccctaatcacgatgcttaaaagaaaaattaggtataataaattagtaaaattataactttagcctgaagcaacaccaacttatgaaaacgcgttaacaccgcataaaatggatgatgaatttgttaccttaacaccaaacatagtccaattttttaattatattttcttggcaatcgttcttcgtatatatatcacatgtaatatgaggttccagcagtgcagcctccaagacttggtgagtgtcactgctgaagagagaaccacgcagaactgacgcaatgggaagcacaagtttgcttcatctattacttggtgttgttttggctctgctgagtgtgtctcttgtggaaggagaagatgcatacaaatactacacgtggactgtgacatatggcattctttctccactaggtagtcctcagcaggtggttcttatcgatggtcagtttcctgggcctcaactagacttggtaactaatgaaaatgttgttctcaaccttgtaaacaagttagatgagccatttcttcttacttggaatggcatcaaacaaaggaaaaactcatggcaagatggggtattgggaaccaattgccccattcctccaaactcaaattacacatacaagtttcaggtcaaggatcagattggaacctacacatactttccatcgacttcactgcataaagcagctggagggtttggaggactcaatgtctaccatagatctgtcatcccagttccttatccgtaccctgatggagatttcactttactcattggtgattggtacaagactaaccacaaggtattaagagaatctttggattctggaaaatctcttgcctttcctgatggtctccttatcaatggccaagctcatacaaccataaatggggaccagggaaagacctatatgttcagaatctcaaatgtgggcatgtcaacatcaattaacttcagaatccagggtcatcctctgaagctagttgagattgaaggatcacacattgtccagaacacgtacgacacgcttgatgtgcatgttgggcaatcagctgctgtgttggtaaccttaaatcagcctccaaaggactactacattgttgcctcaacaagattttcaagaaaagttctcacagcaactgcagtgttacattattcaaactctaactctcctgcttctggacccttgcctagtcccccaatttaccaatatcattggtctgtgaagcaagctagaacctacagatggaatctgacagcaaatgctgctaggcctaatccacaagggtcataccattatggaaaaataactcctacaaagacaattgtgttgtccaattcagcacctttgattaatggaaaacttcgttatgctgtcaacaaggtttcttatgttaactctgatacaccgctcaagcttgctgattacttcaacattcctggaatctacagtgttgactcaatccaaacccttccttctgaaagtactcctgcatccatagccacctccgtagtgccaacttctctccatgatttcattgaggttgtttttcagaacaacgaaaatgccatgcaatcttggcatcttgacggttatgacttttgggtcgtgggttatggttttggtcagtggacaccagccaaaagaagaacctataatctagttgatgctctgaccaggcacactacacaggtatacccaaatgcttggactacaatattggtgtccttggacaatcaaggtatgtggaatctgaggtctgcaatatgggaaaggcagtatcttgggcaacaattatatctcagggtttggacttctgagcgcagccttgctaatgaatatgatattcccaacaatgcattgctttgtggcaaagctgttggacataacaacccctagtatcactatcaacaccaactaatcatattgtgccgttttctagtcatgagggtttgactaaaattggaagagttggagagaatttctaaaatttctggctgtcttgtgtaaatttgagcatggtcttgtatcaaaatttcattgctcatattcgtatgtgtattttagcaattgattttgtagttgattatttgaaatcctaaaatcaaggtatataagaaattataattccat

SEQ ID NO: 11745 - DNA, 394 bp, Glycine max
  Clone ID: PAT_MRT3847_110613C.1
ctaaaacccccctttggattcttttttttaattctgggtttcttttttcgggcggggttgtggataccggggtataccccctaagtggacctccaaacttaacgggggaaaccctaaagacccaggctaaatttctccacttggaactttaatcccgctaagatggccaattttcccctcccctcctaactttgggcctccaaactcaggttccccatcagggggggatctcaatcagccttggagttatccaactccgcatttacgggtttcccccttaatttatgcaggctttctcttggggaaaggctccagctgtccaaagacttgaaattttccctggaacaacttgggactaacaatttaaactcctccctccaggggttatgggaag

SEQ ID NO: 11746 - DNA, 285 bp, Glycine max
  Clone ID: PAT_MRT3847_110614C.1
gatctatgtcgttcttttgagttgtcaatatccctgagagacacattgatctcattctgaatgcacgattgctggatgcctcattaattctacagctcattgaccatcgtcgagtaatagctcgtttagaggggtaccacaagcactcactggcagctgatgagcacaaggccggtctgacactgtataggactccgacgattatgtgcacagacggataccttaggagtcggtcgacactgatcattagtgacggaacctactcttgagcatcaaccaaagaac

SEQ ID NO: 11747 - DNA, 430 bp, Glycine max
  unsure (1)..(430): unsure at all n locations
  Clone ID: PAT_MRT3847_110615C.1
cgtaaatttactatatatgtaccataaaggttttttgcctgtctgttcgacggctgcacgaagcatcacacgttaagcgtgaggggggcacccttgctacaaaaacatncattgtagaatgcctaatacaccaagacgaaaattatctatcaaatttgaaaggaatggctgactgacaaacaggtagagagcatactcatatgcatataccatatgacgtccgagagcttgttaacgaatataatgggaccataagttggagtaaaaaatcaaagctcagcgtgaaaaaataaaatacgatgattgtcctgagactgatagtgagcttatcgacgcttcatttgatctctggccagtacctacagtcactccacatttcgctgaaagaaaaccattagtgctctaactgccactggaatatctaatgctg

SEQ ID NO: 11748 - DNA, 2365 bp, Glycine max
  unsure (1)..(2365): unsure at all n locations
  Clone ID: PAT_MRT3847_110616C.1
ggccttcctgataatatttttgctacttggaatggagttcttgaggacatgagtgatgtaaaggaattggttcctgagctattttacctacctgaggtcctcacaattgaaaattcgtttgattttgccgcaacacaaatgtgaggcaagggtgaatacataaaacccttccgtctcggctaaaaatcctattgattttattcacagggacaggcacatcgtcttcaaccagtaatagttcattgcacttaatagaaaaagaccggagacgtcgaatcgagggtcctatacaggtacttcgggggcaccacagtgaaatactcagttgttgtgttaactcagatcttgggatagttgtttcctgctcccattcatcagatgttctcttgcactctataagaaggggacgtttaattagaaggctcgatggtgtggatgcccatactgtttgcctttcctctgtaggggttgtaatgacctggaatgaatcacagcatactttcagtacttttacactcaatggtactccggttccatgcccacaacgctccttccttcccgctgctgcctgcctggcatcttctgttgatggggcgaagtgcgttgattggcatccagcacccttggaaatggtagagcctataatagcagtccggattcacagtcgaataagtcaggtgttgttgattttgattcagaatcagaagaaacttttgataactccaattatgcgcatgttcaaagcaccggctgcatctggtggggagtggcaattcccccaagcagtagcatttgctgtctctggaattagaagccaagctattgtttctataacaagcaacaaagaagttattactggtgggcatgctgataatagtattaggctaatatcctcagatggagctaaaacattagaaacagctttatgggcactgtgctcctgtaacttgccttggtctttcacctgatagtaattacctagatggtagatcccgaggcactacagtattactctggagaatgcattgggcactttcatctcactcaagtgccgtatcagaacactccactgggacaggcacattgtcttcaaccagtaatagttcatcgcacttgatagaaaaagaccagagacgtcgaatcgagggtcctatacaggtacttcgggggcaccacagtgaaatacataggtggtgtgtggactcgcttctggggtgcgtcggtgcctgctcccattcttctcccgccctcttgctctccttgagaagggaacgtttaattagaaggctcgatggtgtggaggcccctactgtttgcctttcctctgaaggggttgtaatgacctggaatgaatcacagcatactctcagtacttttacactcaatggtactccgattgcaagagcacagttatctttctcttgcagtatcagttgcatggaaacttctgttgatgggacaagtgctttgattggcatgaattcccttgaaaatggtagagcctataatagcagtccggattcacagtcgaataagtcaggtgttgttgattttgattcagaatcagaagaaacttttgattacacccaaatagatgttcgatcaccatcaatttgcttcctgcatatgcacactctggaggtatttcatgtattgaagctgggagaaggacaggatatcacagctctggctctaaacaaggataacacaaatcttttggtttccactttggataaacaattgataatcttcactgacccagctttaagcttgaaagtggtcgatcaaatgctcaagcttggatgggaaggtgatgggcttcagcctctcataaaatcatagcttttagggtatacattaatgggttacagatcttctatacaatatcagttaggaaaattaggttgaggttatgacaatggttgcgcctctatggtttagagatatcttgtgacatatgtaacattctattgttaccactagagttagattccttagatttagcagagggttctttgctcctccggttgtgctatagtgttgatattggactagcttctgagttgcgactgaggtttgagccatttttgtccccattttttttattagagagaatgaaaatttaatagctattctttcttgtaatgctgcttgctgcttttcagacgttgcgattgattagattctgagctttgagtcgtcaatatttgttaatatattaaccaagtttcaattgtnaaaaaaaaaaaaaaaaaaaaaaaaaaaaaaaaaaaaaaaaaaaaaaaaaaaaaaaaaaaaaaaaaaaaaaagggcgagccactctaaaagacccaagcttacaatacgagaacatgcaaacgtgggg

SEQ ID NO: 11749 - DNA, 131 bp, Glycine max
  Clone ID: PAT_MRT3847_110617C.1
gacacagagggggacatgactagtttagcccacttggctgcttggtgactctttacctgattgtgagctacaggactctttactgactccagagcacatattatggagccctgattgctatggatccaagg

SEQ ID NO: 11750 - DNA, 1753 bp, Glycine max
  unsure (1)..(1753): unsure at all n locations
  Clone ID: PAT_MRT3847_110618C.1
cgaanccctccacacctttgctttctcgaagtctcagctgggcttgtgccaattgcgtccttttcttcaggccacaacaactccttctactgcctctctctagctagtgccttcttcttcttcaaagagtctgtgctatataaaatcaaagggggagaagaggcctaattaaggagctttcagttgtggggtcatcatattgcggcgtggatggggcgtttttcatctgcgtgcaataggtgggggaaggcgttttcaatgaataaaggaggaaaaaatgggaaatgtggagggagggaaactgctgatgcaatggcataggaagctaaaaagaatgacatgatgttgtgtagctcaggcattgttcatgtcgatggttcaaacaactttgcttcagttttctcaaaaagaggccagaaaggagtgaaccaagattgctgcatagtgtgggaggaatttggatgccaagaggacatgatattttgtgggatatttgatgggcatggaccatggggtcactttgtggccaaaagagtaagagagtcaatgccaccatctttgctatgcaactggcaggagacactagcccaaacttcaattgatcaggctattgacgtagaggaagagaaaagtaaacaatacagattcaacatatggaagcattcttacttgaagacttgtgctgccattgatcaagaactagagcaatatcgcaagatagactcgttttacagtggaacaactgccctatcaattgttagacagggtgaactcattgtcatagcaaatgttggtgactctcgtgctgtgttggctacaacatcagatgatggaagtttagtaccagttcaactaacaatcgatttcaagcccaatttaccccaggaggcagagagaataattcagtgccaggggcctcgagctccacttgattcagatgttgattttgatgtagagacagagaaaaaacaacaccggtttaacatgtggaagcattcatacttgaagacttgtgctgccattgatcgcgaactagagcagaatcgcaagatagattcattttacagtggaacaactgccttgtcaattgttagacagggtgaactcattatcattgcaaacgttggtgactctcgtgctgtgttagctacaacatcagatgatggaagtttggtaccagttcagctgacagtagatttcaagcccaatttacctcaggaagcagagagaatacttgagtccaatggacgagttttctgcttagacgacgagcccggggtgcacagggtgtggttgccggatgaggagtttccaggacttgccatgtcaagggcttttggtgactactgcgtcaaaaagtatggtcttatttcagtgcctgaggtaacacaaaggaacataaccagcaaagaccagtttgttgtgcttgccactgatggggtgtgggatgtaatctccaatcaagaagcggtggatattgtatcttcaacaccagacagaaccgactcgtccaaacgtttggtggagtgtgcaatgcgtgcatggaaacgcaagaggaggggcattgcaatggatgatatttcagctatttgtctcttctttcactcttcaccttcacttgaccaagttgccaccctagaagaatagaaacatttatcatgtaaaattgccgagtcaaaggtgcaacttgctgctcaatccatgtaaaatggtcctatatattaaggtcgattcattagcatttgaaggtgtc

SEQ ID NO: 11751 - DNA, 197 bp, Glycine max
  Clone ID: PAT_MRT3847_110619C.1
acgctttctccgacaacagggcagacaacgtgattcgctcttatcttcaaatcaacgacagaagcgacggacgataataggagtgagagaagatggcgttcgcgttcatgaagctgctcaacaggatgcttgcgaagaatgaaatgatgatcctgatggatggtctcgatgctgcaggtatgacaaccatctggtac

SEQ ID NO: 11752 - DNA, 299 bp, Glycine max
  unsure (1)..(299): unsure at all n locations
  Clone ID: PAT_MRT3847_11061C.1
ttggggtagaaacaggggtgcattggtacccttcttgttgcctattaaaacatggaatttaagaaaatctcctagtacattttggtgtggagagagagagagcaattataaggaactattaatttgcttatcgacattggttcattttaagagggtggggtacacagtacactcaattaatcagacaagtaacttgggaatgaggcaatttcaaactgtacactctgaattgagaggggaatttaaatatgaatttggctcttgtaaagtaaggagatgcanctagagaaggaattaag

SEQ ID NO: 11753 - DNA, 1078 bp, Glycine max
  Clone ID: PAT_MRT3847_110620C.1
tctcgtggcggcacgccgcgccacgcggaccgaggcggggcgagaaggggaaaatttgtcaaataaattcatctaaccccaaacaaaacctgcacttttatcgcttggttgcagcttcagcagcagcggcaagcaactccatccgcaatgggaatcgatttgaaggcaggaggtaagtccaagaagaccaaacgtacagcccccaaatccaatgatatttacctcaagctcctcgtcaagctgtaccgttttcttgttcggaggactggtagtaacttcaatgccgtcatcctcaaacgccttttcatgagcaaggtcaacaagcccccgctatccctctctagattgattcgttacaccaagggaaaggaggataagatagctgtggtagtcggggccgtgaccgatgacattagggtgtatgaagtccctgctctgaaggtaactgccctgaggttcactgaaactgccagagctagaattgagaaggctggtggcgaatgcctcacctttgatcaactggctcttagagctccactcggccagaatacggttcttcttagaggtcccaagaatgcccgtgaggctgtcaagcactttggaccagctcctggtgtgccccatagccacaccaagccctatgtccgtgcaaagggaaggaaatttgagcgggctagaggaaaaaggaatagcagaggctttagagtttgagttctggagctcaaacatgaaggagttttccttttacctcatgatcattatgtattgttttcttgtgttttggaacaatttgttaattttggtttttatttttccttctctatgggaaaaaaattgaaacgctttccccgaacaattttgttctagcacaaactacttttgagaggaggaggattaaagagtagctattggtctgcttcagttgtgattttgccaagttttcatctaattttttatttttaatctctgtatattcctattttgttatgtgttgctatagaggaccagacagggagtgtccgttttattaagagtgggattaaattatttaatgaattgtcgcccctttatatcctgt

SEQ ID NO: 11754 - DNA, 254 bp, Glycine max
  Clone ID: PAT_MRT3847_110621C.1
tctcgagcacaatgactcagttcaaggtgcagcccatgacttatactcctttttactatctctaactttctgaggactattctgagctttactttgcagggacttaaacaaaaagaccactctgacttattacagtctaacacgatgcctgggaacccagcctctttctaagccaaacccagaaaccattccctctccacccaagagtgggctgcttttcttgttagcagcagtgactcgcaaccgctcccgca

SEQ ID NO: 11755 - DNA, 1417 bp, Glycine max
  Clone ID: PAT_MRT3847_110622C.1
ggtggtggaatagtccaattcggacattgaaaccatcaccagtcaccacctttctcgcatcgcttgttggatttcaaactctgccatttcgattccttcgttcactcgttattttgcatgactattgtagaggctgcagcctggatgattggtggactttaagcttgtgaaagaataattgccgaatggaacttgcaagacctgcctcaagtagaagaaaattgaaagatttattgcttcagagtgataatcgtctttgtgctgattgtaatgctccagatcctaaatgggcgtctgccaacattggagtttttatatgcttaaaatgttgtggtgtgcacagaagccttggtactcatatatcaaaggttttgtctgtgacattggatgattggtcagaggatgaaatagatgcaatgatggaagttgggggaaatgcttctgctaattcaatttatgaagcttatattcctgaaggatatacgaaacctggaccagatgctggtcatgagcagcgttcaaaattcatacggtcaaaatatgaattacaagaatttctgaaaccgagtttgcgcattgtgtctggaaaaagcagtctacaatcaagttctgcaaaaagtagttttatggacagttttaaaagtactggtagttcacagagaatggaaggtatggtggaatttattggaatgttgaaggtgaaagtgattaaaggaacaaatttagctatcagagatataaagtcaagtgatccgtatgttgttttgagccttggccagcagactgtccagacaactataataaggagtaacttgaatccagtctggaatgaggaatacatgctgtctgttcccgagcattatggacagatgaaattgaaagtatttgatcatgacacattttctgctgatgatataatgggagaagcagacattgatcttcagtctctgataacatctgctatggcatttggagatgctggaatgtttggtaatatgcagataggaaaatggttaaaatcagatgacaatgcccttattgaggatagcacagtcaatattgttgatggtaaggtcaaacaaatgatgtcactcaagctccaggatgttgaatctggagaattagatctggaactcgagtggattcctcttgagcaatagggacttgactgccgttggcctatgcattctcttgaacaaattgtctgtaattttttctcttcactttttgattcatcttcctagaagaacaaataaacctgtatttttgcctttttaattcattgcagttaaattttttgatccttcatataaaagaacgagagagaaatgtcagacgtgacaaaaaaaaaaaaaatgaaaaaaaaaaaaaaaaaaaaaaaaaaaaaaaaaaaaaaaaaaaaaaaaaaaaaaaaaaa

SEQ ID NO: 11756 - DNA, 932 bp, Glycine max
  Clone ID: PAT_MRT3847_110623C.1
ggagaagaaaaaaaaaaaaacaagtcaatttaatgcgacaaattcacaactttcatgagttatacacacacaacagtgacatttatttaaataaattgctcttgaacaaaataaaccaagcaccaccagtggccgtgaaggaaaaagtattgtgcttacatacattatttgtgggttgtaactttgaaaataaaaaagtaaatgaaccttaaaccacaaagtcagctaggcatgcagaaaacaatattatgaattcttaagaacatttattttccctgttgctgaaaagatttatgtgcactgctatttaatcggagccaacgattgagatcagtgtttgtgctttggtttcttcacgatcatgacagtgcagtgagcatgatgagcacaatagtcacttacactacctaaaaccgctctttttaaagtcccataaccatgactacccacaaccaacattgaagcttggtgcttttccactgcctcgcaaagaacatttctaggatcaccttctagcacttccactgctacgtcatttacggatttcttcttgcatagttctgtagctcgttcagtgattttggcagctgtttttctcaaatcggcctcaacaacaggtaacacctcagcggctccagggccaacaaaaccgacagcagaggcaacagaaggcttggcataaacaagaaaaatcttgaacttaggaacatttgcaggggatagcaagtgatccagagtccattggagagcgtacgtgctgaaatcactgtcgtcgattccaatcaccatcacttgctttgtctctgacccactcgtcgccatggaattccagttgcaatacctcttggattctgtgtttatgttaattacggaagggagttacttgcgtgctacgctaactttactaccatgtggcgatttgcgctcgagcc

SEQ ID NO: 11757 - DNA, 408 bp, Glycine max
  Clone ID: PAT_MRT3847_110624C.1
aaaaaaaaactccctgccttatacaaattcttaaaaaattctcacttgcaactatttttttttcttcctatttcaactattttatcaaaaagaagaaataataccccctggggccctttgtgggaatctggggaacatataaattctaattgggggggcccgagggtctaaagatttaatttaataaaatgtctttggatgacccaggccctttttttatagactataccccctccccctttggaaaacccaaaaccctcataaaatggaaaccccccccccggggatttaaattcccgggaaactgaaaaggcttaattttttcgacgagtcccctaaacaatcactgaaatttggttattgccccatgcccaaagccctgaggggttttttgtacctgggaataaa

SEQ ID NO: 11758 - DNA, 335 bp, Glycine max
  Clone ID: PAT_MRT3847_110625C.1
tcttctccatgcacgtgggagctttagaatttatcatggatagtttcgcaatgtcctgactacaacataattggtgcactgcttttggttgatcctcatgataccaatcctgaaaatgcattaatcgtatttagtggaccttagagctgaaggccattctgggggtcatttcgagaccatacgcaatagaccaacaaaattaaggtcagctattgatccactacaaagggatttgtaagaaaaactgcatggtaaagcaaatggagcatgtgctagtcgtgacttgacatcaaatttcactccaactcacattggttggaaatctaggttttgct

SEQ ID NO: 11759 - DNA, 318 bp, Glycine max
  Clone ID: PAT_MRT3847_110626C.1
cccacacatcgggtgtaacaatacgacatatcggggctccgcttgagcatacttaacaacagggcaaggggtgttactgtggggttgaagctaccatctatctttctctttcttaatgccttcttgccagaagttaaaatggcccaagaaactttcctattcacatctgaatcaatgaacgaggggcaccctgacaagctttttgaccagatctcccatgctgtgctcaatgcatgcttggaacatgaccctgacagcaaggttgcctgttaaacctgcaccaagaccaacattgtgattgttttcctagagatcaca

SEQ ID NO: 11760 - DNA, 278 bp, Glycine max
  unsure (1)..(278): unsure at all n locations
  Clone ID: PAT_MRT3847_110627C.1
taanactgtatattggtttctaacttgnnctcccaccantganganaaggnnctagcnnagaanncatccaaaatgangcaattggtgttnagnaangttganaagatgccaagtgatattaaaacctttatagagaaaacagagacaaaagacatncnnacatctccattgaaatatagacatgagtgggagctcatgttggggaaaattagcaaaggcaacgtttgtgttgttggagatgcattcccnnnnnggcccctgactanggcaagtggtg

SEQ ID NO: 11761 - DNA, 287 bp, Glycine max
  Clone ID: PAT_MRT3847_110628C.1
cgagaacaagctgaggaagagggaggcaaagctggaccagctggtcttaacttgttacgatctagttcagcggcggatctacaccctaaagccggtggcgccgttgctggaaaacacatgccttcggcgatgtgatgacctctgctcatacatgttatggtgtggaggaagcttattagctaccccaactctcacttcagtctcattggtgtcattcggtccctctatgcgtttatgtggtatgtgcacatgtccaatgtaattttagaatctatttgcataccgtc

SEQ ID NO: 11762 - DNA, 184 bp, Glycine max
  unsure (1)..(184): unsure at all n locations
  Clone ID: PAT_MRT3847_110629C.1
gctcgcatgaaaagctttggaacatattggttcctatgatgctacangatctgagtaattatggaaacagaggataaaagataagttcccacctagcttgacagtacctctgtcactcaaaaagggtgtgccgggtgaggaaaatgctgatcaaaaagctggattgtatattgacaaaagcatg

SEQ ID NO: 11763 - DNA, 502 bp, Glycine max
  Clone ID: PAT_MRT3847_11062C.1
tacggctgcgagaagacgacagaaggggacagcccaccctctgtcccttttttctctcttggctttctttctttcatactcagtactccccattggggtataatagggacacgaggttgatgcggtggagctaagaaaatgaagcccttttgcacattcttcattcttctttcgctgcttgttattctcgttgaatcttcatgcaaaaacgaagaccaggagatggtgtccaaggccttccaatctgtgtctggattcaactcttcctggttcgaaacaggttccaactgttcaaatgctgagattaaagggataaatctttcgtccaagaacctaagtgggaacatctcgtggaggtatctgaggaacatatccaagttgaaggttctagatctgtctgggaattttctacaaggccaggtcccaaactggttctggagaagctcaaccttattggtagtgaacctttccagcaacaggttcggagggagcattaacccca

SEQ ID NO: 11764 - DNA, 244 bp, Glycine max
  Clone ID: PAT_MRT3847_110630C.1
caattcgacccacgcatcacgcctgccctcacgcatgctcctacgcgtactaatgctacaccttaaatgcgaaaacatgcatctgttcaacattcccatgacagaagaacctacacttcaaggtgcaagaccaataatatcacactgtccagaccttgaattcgcatgcatgtctaatcactgcacaggtcttatgtgatgatctagaacctatgcggtcctctaaccaatcaaccattttgac

SEQ ID NO: 11765 - DNA, 262 bp, Glycine max
  Clone ID: PAT_MRT3847_110631C.1
aagaaggttgtcatctctgctcctagcaaggatgcccccatgtttgtcgttggtgtcaacgagaaggcgtacaagtctgacattaacattgtctccaatgctagctgcacaaccaactgccttgctcctcttcgtaaggtcatcaatgacaagttcggtatcgttgagggtctgatgaccactgtccatgtcatcactgctacccagaagactgttgatgggccctcgtctaaggactggaggggtggaatggctgctagtt

SEQ ID NO: 11766 - DNA, 636 bp, Glycine max
  Clone ID: PAT_MRT3847_110632C.1
cggactgacttgctcgacccacctagggcgcacaatttgtttttgccgaacctttttcaccatcattttggtcttgtttttctgccaatacaaacaaacaaaaacttgattctctctattccatggcgcccggaaggaagaagcggcaagggaacacatccattattcctgtggatgcaaaccccactcagcaaaaagcacaatctttggatattgatgctgagtgtgagagtgagaccaaaagaatgaaatttgctgaggaagatggtgatggggcagggggttcttcttctgttgtgaaaaagaagcgtggcagaaaaagtaaaaaggagaagcaggacacggaaaagatgttagagagcaatttgtcggagaagaaagatactcaaggcgaataccacggtgaaaattgtggagtaggagggtcttcttctgttcaagaaagtgcgaaaaagaaacgtggaagaaagagtaaaaaggagaaggaggacatggaaaagaagaagatggcagaggagaaagatgctcaaaacgaaaaccatggtgaaaatggtggagtaggaggttcttcttgtgttgtagatggtgtgccaaagaagcgtggcagaaaaagtaagaaggagaaggaagacatgg

SEQ ID NO: 11767 - DNA, 286 bp, Glycine max
  unsure (1)..(286): unsure at all n locations
  Clone ID: PAT_MRT3847_110633C.1
gatcctntagagcggccgcgttgtttttttttttttttttttttttttttaccataatngctttctatccaagaccaattcacgaaancgcgcgttattttaaagctatatggtcaatgaaacaaangttaatcattctacctaacaaaacgatataactcaaccatcaaaaatatccaaccaaacaaaataatttactacacaaatctttagctagttcataaaagacagaacacaagatttaatctattaataaacatttcttaaacaccgcaacttttttaca

SEQ ID NO: 11768 - DNA, 381 bp, Glycine max
  Clone ID: PAT_MRT3847_110634C.1
aaaaatgcccataaaattggggttaaaaatttcccgttgcaaagggactaccatttacattgttccggcctaaaaatttcagaatttaatagctcccctattagtttttctagcttctttgattggaaggggggtttaactcccatggggtttccataaacagcacaagggtcttttcccaaaagaggattggcaatacaccaaccttccggggtaaagggaccatttgaccttttaaaaagttccttatcaattttggtgaaaactgggtcaccctcgggaaacttttgagcaaaaggggccccccttgggaccatggtatcaaaaagcccccaattttaagaagacttggatgctgttttgggggggtgtccccccttt

SEQ ID NO: 11769 - DNA, 301 bp, Glycine max
  Clone ID: PAT_MRT3847_110635C.1
ggaacaggctatagtgacaataacggctttggcaaagaagttgttggagaagttaagaggaagataggggtttttctattttgattttattaaaacggggtctatgtttttttgtctgattttttgaggattttttagatgcttcgatgctattttttccttaaacttatatttctgatattgttcagagatttacgggattgcctacgaggtaagctataatttttatgcattttcctccatgctttattatctgggtttgccttttaacccttcaacctccaatttctttttggggttt

SEQ ID NO: 11770 - DNA, 415 bp, Glycine max
  Clone ID: PAT_MRT3847_110636C.1
acgcaggcaagttcattgcttgactcacatgatgacccccatatttgttgatttaggtgaaacgcactggaccgtggtgatatatgacaacagaacataaaagccaggagtacttataatccacctgacttgatattgcgttgatcgggctcactgcagcagcattttttttagacctaggagatgcactaccatggcagtcttggacaaatgtttggtgcacaactgcaccacctactgcaagctgttcagtgctgctattaccacagcagtttgctgtgatgtctaagggaaatttattgagggcctgaccctgcatgggcatgggcaaaggaacagagtactctggtggacataagctagctaacatcctttgcacaagttcacctggagccatgtgattgaagctataacc

SEQ ID NO: 11771 - DNA, 318 bp, Glycine max
  Clone ID: PAT_MRT3847_110637C.1
ccaccacggactactatcccagtgtcagagttgatgaacaaggtgaaggagttgctgaaatacgagtgcccagacggaaacacatccttgtttccaagtcccaactcctagactgccttcatcctctctatccaacatgatattaaggcccatcagtttggagttctagcctgatgcttagagtctatacttcatgccgagcatccgactatagttgagtaggagaggcgttctgattttcaacttaccgattgactcaaacagctttggggccatggcgcactatctaggaggaagggaccctctatgactatgagc

SEQ ID NO: 11772 - DNA, 482 bp, Glycine max
  Clone ID: PAT_MRT3847_110638C.1
ggctcgagatttaagttactgcaatctttctaaagagtcaatcccagacgagttttgtcacttatctcactggcagcaattctgttatcctgcctagttgcatttccaaaatcacaaagcttgaactccttatcctaaacttctgcaaaaagcttcaaaggttgccagagcttccttcaagcatgcaacgattggatgcaagcaattgcacttcattggaaacttccaaattcaatccatctaagccgtgcagtctcttcgcatcacctacaaaatgacatttactaggaaaattggaggccttcttgaggaactccgtcttcccaaagcaagatttgacatggagtgaaattccatcatggtctgtccctccaaaatatgtagtcccacctgagatgcaccaacatgaagttgaatgctgcttgtttagacctaatggttgaacacaaacttgtcggacagaatgtgcttgtatgttggct

SEQ ID NO: 11773 - DNA, 2903 bp, Glycine max
  Clone ID: PAT_MRT3847_110639C.1
tacggctgcgagaagacgacagaaggggtgaactggacagttccaataagatttcattcttgaacaaaaatccattttggggtttatttcatctattccatgaccggaacagtgggagatacacgttacaccacgattttgaatcagaagagatatttcaagaaatggcagatctattcactctatcaataaccgagccggatctggtgtatcataagggatttgctttttctattgattcctccggattgggtcaaaaacatttcttgaatgagttattcaactccagggatgaatcgaaaaatcactctttattggttctacctcctcttttttatgaagagaatgaatctttttatcgaaggatcataaaaaaatgggtccagacctcttgcgggaataatttggaagatccaaaacctaaaatagttgtatttactagcaacaacataatggaggcagtcaatcaatatagattgatccgaaatctgattcaaatccaatatagcacccatggttacataagaaatgtattgaatcgattcaattgcaacttcgaatatggaattcaaaggtatcaaataggaaatgatactctgaatcatcgaactataatgaaatacacgatcaaccaacatttatccaatttgaaaaagagtcagaagaaatggttcgatcctcttatttttatttctcgaacggagagatccatgaatcgggatcctaatgcatatagatacaaatggtccaatgggagcaagaatttccaggaacatttggactatttcatttctgagcagaatagccgttttcaagtagtgttcgatcgattccatattaatcaatattcgattgattggtctgaagttatcgacaaaaaagatttgtctaagtcactttgtttctttttgtccaagttacttctttttttgcccaagtttcttctctttttgtctaactcacttccttctttttttctttgtgagttttgggggtatccccattcataggtccgagatccacatctatgaattgaaaggtccgaataatccactctgtaatcagttattagaatcaataggtcttcaaatctttcatttgaaaaaatggaaacccttattattggatgaccaagatacttcccaaaaatcgaaattcttgatcaatggaggaacaatatcaccatttttgttcaataagataccaaagtggatgattgactcattccatactagaaagaatcgcaggaaatcttttgataacacagattcctatttctcaatgatatcccacgatccagacaattggctgaatcccgtgaaaccatttcatagaagttcacggacgcgtgggttttataaagcaaatcgacttcgagtcctgaataatcaatatcacttctgcttctattgtaacaaaagattccctttttatgtggaaaaggcctgtatcaataattatgattttacgtatggacaattcctcaatatcttgttcattcgcaacaaaatctttcctttttgcgatggtcaaaaaaaacatgcttttttgaagagagatactatttcaccaatcgagtcacaggtatctaacatattgatacctaacgattttccacaaagtggcgacgaagggtataacttgtacaaatctttccattttccaattcgatacgatctattcgttcgtggagctatttactcgatcgcagacatttctggaacacctctaacagagggacaaatagtccattttgaaaaaacttattgtcaacctctttcagatatgaatatacctgattcagaagggaagaacttgcatcagtatctcaatttcaattcaaacatgggtttgattcacactccatgttctgagaaatatttaccatccgaaaaaaggaaaaaacggagtccttgtctaaaaaaatgccttgagaaagggcagatgtatagaacctttcaacaagatagtgttttttcaactctctcaaaatggaatctattccaaacatatataccatggttccttacctcgacagggtacaaatatctaaatttcatatttttagatactttttcagacctattgccgatactaagtagcagccaaaaatttgtatccatttttcatgatattatgcatgggtcagatatattatggcgaattcgtcagattccattgtgtcttccacaatggaatctgataagtgagatatggaatctgataagtgagattccgggtaattgtttacataatcttcttctgtccgaagaaattattcatcgaaataatgagttactattaatatcgacacatctgagatcgctaaatgttcaggagttcttctattcaatccttttccttctccttgttgctggatatctcgttcgtacacatcttctctttgtttctcgagtctatagtgagttacagacagagttcgaaaaggtaaaatctttgatgattccatcatacatgattgagttgcgaaaacttctggataggtatcctacatctgaactgaattctttctggttaaagaatctctttctagttgctctggaacaattaggagattctctagaagaaatacggagttttgcttttggtggcaacatgctatggggtggtggtcccacttatggggtcaaatcaatacgttctaagaagaaatatttgaatctcatcgatctcataagtattataccaaatcccatcaatcgaatcgctttttcgagaaatacgagacatctaagtcatccaagtaaaacaatctattccttgataagaaaaataaaaaacgtgaatggtgattggattgatgataaaatagaatcctgggtcttgaacagtaattcgattgatgataaagaaagagattccttggttcagttttctacctt

SEQ ID NO: 11774 - DNA, 142 bp, Glycine max
  unsure (1)..(142): unsure at all n locations
  Clone ID: PAT_MRT3847_11063C.1
gcaagcnagctaggttgaaaatagtntngtntnntagtaagtgaggtgangtgccaaaatggtgaagataactcntggtanctcgatgactctnttggtgttgcctctcttaaggctantggcagagttccatgcaactctg

SEQ ID NO: 11775 - DNA, 132 bp, Glycine max
  unsure (1)..(132): unsure at all n locations
  Clone ID: PAT_MRT3847_110640C.1
taaaattcttccaccaagtaaagggctgtcntgtgatgcttctttactcccactaaggtctctcatctagtaggagcataagatctcgggcttcggtataggagcatggcgtagccgagtttaccacagagg

SEQ ID NO: 11776 - DNA, 213 bp, Glycine max
  Clone ID: PAT_MRT3847_110641C.1
acctctcgtgcagaggattgctggctaccagagcagccacactccttcagggacatgtgaaactgttagtagcactcgaaacgcttcatgcacacacatccctgatcaatcttatgacctgtcacactcatgatagaaacctggcacattcatactgtcaataaccactacccccataccaactccagtccttcaaattccagcccatcaaag

SEQ ID NO: 11777 - DNA, 276 bp, Glycine max
  Clone ID: PAT_MRT3847_110642C.1
ttgtactgaaaccctgattaattttggggtgtagaatatgcactcctcttacacttccattttctcttagtcctcaatacctaataataattcctttcatctgaaaaccatcctaccttactgctttactatcctactcatccatttctccaaggctactcccaaaattgactaaactaccgtacaaactattcgcaaatactttagaaaacacttccaccttctatacaaacatctatttactacattatcttctgcatgatcaccttttctaat

SEQ ID NO: 11778 - DNA, 395 bp, Glycine max
  Clone ID: PAT_MRT3847_110643C.1
gcggctgggagaagacaaccgacgggggaactgtgaagtgtgttagggcactgacctatctcgggagagatttgaagtgtaaaccttcaaattaatcaaaccattttaatttgcctatagattctgaggcactggtgattggtcgttacgcggacttcttgagttggggatgttgctgatgttgtgccttggtaacgcttcatcggatccactgatacaaaaacaaatactggacgcggaataagaactgcagcctgccgatgacgagccacttatcgcgagagacgcgaacacaaggctaatgcatgatatggattgtggtgggttgtgcaagacgaggcgcagtgcacattcgagaggcaacttgtgcactagggcgtgtggcacatgctgtg

SEQ ID NO: 11779 - DNA, 586 bp, Glycine max
  Clone ID: PAT_MRT3847_110644C.1
cacagattaagcaaacctgtttgatgagaattcgcgcgaaattatcacaaccccgtgctacctattacagtggactcaattttgaagatagctgttcaatttgattgtgggggtgcgcacaggggcgctctttttttcctttttaaataaatatctttacgcttttggctctttgaatgggcttgactaatgggattcttgggttgcctccaataatcttatcttgggcttcattgccttagttgtttggcctttccttaacatcccttgtcttttggtcaaggtcttctttttcatagaaaaaggtgccttaacgggtaaggtggttattacagacatatttttctgtacaagacaaattggttctgtgctgcataccacaaatgcggatgaacacttgttaggcctgtttgggtacaaatcatacgcatcctggacatggatggtgctgaggaggacatgaataggggttgcgatgatcaaacctatgacagcgcctgtgatggtcaacccagacgggtgctggattgtgaggtcaatatgggcctcctttttcttcttgaatggggggcgcgaaggagggttg

SEQ ID NO: 11780 - DNA, 317 bp, Glycine max
  unsure (1)..(317): unsure at all n locations
  Clone ID: PAT_MRT3847_110645C.1
cccacgcgttcaaccacgcttacagccacgcgtttgnataatttatcaatccaattattnctggtgcttcttttatggctgcgtgggctggccctaagacttgcttctattggacctggggttggtcaaagcactgcttgtctgaaacattggctaatggttcacccaccacatcaggctcctcgaaaaatacgacaagctacattgcgcaaatggcttttgacataagctatcacaatactttggctgggtgtctcattacacactgacatttcctaatcctttacattactcctaaagctatagaaattcatatc

SEQ ID NO: 11781 - DNA, 738 bp, Glycine max
  Clone ID: PAT_MRT3847_110646C.1
aatccgctctttttcgcagtttcttcgtttctctctctctctctctcttcagaaaagcagaaagaaataacccattcaaaaaaagaaagagcaatcaattccaatcacaatggcaaatcaactcaccgatgaacagatctctgagttcaaggaagccttcagtttgttcgataaggatggagatggttgcatcacaacaaaggagcttgggaccgttatgcgttcgttgggtcagaacccaacagaggctgagctccaagacatgatcaacgaagtagatgctgatggcaatggcaccattgacttccccgagttcttgaacctcatggccagaaagatgaaggacactgattctgaggaggagctgaaggaggcgttcagagtgtttgacaaggaccagaatgggttcatttctgctgctgaactccgccatgtgatgaccaacctcggggagaagcacactgatgaagaggttgatgagatgattcgagaggctgatgttgatggcgacggccaaataaactacgaggagtttgttaaggtcatgatggccaagtgatggcacaccatctccactaaattcttaattgatgggaaaaaaatgacaatgttgacacttggtaaactacacttagtccttgcctaatgtcactattggcttcttactaaatttttatttgattgctttgaatcaatcttatagtggaaagctctgctgctagtggtattgtgttggaa

SEQ ID NO: 11782 - DNA, 814 bp, Glycine max
  Clone ID: PAT_MRT3847_110647C.1
tcattatttatgggttcaaagaggatcaacctcaactattatcctgtttgcccaaatcatgatctaacggtagcaatagggcgacactctgatgtctcaacactaactgttctccttcaagatgaaactggtggcctctacgtccgagcaccgaaccaccacggctggattcatgtaccaccggtctccggtgctatagtgatcaatataggtgatgcactccaagtaatgagcaatgggagatacaagagtattgagcatcgtgtgtctgccaacggaagcaagagtagggtttcaatgcctatttttgtaaaccctagaccctcagatgttattggccctttgcctcaagtgcttgctagtggtgagaaggccatgtataaaaatgtgttgtattcggattatgtgaagcatttcttcaggaaagctcatgatggaaagttgacaattgactatgccaagatatgctgagcttaattcctttgggaggtactacagcaatgcagatatttgaagagatttaatcatgatatgatgcaaattatttattcaaacttttcagcattatataacttacgttgaagaatattatttagatgcatgtgtgttcaaaataaagtggctttgagggttagttttatattattaggatggtgaaaatcccacaagtcaaaaagttccgtaatctgtttttcttttttctttttaatcatttcaatgtactttacaactgttatacacatggacacattgttgtaactagaattgatattttttcttttataagatattataagagatactagttagtacc

SEQ ID NO: 11783 - DNA, 889 bp, Glycine max
  Clone ID: PAT_MRT3847_110648C.1
gatggtaaagaagttggtggcatcgatataagaaaggcaagtttggtcggaataagattcaaaacgctgtttttttgcagtttcttcgattctctctttctctttcttcagaaaaattaaacccattcaaagaaagaaagaaagagcgatcatttccaatcacaatggcagatcaactcaccgatgaacagatctcggagttcaaggaagccttcagtttgttcgataaggatggcgatggttgcatcacaacaaaggagcttgggactgttatgcgttcgttgggtcagaatccaacagaggctgagctccaagacatgatcaatgaagtagatgctgatgggaatggcaccattgacttccctgagttcttgaacctcatggctagaaagatgaaggacactgattctgaggaggagctgaaagaggcgttccgagtgtttgacaaggaccagaatgggttcatttctgctgctgagctccgccatgtgatgaccaaccttggggagaagctcactgatgaagaggttgatgagatgattcgagaggctgatgtcgatggcgacggccaaataaactacgaggagtttgttaaggtcatgatggccaagtgatggtagtacaccatctccactaaattctgaactgatggaaaaaaatgacaaggttgaacttgtgatatagtacacctagtccttgcctaatgtcattactgtcttatttctagatttttatttgatgtttttgaattcaatctaaacgacatttagtggaaagctctgctgctaatggtaattgtggtggaatggtgtctttctagtttctgttgtgacttgtgtctcaagtgcttgatgtttattcaaaaaaaaaaaaaaaaagggcccctagg

SEQ ID NO: 11784 - DNA, 1121 bp, Glycine max
  unsure (1)..(1121): unsure at all n locations
  Clone ID: PAT_MRT3847_110649C.1
cccacgcgtccgatcatgcaccctttcaaatatttggcttgggagcggcaaccttaggcactcgatcatcaatattaaagctaaccactcgtttgcattgggtagtatatatcattctaagaagtaagaatctcagcaacaccaattagacaataaacagcgacgatgaaagcaatgacagcaacgacaacgtttgatgtctctgccgcttgcttccgtgcccctcctccttcgtgctcaatgaatccatgccacaccagtttttcagttataaactccctgaatcctcacaagggacgacggataagcgttgctgttccacccaagtttccaaacttccggagggaagcatctctgcaggggaatttggaggctattagagtcccaacttcggtgcctgtgcgtgtagcatacgagcttcttctagctggtcatcgatatttggatgtaaggaccccggaagagttcgatgctggacacgctcctggcgcaattaacataccttatatgttcagagttggatcagggatgacaaagaacagcaactttattagagaggtgtcttcacagtttaggaaagatgatgaaattattgtcgggtgtgagcttggtaaaagatctatgatggccgcaagtgacttgctagctgctgggttcactggactcacagacatggctggtggttatgctgcatggacacaaaatggacttccaacagagctatgaagtgtttctgttggaactgtagctgtaaatagaataagttttgggaggagtccaatgcatggaaatgcagaaacacttcaccaagacagtgacaatctgacactgggaaaacaaaaatctataaatggaaaattaaatgtatttgtcgatatcaacaataaataaaatgttaatatatatccaactttgcaaagaaactctatttcctggctgaataattgttgttaatgatgccttcccttccttccaattcgaacgatgatatattattaatgaaaattgcctagccaaaacttaattcaaactctttttcttggctaagaaaaaaaaaaaaaaaaaaaaaaaaaannnnnnnnnnnnnnnccnnnnnnnnnnnnnnnttnnnaaataaaaaa

SEQ ID NO: 11785 - DNA, 875 bp, Glycine max
  Clone ID: PAT_MRT3847_11064C.1
ggaaaaggcgaaacagagacggcgtagtgatgctatgttatggcttgggtgtttgagttgcggagtcgttccctctgcacgtcctcctcctcgaaatggagggtgaagcaggtgacaacctccaacttccaagagtccctgcaagagataaagacgcacatctccaactccgactttgtcgccatttccatgggaaaaacgggctctccctccgcgccgtcgtggctccgccctctacccttcgacaccgcccagactgcctactccaaggcccgccgcgccgcccagagattccagctcctccacttcgccgtctgccccttctccgtctcccgctccgacaaactcctcgctcacccgtataatttcatgttgtttccaagagatgaaatgaagatggggatgcccacttacagcttttcgtgccagacttcgctacttgcctccatggctcgccaggggtttgatttcaatgcttgcgtctacaatggcatatcatatctatccagagcacaagagtcagcagctagaattcgtcttgggactgctctcccttctcttcgtgtgatgaaatcttcttcaccctctactgttgctgatacagtgtttgttgagaggattagatcaaaggttaaatattggagagagtcatgtaaaagctccgacacaaacaaaagcagagatgaagaacttgtcaactcccttaggaatattgtcctgggcaatgaacagttcagatcaagaccttgcattaactgtagatgtttgcagtgaacgtcaagtgcaacttattctggagatggtgttagactactcagatgatcttcttcctttgccaatccctactaagagtgggaccattcatgcagtacgaa

SEQ ID NO: 11786 - DNA, 414 bp, Glycine max
  Clone ID: PAT_MRT3847_110650C.1
acccagcgccgaagcgcagtgtagacgcactttgctccgtgaactccgtaaataactcgcatcgacacacccgcgcgactcccggcggcggtgagttttcatccagtgatgtcaagtctagtcactcgactgcatgcatgcgtggcatgacccactgactgacgttccgtgtgccgtcacaacatgcgcgtacatctatggtccctctcgcgggaccatatgttttcatctcgtaggaggtagtccatagacagaacagatagaacatgattgacccgccatccgtctcgcgtgggctgaacacagctgaacctgtgcatgtcacgcctgtacggggaccgaaaagaaagaacttggtcgcttccgtgtcggcataaactgtgaaagagggacctatgaatgactacgagggcc

SEQ ID NO: 11787 - DNA, 2089 bp, Glycine max
  Clone ID: PAT_MRT3847_110651C.1
ctcgagccggcttgcgtcctctctctcacaggctgcgacacagtcacacacaaaatatcgaaagagaaggtttcagcttcctgaccttgacttttctcctctcttcctcttccaccatgtccatcgcacgatccgcgttcacattaaaccctctcatcacacactaaccctctcgacatcttctcttttctttattcacaaaacttcatcccctttctcacaattaattccgcgccaaataacctaatcctaaaccgaaatcttatatcatcacgaatgcttttgcttttccagtatttgcgatcggtataatcaggggacgccgtacggaaaaaggaacacgcacggtaggtgaagcgaaagcgaacgtcaccagttagttagttatcgtttcggcgagatggaatcggaagcgataccagcgtcttcggtaagggtggcgctgtcacgtggttcgggatgagtttcccattccgttctccgctatctctcgtcatggattactgcgcgcgcgaggattccgcggagcctgtgaatatcattcttctgcggagcctttgattatcgttccctgcccacagccgcgttgacaggcgcatgcctgaatcggacgctgcttcggcctctgattccgatgagaatgcgtgcaacggcgctgctgaggaggttgcgatacgcataattggggtcggcgagcaggagagcggttcgtcgccctcatcgtcgaggggccggggcggggagctgggcggtgaggaggcggtggttgggaggagcgggatgctgtcgtctcgccggcgaatggcggaggagagggtgccgttggtgtctttggatgatgggattgttggcgctagggattcttcttcttcatcatcgtcctctacttaccagaggtatgatattcagcaggttgcgaagtggattgagcagattctaccgttttctctcttgttgctgattgttttcatccgccagcatttgcaaggtttctttgtcacaatttgtatatcagctgtgatgttcaagtcaaatgaaattgttaagaagcagactgccctgaagggagatcggaaagtctctgttcttctcggtatctcttttgcctttatgctgcatgtgataagcatttactggtggtatcgaaatgatgatcttttatacccactggccatgcttccaccaaaaacaccgccacctttctggcatacaatattcatcatttttggtgaatgatacattgggtgcggcaagcaagcatggctttcaaatggttggttgcttatttactacaaaaatggaagaggccataacttccgtcggcagggtcaaatgttaactctggtcgagtatactctgctgctgtatcgtgccttgttgccaacaccagtttggtaccgatttttcttgaacaaggattatggaagtctcttttcctcactgaccacaggattgtatctaactttcaagctaacatcagtagttgagaaggtccagtgcttcgtttctgccttaaaagcattatcaaaaaaggaagttcattatggggttcatgccacaacggaacaggtgaatgctgctggtgacatgtgtgctatatgccaggagaagatgcaggctcccatattgttgagctgtaaacacatgttctgtgaggagtgtgtatctgaatggtttgagagagaacgaacttgtccattatgcagggcattggtaaaaccagctgatctgcggaccttcggagatggatcaacaagtctattttttcagttgttttaagttcattttctttgacttgttgggtcatgtttttgagccaaaatcttcctggaaaatgtcaccatctatggtttggtaaaattttccattaatgaaattgagattgaaaaaagaataaagagatatttatatgtatggttaaagtatataagttcattctagagtaatgaggtcagatgtacaaagggatatagatagctggcattatactgaaatccgcgtggatctcttaacctgatattcgtcacgtcacacaatggaaacttttgtttataatgttacatttcaaattaaaaaccctcttcctcca

SEQ ID NO: 11788 - DNA, 3251 bp, Glycine max
  Clone ID: PAT_MRT3847_110652C.1
gccgtccgttctccgcccgccactctctccggctctgacctccaccaccaatcccagcagaatgtgccctcctccgtcccctcctcgtcgtttgcttgtgcacagtgtgccaaacactttcccagccaatccgccctcttccaacaccaattgatcgctcacatcggcggcaccgatgcgccccagcagcagcaacagtcgaccgccagcaacgacactcagtcgactgttaacgcattggcaatgttagcagctgcgggaattaacgggggaagtgggacgacgcaacagcaacagcagcaattatttggacagttgctcggctccaaccctttctcacaaggcacaacgccttcgctgatgttcaacaattcgtccgcttttggcggaattaatccgacagagtttgacggtgccgcaatgttggcgaaactgagcgcagagttcgccgcggttgcccaggcacaacacggtcaaagcggcgctatttcagccacaacggtacaatcgacgggagggccgtcgacgcagcaaaacggagcaatgggcaggggacatacgccggcgccgtccaacaaaccgccgcctcagaaacgacaatattcctccaccagcaaaaacttttgcgacttgtgcaacaaagaggtgtgcaacaagtacttcctgaggacgcacatgctgaaaatgcacaacataatcatagacgagaacaaacagctgatagcgaacattgacacggtggacaaagaacggaagggcgaggtgaagttcaggtgtgacatttgccataccagcatgaacacgcgagaggagctgaagttgcacaagagggagtcgcatggaatgcacgcgggtggcggcgggtcgcagtcggccccactcggcggagcccgcggagtgccaaaagcgacgtcgtcgtccgcctcgcaaccgacggcagtgtccatggataccgcagagacaaaccagcaacaacagcagaaaagggtcgctctgccgtcgttcgcgccggcggcttcgaatttcaatgccattgaacaccaaacgcagcagcaacagcaacaatcgacgcagcggagaacgacgagcgaagggacggaggcaaatgatgagaataatcagcccctgggggtacactcgccgcagcagcagcagacgagggaagcggcgggggcccagcagccgtcgctggcgggggccaacccaatgaaacagctgctctctatcatcggaggggacgaggcgctgccgccgtcgctcgtcgggggcgcgcgtctgctcagaacgacgggggaaaggaacgacttcaaaaaggacactgaagaagaacatttgggccacagaatcgccgacgccaataataacgcgacaaactgtcgattttgcggtctttgtctggaggaagaaggccaactgcaactgcaccaactgatggaacaccccaacgagtacatggcggaactgcagccaacgatggacttaccgcactcggcgagtaccgaggacaaactgatcaatcaggtggccctgcaaatggcagaggctaacagtcacaaccaccaccatcatcatcatcaacacacatcagcaccaacggcaatttccgcaactacggaagacttcggtcgcgtcctccggcgcttcgtcctcttcggccgcctctttcggcgaagtcggcacggcccatccgcctcagcaacagaaaacgaagaaaggcactctgtcgcgaggcgaaaatgccgacggagacgacgaaaacggaggaggagggggaaggcaccaatgcccacagtgcaaaagaatttacaaaagtgcgcaaagattggaggggcaccagcgcatggtgcaccacaattttgtcgccaaaatgtcaccggcgaagcgatcgatcatttcgccgaaaaagattgccaaactgatgagttcgttttcatgtcacaaatgcaggcgacggttcgcaagtcgcggagaatgcgacgaacacgtcctttcgcacatccgctcggggagattgaagcaagaggaagcggaagacgaacaaccgcaggaagaggaggaggaaggaggggagagagcaccgcaagtgaagaggccgaagatggaggaggagggcgaagaggacgaagtggcggaacaacaccatcgggaagacggagtcagagaagtgggggaaaagacgaacatcgccggaggagtggaggaagaagtaagacagcagcgtgcacagagacgaacaaagggcggcacggggggaggcgaaaagcacagccatacgagcggttcgactagccccgtgtcggttcaggccggaagttctggcggtgtactgcccgagggctttgcccaccctttgttggaccacacgaagcctttcgtcctccaatccttcactctgcggcccgtttctcctcattcgaactgtcaacttcccgatgaactcgtcgcttatttgcctgtccgttccacgcttggccaacccatccgagtgaccttcgagctcaatccgactcctcacgtggaccagcaggtgcaacacctttgatgcagccgaggaaccgaccgccatttgcctctcaattcttcgtttccattggcatcgtcgggcagtgccataaaaatacggatgccgttgtgtttgatagtccttaaattggccgtctgttttatcagtctcctttcccccatttattatggtaattgttgttgttgttttgctctgttgggacttcgttccgttcatttttgccccttttattcatttgttcattcttttgactctcttctgatgagtttcattctctcgctttcttcgacagttctttcatgctctgatttgtttcaattccaccttttttatcctttggtttcctttgcctcttaaaattattttttattattatacataaatattattatatttttctccatatccttccatcgattcctccccctccccctaatattgcacattcgtcgcgcaatctcaaggtggtcaccgaccgtctttttgacggttctttgccgcccttcccctcggatttctttcattaaatttcgtcaatttgccatttccctcccccaattttctccatgcgtattatttccatttttttcgttgttcgttctcatttaatcaatttgtgaggccgatttacccgcacttttcattcacaatttaaagttgaaagaatatttttgttcattctctgttcaaaatttaattcaaatgttgcattaaggacaataaactg

SEQ ID NO: 11789 - DNA, 207 bp, Glycine max
  Clone ID: PAT_MRT3847_110653C.1
atctcacgcaagaataaagcctgttgctgatacaaccaattgggagaccttagatcatccggcatgcggaagctcgtgcgaatcctcctattgagtttgctactacctacgcccatctttttctgttacccttctttactctaagatagtcttcctatgtctatacgtacatgctcctgtgtattcaactttgtcaatatgtcttgc

SEQ ID NO: 11790 - DNA, 243 bp, Glycine max
  Clone ID: PAT_MRT3847_110654C.1
attcgctagcccgtcaaatctgttagcaatggagatcgcattaccttttttaaccgaatcagtgtcatttatcatttggcaatttttgctcgaaacaatcatggtgagtgttgttcacataaacgcaaccctaataattattctcgaagattttcgtaacttgacttgtaactacctcttccaatattacgacctacgttttttttttatttacaaaatttttggtttctgtttatagttatt

SEQ ID NO: 11791 - DNA, 375 bp, Glycine max
  Clone ID: PAT_MRT3847_110655C.1
cccacgcgttcgcccacgcgtccggtggatttagttttggaggaagtggcaatgttaaatgttgggtgtggtgatgtgagaaaaacacagggaaaagaagtggaattcgtccctccagctccaagggataatcatgcacacatgtacgagcaaaggagttagttctcctttcatggcttcaatagcttcactcttgtgttttctctattatttaccatttctgatgacctggtttgaacatatatagtttctcgctttgagaataaattgtctttattattttttttttttcggggttgttggatggtgattggatttatgtatttttcatacacttagttacatctgggcaaaagatgaatatagtgaggagtg

SEQ ID NO: 11792 - DNA, 474 bp, Glycine max
  Clone ID: PAT_MRT3847_110656C.1
gggattaaaacctaacgggccaggccttacttagcaacatacaaaatgcagttttctcatgagtcattagatgagaattggatatttttacactttaaccacaattctccattaattaattagtactaccaatctaccattaaggaattaaaaaagagaaacagtttttatactcattcaatcgcatataattaactatacttttacaataatcagcataaaattcatactaataatgatttttttatcagttgagagtataatttttgtacaatattaaccttgtatagctattaaacttgttaaaaaatggttgttaacacatagagctagcaatagcacatgtttgtttcctacttagacggatgaatgggtcccataggaagaaaaaggaacatccaaagtcgcctctggatcccactagaatgtgtcaaaggggtctaattctgctataccctacctgtgggcaatcac

SEQ ID NO: 11793 - DNA, 170 bp, Glycine max
  Clone ID: PAT_MRT3847_110657C.1
ttttgtgtttttttttttttgcgaccaaaactaaactaaacttcttaaaccactggtatcaaacagggcctccgaatcattaattctccacattaaacataggggcaaaagaatacattgcttcaattgggtggggatcattaaggttcgattgggaggttggcaaatta

SEQ ID NO: 11794 - DNA, 364 bp, Glycine max
  Clone ID: PAT_MRT3847_110658C.1
gcctctcgttcctccagttggacctgcagaaagaccagcggagtatttgccagaaaactcgggtgaccctcgtgctgccatgtctggaaccttggatggtgatggaagatggctgggcagaatctgtgacaaagacacatttgaggagacactagaggcatgggcaacaacagtgggctaccaggaaggggcaaatgctctggaggaaatccctggctggaatagcacgctgcagaaacacagacagtaccgcatataatacctgctgatgctggtcaggtggagtctgacgagagggccgttcctgaagccgtgcatgtgtgggtacctgataccgcaaccaagacagcccatgcaatcttgg

SEQ ID NO: 11795 - DNA, 429 bp, Glycine max
  Clone ID: PAT_MRT3847_110659C.1
tcgtaccgcctcacgtcgtcgcggttatttggttctccttcctttggacgaatcgatcactgatgttcgatggagcaaggcgagaagtaagaatgccagactccagtaactgcgaagtagggttgttcgatataggcatcacatggtgctcgggagacgaggcggggtcccaattagcaatttgtgcggtaaaacgacgcgagggagcttttgtgtgtcggcttgttgatatgacactcgctctctcaaaagtcctttacgcccgtagagggggaagggctttcccgtccctggtgataacaaacatccactcggtttttcgcgcttttacttgcctcccatctttggatctcgatgcttctaagttccttagggataagaaattgcgatcgcatgtgtgtaacgaaaatttcaatggcttgttgcaag

SEQ ID NO: 11796 - DNA, 432 bp, Glycine max
  Clone ID: PAT_MRT3847_11065C.1
gaaaaaggccggactcctaacatgacacaccaaccgcactgattatgataagaaaatgacaacacgccataccaaggtcttccagctcatgcaacaatacagcacaagaacacggcccaggcacccgaaaaagaaaaagacacgccacaaccagcctcacacgtgactgggccagaacacagcgacattgaagactgacaagaaccatatgactctactagccagcctagacaccatctataacaagaatgggacagcagccacaagcacgagtgacacaacgaacgaatgtgcagcaaatcaaactcagcgaaggcgtgccaccacaacaacctccgcacaatgatgtgcaagaagacccctggaaagtgcagcaacaactcaaaaggacaagggaacggagccacacgaaagagcaaaacacagatgcgc

SEQ ID NO: 11797 - DNA, 561 bp, Glycine max
  unsure (1)..(561): unsure at all n locations
  Clone ID: PAT_MRT3847_110660C.1
ggctcgagcagccacggggtgcctaaaacagcaaaaggacactaaaaacatgtatgccactgggatggtgaagatgatttgctgtgagacagagatttcatctgggaagaatgtcaagtgcttgggtacaagaagcagtgaaaatggttgctttgtgctttggcagatgcaacctggtatgtggtctcttgaattggtggttggtgaccacaaggtggttgcaggcagcaatggcaaaaccgtgtggcggcacacaccatggcttggcacacatgcagccaaaggcccccaaagaccccttcgtcgcctcattcagggcttggatccaaagaccacagcgagtttattcaccaacgcgcaatgcttgggcgagaatcgaattgggaccgtggattgattcgatctaaaggtctcgattgatcgtgcaactgaggtagtgggtctggtttgtttgagtgcaatgatagagcacattctatacggttacttttgttaaaactgtgcccagttcatatacctagaagactctcaccttacatgggtcccaacacangacaatga

SEQ ID NO: 11798 - DNA, 381 bp, Glycine max
  unsure (1)..(381): unsure at all n locations
  Clone ID: PAT_MRT3847_110661C.1
nagacaataaagagaagaagaataagaacctgagtaactacattaacaaggatcatttaaaaaaaggctcaaagaagtaaaggctnaatnnagtgggtnnnaatacttanaatggcttgattgtgagaagttagggattgtaatgtatgaatgtgttggaagaatatggaatttaagagattagaattgatagaggttggtttagtgttggaagaataagaaagagtgttaatttgtgttatagggaaggagggtattaagaagaattagaaaagtggattaaggaatatggatttgaggaaaggantaatgctagaagggttcttattaggggttgggctgataaattgttaatattagcatattgtgatattggagggt

SEQ ID NO: 11799 - DNA, 289 bp, Glycine max
  unsure (1)..(289): unsure at all n locations
  Clone ID: PAT_MRT3847_110662C.1
gaagaaaataaggacagatgatatttacatgtacaatacaaatcatatgaccatgagagatggatcaagcagtttgggcaattttaatgaatcaggaaaagctaacatgggaacagaaaggattcatgttttttcaggtactcgtaagcattacagcacaaaagagttgtcgttgtttgaattacgaaatatgttgatttataaggctcagactgaaattttcaagaaacttcaagagtggagatcaatggctgaagctaagattacccaanaaaaaaaaaaaataaaa

SEQ ID NO: 11800 - DNA, 1666 bp, Glycine max
  Clone ID: PAT_MRT3847_110663C.1
cccttgcgtccgcccacgcgtccgtgcctttcttttctaattttttcccgccggttgctagtgttttcctacttctgtcacacatacagaggcaaaaaaattgaatcgtgaccaggatcctgcatcaacaaaggctaggcttggttttaagactttcatctttaggtggtgtgtgggcattgggcaagtttattttcatagatttgcataagtaccagttttagaacggttataattttcttcattcgagcattttcacccactcagccttttctcgcctcaacgctaagtagaaaactattggtgagttgagttcgctcctcagaggtaactaactaatttcgagatttcttccttcaatcccaatgcccttgatcattagtttcatccattgcaaaaatttcattctaatcacctataaatagctatatatgcaagccctaagtaacttagaagaactcacgctgcttatgtctgttgttcttttagggtcaatttggatgtttattcttgattttattgatagtattcaccttgtttgttgttatgtttgatttagaccacaaactctttggtgtttgggtggcaaaatcagagagagaatagcaataaccggtttgctaatggtgagcagagcacttgttttcttttccacttaggataacagtatttgggatttgtacctgctgaggaaaacggaagtgatgatattgagaaacctggaggcatttgtgcctattattaaagcaggatggaggttttctaagatctactgttttatacacgttacccaaacctatttgatcgcccctgctgtgacctatggtcctagcatgcttcctactatcgatttgaaaacaggtgtgttcttaatggaaaagatctcaccccggtttggtaaagttacttgtggagatattgtagtcttgcgcaatcctcaacaccctaggcactttatgaccaaacgtgtggttggattggagggtgatagcgttacatacatttccaatcctgagaccaatgaatatgagggtgatagttttacacacatttcctctcctgataacggtgataagtctaagacgattgtggtgccaaagggtgccgtttgggttgagggagataacaagtataacagcaatgattcaagaaaatttggtcctgttccttatgaccttattgatggcaagatgttctggaggataacgccacttaaaaaatttggacctttctggaataaatgatctgaagcaaagcattctgtcattgcatactacaatcttttgcagcatggctttgtcaaattatcattttttgttatcagcgcagttttgtttttttttttttttttttgacgaagcagtttatcttttatgcatgaagtaaaagacaagtagtagatgatcataagaatctactcagatattagaaatggaacatagaattttctgttgtttgagcacatccctaatactagtatttcaattgttatttttgggatgactggtatctggcatccttgcatcttcacattaagaattggcttgatattcgatagcctttggtctagagaattttgacaataattaattttttccattgctgatatatgatatgctggtttgttggttggaaaaaaaaaatcacttaaactaaaggggggggc

SEQ ID NO: 11801 - DNA, 835 bp, Glycine max
  Clone ID: PAT_MRT3847_110664C.1
ttatgacagccttccatgttattttcttcggattcatcataatcgctggttattgcaatggaagtgccaaaaacttggtttctccaaaaggactagctccttttggtgctagaggtgttcttgatggagcagcaatagtctacttcagttatataggctatgactcagcttcaaccatggctgaggaggttaaagacccctttaagagcctacccattggaatcgtgggttcagttctcataaccactttgctttattgcctaatggctctgtctttgtgcatgatggttccttacaacaagatatcagagaaagcatcattttcaatagcttttctgaaaattggttggaattgggcaagcaaccttgttggggcaggtgcaagtttgggaatagtggcttctctcttggttgccatgttaggccaagcaagatacctttgtgttataggaagggcacggcttgtgccatcttggttagccaaagtgcatccttcaaccggcacaccattgaatgccacggtctttttgggactttgcacagcaacaattacactattcaccgagcttgacattataattgagttgattagcatcggcacactgttggtgttctacatggtagccaacgctcttatataccgtcgatatgtaatcactagccatgccccacctacgcacactctcgttttcctctttctcctttccctaagtgcactatgcttctcccttgcgtggaagttcaagcagcaatggtgggttctcctactttttggcgggtttatgatcgccatcactgccttctttcaacacgtggtacttactacgactactac

SEQ ID NO: 11802 - DNA, 810 bp, Glycine max
  Clone ID: PAT_MRT3847_110665C.1
ccggtttggtaaagttacttgtggagatattgtagtcttgcgcaatcctcaacaccctaggcactttatgaccaaacgtgtggttggattggagggtgatagcgttacatacatttccaatcctgagacctatgaatatgagggtgatagttttacacacatttcctctcctgataacggtgataagtttaagacgattgtggtgccaaagggtgccgtttgggttgagggagataacaagtataacagcaatgattcaagaaaatttggtcctgttccttatgaccttattgatggcaagatgttttggaggataacgccccttaaaaaatttggacctttttggaataaatgatttgaagcaaagaattctgtcatggaagctacaatcttttgcagcatggctttgtatgtttaattttgaaaggcaaaaccctacctatctgtagttaattccctagactggtgcactttgctcaccaaagattcaaattgccccattttgttataagggcagttttgtttttttttttttttttttgacgaagcagtttatcttttatgcatgaagtaaatgacaagtagtagatgatcataagaatctactcagatattagaaatggaacatagaattttctgttgtttgagcacatccttaatatatctagtatggttgttcaattggctttgatggaagaatttatgtaatcctattgaaaacctatggccttttgaagtagggtcttggactataaaggcccattgcattgctgatatatgaaatgctggtttgatggttggaccctttcc

SEQ ID NO: 11803 - DNA, 325 bp, Glycine max
  Clone ID: PAT_MRT3847_110666C.1
gtcacttccgcctgcttttgttgctgttggtgccaatgacaataatgttcagcgtcattctgctgataattcttctcaaaggcaacccaaagctgacagttgtccgcccgcaattccttcttccaataacccaaatgggcggcctccgaagaaatgaatgaattaaaaatttgcctgcagcattatgttttgaaatgtaaattttttaaaattttcttttcatcgaatgtcatataacacacttacacatcatattggtattcttctcgttttgttgttttgtttttaaaaaatttttatgtacatgcccaaaaattggtgttct

SEQ ID NO: 11804 - DNA, 691 bp, Glycine max
  Clone ID: PAT_MRT3847_110667C.1
cgacaccgctcaatgtttcctttgtctccttcttacatttacttgattacatcccctccgttcatggaccaatatgctcaagcttcttcttccatcctcatcctctaaactcatctccagacacattttctcacaactatcacgccccaccaccaccatgtccataaatctacgcacccacgccttcgcgggtaacccgctccgatcccccaaccgggtcgacccgttttcgcccgcctccgcgctcgagaccctcacgacccgaatcctcgacgccgcgcacgtgtcctcaccgtccgtggattttaaggtcttgccttttagaaatgggagggtgctggcttcttcggagagtggtgacacgtggcgcctcgggtggatcgcgctggaggaagtgaagggtctattgggtgcggatttgagcgcggactcgttcgtttatttggggtcagactcggactcagactcggtggtgtactgggcgatcgacgtgtcgagggagagtgggttggtgacggaattcagtggcgtgaggttgtgcttcgtggagctcaggacgctcatggtcgctaccgattgggtggatttgaagaccatggggaacctcgccatcgccggtcatgcaattctgcttttctatctactgggtttggccaggccagggcacttcttgaatggcataaaatatcac

SEQ ID NO: 11805 - DNA, 304 bp, Glycine max
  Clone ID: PAT_MRT3847_110668C.1
attttggcaaacaattcatactccttcttcttcttccatgtcttacatgcccaatgttcatcagcaaagtcataataatgctcaatctgttgatagatccagtcatcattcttcaacaacagttgcatctgtggccaattctctgctacctacaaagaggaggctccgccttgatccttccaacaagctctactatccatatgaacctgctaagcatgttatgagtgcaatctcaattaaaaacacttgcaactctcatgtaggcgttaagtttcaaacatctgctccctagagttgttatatg

SEQ ID NO: 11806 - DNA, 1453 bp, Glycine max
  Clone ID: PAT_MRT3847_110669C.1
cgaaaacggcggcacaagaggccattgaagaagctcggggatagcttcaacaggagaagcagaaccatcgctcaagctcacactcacagtaaaatccaaaccaaaatggcggaaaataaagccattgaagaagctcagagcaagttccgttcagagttccttcaagttctgcgtagtaggcgacccgctcaagttccattaacagtcgaattcgcgaagccagtggtgaatcctttgcatcagaactctcctccatcgatcgaagagatcaagataatggagtcgtgtccgagaactgatatagagaaccttgaagacttgctcgaggaggagaatctctatttgaatatagaggaaggagagcaaggacggttgcctttgttgattttgaagttgaaggaaagcgataagcagagaaaaaggcctgcagttgtttttcttcacagtacgaacaaatacaaagaagtcctacgtccattgcttaaggcgtatgcttcgcgaggatatatagcaatttctgttgattctcgttaccatggagaacgtgctaccagcgcaaccacctatcgtgatgcacttatttctgcatggaaaactggtgagacgatgccattcatatttgacacggtctgggacttgattagattggcagattatctaacacacagagaggatatagacccttctaggataggaatcactggagaatcacttggaggaatgcatgcatggtttgctgcagttgctgatactcgctatgctgtggttgctcctctgattggtgttcagggatttcgatgggccatagacaacgataaatggcaggctcgagttaatagtataaagcctctttttgaggcggctcgtgatgatttgggtaaaggtgctattgacaaagaagtggtggagaaggtgtgggaccgaattgctcctggtttagcttcccaatttgactcaccttattcagttccaactatcgcaccacgtcctttgcttattgttaatggtgcggaagatcctcggtgtcccgttgcaggcttggaaattccaagggcacaagcaagccaggcatatggacagtttgactgtttagataatttcaagattattacagaacctggagttggacaccaattaacgagacttcaagtgaaagaatcatcttattggtttgacaggttcttgaacccttagcccgtgccctcatatgtgttcatcaagccctgtgtggttgttgctctagctcattgcctcatttctattgtcattgtgtcatgatatcaaagtcaataaattgtcaaatagaaatcatcatcatgatgactcttaaggtacagtcaataaatttattatgtatgatggtgtgtaattgaatgatagtaaaaaaaaaattatattgtcattgcaaaaattatttattcaaactttttttgccccgttataataacatgtt

SEQ ID NO: 11807 - DNA, 200 bp, Glycine max
  Clone ID: PAT_MRT3847_11066C.1
ggtttttttttagtgtagtttccttggatatggctgtatttgtctggaagtgtcagttattgtgctttcttgaatatttgcagcaagcaccctttctgtgttttttactctaaagtcccttttatatgatgtggaggacaaattcatttgatgtgggtctgttggatgtgatggtcatcatactgaatagatgtacatta

SEQ ID NO: 11808 - DNA, 1397 bp, Glycine max
  Clone ID: PAT_MRT3847_110670C.1
ccgcgtccaggcggctcgtgatgatttgggtaaaggtgctattgacaaagaagtggtggagaaggtgtgggaccgaattgctcctggtttagcttcccaatttgactcaccttattcagttccaactatcgcaccacgtcctttgcttattgttaatggtaagacccttgtatatattgtacattaaacattttcaaaatgaatcaggctatcttattcatatacaacggcatatattgacaattcaggtaaccactctgctgcaacataagctttttgcttctttaggatatatcaataaatcgtagacccctgtattagtcaatttagttatcccgttcatttagattttgtggattttttttaagctaacttggaattgaagcatttgcttgggttttgggaactctaggtgcggaagatcctcggtgtcccgttgcaggcttggaaattccaagggcacaagcaagccaggcatatggacagtttgactgtttagataatttcaaggtttgaacttgtatagtttgggcactttgatgacaaatttaaatttgccagtgatcttccggtattagtttaataagaatatatttaactggttggtcgaaacgtgcaattctcctccggtttcaacaaagcatcatttcataaaaaacctcgcataatagaagtggaaaggaagtcccttgaatttaacatgggctttccaaagtatggcaaacactttagagtgcatgtctatcaacgactttatatcttcagcttgactttgtaggtttaatagttctttccacttatatatactttaatttactcatatcactagtcgatgttgatgtggaatttccaacatggacaccattgaaggtgcagcctcttatattggatgcgattgtgagaagagcttagctgagtgtttggttggggattctttttagggtatgtttgtaatttagttttggagtgaaagaaaagagaaatattttagttttatagtaaggcggtgttgatgattggttgctttcttatttgtcctaatttatgattggttgctttcttatttgtcctaatttatgattggttgctttgagatgtagattattacagaacctggagttggacaccaattaacgagacttcaagtgaaagaatcatcttattggtttgacaggttcttgaacccttagcccgtgccctcatatgtgttcatcaagccctgtgtggttgttgctctagctcattgcctcatttctattgtcattgtgtcatgatatcaaagtcaataaattgtcaaatagaaatcatcatcatgatgactcttaaggtacagtcaataaatttattatgtatgatggtgtgtaattgaatgatagtaaaaaaaaaattatattgtc

SEQ ID NO: 11809 - DNA, 462 bp, Glycine max
  Clone ID: PAT_MRT3847_110671C.1
cttacgcgttcgttttcgcgtacgatgcctctttgctattacacgttgtagatagctagccaaccagagtcagatctacagatagttcttatatatgctatggggcgagagtgaccttgttctgagccaagcctttcttgcacatctggcggtgcaacctctttctctctcgagctctcatgtggtcaaatgactcgtgtttcttcaactcttagcagagtgcacccctacataacatgtcgtttcccgttcgatttttgaggaccaaagtttgaaactttattaagttgggttgtagggagtaggactcatcaattgttattcttgtagattcatttgctgtaaccaagtagaggtgcaataattaaacgtacaacagcttcttgttggtgatgtttgagatccatgtatgcgattttcagtgaaatcttctttgcctagtgtgtgatcaggctcactgtt

SEQ ID NO: 11810 - DNA, 202 bp, Glycine max
  Clone ID: PAT_MRT3847_110672C.1
ccaacggtcccgctcctacaagactacataagggtacagctgccatcataccacatcaaggtactgatgcaagatcactacactagggttcggttgcgagacgactacactaggataacgctgccataacgcgattgacgtcgtcttgctgcgaaaagaccattcaccggcgcggctgctagaaaacaacaccacggtactg

SEQ ID NO: 11811 - DNA, 323 bp, Glycine max
  Clone ID: PAT_MRT3847_110673C.1
acaaatcaatggtatgttgatttcagttatgaacatatacttttcgggatccaatttttcacattttttaccaaggggaatatattttacatttaaaaaaaaccaaaattagagggggggagagggagaaaaaaaaaaaaaattgacccaagaagtggaattgggttaaaaaaaaaaaaaaaaaattgggtaatttacgttattcgacaggggccaagggaaggttgttcgaggaaactaaaggtggaaaatttttgatcatgtacaagtagggcatccccttttggagaagagggatttgaaaaaagcgtccatgttcttct

SEQ ID NO: 11812 - DNA, 219 bp, Glycine max
  unsure (1)..(219): unsure at all n locations
  Clone ID: PAT_MRT3847_110674C.1
ggctcgagctggccttcaggtgtggatatgatcaaaaacatgtgtggtcataatgccctcagcttccacagcaggtggttctgtggccttcggaaatcggcaagacaagcgatnntctgtctcatgcttcacctctcttaggcccctaattcgcaatgggtggtaggcccactgcttaatgttttagaggagagaggctnnnnnattcntttggagatc

SEQ ID NO: 11813 - DNA, 715 bp, Glycine max
  unsure (1)..(715): unsure at all n locations
  Clone ID: PAT_MRT3847_110675C.1
gccttcncggnncnncncnnctncnttnnnggcctcnnnnnggccntcnttcntgnccctggccgcggcgctcccctcgcgaaagtagtctttcgtgatccctatcgattcaagaagcgggcagagctgttcatcgccgcanagggaatccacactggacagtttgtgtactgcggcnngaaggcccanctgaatattggcaatgttttgcccgtgggcaccatgcctgagggtactatcgtgtgttgtctggaggagaagcctggggacaggggcgagctggcacgagcctccgggaactatgctacagtcatctcccacaacccagagaccaagaagacccgagtgaagctgccttcagggtccaagaaggtcatttcctctgctaaccgagctgttgttggtgtcgtggctggcgggggcagaattgacaagcctatcttaaaggctggccgtgcctaccataagtacaaggcaaagaggaactgctggccacgtgtgcggggtgttgccatgaatcctgtggagcatccctttggcggtggtaaccaccagcacattggcaagccttccactatccgaagagatgccccagctgggcgcaaagtgggtctcattgctgctcgccggactggacggctacgtggaaccaaaactgtacaggagaaggagaactagagttcaggagctaataaagtatgtgctttggctaata

SEQ ID NO: 11814 - DNA, 279 bp, Glycine max
  Clone ID: PAT_MRT3847_110676C.1
attcggctcgagcggctcgagccaattcctatcgcggaaataaaaccaaaaaaacttgttatttctgccatgctgtcctaaccgccatggcgccaccattcgcaacccaccacgccacagttattcgttggcattttttcaaaaaaccgccacatctttccgccatggctgtcatttgacaacactggtgaagaatagttcagggcgctaactaaattgcattggttatgattttgatagtcagtatggaccaggaaaggagaggggagtggctggggc

SEQ ID NO: 11815 - DNA, 520 bp, Glycine max
  Clone ID: PAT_MRT3847_110677C.1
gtcaccactggtgccggtatcgcctcttacccccttgacaccatccgtcgtcgcatgatgatgacctctggtgaggccgtcaagtacaagtcctccatcgacgctggtcgccagatcatcgccaaggagggtgtccgctccctcttcaagggtgctggagccaacatcctccgtggtgttgccggtgccggtgtcctgtccatctacgaccaggcccagctcctcatgttcggcaaggccttcaagtaaacgtatcaccaccaaatacgttgacaacaccatcgcggcggaagttgcggcatggaggtctgcaggcctgtgatgaatgcagacataaaagaaaaggagacgtggagtggcgatgttccgagcggctacggcctacggagggtggtttgcattggaagttgcgcagtgcgcgtctcttcgataccagcgatgtgtacctttactctgggcctggcttctcaatacctgtattacaattggttgcactttttcatgcaaggagtatagatgg

SEQ ID NO: 11816 - DNA, 729 bp, Glycine max
  unsure (1)..(729): unsure at all n locations
  Clone ID: PAT_MRT3847_110678C.1
cccacgcgtccgtcttaatccagagaattcggtgtgttaagataggtttcaatttgccatctctggttgaacatttgattggatataagacaagattgaaagatggttttggagtgcacagtgttagaggcagagacttgtataattgtataaaggggcatcttgtgttgctagcagaaatgtcttgaaagtttcaataccctgttattttttcagaggctactgtacaatccatcattctgcaattaaaaggaatagaagggaagttttttcaacaggttcttgaagaagatggaagtttgcgagccagtcaaatctgaaaatagattaaagcaccgccccttgaccccatttaggttgttaaggggtctgatatgtttagtggtgtttctttctacagctcttatgtgtttagtctattctgtgccagtggcagactgaggattgcggcttttcagcgtacgttggaatacgaagacagtgtcattcatctttggactttggctgtctctgtggccctcactatttgaaaaggataacataactcaagttgtgttatcgggggatagtgttccaatgaaggaaacgtgttttacttattgctaatcacagaactgangttgattggatgtacttgtgggatctcgcacttcgaaagggaggcntggatgcatannatacatccttaagagcagcttgatgaaactacctatctttggttgggggatt

SEQ ID NO: 11817 - DNA, 2052 bp, Glycine max
  Clone ID: PAT_MRT3847_110679C.1
gctggcatacgaaactgtggccaggatgggattaatgaaattaaattcctgatcaaagaggcgcacaaacgaggaatagaggtcatcatggatgttgttttcaatcatacagctgaggggaatgagaatggtcccattatttctttcagaggtgtcgacaacagtatgtattacatgttagcacccaagggggagttctataactattcaggatgtgggaacacgttcaattgcaaccatccagttgtgcgacaatttatagttgactgcttaagatattgggtaacagaaatgcacgtggatggttttcgctttgatcttgcttctattatgaccaggagtagcagtctctgggatggagctaatgtatttggtgctccaatagaaggtgacttgttgacaacaggaacccctctaagcagcccaccattaattgacttgatcagtaacgatcctatactttgtggagtgaagcttatagctgaagcctgggatgctggtggcctctatcaagttggcactttccctcactggggtatttggtcagaatggaatgggaagtatagagacacggtgcgcctgtttatcaagggtacagatggctttgctggagcttttgctgaatgcctttgtgggagtcctaatttatatcagggaggaggaagaaaaccgtggcatagtattaactttgtatgcgctcatgatgggttcactctagctgatttggtgacctataacaacaagaataatttgtcaaatggagaagacaataatgatggagaaaatcataataatagctggaactgcggacaggagggggagtttgtcagtacctcggtgaagaaattgaggaaacgacaaatgcggaatttttttctttctctcatggtttcccagggagttccaatgatatatatgggcgatgaatatggacacacaaaaggaggaaataacaatacctattgtcacgataattatcataattacttccaatgggacaaaaaggaagaatcctcatcagacttcttcagattttgtcgccttatgactaagttccgccaggaatgtgaatcgctaggcttagctgacttcccaacctctgagaggctgcagtggcatggtcattttcctggaaagccagactggtctgaaaccagccgttttgtggcttgtaccatggtagattcagtgaagggagaaatatacattgctttcaatatgagtcatttacctttcacagttaccttgccggagcgtcctggatacaaatgggaacctcttgtagacaccagcaagcctacaccatatgatttcctcactcctgaccttcctggaagagatattgccatacaacagtatgctcagtttctggacgccaatatgtatcccatgcttagttattcttccattatcctcttgcgcattccagatgaaaatctgtagcttggaaaatcttgcttctttgtttttatcggctatatatataatcctgttcctagtatgctggaaaagaaatcgtagtaagatgggtctgcaggaagtaagcaccaaaggcccaagaggaaggaacgtatagcatggctggcatcatgcatcatgcatacatgcaccgtacgtaggaaaagcgcaaacccgtgtgatagcatcgtgtcttctagaagatgcgtaggtagtggaataaaggcatatttgctcttaggatatttcggattgcttttatcttttccgtttttgcttgtcgggacttgtcccctctataacagctatatatatatgtaaagaaatggtgttggaaggatatgagaaaatagcagaaaaacgttcctccgtagttctctctctcccactctcttcttctctcttaggaggctacttggtcctcgaactccaagctcgtaacatttgatcagtaaataaaaataatagatgcattgaatattttcttttgcctttacctaggaaagaataagctgtattagtgatgtaatgatacgatgatggaaacgtggctaagttgtatttgagcaatttagatgtgagtttgctccaaaa

SEQ ID NO: 11818 - DNA, 284 bp, Glycine max
  Clone ID: PAT_MRT3847_11067C.1
attcttgcctgcattcataaatattaaataatctaagcaaaaatcaaagaatggcacaagtgacagtgtgaacaccctcattggggcaaatcattcccaaaagccaaccctgcaagcaattactgggcacaaataaaataaagtaagaaaattacaagaaaaagcatcgaatccacaagcacaaaatctgttctcccaagatcctgtcacaacgaccctcccattctcaccatcatcacaactgaatggactaccataacctttaacacagacaaagtctgctc

SEQ ID NO: 11819 - DNA, 2566 bp, Glycine max
  Clone ID: PAT_MRT3847_110680C.1
cacgcgtccggctcgttgcagcactcaaactccttcattgcagctacactcaacaccgtgtttagatggaagcctaagttttgcggcaactttggaaaatacttcaaaagtgcgttcaagtctcacaaaacggtgcattggaacacgtgtcaatggattaaaacggtaaaacgaacacacccttgttacttggacgtggaaattcacgttcgcgctcctttttatcttggcattgcgtttgtgtgtgtgtgcaatatcacacaacccaaccttattcgttcttctgttgttctgaggcgagccatgacggacggtcatctcttcaacaacatcaccctcggtggccgtggaggcaccaatccagggcagataaaaatatatcctggaggaattgtatggaagagacagggtggtggtaaattaattgaagttgataaatctgacataatgggggtgacatggatgaaggtaccaaggagtaaccaacttggtgttcaaatcaaagatgggttgtactacaagttcacgggatttcgtgaccaggatgttgtaactttgaccaattttttccaaaacacctgtggaatatcagtagaagagaagcaactttctgttagcggacgtaattggggagaagttgatctaaatggaaatatgctggctttcacggttggttcaaagcaagcttttgaagtgtctttagcagatgtctctcaaacgcagcttcaagggaagaatgatgtgatcttggagtttcatgtggatgacacaactggagcaaatgagaaagattcactaatggagataagtttccatataccaaattccaacacccagtttgttggtgatgaaaatcgtccccctgctcaggttttccgtgacaaaattatgtctatggctgatgttggcgctggaggtgaagatgctattgttacatttgagggtattgcgatccttacaccaagaggacgatacagtgttgagttacacatgtcattcttgcggcttcaaggacaggctaatgatttcaaaatccaatatagcagtgtggttcgcctatttttacttcctaagtctaatcaaccacatacctttgtcattattagtcttgatccccctattcgaaagggacaaactttgtaccctcatattgtgatgcagtttgaaactgattatgttgttgaaagtgaattggcaataaatgaagatctttataacacaaagtacaaggacaagttggatctgtcttataaggggcttattcatgaagtgttcaccacaatattacgtggtttgtctggtgccaaagtgaccaagccaggaaaatttaggagttgtcaagatggctatgcagtgaaatcatctttgaaagctgaagatggaattctgtatccccttgagaagagcttcttctttctacctaaacctcccactcttattcttcatgaagagattgactatgtggaatttgagcgacatgctgctggtgggtccaatatgcattattttgaccttcttatcagactaaaatctgaacaagagcatctcttccgtaatattcagagaaatgagtaccacaatttgtatgaatttatcagttcaaagggcttgaaaattttgaacttaggagatgcacaacctactgttggtataaagaaggttcttgagaatgatgatgatgatgctgttgatccacatcttgaacgcataaaaaaatgaagctggtgaagatgaaagtgatgaggaggattctgattttgttgctgacaaggatgatgaaggttctcctactgatgattctggggcagacgattctgatgccactgatagtggtgatgagaaagagaagcctgccaaaaaggaatcaaagaaggatctgccttctaaggcatctacttctaaaaagaaatcaaaagatgatgaagatggaaagaagaaaaaacagaagaagaaaaaggacccaaatgcacccaagagggcaatgtctggtttcatgttcttttctaaattggaaagagagaatctaaagaaaactaatcctggaatttcatttacggatgtgggaagagtacttggagagaaatggaaaaagttgtctgcggaagagaaggaaccatacgaggccaaggcgcgtgaagataaaaaacgttacatggatgagattagtggctacaagaatccacaacccatgaatattgattcaggaaatgaatctgacagtgcctaagctccgtatatttcttactggagtggtgatgacatctactctcatgctccgtaagttggcacatttatgctcttggaaatggcttgataacttgtgaacatgctcaagagttttgtgctctgttggtttgcatggctatagggaaggcagggacggtagagcttgatgtgttgagtaggttcctatgcttaattgaattagtggtctttgtgaattgtgacccaattttcgctaaatgacagtgcctctttttagagtttatgaccggcagatgtaggatttgtaacaatttttttgcttcaactctttgcacgaataggatttaaaatattagatcaa

SEQ ID NO: 11820 - DNA, 629 bp, Glycine max
  Clone ID: PAT_MRT3847_110681C.1
cctcgtgccgagtttcttcagtgacaaagcaatgctacctttctgattctgatggcgtcgttttcccattgcactcgtcgtttcatctcactctcttcgatgaaatcagctgttagaacaatcagtcattctcctcttctcaacgctactgtgccccaccgtccattctcaccgcttatcagaacttgtgtgtaccgactaggaagtgtgcagtcacttttgcctctacatagtacagtggctactgcaagaatggtgtctagtcttagcattgattcaaggaattgtgaagctctttcacatgctactctctgctgcaaccaccctggaccctaagaggtctttgttactttgaagtttgaaatgtgagtggttgtctcctttggaaaaagaacaaacacaactcataacatttggagctctgcttgtgattggggaaaaaaaataatgattggtattgattttcggatgagtggcaaagtttatgtattatgaatttagccccaattcattttcttctttcttatagaccagattctcaaatgtggttaacttttctttatttggtttttggtttttaaccgagtcttatgacgtgaatgggtgatctatctaactaatctcacctc

SEQ ID NO: 11821 - DNA, 920 bp, Glycine max
  Clone ID: PAT_MRT3847_110682C.1
ctcgagccgaatcggctcgagggcgttttcggttccgattgcatttctttttctttccctttcttctaggaatcaaatctgagaagcattctcgttccacagaattttcctttaagaaatgcggaaaactcaagtaaaaccgtagtgcttcctctcttccatttccctctatcgctccacggatctaaggcttcagtgtagtctgtaatcatgtcaggcaagtatatcatttctgctattcttggatcatttggagttgcatgggtttgtgattattatgtttcagacaaaaagctatttggaggttctacccctggaactattacaaacaatgagtgggcagaagagactgacaaaaaattgcaggcatggcctcgtactgccggtccaccagtggtcatgaatcccataagtcgccaaaatttcattgtcaagtctcgcgctgagtaataatttttgttgattgattttgagttaattggtgcttggtcatgccatatgtttccataaatgatgataatgcttgaggtaaaactcttacagttcaattagtgttttgaagtttaaacatgtgaatgtgtttacttgctaaataaaatgttacttaagcaatcatggattgattaatgcatattcatgtattcaaattctgttagtctttaccttggtatgaatgggaatcaatgcccaaaattatgtttagcagacatgtgcaaaaatttactactagtggtttatgttgtgattctttgtttccagcagtcagttgtatctgctactatattgggtgcttttaggcagtgtcgttcagtagaatcctcttttggattatcttctgtggtgttgaatttactgttacaatttgccggtaaatcaaatgttactaaagcaatcctgaattcatagatatgtattttgga

SEQ ID NO: 11822 - DNA, 789 bp, Glycine max
  Clone ID: PAT_MRT3847_110683C.1
acggctcgagaagacgacagaagggggttaaacttcaccttacagtccactaaagcataacgctaatcgcactccgctctccgcactccgctattgcacctccctcgacggcacctcaggcgcactcgttttcggttccgattgcattgaatcaaatctgagaaccattctcattgctgtgcggcgctcgaagaggcccagggccttttggaaattccttttcctcgtgaacgatcggctcactctcgctctccctagatcgcgcactttcgctctccctcgtcgcgtgctcgttctcgctatcgtgctctcgcgctctctcggatctaactctggtagtctgtaatcatgtcaggcaagtatatcgtttctgctattcttggatcatttggagttgcatgggtttgtgattattatgtttcagaaaaaaagctatttggaggtactacccctggcactattacaaacaatgagtgggcagaagagaccgacaaaaaattacaggcatggcctcgtactgccggtccaccagtggtcatgaatcccataagtcgccaaaatttcattgtgaagtctcgccctgagtaatattttttgttgattgattttgagttaattggtgcaccttagtcatgggatatttttccataaatgatgataatgtttgaggtaaaactcttgcagtttaatcagtgtttggatgtttaaacatgtgaatgtttacttgctaaataaaatgttacttaagattgactaatgcgaaaaaaaaaaaaaaaaaggcgggccgct

SEQ ID NO: 11823 - DNA, 233 bp, Glycine max
  Clone ID: PAT_MRT3847_110684C.1
agggggttttttttttttttttttttctggccgaagtattagggttgccacttaaaggttataaatatttaattaagcataatataaaagcaaaaataatacaggatttgttatgaatgacaaggaaatactcaagactaggtccaaaagattaataggagataaactcccttcttaaattgggcctatcatacgaaaaacattttaacagggtcttatctgatgtgaatttt

SEQ ID NO: 11824 - DNA, 173 bp, Glycine max
  Clone ID: PAT_MRT3847_110685C.1
cattttggtccttcaaggcaaataaagtgtcactggtggtaccatggccgaggaagtttcaaagacaagcacaacttccgagaagtggtggtcttctgacgtggcacctgctggcgagaaacccgacaccaccaccgacgttgttgtttccgttgagaaagacccccaacatg

SEQ ID NO: 11825 - DNA, 777 bp, Glycine max
  Clone ID: PAT_MRT3847_110686C.1
ttcggctcgagaagacgacagaagggggttaaacttcaccttacagtccactaaagcataacctaatcgcactccgctctccgcactccgctattgcacctccctcgacggcacctcaggcgcactcgttttcggttccgattgcattgtctgcgtttcttttttctttgccttgtttttgttttctttttctttttattttgctttgcgattctctgagtttctttttctttccctttcttctaggaatcaaatctgagaaccattctcattgcccgtctgtaatcatgtcaggaaagtatatcatttctgctattcttggatcatttggagttgcatgggtttgtgattattatgtttcagagaaaaagctatttggaggttctacccctggcactattacgaacaatgagtgggcagaagagactgacaaaaaattgcaggcatggcctcgtactgccggtccaccagtggtcatgaatcccataagtcgccgaaatttcattgtgaagtctcgccctgagtaataatattttttgattgattttgaggtaattggtgcaccttggtcatgggatatgtttccataaatgatgataatgtttgaggtcaaacccttgcagttcaattagtgttttgatgtttaaacatgtgaatggttactaataaaatggtacttaagcaattggggaattgataatgcatattcatgtattcaaattctatggttagtctttaccttggtatgaatgggaatcaaagcctaaaattatgttt

SEQ ID NO: 11826 - DNA, 590 bp, Glycine max
  Clone ID: PAT_MRT3847_110687C.1
tgtttttgttttttactttaaattttgggggtgttttcggattatgctttgcggctctctgagtttcttgtcctttccctttctttctaggaatcaattctgagaagcattgacgttcaacaggttgcttcgaagtgaagtctgtaatcatgtcaagcaagtatatcatttctgctattcttggatcatttggagttgcatgggtttgtgattattatgtttcagagaagaagctatttggaggtagtacccctggcactattacaaacaatgagtgggcagaagagactgacaaaaaattgcaggcatggcctcgtactgccggtccaccagtggtcatgaatcccataagtcgccaaaatttcattgtgaagtctcgccctgagtaataatttttgttgattgattgtgagttaattgatgcaccttggtcatgggatatgtttccataaatgatgataatgtttgaggtaaaagtcttgcagttcaattagtgttttgatttttaaacatgtgaatgcttacttgctaaataaaatgttatttaagaaaccatggattgattaatgcatattcatgtattcaaattc

SEQ ID NO: 11827 - DNA, 211 bp, Glycine max
  Clone ID: PAT_MRT3847_110688C.1
gtctatcatcccaaacttgttcagtgatagacaaagcaacgtcttcaacccattctctctaaacgtataagaccctttcgaagggttgcctttttccacaaatcacataccttcctcgtataaaaaaatcagtaccatagccaacactcgcgtaaactgtaaggagactccagcgactcacatattcaacattagatcttcccgaattaaa

SEQ ID NO: 11828 - DNA, 221 bp, Glycine max
  Clone ID: PAT_MRT3847_110689C.1
ttgttctccaccgtggatatgatggaacttgcgggggttttctttactgattagggggatttttcatattaaactggagagagagagagagagagagagagccacccttcttcattgtttgatacctggattccagacatgagatgaggcctatgcaactgccaccgcctttcggtttcggggccaaccctgcccccaccaacaacagcaagggccctacc

SEQ ID NO: 11829 - DNA, 201 bp, Glycine max
  unsure (1)..(201): unsure at all n locations
  Clone ID: PAT_MRT3847_11068C.1
tccggctgtnagaagacgacagagggggagacaggcgcaccctccgttctgccttcacaaaaaaattatcgagaccctctttttctactaagataagccatggctaagggtccgggactctactctgacatcggccacaaatcctgggatctgttgttcaaggactacctcagtgtccagaagctcagcatcatctaatac

SEQ ID NO: 11830 - DNA, 694 bp, Glycine max
  unsure (1)..(694): unsure at all n locations
  Clone ID: PAT_MRT3847_110690C.1
cggacgcgtgggtttggtgctgcgattaagcttcaacctggctacactgcaggagtcataacatctttatacgtgaggatcaatttataacttttagcacatgtttaaaattgagcgtacagtatctttttactatgtgtttttcatcctttttcttcgttatttcatttgggaattgtagctttcaaacaaccaagactacccaggacaccatgatgaaatagacattgagttccttggtaccacgccagataagccatatgtcttgcagacaaatgtatacatcagaggaagtggagatgggaacattatagggagagagatgaggtttcacctttggttcgacccaacacaagattttcacaactatgctattctgtgggaacccagtgagatcatgtaatatcttcacgcactaccatgatctacataaactgtttcgataaaatctaacttgaaacccttaccataaattttttggtgaataattattttatgtatgtataataactatcaacaaccatttagcccaattaggaaattactatgactnggttaaaatatttcacttgaaatatcatttctatacaataatggaatgcagacccctttaaaatatacctattaacctttaatcatgttagtcaaagggagaaaaaaatgtgcatctaggcctctttttctcactcaatca

SEQ ID NO: 11831 - DNA, 153 bp, Glycine max
  Clone ID: PAT_MRT3847_110691C.1
caccacgggaaagggttccccctttaaattcaaccctttataggaaaaacaacaaattcttcccccacccaaaactttcctacccttcaaggggggtgtcttcaaccccaagttttacctgggaccaggaaaaatacctttcttttttttacg

SEQ ID NO: 11832 - DNA, 396 bp, Glycine max
  Clone ID: PAT_MRT3847_110692C.1
aataaaaaaagacttataaatcccaacaaaaaacttaaaaaccaaaaaaaaaaaaaaacaaaaaacttcctaacaagaaaaaaaatacataaaaaacccaaataactcaaatgggggggcccgttttaaagaacccaactttacgaccccgctccaccgatgcaaaatttttactttggggtccccaaatgtaattgcaccgccctggttttaaaaaccgcgaaaacggaaaaacctgggggtacccaaaataaatcccctagaaacaaaaccccttttccccagttggttaataatcaaaaaggccccccctaaatgcctttcccaaaaatttcccaccctaaagggaaaagggaaccccccttgaaccccccaataaaacccgggggtggtggg

SEQ ID NO: 11833 - DNA, 327 bp, Glycine max
  unsure (1)..(327): unsure at all n locations
  Clone ID: PAT_MRT3847_110693C.1
aacgcctaaaaatcacaaagcggaaaatgaatatgcacgtctactccgacccggacgaancangttcgggtgaggatnctccttcctggtcggcgggaacaccataacccttttttccgcccaacaccaagtttaaaacccctccattaaattcaatattccccacccccttattctcccccttttttcccccaagaacccgtccaaatccttcatcaccaccacccacttctgcgtcgatttgaggaagaaccatttcacatcccaatccttaaggatttttcagaggtcgatctcctagacctcttaagagaagaaattttccat

SEQ ID NO: 11834 - DNA, 458 bp, Glycine max
  Clone ID: PAT_MRT3847_110694C.1
gcgcgcatgccttgggcttgtcgtccattcctcttgtttccggtcgatgacacatatataccttcgtcccccggtgggaatgatgcgcatgctgtaacttttgccgttcattgcattcaattgtcatcttggcggagctattttgatccacggaaaataaccctagctgactagaaatagatcatgctttcatagtgctgttccgagcctgaaatcgttcatttggtgaactaatactatatagcctgaaagctctattatctagatgcgacagaggatcacggatcatcaacctgacaccttggatagtatctagacaggtcactgttaaggttttatggaatctgaatacattggacggactatggatcgtacattgctaggatcttatgatgaattgtatatagagctgtcaggcatgattggcatataaaaatctgtggtgctaagtctcatgc

SEQ ID NO: 11835 - DNA, 818 bp, Glycine max
  unsure (1)..(818): unsure at all n locations
  Clone ID: PAT_MRT3847_110695C.1
gcgtacgtnngcttggtcttgggagagcggccgccctttttttccttttttttgctgtnnctggnntcnttagggantatgatcccgaaacacatttacatgattcatgagtctgaataatttggaaatcacttttcaatttgacaacccaaattatattaaaaaaatcacgtaggtgtngctccnngtgtccttcgtgcgacctttactatttctatttctatattacctacaaactcgtgccattcattagtctcctctctccgctggtctcacggttggnntaccctgatanatggcctcggcgactggtgctattttccccagtgggccccgcggcgcccgggtgggactattatcggggtgcgtgctgtcattgttgcctctgccgtgtgctgtatcttggtggtttgcggccgcgttggtcggcgggttgtggctgccggcgggcgtggntgttgggcctgggtgtggggggtctcagtgttggcgcccccggcgtgtgtgttggcgcccgcgtgggcgggccttggggctgtgggggcgtcgggggcggggctgggctggggnggcccggggggcgggggcgtgtggggcggggggggtggtggggttgggggtggtggcggggggggggtggtggggggggggtgggcgggggggcgggggggcgggggggggggggggggtgtgggggggggtgggggggtggggggggggtgtggggggcgggggggtgttgcgtggcggggtggtggggggggtgggtggggggggggtgtgtgggggtggtgggggggggtgttgggtgggggggg

SEQ ID NO: 11836 - DNA, 420 bp, Glycine max
  Clone ID: PAT_MRT3847_110696C.1
cagatatgttgaggtagtgacagatgggtgtggaaaagaggttcgtggtcatattgagttttggtaggcatgttttgttgaccttgtatcaggcagttccaggggatgtgtggtggcctatggagataggcgggatttgtgtggctttaattaaaacagaaggatcagttggcctggacgttttatcgaacagttggaaggcataaatgctggtaatgaagaatgatgctagtggtatatgattctcgctatatcctgtttacatcagatcagacaagaaagttcagaattggacttggtccatgatgttgcgtgttgtgtgttttctcaatagagagatcgatatcttggtgcaatcctgttcggggttttttaataggctgagtttgtgtgtttctttgaacgctattgtagctttta

SEQ ID NO: 11837 - DNA, 471 bp, Glycine max
  Clone ID: PAT_MRT3847_110697C.1
caacaacaaaagcttatactacaaaggagtaaacggttgtttctttgtgaccaagcttcactccatcaacatcaagtgatggccctcaacacctcttgctccaaggccattgttgacatgctaggaactcatgttcctaaatgtgctattgatgtttccaacacacccagattttccttgtcccagaatgacaaaaagggctgcaacttgggattccccaaacttgttcaaaacaagggccttttcccacttcatgctgtgccatccaaaacaatggtggacttggacaatttggtgcttcaatctcaagaaaaaccaaaggaatcaaagacaataaatgtcaaatttcagttacaatgcaattgtaattatggggaacaatttctagtagttggtaatgatcctatgtttggttcatggaaccctgaaaaggccataccaatgacatggtcagaagggcatgtgtggact

SEQ ID NO: 11838 - DNA, 492 bp, Glycine max
  Clone ID: PAT_MRT3847_110698C.1
tttttgaaccggaaggaaacaaaccaaatactattctcatctgagcttttacgtaaagtcaagcacaatcacaacacgcttccttagatccatgatggaacaatatattaatagcaattacaatagtatcattgtataaaataaaaaatactactatcaatttgccgcgggctacccttttttgttagccgcttcagcatttcctacagaaatcggaacgtacaacttcacacgcgcaccctcaattatacattaaaaatatgaaacccaccaacgagaaaccaaaatcaaagaacttgtcacaacaagctgtcactcactctttttttctccaaaagatcagggtctaagggcaaaactggaaagagaaataaacttgtatttcattatattaagaaaatgaaaaagaaagtaaagggatgaagccagtgttcagacacggaagttctttccagtgaaagtttgagcaaattgccaatttggtggaacaat

SEQ ID NO: 11839 - DNA, 306 bp, Glycine max
  Clone ID: PAT_MRT3847_110699C.1
gagcgaaacagcgaatgtgttaatttcaccttatagacttgaccttcccgaaacaatgggctgacagggctccaaagactcgaggtggacggacactgactaatgacggacttgccaagagcatcgacggggctggctgcctcatgtcaacctcacttgtcgaacctggcccctgagagcgacactccacgggtcacgagctttggttttttaaacgaatgcaaccttgactgcacagataaatgcccggctagtgactatggacaaaaggtaatcatcgtaataggtgtgtgctgtttcaaattg

SEQ ID NO: 11840 - DNA, 572 bp, Glycine max
  unsure (1)..(572): unsure at all n locations
  Clone ID: PAT_MRT3847_11069C.1
gtaaaagccatcaacttggaaccccttgagcaggtcggcgtttcaaaccattcgaatggaagccttgaggttggcgtatctcctccttccctggtggttggtgttttcgacagcagaatcggcgtgcaaggagggctgtggagtggcactaggctcctactacttatggcggggctccaacctcacctacatctcctccatcatggcctccagccttctgacaactccggacgacatagtcaactacaacaaggacaccgtgcccagcaaggacatcatcatcgccgaccaaagggtcaacgtccccttcccctgcgactgcatcgacggccagtttcttggccacaccttccgctatgacgttcagtcacaggacacgtacgagactgtagccaggagctggtttgccaacctcaccgacgtggcctggctgaggaggttcaatacctatcctcccgacaacattcccgacacgggaacgctgaatgttacggttaattgctcttgtgggaacactgatgttgccaattatggcttgttcgttacctaccctcttagngattgggacactc

SEQ ID NO: 11841 - DNA, 385 bp, Glycine max
  unsure (1)..(385): unsure at all n locations
  Clone ID: PAT_MRT3847_1106C.1
atacaacatacttatgatgataaatatcttacaattattaaatatttttatcaggattatatttaaagcggggaaagactattattttacaaaactaattgtcaatatttgatcttgacagtaccaattataaaataatttttctattcaaagattacgaactaacgttgtgccgagtatcttgtgatgactctattatttaaaatattaattgncttgcttatatatatatatatataaacatatttgttatttgttaacatgttaaatattaataatgattctttgctattgactaaatagatatataacttattacacaaataatgtcaatgtacaaaatattgattttcatacaatattaatatatattacattatctatg

SEQ ID NO: 11842 - DNA, 378 bp, Glycine max
  Clone ID: PAT_MRT3847_110700C.1
gtaaaagcaaaagcccttgaaaaatatatttattcattcattcctggccacaaagtctacacagggggccagatcccaactaaatcgatggtcttatttggggggaaaccatttaacggtattttattcatagacagaccttttcaaaccttcttgacccgcgaaaaaaaagattattattaaagtcaatcatccccaaaagagaccgtttttttaaaaagggttgaaagggccggttcccaaccctattgtttaagtttcttcaacaccaggaattggcacctgaaaacgctcattgaaaaaagttttttttttggtacccgcgggggcacccccaatggacggcccaccccatttaacccggagatgggtccagtt

SEQ ID NO: 11843 - DNA, 226 bp, Glycine max
  Clone ID: PAT_MRT3847_110701C.1
ttcttttatttctgctctagttctttgtttgtaacaaaacggtaacatttcataaccgaaagagattattgtgggtaaaacgaaaaaagcaaacaaaaaaaactctttaggatttggtgaaatcaccttagacctatgaatgcagttgctatggtcatgctacacgcaaattgttcatccacacctagctagacatacattgatgggagtgattaactttacaaca

SEQ ID NO: 11844 - DNA, 497 bp, Glycine max
  Clone ID: PAT_MRT3847_110702C.1
gtcacagatcaccagccaggtaactgggcagattggctggcggcgagagggtatcaagtatcgtcggaatgagctcttcctggatgtgctggagagtgtgaacctgctcatgtccccacaagggcaggtgctgagtgcccatgtgtcgggccgggtggtgatgaagagctacctgagtggcatgcctgaatgcaagtttgggatgaatgacaagattgttattgaaaagcagggcaaaggcacagctgatgaaacaagcaagagcgggaagcaatcaattgccattgatgactgcaccttccaccagtgtgtgcgactcagcaagtttgactctgaacgcagcatcagctttatcccgccagatggagagtttgagcttatgaggtatcgcacaaccaaggacatcatccttcccttccgggtgatcccgctagtgcgagaagtgggacgcaccaaactggaggtcaaggtggtcatcaagtccaactttaaaccct

SEQ ID NO: 11845 - DNA, 286 bp, Glycine max
  Clone ID: PAT_MRT3847_110703C.1
gggtcgacacaagcgtccgcccagacgttcgacagctgcgaaaagaccacagaatggggaaacactcccctttggcgctgttgttgttgccgcagcaccgaacaacttcccctgttaatcgcgtttcgtttgtgcaatgttttaaaagattgctgacgctgaagacattcaacctcctggtgttgataaaggaactggaatggtcaacgctggttttgcacgtgatgatgctcctaaggccgtgttccccagcattaatgggaaaccacgccatactggtgtaatg

SEQ ID NO: 11846 - DNA, 366 bp, Glycine max
  Clone ID: PAT_MRT3847_110704C.1
ggctcgagatttggtttccttctctatttcaccgatagaacttactgaccctttccgcttgctactgaaatccatagtcgcggcgacgacttcaatcgatgcggggaacggcaacggcagtccgaaccctaacgtgactcccaaacgctgcgtctacctacatgacacgctggagctgccgtgagtcttacgacgatgcgacgcttattgcgacggcaagatctgcggtaccgcgttggaccacgaggtccgcttcctcggatcccgcgtaccgcccgaggatatccagcgcgctatggacgacctgaacaccgaccatgacggactcatgaagctctcgaagttcgtcgtcttatgacggtccta

SEQ ID NO: 11847 - DNA, 501 bp, Glycine max
  Clone ID: PAT_MRT3847_110705C.1
cccgggcaaagaaccattttgttaaaccataaggggtctacttaaacccctaaaatccgatccagccaaaccccaaatttcagccgtccacaacccggaccaaacaaaaggggtaaaaagggggcctcctttatcccacaatttaaaaccccggccccaccctaaggggataagttaaccctggcaacccaatgatcccacaggtttttttccccccagtttttcaggtgtttttgttaacctaaggccccccttttccagggtcataaaattcggcggggccaacacccccccttcttataagggagttgggcccagggagaggaatctgcctggcggtaatactgaacttaacggtcccatcatccccgactttaactttcccaagacccccagcttgacatttctcgcctcaggggcccccggcctcgttgttataagaattgaaatgccctccagttgacaggcaccctttcgccccggggggtccccccggaaatt

SEQ ID NO: 11848 - DNA, 264 bp, Glycine max
  Clone ID: PAT_MRT3847_110706C.1
tcaattcctaaattgacatatcttagtagctgtcattctctatgggcgaactatcaacttgagatgtttaaaactccttaaactcttaaactaatttacctcaacagttaaaaactcttaactcaaaacactatctcctcattctttacaaattatccacaactacaaatcacctattaactcagtaccttatcccctggtaatcaaaacccaattaatcattcctatccatctttaacaactttcaatactattccaaccact

SEQ ID NO: 11849 - DNA, 303 bp, Glycine max
  Clone ID: PAT_MRT3847_110707C.1
tttttcacctactcgcagaaaaagaaaaaagcggtgcggtgttacacttcaacctgatccagtttaggcattaggctctctaccctatatttcacgtatcgaaaccttaaatttactatcatgtttgagcactctgctttgtaaaacctttggtcttacaaagtcaatgttttatttctgaattatacgatcaaactgctactgccttttatccttttgctgatgcaaatgcttatatactccttgcatggtcaaaagagtatgtgcacattctcatacagaagccaaatgttttgaaaagcc

SEQ ID NO: 11850 - DNA, 499 bp, Glycine max
  Clone ID: PAT_MRT3847_110708C.1
ggctcgaggagcaacttagctttcaggtttcaattcgcgaatcttattcggatctgagcgatccggaacccagatggtccaaacgaagccgctttccacgtgactcgctatactgaaagaagatacttgaatttcggatttggtgagagagcccctgtacgaagaataggagagtggagggaaaacctggaacatgaatacaccacaatgtttggatactagcaggagaagatccgaaaacgaatttgattcgtaaagtgaatgactgtccgaccattacattgggtccagctagatggctgttgccatggccgacgctctctcgttgattccgggagctggtgctctgcagccttgctgacaagctctaccagaagcgtaatgatgctgatcttgatattgaggggatagtggagcagatagatactgctgaggatcatgattaaataacggctgtgatcagttggttgactgcggaatgtacttattgaccacaagc

SEQ ID NO: 11851 - DNA, 771 bp, Glycine max
  unsure (1)..(771): unsure at all n locations
  Clone ID: PAT_MRT3847_110709C.1
tgtagatactgtagatttagaacgaactgtagatttcgaaagattgcatttcagatggtgttggctttcggggcctctttgtttttttttttttggttgacattattcagtagtataatatgtgttggctatttattgatcaatcatcaatgggctgaatactgtgtactttggaattaacctagtcaccactatgatagctggaaatagcgttgaagattatttgaagttttatgttgtttagtcttagtcctatcctttcttttagtaattcaattgtgtataattacatgttagtgatgttactaaaccatataattttcttgcttgttctgttgagaaattgggtttctgtcctttaatttgtgttgttggttatcttttcttagtcatacatgcaagtggtccacaagtttgtaagtaacttctgtagttatttgaattattttctttatcttattttcatgtttgatttgaaatgcatagcattccacccaatcctccctttcctgttccatttctgcctagtttccccacaaattcttgctagtttcaatgatattggtgatgacctgctgtcttctgtgtgactacctagtgctcacagatagacaatttatccacatttaatgtagccttttctggataatcagtttagatgaattgtgggtaatgtaggttacaaacctaaggtcactggcaattggtaatattattntaatgaatgagtcaactcatctcatcagctgtaatagtgagttctttatcaat

SEQ ID NO: 11852 - DNA, 281 bp, Glycine max
  unsure (1)..(281): unsure at all n locations
  Clone ID: PAT_MRT3847_11070C.1
cttactaacctatttacagatcttatcacaaaacangcctttaaanaggcttgctggtctggccagacctgacttttgtgtaggttaggctatgcctttaaataaggcttatgacaganaggtctagctcaggctttgtactttcaaccaagtctaggttcaagcctagcanagcctggcttaacctgtttccatcccttggtgcgatgtccacctcaagtttgatctataagtgatttttggttatgagcttctgttacttattattcattccttttcct

SEQ ID NO: 11853 - DNA, 767 bp, Glycine max
  Clone ID: PAT_MRT3847_110710C.1
ccacgcgtccggagcctcccctgttcttgtttggttcctaaaaggctaaaaccctaactcaaggctccctaaacccaagttgaggcctttattgcaacctcactttctccgcaccgcaacctctcgcaaccccttgcgcttactcgcactcacaacctctctctcagcaagttgctttgacaaaatcaataccactcattttaagaagtcatatatccccgtggaatttttggttgagaaaagaagaaggtgtgaagagagatgggaaagaagaacaaagtgaaggaaaatggaggcaaagagcattgctcctcgacactttttgtctccaacttgccctattccttttccaattctcagttggaggagacgttcagtgaggttggacctgtcaggcgttgtttcatagtcactcagaaagggtcagcccaacatcgtggttttggttacgtccaatttgccgtcgaggaagatgctaaccgtgctattgagctgaagaatggtacatctgttgaaggccggaaaattgtagtgaagcatgcaatgcctcgtcctccctgtgaagaacggcaatcaaaaccaaataaagagggcaagacagatgatctcacaaagccaaaagacgatgatgaagacagcacattatctggagcagagaagaacgtttcagttttgaaggaagaagaagtacaagtcagtaaacaaaaaaacatgaggaagcccacagaaacgaaaaaatcagctctctgtgatgatgtaccagatga

SEQ ID NO: 11854 - DNA, 439 bp, Glycine max
  Clone ID: PAT_MRT3847_110711C.1
aaaaaaaaatcacgtaattttatttaattaaaaaaatacctttttacccccaataataggaggggatcgaaattcttgggtcatcatcacacttaaaaaatttggtttttgggaaaagcaacacatgtttggggaaggagggagtttaacggggagcaggatgagccacccttttgcgtagccaatttggccatttttgccaactccctcactttttttttaagttttttccccttgactccttccatcacctccttaaccggttttttaaacccttcccttttaacaaaccctttaaccgacccatcacacgtttccaccctcaaccccaccttcactttctcctccaccattcttgcattcaaaaactgctcccccattattggccaccccactttcggaacccctgctgggacactcttcttcaccgagttccacc

SEQ ID NO: 11855 - DNA, 585 bp, Glycine max
  Clone ID: PAT_MRT3847_110712C.1
ctcgagccgtggaaattttggttgagatgggaaagaagaacaaagtgaaggaaaatggaggcaaagagcattgcccctcgactctttttgtctccaacttgccctattccttttccaattctcagttggaggagacgttcagtcaggttgggcctgtcaggcgttgcttcatggtcactcagaaaggatcagctcaacatcgtggtttcggttatgtccaatttgccgttgaggaagacgctaaccgtgctattgagctgaagaatggtacatctgttgaaggccggaaaattgtagtgaagcatgcaatgcctcgtcctccccgtgaagaacgacaatcaaaaccaaatcaagcgggcaagacagatgatctcacaaagccaaaagatgatgatgaagacggcagatcatctggatcagagaagaatgtttcagtttcgaaggaagaagaattgcaagtcagtaaacaaaaaagcacaaggaagcccatggaaattaaaaaatcagctctttgtgatgatgtaacagatgagggtggttgctcaaaaaagcaaagggttgctagaacttgtatatttggggggc

SEQ ID NO: 11856 - DNA, 1708 bp, Glycine max
  Clone ID: PAT_MRT3847_110713C.1
ggctcgagctgtgacttgtaggtgatggaatgggaagcattgctgtaccgagtagtgagcgtgccaggacagattggactgcttctatggagcagttttttatagagcttttgctggatcagttgggtaggggaaatcaagtggataatggattcaataaaaatgcgtggacagatatgctagccatctttaatgctaagtttggatgtcaacatggtagaagggttttaaagaatcggttcaagaaacggttgaaacattactgtgatataacaaatcttataaaacaaggctttttgtgggatgaacaacaactaatgcttttggctgatgatgatgtctggaatgcttatgtcaaggcacatctgcacgcaggaacatatagatcaaaaactttgccaaactatcgtgatttagaattaatattcagaaacatggctgaaaatgagatcagtaatttgcaacaggagaaaaatcatgaagatgtcatatcagaaacaaaggctggtgaagcaaaaggaagtcgcaacccaagtggcactgatcgtactagaacatattggacacccccaatggaccgatgcctcattgacttgttattggagcaggtcaaacatggaaatagacttgggcagacattcatttcccaagcttggaatgacatgattacaactttcaatgaatgattcaaatctcaatacgacaaagatgttctgaagaatcgttacaaacatttcaggaaacagttcaatgatgtagaccatcttcttcagcagggtgggttttcatgggatgatacaatagaaatgattgatgcagaggatcatgtttgggatgcttatacaaaggcacaccctgaagctccaccacttagagttaaaacgttgccagactattggaaatggagtgttatatttgcagcagaaagttctgatacaagatacgtccatttagcacataatgaagatcacagtagtgaattaccaatgtatataacaggtgaacagaagaatggcatttgttcaaatgtttacgatgctggttctacaatagagtggacagaatcaatggaatgctattttgttgacattatgattgagcaagttaatagaggaaataggattgaaaatttatacaatgaggaagcttggatgcacatggtccaagcatttaacgctagatggggactccaatctgataagcaggttctaatggatcaatatttctgcttaatgaaaaaacatgatgacatcagcaatattctgagtcacagtgaatttgcatggaatgaaaccctacaaacgataaatgctgaggatgatgtatgggatgcatacatcaaggatcacccagatgccatctcatataaaaacaattgtttgtatcgtttctgtgatttatgcaagattttcggaaacaaattaatggaagtaccagatgtaagagtgagtgatctggagcagcttcacttgatggaagcaaatgattttactatagaaatggatatggatgaagcaaatgaaaatttgcttaatattagcagtgttgacatatcagaccagaatccgggcaggacaagggaaatggatacggatggatcatttgcgaatttgggtgtgactagtagcagtgcaacatcaggaaacttagatgtgactagtagcaatgcaacatcaaaccaaaatacagaaaggccgagggaaaatag

SEQ ID NO: 11857 - DNA, 1052 bp, Glycine max
  Clone ID: PAT_MRT3847_110714C.1
ggtccggaattcccgcgtcgacccacgcgtccgcattgcccaagattggaatgacatgattacaactttcaatgaacgattcaaatctcaatacgacaaagatgttctgaagaatcgttacaaacatttcaggaaacagttcaatgatgtagaccatcttcttaacagggtgggttctcatgggatgatacaagagaaatgattgatgcagaagatcatgtttgggatgcttatacaaaggcacaccctgaagctcgatcacttagagttaaaaccttgccagactattggaaattgtgtgttatatttggagcggaaagttctgatgcaagatacgtccatttagcacataatgcagatctcagtagtgaattaccgatgtatataacaggtgaacagaagaatggcttttttccaaatgtttatgatgctggttctacaatagagtggacagaatcaatggaacactatattgttgaccttatgattgagcaagtaaatagaggaaataggattggccatttattcaatgagcaagcttggatgcacatggtccaagcgtttaacgctagatcggctcgagaatctgataagcaggttctaatggatcaatatttctgcttgatgaaaaaacatgatgacatcagcaatattctcagtcacagtgaatttacatggaatgaaaccctacaaacgttaaatgctgaggatgatgtctgggatgcatacattaaggaccacccagatgccatctcatataaaaacaaatgtttgtatcttttccatgatttatgcaagatttttggaaacaaattaatggaagtatcagatgtaagagtgagtgatctggagcagcttcaattgatggaagcaaatgattttaccattgaaatggatatggatgaaacaaatgaaagtttgcttaatgttagcagtgttggtatatcagaccaggatccgggcagggcaaaggaaatagatgcggatggatcatttgggaatttggttgtgagtagcagcaatgaaattgagattgttgccgttggaacatc

SEQ ID NO: 11858 - DNA, 217 bp, Glycine max
  Clone ID: PAT_MRT3847_110715C.1
gacacaacaaattggcccgacgccgcttcggcaccccactttgaaaatatatagtatgaaccagtacacatattaactacctattggagccaattccacacttcagtgcggtcagggaaaatgaaaaaccaagcccttccctcctaaggggaggggggaaccaaaccagagaagtgaaccaaacaaaccgagggaggcacccccccgaaaagaacca

SEQ ID NO: 11859 - DNA, 185 bp, Glycine max
  Clone ID: PAT_MRT3847_110716C.1
gctacagttaacctctccaactatagctttgagtgtggaaaaagctgaaaggttttggcacaattttgccatattctagcgtcaagtgagatggattattatacttcattattctatatacaatattttgcactaatgtatatagaataatgaagtataatattgtgcaatttaaaaaacaaaaa

SEQ ID NO: 11860 - DNA, 573 bp, Glycine max
  Clone ID: PAT_MRT3847_110717C.1
cgccaggactgtcgatgcaagtcagccgcgcgctcaattcggacatggacaccgaccgccccccgttctcgatcaggattcttaccagcacaggacgatggcagggatcgccacggagacaatcgacagcttcatcactgctgcctcgccaaaaagctacgatggatctgacctgaccccttcgcagtattccgacgcctttgcaaatcaaccgacagatctcacagaggatgccttcactccgttcgaatccgtggatgacctacaggacgataggtctataataaaggacatcgatctcgcttctctgggtcatgcgacgcatgatgtgaatgaaagcgcaaactcgctcagtaagaagctgttcgcatgtgaaatatgtggccgctctttccaacggatcgatcaccttgccagacataaggtcaaccacgatagcgtcaagccgttcaattgcatcgtctgccatcgggctttcgcccgtaaggatgtctatcggaagcacttacagaggcacgaggcggacagacggacgcgcaaaccccacacggcaccacttcatgcacattgatc

SEQ ID NO: 11861 - DNA, 255 bp, Glycine max
  Clone ID: PAT_MRT3847_110718C.1
cccacaccttcggattgcacctttgaaagctttcacaatcatctatccctgtcgcaacatgggttattgctgcaaaacctacaatctcacgatagagcagcactcgcaccctcagcacgactcctcctgccattacgtcatctactactcactcttgatgtacacttaacactcactccctacaatcattaagccatcacctcttccattatctgatcacccagacaagcctacgttacgtcatactagctacca

SEQ ID NO: 11862 - DNA, 314 bp, Glycine max
  Clone ID: PAT_MRT3847_110719C.1
acgagagaatatcgaaaagtttatcaattgggccaaggattaatggtgcttttcgttggtcccatgttggaccttcttctacgttttctttttccctttttggattcttatgttgagaaaggcaaaaagcatttgatacttataatttggttatagacaaaatgaagtttatgttggagtcgttctactactattctcaaaaaaaatcattttgtctataaccacggctaaaaatgttatgttggagtcctcctacgattctcatgaagtttatctcacttgtatcaataatattcaaaaaaaaaaaaaaaaaa

SEQ ID NO: 11863 - DNA, 268 bp, Glycine max
  Clone ID: PAT_MRT3847_11071C.1
tctctctatgttgacgctagctagggtttctcttcctgctttgtaaatttcatcacgagtctctcatatttttacaatgggactattctcccatcaattcgtttcacgaaattcaaatgtgtagtaggatacccagtgggttgttcttcaatcaaatgcaaactcgcggctagactcgctctaactcgtgattttatacagagttagccaattttccatcaaacacccaaaaatgtccaaaacgtcaccgtttcgctagggtttgttt

SEQ ID NO: 11864 - DNA, 1356 bp, Glycine max
  Clone ID: PAT_MRT3847_110720C.1
gcatttgttattctttcgatcagctatgaagtaaagagaagggcaaggagagatagatagggaagaaaaatgagtgtatcattgactgtgatgaccttcaatctccatgatgatgagccacaagacagtcctaattcgtgggagaagagaagggatatgtgcataagcgttattaccagttactcacccatcatcctctgtacccaacaaggagtgaaagcacaattggattttctccagcagggtttgccaggttatgatcaatttgggatatcacggaaagggccccaagacactactgaccagcattgcactatcttctatgataaggaaaaggtcgagcttctagaaagtggaaccttttggttgtctgagtctccctctgtacctggacgcatgtcatggggctctgaagttccttgcattgcaacatgggctacatttcaactgaaaggtgttgagcctcctggattctcatttcagatagtaaacacaattatggatgagtttagtcctcgtgcccgtaggcgaagtgctttacttacatcgccgctcattgcgtcctggcccccctgcctaccggttgtgtactgtggaggtttcaatacacaaaaggaatcaactactggacgctttcttcttggaagatcaagagagcatggtgtcgttggggatatgagggatgcatggcctagtgctcgtgtgaggaaaaatgtttccctaatccccacttatctggggctcttgggtgacaaacaaggaacccttgaattcctcaagttaatttttagagctctctgcctctgctgggatcgtcaaacacaggatcttcacattgattggatccttttcagaggtagatctttgattccggtttcttgtgaagtggtaaatgataatattgatgggtattatccatcatctcattttcctatatttgccgagtttatgcttcctcgcactgtaagaatgctagaatcacctgtacaagaagatagctaaattcttttttcttgccatatctggtgcttcccttgtggtgctcttcttctcctttttatagctgtccatcatgaatgtattttgtaggtaaattggggtttgtactttgtaggggtattgaggggagggaagagtttgaagtatgctttatgtttttctgaaaaatgtggacacatcattgtcagcaaaatttgttagctgaatactgccccccataattgaggatcatgtattgaatcatatttaatttgcttataaatttaatttgttcctgctgtaactttcccaaaaaaaaaaaaaaaaagggcggccacagcaagtgagctgcaaacccggaaattataagaccggtcc

SEQ ID NO: 11865 - DNA, 291 bp, Glycine max
  Clone ID: PAT_MRT3847_110721C.1
cttaacctagatcgcaagcggtccaccttggatttctttattaaactttgcctgcgaactaagactctattactacctggagccgaatgatctcattgaatgtggacatatgctccagcgataccggcatgataagcgtggttccaccatgcgatagccaaacatacgagttgagatagtagaacttggtgacggacgtctgctgatgttttgcatctactacattagcgctaacacatgtctgcatgaaagctctaaatgtgaccacgacggaactagcacattcctccc

SEQ ID NO: 11866 - DNA, 477 bp, Glycine max
  Clone ID: PAT_MRT3847_110722C.1
acggctgcgagaagacgacagaagggatatatattaattatattaattctattttataaaataaaatatttattttagattttcttaagattttgttttaatgagtcaactagtttgttacatttattgtgacaaccgtatgttgatttccaacggtcgtattttatttttgcataaatacaatctagtttgattctcctaaaaaaaattctcttcattttcctataaaaaacttattttttgagagcaagagagttgatgttcagaaggtttggagatcatttcactgcacacgatcggaaccaacaggttgtcgtattttgggagagaagcgcaatcaaattttcctactgcagtgggagcgttttctctctaaggataatgtttgcgcgctccaacccaggttaaatattttttccctaatttattttttccttgtttttattgcatgatatagtgtatttgttgatttatata

SEQ ID NO: 11867 - DNA, 411 bp, Glycine max
  Clone ID: PAT_MRT3847_110723C.1
agacaaactggactcatgaatgccagattccggcaacatcttgtgaagatgtggcgaccaagcctgaagcatcagggtccactgagcaggagaaagttttgaatgtagataagttggctaacattgtatatcaagaacatggagggtgtttgaaaaaaccgagagggaagagaaagaggaaggattgtagcagaagtattaacgaagtaagtgtaagagaaagtgattcttcagctgatgtgtgtaaagaaagttctctcagctacttgtgcgagaatgttaaatcttctgtgtgaatgaggagaatgcaaacttgaaaacggctggaataaaagatttgatggagctcttagattcttttttggtagttcaaggtgcttctgtcttcacttataagcatgataaccagaa

SEQ ID NO: 11868 - DNA, 462 bp, Glycine max
  Clone ID: PAT_MRT3847_110724C.1
cggacgcgtgggattaaaaaaaaaaaaaaataaaaaaaaaaaaaagaaaagataatattaaaaaaaataaaatataaaaatacaatttattaaataaaaaaaaactataatatacaaaaaaaaaaaatgaaaaaaaatatgggggcggcctttttaaaggatcaaagtttacatcccgttctttccaaattaataatttttttttggggtcccctaatttaatttatttggccatattttcaaacctgataacttgggaaacccttggttttcccaaattttttccgttgaaagagattccccttttcccaatttggcttattaaaaaaaaggcccgctcatttccccttttaaaaattttgtcccccttttttgagaattggacccccccttttaccggcattttaaactcggggggttgggtgtttacccccaagttaccctttacttttgcatgcccct

SEQ ID NO: 11869 - DNA, 398 bp, Glycine max
  Clone ID: PAT_MRT3847_110725C.1
gggggcccatttttcccctcaacattatttgaaaaaaacaaccttgtgctgggttttattttgccccttcacattgcacccacggggaaaacttttggttcccccaatttaaccataagtccaggggtggccccaaaaaaaaaagaccctcgtttttttaaacctttccgggcaaaaggggagggggatcaattttttggaacccttaaaggcgggccccccccggggtttgagggcccctttgggggggggtggaagcaaaataattcgccccaccccctcctaataaattgcccgggttttttgggacccaaaggaaacctttttctccccaattttttcccaaagagtttttgcgtttccaggaatctaccccttccggtgaaccctaccccccc

SEQ ID NO: 11870 - DNA, 262 bp, Glycine max
  Clone ID: PAT_MRT3847_110726C.1
gtcgacccacgcgtccggtttaatccaacgagtaatgtccatatccagtttgtacaagaaaataaaaaccagtttgtgcatattttcactttggtttagattatgtatatgcttcatctattctctagaagattcgtactctatttatcaagaaaaaaaaaaaaaaaaaaaaaaaaaaaaaaaaaaaaaaaaaaaaaaaaaaaaaaaaaaaaaaaaaaaaaaaaaaaaaaaaaaaaaaaaaaaaaaaaaaaaaaaaaaaaaa

SEQ ID NO: 11871 - DNA, 277 bp, Glycine max
  Clone ID: PAT_MRT3847_110727C.1
agcaaagaaattagggcatactatatccaccctgggactcacattaaattaagagtttttcgatacaccttaaaattatatcataacttctaattttttgtggagtacaacgaattgaaatcactattcttatgataaaacgaggccatgtgcggggagaataaaaattcttattacctgccgtcctggaagaattgtaatatagccaaaaagccactattttaataaggacttcgagggacctttaatcccgaacaaccaagagataatggcattt

SEQ ID NO: 11872 - DNA, 107 bp, Glycine max
  Clone ID: PAT_MRT3847_110728C.1
aattccgaagggaaagagatgttttttatgggtaatgtcgcccgcaaaagccaggtcctctatcggaatcgatttggaacgactactcttgctcgcctgtggcaaca

SEQ ID NO: 11873 - DNA, 391 bp, Glycine max
  Clone ID: PAT_MRT3847_110729C.1
acgcagacgaaagagaccgaaggctacagcgagtttaaagctacagacggtgcgtccgcggccactgccaacgcaattaacatgatgtagtatgtgcaccggatgtcacctggttcgttgtgggcccacagaggacactctcccggtcaaacacttgactctatcgaggttcatgacgtgcatcatgacttgtgctaatactcattacatagcacccttggacgtgatcgacaacattcacatggagacacctcttccgtacttcttgcactcgtaagctggtactacaaagatgtccatctacgaggtctcaaatgcatgttgaacaatataatgaacagactttcagacatacgttacattgactcaagttcaagataccgatactcat

SEQ ID NO: 11874 - DNA, 500 bp, Glycine max
  Clone ID: PAT_MRT3847_11072C.1
gggacaaacattggccgagttcctgactccttaattatattgatttcttttagtcaactaacgccacttattaacgattcttcttggccgcgttcctgactccttaattaaattgattttttttagtcaactaacgccacttatgaacaattcttccataagtcactattaaagatgaaagttgggatacatgcatcttgtcaaaaggattaatgttctaccttcaagtagggtttgatggcatcttctcagtttatgtccgaactttgaactcctttattccttaggcacaccaatattacaaattgtaatataaaatccgagagtgtcaaattgattttcactttccacgcagataggtaactttcatagtaggatttgggattgacatttggcagatagcatcgctttggtgcagtgagaagtgaaaaccgacacaactctttcatgcatgacgaaaattaaggtactaatttggacttgttgactcattttttttg

SEQ ID NO: 11875 - DNA, 2269 bp, Glycine max
  Clone ID: PAT_MRT3847_110730C.1
gacactatagaagagcttgacgtccgcgcacgcgatgcgcgggattcggctcgagctcgagccgaatcggctcgagcggctcgagctttttggtcggcacgtttcgtagacccagcgatcaaatatgaatagccacacagacagagaaacaaacactccttaacacttttcacggttccgccgccgaaaccgaatcgcgttcacgtttagtaaaaagttcttagattctctcgtttgtgcgttccagaaagcacaagaggaacacaaggaacgatgatgggttcaacggggagggtggcgaagctgggttccttccgccacagcttcgcggagaagaaggagaggctgctctccatgaagggcggcggttactcccaaatagggatagggattgcgctgccggagtccgacgaggaggaccagtcgccgacgcggaggagctgctgctcctaccgcgccgtctcggacgggatcgtcggcgcgtggaagaccgcgaagcacgtggtggcgagggcgtgggaaatgggtcgctccgatcccagaaagatcatattctccgccaaaatgggactcgctctcattcttctttcgcttttgatatttctgaaacagccctttgaggacattagtaaacactccgtttgggccattctcactgtcgttgtcgtcttcgaattcagcataggggcaactcttagcaaagggcttaacagaggattggggactttgttagctgggggactagctttgggaatgggacttttatcaaaattggctggaaaatgggaagaaaccattatagttattagcattttcactgcaggattttgtgtcacatatgcaaaacaatatccaacaatgaaggcttatgaatatggtttccgtgtgttcttgatcacctattgcttcattattgtatcagggtatcgttcaggagagtttgttgaaacagctgtagatagatttttgctcattgcactgggtgctgctgtggctctgggggtaaatgtatgtatatatccaatctgggctggtgaggatctacacaagcttgtggcaaaaaatttcgtgggcgttgcagcatcattggaaggtgttgtaaataactatcttaattgcattgaatatgagagagtgccttcaaaaattctcacgtaccaagcttctgaggatgtggtttacaaaggctacagatcagctgttgaatctacaagcacagaggattcattgatgggttttgctgtctgggagccacctcatggtcgatacaaaatgcttagatatccatggcaaaattatgtgaaagtaagtggagcactaaggcattgtgcgtttatggtcatggctatgcatggatgtatactttctgaaatacaggctccacctgagaagaggcaagtgtttagtagggaggttcaaaagctaggttctgaagcagccaaaattctacgagaacttgggaacaaagtaaaaaagatggagaaactaggcgaggaagacattctttatgaagttcacgaggcagcagaagaattgcaacagaagattgacaaaaaatccttcctccttgtaaattcagagagctgggaaattggaaaccgtccaagaggggagggtgatcctcaagacctcttgaacatgaatgaagaaagacactttttggagtacaagtctctcagtgaagctgtgcttgacctcagaactgccaaagttccaagaagttggggagaactagcaactcctgacaacaaacctgcagcacctataggtgttggtgatgaaaacttgttcaagaaacagatatcttggcctgctcatatttcatttaaagcagatgcagggacaagagaggaagaatctaaaacctatgaaagtgctagttcattgtctctagcaacatttacatcccttcttattgagtttgtggctaggctccagaaccttgtggattcttttgaagagttaggtgagaaagcaaaatttaaggaccctcttgagcaagcaccaccaacatctggtgggttttggaacaggttgtgtaattgtttgacattcaaggactgagatatgactgcatatacatatcatggactgatctaaattaaatgccggtatcccaaaatctgtgtgtgctcttctgattctttagataatctgaactcttcctcagagtatttattcttcattggctttgcctgccaaggacaactcacctcttgttaaatcaacaactgccaagcgctattactgatactaactaaattttgac

SEQ ID NO: 11876 - DNA, 331 bp, Glycine max
  unsure (1)..(331): unsure at all n locations
  Clone ID: PAT_MRT3847_110731C.1
ggctcgagcacccccaaacgccgtatctccttctcaaactcccctcctcaccttactccgtttggcgtcacgtcacctacaacggctctcttcgcacctcgcgaatccgcgcaactagagaagaatccgcgttggccgagcgactcaacgacgtcgaatggaccggaaacggcgccgacgccgctgctgctgacggaaatggcgcctncggttggtggatacgttacctgcgctactaactgaagcttggtgaagtactgctacgataacggaaacggcgtatctgcagatgtgtcggaaggtgaagcctctaataagctgatcgaggatg

SEQ ID NO: 11877 - DNA, 159 bp, Glycine max
  unsure (1)..(159): unsure at all n locations
  Clone ID: PAT_MRT3847_110732C.1
ttgcgaccgccttggcggccgcnccaaacagagcccaaagncaggccaactacgaaggaagcagccgaaacaaaggaacagcaagaagcaggcaangagaaaccagcngagaacagaagacggaggacgcggacccggggagacaacaacaaggagggc

SEQ ID NO: 11878 - DNA, 233 bp, Glycine max
  Clone ID: PAT_MRT3847_110733C.1
accacgcgtacgaacacgcgtacgaccacgcgttcgagtgcatccaaagccgttgaagaagggtcactgttttgagtttgtccgcgaaggaaagaaactctatatctagctatccttatggatcggtaccagaaggtatacaagccaacagctcaaactgcaatctatgaaaacgagatccggattactgacatgctacgatgcgtaactacattacttacgccatgagcttg

SEQ ID NO: 11879 - DNA, 529 bp, Glycine max
  Clone ID: PAT_MRT3847_110734C.1
cggggcgacggggtcactaagcggggggaaagcaaaaaaatatattaatacgcattcaataacaagatatttatattaatatatacaagttgcctcgcaatttatggaccccatatattatacaattctaccaaaatatcattctatgttcatttttctttctcaatcacaccctctattcctcatcagcagtaaaatcaggttctgcaggcttctgaggcagcatgggtggtaatctctctggcaccctacccttctttgtaccattgcgacgtaacaatctgagtgcattagcagcaaaccttgaagcgtatattgtggcaccaaggctaggtgagctaccacctgctttagccaatgcatcttgcagcctattctcctcttcgacgagggactcttcaagcttccttttactatagcgccgccatgctgcttgaatgaaacatgcagcccatgtgcgccactgttgcgagtagaacctgaaagtgtggcgtagctgcttactgtgaaggcgccgaaactgtgatgc

SEQ ID NO: 11880 - DNA, 250 bp, Glycine max
  Clone ID: PAT_MRT3847_110735C.1
tgtgaccaacgctgacggcgtccggaatccgtgtcgacgagctcaatcgtactaggcggcggccgccctttttttttttttttgtcttttttattccttttagatctatattgtgacattttaatgcccccaaggaatatctaatgggatctttggcggtagaggcacatttatccatggacaatactaagccgggggactatattatcttttgatgccatacgcaaacatttggcactgaaagatccga

SEQ ID NO: 11881 - DNA, 119 bp, Glycine max
  Clone ID: PAT_MRT3847_110736C.1
cccacccgtccgagaaatgctatagatagaggaagctatagcgcagatctcgcgggccgattacgaacggagctcaggtggcgcctccagctgagctgaagtgtgctcgactcttatca

SEQ ID NO: 11882 - DNA, 349 bp, Glycine max
  Clone ID: PAT_MRT3847_110737C.1
gtcctcccgaaggaatctctctcaccggttattccttttccctcactacttcatacgcttaagttcgcgacacaggcatgggtgcaccatcgacgaagtacacccaccagagctgcactagcagatgctccggttccgaacatgattgagccatttaacccgagtctagactcctcagtataagcgtcacagataccgacgcaatcgactcctccagctacgacaaatagacgaagttttctacgcgcgattgacattaggtagctcatcaacgagatttcgatcgccagagcttcagatactcggctcggatacgaattccgcggactgtgacagacgtctctgggaa

SEQ ID NO: 11883 - DNA, 420 bp, Glycine max
  Clone ID: PAT_MRT3847_110738C.1
tttcggtgtttcacttccgtaattctcaacacttccaataactctttctcttttcttcttagaacggtgattaatcgttgtttccgttatgaaacgctctgaatttgagttccccgcaactgtttttcccagtgcggtctccgacgacgtcgttttattcggcaaactcataacgcgccgaaccggagaaccgggtccagcgccgtgtgagaagagcgaaaaccgggttctgttgagatccgagtcttcttcgggtgggaccaacgggtttgtggcgtggctacggtcgccgtccgggagggaaagccggtaccggaaaagcgagagttgccggagccgtgataagatggtgctgaaatttccactgcaaatggaactgagtgacattaagatgaggcaggaacggggggagccgatgcc

SEQ ID NO: 11884 - DNA, 127 bp, Glycine max
  unsure (1)..(127): unsure at all n locations
  Clone ID: PAT_MRT3847_110739C.1
gacttgtcattgtcaatatcagtattatgccttgtcacaantctataactgatcaatttacttcaagtgctaccttcaaaaggccgatggcttaagaggtcactcaccatttaaccctcagactttt

SEQ ID NO: 11885 - DNA, 396 bp, Glycine max
  Clone ID: PAT_MRT3847_11073C.1
cgtcgagccgcgtcggcgtggaaagacgccacaggggggcgcatggctctcaactgcggactggcggatccctccgggggtcccatgtcgaggacttctatcagcctagctttgttgatatattctttacaggttggagtgactccatgtaggcggtagggagcgacagtacaggatgaagtagaggaggctggtgcttgggagtgagacgtgctagcgctgagcgtggatggtggaagccgggtggtggggacctgcttggagcggtgaaagaggagtgggaggtaatgagttaggcatgcgcgggaagttacagtggggatcatgatgcatggagcgtggatgggtgaatacacgtgggtagcagagcctgctaaggcatgctagagactgctg

SEQ ID NO: 11886 - DNA, 242 bp, Glycine max
  Clone ID: PAT_MRT3847_110740C.1
attcggctcgagcgaagatttgagaaacgagttgacgggtggtcatatctttaccaagtttagttctagtgtaagtaagcgagtcttgaaagtcagcttggactttactcggctcttgtggtatgatcctaaatggaaaaatcaaagtgatgccaagattgtcaaaacattgcccatcaagttggtcaaggatattgttcctggagcgtcaaccaataatttgaccaagaaacgttttttgc

SEQ ID NO: 11887 - DNA, 599 bp, Glycine max
  Clone ID: PAT_MRT3847_110741C.1
ccacgcgtccgcggtcacgcgtccgaagaaaaaggcatatctgaagcgaaaaagaggacctgcagagtgatgggattgcggcggctgttggagttttgtcaccgtttccgttctattactgcctctggatttggccacagtcatgggtggacttgtgtggcagagcccgagacccatctaagggtttatcagctacttggtgaggctggcacatactacggtgtacgctttggaaaaactattccctgggtaactgaattcccttttggtgtcatcaaagatcctcagtacgttggcagcattatgagtcttcttgcatgcttcttgtgggttccttttcaatacattctcctttgggtattaggatatgtgtttatgatgcatgtggaatcaaaggaagatccatctactcgtgccaaaccactccattgattgaatttccgtagattagaaagaacttgaggatttagcagcacctgaggtgccaaattctttgtatgttgctgtttctttcctctgctctggaatgatcatctctatttatatgttctgattccagcaaattatttctaatgaactgcgaacttatttctgtttct

SEQ ID NO: 11888 - DNA, 948 bp, Glycine max
  Clone ID: PAT_MRT3847_110742C.1
gagacagtgtgcccggttggtgagaagcaagaaaaatatatatatctgaagcctttattttttcttattattcaccgaaaaagaggatctgcagagtgagtgatggggattgcggcggctattggattgttgtcaccgtttccgttctattactgcctctggatttggccacagtggtgggtggacttgtgtggcagaggccgagaggcccgagatccatctaaggttatggcttacgtttcttacttcttgaagctcgttcagttcatctccctcttctatgtttcttctttccactggcctcctcctttctacttctggcccctcattgcctttggccaattcctaaatttcagggtttatcagctacttggtgagactggcacatactatggtgtacgctttggaaaaacaattccctgggtaactgaattcccttttggtgtcatcaaagatcctcagtacgttggcagcatcatgagcattcttgcatgcttttcgtgggttccttttcaatacattctcctttgggttttaggatatgtgtttatgatgcatgtggaatcaaaggaagatccatctactcgtgccaagccactccattgattgagtgaatttcagtagattagaaggaatttggaggatttagcagcacctgaggtgccaaattctttgtatcttgctgtttctttcctttgctctggaatgaacatctctattttatatgttctgattccagcaaattatttctaatgaattgcgaacttatttttgtttctcatgacgtgtgtatttcaaacatgtcaaagcattagccgattaatttaatgaatgcaacgtcccacctttgataaaaaaaaaaaaaagaaataaatataaatgagaaaagttatgcaaatacaagaagtaaaaaataaaaatttataaaatttaagaattatattaaaa

SEQ ID NO: 11889 - DNA, 403 bp, Glycine max
  Clone ID: PAT_MRT3847_110743C.1
atcacaaggttttaaactatcttgaaagtcactatcaacactgggcaacagggcctaaaatattaataatcgggtgtttcaatgtattcacacattacaacaatctactacatgagaaaggatcctagccacaacagagcacatgtcgagaggaataacatcgtacacaaagatgaaaactactaatgtgaactctactgatccaagagacagaccacacacataccgagctgctcacataattcattagttgtacaacgacaaaacatagattccaatcccaactttcacacttgcatccccttacagcactgaccttcgcggagccagcaccatcaggaagccgcacatatatgccaacaggactgcgaacaggactatgactcccgccatcaactacacc

SEQ ID NO: 11890 - DNA, 241 bp, Glycine max
  Clone ID: PAT_MRT3847_110744C.1
aaagcaatgtttagtttcatcctctcatctattccatcaacacaataaaagtcaaaacacctctcataaataaaagagtgggaaaaaatggaaaaaggaattaccaacagcctgaatccgaagtacatacacccaactttaaagatagacgtgtatcattaacaactacctcataaactcacacctgatcaaccaaacaaatctagaacaccccatgctatgatgatgaggcctaatgatg

SEQ ID NO: 11891 - DNA, 323 bp, Glycine max
  Clone ID: PAT_MRT3847_110745C.1
ccttaaattattaattttagagaactacaattttacactttcatttgcagaacggactgaaagaaagccatccttggaaagtttttaatacaacccaatatatatcaagcactgcataaacttctaacagtttaactgcatatcttaccctaaaaacctgctgatttcattagataagacaactttaagttaacaaaaacttatgaaaaattgccctctttgtattcactcagaactttttggagggggctgacaacctccaattgatggaatgtcttatgccagacatgtgttgaaaacgatagcttgaaatctcatttttt

SEQ ID NO: 11892 - DNA, 411 bp, Glycine max
  Clone ID: PAT_MRT3847_110746C.1
ctggtatacagcacacaacaaattctctcaagatctgttttctttagaatggggaatgcagccgcgactccatgctcccatccaaagaatacatccttataggggtcgacaaaacttattttgtgggatggcacgatgagatctctaaagggtaagcacatgtgctagtgagatcatgtttgagtttccaaacaaggtaggttgccatgcagattctatagtcattggacacccaattcctgctgtagccttaaaggatgagctcattcaaggggaagcctatttagatctcccaattgataggttgatcacaagcaaaaccctatctgtgccttcactcttgtccttgggatcacacactaattacaagtccaccatcaaaattggggagcgtccttaggagtacttgaa

SEQ ID NO: 11893 - DNA, 334 bp, Glycine max
  Clone ID: PAT_MRT3847_110747C.1
atttgtttcgggctattatccgggtaccgctatagacatttaattattagactacctattgggcctgagtagggatgaaacagcccgaatcataaatcaattccttaatggactgcttgttataaaacttcatatcaaacacatctaacatattctcatggaaagccgtcgatatcatcaaaaaactatattctctggcacaaagcatccttaatttatcaatcattcaagattaatgggctattctctctatctccttttataactatcggtgtctttaattattcttcagcagatcaacaggatctcaaccgggagcccgagcttgttgata

SEQ ID NO: 11894 - DNA, 233 bp, Glycine max
  Clone ID: PAT_MRT3847_110748C.1
ctttctagcaatttttgacatttacggtctcaattgtggctgacaagacaaaatcttcatctaaagtgatatgcctcagtttttcacatgtaaccaaattaagcaagttagtgtgataaactatcagaatgaccaattttatctaaagagacacctaaaaggactaaaacaaaactttaaacctaaaggatcaaactaaagtgttgataagagaccaaattatattatcacct

SEQ ID NO: 11895 - DNA, 325 bp, Glycine max
  Clone ID: PAT_MRT3847_110749C.1
tccgacgcttttgttttcgggccgacagacaggcaacacagagggggaaaaggtttccacccatttcgcggcagcatcagtacatgtgccaacaggaggcggaacctggccactactagctgtgagcgggctccacaggaatggttgagtgcattgacacccaattcacattgctgaaagaactcctgtcaaacagcaaaaggacaccgttgaataaggcgcatgtgcaccaccaaatgagggaggctcattggctgatgccagggttggaaatcaccaacaaattggtggacttcaaagaactgcaagcatgggatgactgccc

SEQ ID NO: 11896 - DNA, 229 bp, Glycine max
  Clone ID: PAT_MRT3847_11074C.1
aacctgcaccaggaccaatatggtgatggttttgggaaagatcacaaccaaggccatcgtggactattaaaatattgtgcgtgacacatgcaagaacattggttttgattatgatgatgtaggtcttgatgctaactactgcaaagtcctcatcaacattcagcaacagattcctgatattgctcaacgtgatcacgaacacctcactaagaggtctgttgatattgga

SEQ ID NO: 11897 - DNA, 118 bp, Glycine max
  Clone ID: PAT_MRT3847_110750C.1
ggactcaacatgaataccagtggtgcattatacactgaatagagatacacatgtcttggtacatgagctaggatctgatgcaaagttgcactatatagaaaagagaggcatgaatgga

SEQ ID NO: 11898 - DNA, 168 bp, Glycine max
  unsure (1)..(168): unsure at all n locations
  Clone ID: PAT_MRT3847_110751C.1
cataangacttaatttgagatgtgaataaagcgaacaaggtgggtgtaatctgagtgaactgatcggcaaacacaacccatatgaagataatcgtggggctcgaggaacctgatatcattaacgaagtgaaggcaaaacacaacatcaaaatttcgtttctgaaccag

SEQ ID NO: 11899 - DNA, 193 bp, Glycine max
  Clone ID: PAT_MRT3847_110752C.1
tcgaccacgcgtacgacacgcgtgctcaggctttgaatgagctagtaaaataccaacgatgagctgaaaagtgctgcggaataggatccatggactgacatgtccaaatagctgtacttgccatccgaaatgctccggatgctcatgtaccgtgcacacttgcgcactgacctagacccatcaatgggaggct

SEQ ID NO: 11900 - DNA, 183 bp, Glycine max
  Clone ID: PAT_MRT3847_110753C.1
ggtgggggtggaaggaggtgcagacactaaaaagagagaagttctcgccaaccagaatgagcagagaaatcattatattcaacgcagtgatggatggtaacccccatacgacacgcaatttcatttatacgacgcgcgttctttaggagaggaaccaagcgggggggtggcgtataacccccc

SEQ ID NO: 11901 - DNA, 441 bp, Glycine max
  unsure (1)..(441): unsure at all n locations
  Clone ID: PAT_MRT3847_110754C.1
ctgacgatttttttattttttttatttatatttttcttaaaaaataannntttataaataatattattgttaatctgcgcaacattacaaaccaatatttcctttcttaactataaacaattataatcctactatttatttcctccattcaaatactacaataaccctctctaatactaaaactcatcctttaacttttttaaaccctcactaccccccctttttgagcacatatcacactatatactttctctttttttcaatactaatttctttatatttttcactaacccaaccttttattctttaaaacatacacggatttttttcccccgcgaccttattgttttaaaaatttattccacaattgtataaacaccacaaattgcaacaccccacatgtttttccccaattccatcttgaagtatccattttccccc

SEQ ID NO: 11902 - DNA, 193 bp, Glycine max
  Clone ID: PAT_MRT3847_110755C.1
cggaattcccgggtgcgacccacgcgtccgtttgattttttagcaaaatatcaacaccatagaccaggaaaaaaatttgtgagttcttccaaggcattgctagaagggcatccttcgcctttttttaacagggatgactcggttgaacactctgatgatgataccgagggattaccacctaaattccgaaggg

SEQ ID NO: 11903 - DNA, 364 bp, Glycine max
  Clone ID: PAT_MRT3847_110756C.1
ccctcgcgatcgttgtgtcgttgaggaggacccctatgagggggtgtctttaagtgcaacccttaaggagcagggttgtcttctgaagatcctttgccactgtgggatcaatggaaggacgaaaattggtgtatagggtgtaaggagatttgttgaacagtatggtgatgcattgacagctaattcgctgaccactgttgtataggctaacagcatgctagtcagagaacttgagaaatatggcttcctacatcaggttcggcagttgagactgccccagaggatgactaaactatacttagggataaagtgctacgacataccctaagacgcgcttggaccactatggttcgtctggagtata

SEQ ID NO: 11904 - DNA, 119 bp, Glycine max
  Clone ID: PAT_MRT3847_110757C.1
ctatagcccattttctacgctaccaagccattccctcatggggggcaatttctgtcccttcatcgctatatctgcattttgtctcaacgctactttatcatgatctcaaattttgatca

SEQ ID NO: 11905 - DNA, 262 bp, Glycine max
  Clone ID: PAT_MRT3847_110758C.1
tagctgcggctgcgagagacgacagaagacgacctggtggaggactcacttcacactgttctataagcttcactgtcactgtgtcagccatggattatgtatggagttcaacttgggtatgattccagagctagacaagaacaaacaccacacggcaattattgtatattgatcataagaagacaaataggggctcagataagaggcagcgtctattaataaaatgtacatatgcataaacttcaacgatgcagttgagtaa

SEQ ID NO: 11906 - DNA, 271 bp, Glycine max
  Clone ID: PAT_MRT3847_110759C.1
cctaatctcactcaggcctccagggatccatgggggagtgaaaccaattctcagagaacaacccaccagagccttttaaagagaggccaggcttgggaatgggttgggagagcgcatctgttcattggagcatgagtggatgccagaactgtaggttataaggcagtcactttttctctctactcccacccacacctgcctccctcttacccctgctcccccacactgcaggaggatttgtctctaagaggtgctgccccaaagctcccca

SEQ ID NO: 11907 - DNA, 497 bp, Glycine max
  Clone ID: PAT_MRT3847_11075C.1
ttagcaattccaaacatgattagatagataaattcatctagaagaataattgagtaagttcaattttgaagtaaaaaaaaatgtgaaagagcattaatcacaattccttactatatgaagaataacattgaaaaaaatcacctttgaatcataaaacgtttcaagtcttaaatttgtacacagggtctatgccaaaagtgcccattacttgagttgtaatatgactttttcaagcaccagtagcttaggaatcccaaaagcagatatatttgcattgagtcgtaatcaattattattactcgatgcaagtaagccattgattgcccattgcctaatgctagtaagccaccctaacgctgaatgttgagcatgtccttggcctcagtctgctccttcacgagcccctcactcgcgtacctactcaacagatccttcttcttattctccagcaccctcctctcaatctccttctcatccggaagcggcacgtgcaccac

SEQ ID NO: 11908 - DNA, 233 bp, Glycine max
  Clone ID: PAT_MRT3847_110760C.1
agcatgtacaaccatgcattttcttcaattcagaatcaatttgttgacaaaagagtaaattacattccgcatcgagttcaaattccgcgcacattttctaaatctggaataatcataccggggtttgctcttggcatctgatacactggcaagtcgaccaccttgtacattacttccttcaggtggtcttaatgcgactccccattcctgggctggatgattgctcattggct

SEQ ID NO: 11909 - DNA, 433 bp, Glycine max
  Clone ID: PAT_MRT3847_110761C.1
tatggagagtggattctaggagtatactaaacgataaagattacttagtggtaaaatccaagagagtacgctatagggttatatatgtaaagttgactttccatatatttcagcaatgatagagtcgagagaagtgccccaggattctaaccaaacgatattctatatactgtccatactgaaaacagtagagaatactggattccaaggttaagttttaaagactcaagtggcacgtgatatgagagttgatatgtactaagtatcatgcacatctagaaccttcaccagttgaacagaattatgtcagcacggatttttcttttttactgtcaactgacgagcatcttcggctggtttaggataagcagcccgcttgatactttggcactgttctacctcgacacactccataactttctgggtgagagac

SEQ ID NO: 11910 - DNA, 361 bp, Glycine max
  Clone ID: PAT_MRT3847_110762C.1
tctttttacttaaacttttttttttacatttaattaaatcacaacgcgggggtttttttttcttttcaccctttcatacatttttttctttttttcttctaacaccaatcttgttgttttaaacctggctggagcctcttggctaaactaactggtgaaaaaaaaccccctaaattttgtcctttttcctccccccccttaacctttttttttttcccttaaaaaaaaaaacaaatttttgttgatctaagtcttccctcaccaaaaggggaccaggggattatgtccccttgccgaaacaaaaaaaggttgagccccctttttctttttttggatatctacccctctactcaaacaattg

SEQ ID NO: 11911 - DNA, 188 bp, Glycine max
  Clone ID: PAT_MRT3847_110763C.1
aatggaaggccaaaaaactaccatattttaaatgcaatttatgtacatgacaccccttacaaagggacataaccaacactctccaatcaccaagcatggaataaagatccattcgacgaatcactgagcaattgaaaaagcatttcatccctcccgttactataaccctctttgcggacttttacact

SEQ ID NO: 11912 - DNA, 251 bp, Glycine max
  Clone ID: PAT_MRT3847_110764C.1
accctcggcctttctgtatttggggtcgaagttgcaatggtacaatcaacatttaagtttcctgatgtcctgctgagacatcttcaacccaaaatcgtaaagaaaccatccgtatccatttcccttgtccagcccggattctggtttgagttgtcaacactcttaatattaaacaaacttctaattgtttcaaccatatcctattttatagtaaaatcatttgttcccattaagtgaaggcgctccaaaac

SEQ ID NO: 11913 - DNA, 390 bp, Glycine max
  Clone ID: PAT_MRT3847_110765C.1
ggttcgtggtgggaaacgaccagaaaatgacgggttcaacacgctgaatcaccagaagtatcaatgagccttgcttccccggatctcatgggaatgctctcacctgtgcgcctatcatacacccgggattcacccggtcgttccccgggaagataagatcccatcagattacaggatccaatcagcatcggaactgggggttgagttgatctttatgtagatataagatgacttcgtcaatgcctaaaaacgataactcactctcgactctgacatatgttcatgttcacacggttcaaagactactacgcctgattcatgtaagacgttctgtcacgtggaacagactggacagctgtgtagcttatgcacaagaagaccaaatatagg

SEQ ID NO: 11914 - DNA, 187 bp, Glycine max
  Clone ID: PAT_MRT3847_110766C.1
acaataaatttgcgggatggggcactactctctttacactagaacttatttttacaaggctatacatctgtaaacactatgcattctattattacgtgtgcacctcacctctaaaattgtaactatgctatagactaccatagctactgcctcaagtatttaaagaaaccattattagattaccgaa

SEQ ID NO: 11915 - DNA, 868 bp, Glycine max
  Clone ID: PAT_MRT3847_110767C.1
ctttctagcaaaacttgatcttgcaaggcttttaaccccaccatttgatgcctaaatatgtagactacctttctagtgatcctttaggtcaaattaagtcaagttaatgtcatggtcgttgtccacgctgtttcacactgccttcttctggtctttcccaccgagagcgcgccttgtatatccgccagagtaacggttgccctctggatttttgcgccacagggttatctttggcatgttaatatccttaccaataactctcttatattacatatttcttggcttatgaagggagagaaagagctacaacctcaaacaagaatcaggcattgaaaaaaaaagtatgatccaaactataataaccctactagactaggtggggcaatatatatcggaaagcttctctggcgtccccataattctgtcagcaccgaccacaatcatgtatgaaagctttccattattgtagacactacctgcggagaaggttgactttggtaaggccaaaaacaatttcaaaaagccacaagtgttatgttatcttcgtatgtaatacaggggtttgacagagatgacacaagagcagtagtagctaggatttatatagttctcgacatgcccagctacatagattagtggtagccgaaagggaaataaatattatcatgaccaattattaaggtaggaaacatgctttcttgttggaggttggaaaagcttgagggaacaaatgttggccataaaaaagttggaaggtgacacttagccaaatatatggcactcttaggtgatttatcttttggtcttcaatgtgtcaaaccaatgagaatatagtaattgattgtatgtgaaacagatgcctctttac

SEQ ID NO: 11916 - DNA, 973 bp, Glycine max
  Clone ID: PAT_MRT3847_110768C.1
ccacgcgtccgcacgcattaaccttaaccgttgcaaagttcgccggggaatcgggcttggccaccgctctccgatgaacactccataggacaccatggatgagcaaaaaagcgccgccgtcaacgacggcgaaccagaaccgcagcaaaaccaccaccaacaaaaccacaccgacaacaacaataacaagagcaacgacaccgaaaacaacaacaacgacaacgagaagagtacatcagatcccgaactgttctgttgtttgcttcagccagccaccaccgacggagatcccgagtacatcggcattcgccgcctcctccttcatcggaaggccgaggccggcgttctccgccgcagagattggagatgcaatggcaaaacttatgtggcgtatcggaattacataagtaggcctaggaactgggaaagggatagtttgcgcaccccgagtctccagagtactccgggaaacagtggccgatggtttccatctccaactcctcacgggacccgttggtctgaggtggacagcttgagttgtgggcgggatctgcaaaatgcaaatccagtatataatcatagaacaagttttggctcaagtataagtgattctgatcgtcctagacatcatggggttgaggctgcctattcttttgttggaatgcattgcatctttgatcagtgcaaagcttctgttactgtgttgaagtttgggcacatgagttctgatctacttgcttatggggcatcagatggaaccttgactgtgtgcagtgtatctgagaatccttcagtcatcaaacaattaaatgggcattccaaagatgtaacagattttgactttacatcaaacaatcagtacattgcatcgtcttcattggataaaactgtgagagtatgggagatagggaaaggtatttgcatacgggtgatatatggagtctcttcacaattgtgtatccgttttcaccct

SEQ ID NO: 11917 - DNA, 490 bp, Glycine max
  Clone ID: PAT_MRT3847_110769C.1
gtaaaatccttttttaccgtataaaccaatatgatactccaatctgcactcatagatcccgtgagggaaaaaatgcgttaaagtattggttctcctaactcgccgcacctaattcttggccaccacatgatgtttgttttaacggaaaaaccggaccagttgagcctacaatttcaataccatccgccacttgcctaaaacgtctgtcttacccggtgacctaacggagaaacttatatcatactctacttaaaagtcccttcatctacactagatatatttgtccataacccaaagctctccatgccaaataggtcaaccaaactctactgggctatggcacaggagtggttgcatgaataacttgttcaccctccaaattcgactggacccaactttcaaagcacttgggatgaacaatggctggcccagattttggtgttcacccttgggcacccacatatgttggaaggtgctactggccccctga

SEQ ID NO: 11918 - DNA, 463 bp, Glycine max
  Clone ID: PAT_MRT3847_11076C.1
ctgcgagaagacgacagaagggtacggctgcgagaagacgacagaagggtacggctgcgagaagacgacagaaggggagagaaatgggtggtatcctcattgagcacacagaaagcaaagtgtctctctaacctctgcaaaagtccaaggttgcacggttttaactgcttaggcttttgtcttcaaaattaaaactgtgcaactttggttgcagagtcataagtgttaagttgtgtatgcatgaaagtgggcttgagttaattgtgcctcttgtatgatggaatccctttggaaactgttgtacttgctagagcctgcgcctgtcacacttatcattacagctgtggctgtgacatttggcgcagcatttcgagctctaaactatgggaaagaaatggagcataatcgtgacttatgtgaagcatcgattacattggataggtcacaggcattgatgatcccg

SEQ ID NO: 11919 - DNA, 425 bp, Glycine max
  Clone ID: PAT_MRT3847_110770C.1
ggaaatcaacttggaactattaatggataacacagcccaattaggttagatcttgatctgattaccaagattttaaccaacctgggatgagaggaccccatcaccctttttgggtattaccaatatcaactggcaaaaggaaaaagggggggttttaagcttccttttccaccaccccggcacttaaaggaaagctggagggtaacttcaaggtaaatttctttctttggctggctttctaacccgacctttttttagccagaaataccagaatttttgtgaaaacccatacgcgttcttaaaacttttttttaacattaattccagggccattaccttaaccaaggaacatcgaatggccagttacaatcttatattcaatgggggggggggggaggacaggagaaaaaaatttaggtaaccaa

SEQ ID NO: 11920 - DNA, 508 bp, Glycine max
  Clone ID: PAT_MRT3847_110771C.1
acgagattttaccctcagattctgttctacttcaggtttttattaataaaatttgagaactacatttctggatcctataaacagtattcatagttttatggtttagatgatgatttcagtgattttctagatggctatattccttgaaatacaatatgtgcttttcacagcaaaagaaagagaaaagtcagtttttttttttttactaaatctaaatgaacgtcaaatttgtttgctgatttccctgaataggatttagcgtagttaaaaaatcatccgaattattaattgcttctgattatgtgaagcatatttaagtgtcaatttagtccattattgatctgtggtatgatattaattgcttttctatcttcaaaataaactaatccaatcacatacttggtcattaattcccccctttcttggatttagatcccttaaatttcttttttgataatacatctctcagatttttttcccaatttgtttttgattcatgcaccagacc

SEQ ID NO: 11921 - DNA, 326 bp, Glycine max
  Clone ID: PAT_MRT3847_110772C.1
gaaaccaaaacttttagattttactcaccaaaaaacagaccgggggaaaggggggactttcactacgcaaacggcaacatacccacacatcccaccacctccaaccaagcgaaacatgcgacataaccccccctaggacaacagcctaaccgttgacgggccaaagatgctcaaacttaacaccccaatcaacagcaagaccgaccacccgcgctttacaaacaactaccgcaagagcatcacgagggcacgcaaacaaccgcaaacacctggagctgccacaacggaacaagccgtcttcaatgccctagagcgggggcgcggct

SEQ ID NO: 11922 - DNA, 307 bp, Glycine max
  unsure (1)..(307): unsure at all n locations
  Clone ID: PAT_MRT3847_110773C.1
nttnccatcacacnnacgtaatcncnnaattcnnnaacnanctnncnccncacnanccananaancnacacaaacnannnannccgnnncnaanannnancannnnnnancnnanncacanancaaatnacaccntnntnntnaacctnanncnnancannnantnatncnnnnncntnaccannanctnatcctnncncatactnnacattcctncannancanantcantnntnganttaaaannnaantnntnnatnctncatncccncttctnaaannnnttntntacaannatntnatntnt

SEQ ID NO: 11923 - DNA, 126 bp, Glycine max
  Clone ID: PAT_MRT3847_110774C.1
cgttgatccgcattcaagccctatgatttaatctaggatcccattgcactctaattccatattctaactctgctaacaattctattgacggggaattaaatggtcactatacttttgaggcaattt

SEQ ID NO: 11924 - DNA, 307 bp, Glycine max
  Clone ID: PAT_MRT3847_110775C.1
aaacactcttatcacaaagcacacagcaaagctcattcgggagcggaaaaatggcagcagcgttttacatggcatctgttattcgcatcactggctggcaaggctcgaaagctagtcccatcagccttagtaggagaaagaggttagcatgagataagaccgtgatcaaacacgtctacaaatgacgccgatgcattagtgcatacagagttacacagctgtggcatactgtttatccagccggatagtctaatcgatcaggccagtgaccagtcgagcgagactattgcacatcctcgctttacag

SEQ ID NO: 11925 - DNA, 359 bp, Glycine max
  Clone ID: PAT_MRT3847_110776C.1
ttcggatcgagctcgagacgaaatcactctatttttttttattgctagccaccttatatgactggggggagaagtgagatcaaagcgaacccagctggatctcctccacgatcggacacagctctgactggcatgtcacccttgatttccacgtacctattgtagacctacgttatgatatcaattataagatcatgacccctttgccttgtgatgcacaaatatgaaaacctcccccttattagatacccttcaaggcctacgattgcctgacactcttaagagccagccatccgacactctatggtcaagaaccatatctatatctgctttgcttacaccggccaggttacataggt

SEQ ID NO: 11926 - DNA, 270 bp, Glycine max
  Clone ID: PAT_MRT3847_110777C.1
gggccttcattcgggactttcactagccgcatcagcctcaggacgagaatcaggatgtctcacaagaagttcgatcacccaacgcacgggtcactgggatttctccccagaaagcttgctgcacgtcacaagggaaacgtgaatgcattccccaaggatgacccatccaacgcatccaagctcactgcattcctgggttacaacgctcgtatgactcacattgttagagatgtcgataagccaggatcaaagcttcacaacaacgaaaca

SEQ ID NO: 11927 - DNA, 355 bp, Glycine max
  unsure (1)..(355): unsure at all n locations
  Clone ID: PAT_MRT3847_110778C.1
ctcacctctcctaattattgtttttcatttctctactcctctcaccacatcnaacggggcccacaatggagtgggctgatcctcacacacagcctcaactcgcgcaacctgctctccatcaggtgccgtgcttcaaatcgcaaaaacaccttctttgcctattacactactaaaaaacgcgttctccaatctataaagatcatcgccttgctcattcacctcacaggcccctagatccttcgatataacaccttcactcccatactactgatgggtatgatcccttttagattggtccacatgcacatccactttaattgcagaaggcacacctcatagatctacgcccttcccc

SEQ ID NO: 11928 - DNA, 332 bp, Glycine max
  Clone ID: PAT_MRT3847_110779C.1
atcggtatgtgccattcaagccaggggaaggcatgaatttctatataaaatcaaaactgtatcatgatgggaaaacatcaccaggagatgtatgtcaccataagacatttttgtgggccaattgaattaccccttgaccatgggctgggtccctaacctaatactggggggcggcaaactatttaaaaaaattttgggctaaagactttaaaaatgaataggacatgtgagtggcggctcttaaactttctaatttctggtgggaaaccggcgtttaccattttttggggctttaaaactgttattgacaatgtttaaacaaagccctttaa

SEQ ID NO: 11929 - DNA, 253 bp, Glycine max
  Clone ID: PAT_MRT3847_11077C.1
attaggattgagagctaattttgctgttattattagaagtattgatgtaagttttgatatttgatatcaatacatattccaatctatttttttatttttttttatataaaaagagtttatgtttaagattatgataatttgttcaaattattttaatatataatggtaaagatttaaaggtatttatagaaaagatatggtaaaattataggtagatatgtaattattaaagagtaacattggaatttttgtt

SEQ ID NO: 11930 - DNA, 1543 bp, Glycine max
  Clone ID: PAT_MRT3847_110780C.1
cccacgcgcccacgcggtcgcccacgcgtcgagaagacgacagaagggggcagagataagtgatatgcaaaacatgatatgcaaaacatgtctctaattgcttcactctcctccacaacttcacacctcacttcccttgcttccctctcttcttcctcctctccactttcccgcaaatttcccctcactttccgggaaaaaaacagaaccccaattgcaccacctcacaagctccccttcttctcagcaaggcctgccaccaccagagtggtgttggtgaagtctcaggccacagcacctgcttcttctgaggctgtggcagtgacacctgtgtcttctgagatgaaggcatgggtctatggggaatatgggggtgtggatgttctgaagctggactccaatgttactgtgcctgatgtgaaggaagatcaggttctaatcaaagttgttgctgctgctcttaaccctgttgatgccaagaggaggcagggaaagtttaaagccactgattctcctcttccgactgttccgggctatgatgttgcgggtgtggtggtgaaagttggtagtcaagtgaaggactttaaagtgggtgatgaagtgtatggagatgtaaatgagaaagcacttgaaggtcctaagcagttcggatctttggctgagtacacagctgttgaggagaaattgttggcaccaaaaccgaagaatttggactttgctcaagctgcttctcttcctctagcaattgagactgcttatgagggtttggagaggactggattttctcctggtaaatctattcttgttctaaatggttctggaggagttggaagcctagtgattcagctagctaagcaagtttatggagcttcaagagttgctgccacttcaagcactagaaatttggacctactgaaaagcttgggagctgatttggccattgactacacaaaagagaactttgaagatttgcccgaaaaatttgatgtagtttatgatgccattgggcaatgtgacagggcagtgaaggctgtgaaagaagatggcagtgtggtggcactcacaggtgctgttacaccacctggcttcagatttgtagttacttccaatggagaagttctgaggaaactaaacccttacttagaaagtgggaaggtgaagccaattgttgaccccaaaggtccattcccctttgataagcttgctgaagccttctcttaccttgaaacaaaccgagcaactggaaaggttgttatacatcccatcccttgaatcaagtaaaagggataggcaattttgccgtgtctgtctagtaaacttcacattctatgtaaatcagagtttagataaaaactaaaaaacaaaaataaagaacttcatttttacattcttagtgctttaaacttaccattacaattgtttgaaagcaaaacattcttaaaatttgacctactcattcagttaatataaaagaataaaaagagtaaaaaacataaaaagttaatttgaaaacagcaacatgctctctggttttgttggataa

SEQ ID NO: 11931 - DNA, 773 bp, Glycine max
  unsure (1)..(773): unsure at all n locations
  Clone ID: PAT_MRT3847_110781C.1
gtgtacccctcttaggccggcccgggctcttaaaaaaaaaattaaaaaggatccacgcgtccgcgtccgggttgctggttttgacattgacttcttgtgttgcaattttcttcactggctttccttttgcttttgtctttcaatttttctgccattggtagttaatttaatcatgtgctctcaaaggtagatgaagcatttgtagaagacagagtggggattgtaattttaatgtagggtagcttgcacaagtatgatggtatttttatgtgaattacttgatgcttccttacctcagttatttatgtgaaaccttagctcggtcttaaaattcaaacgtgatcacaccaatgcatatattctggcctgatgtcttcattgtgcaccattttcagagtgcccgagaattcagcaagagccttaagcaagccgagaaaggaaaagatgcaacaacctcaaggcgtgcttaaaggttagtgtgtggagcattcaagcgtctgcggtgtacttgaaaaatgctcgagtggtaccggaagattgtgaagagatagtaatggacgaactcatactcggatttcatgtttccatcacagggataatgatgtattttaataggctgtggttcttgcaaattttgcagtcaaaattcgtagtcttcacgaagtgaggagtagtaaatcgaaacacgaacttttgaacagacaaattcaattgagcatgttctgtttaaaaaaanaaaaaaaggaanaaaanggaaaananaanaaaaannn

SEQ ID NO: 11932 - DNA, 785 bp, Glycine max
  Clone ID: PAT_MRT3847_110782C.1
aggtaccggtatggaattcccggctcgacccacgcgtccgcccacgcgtccgcccacgcgtccgggttgctggttttgacattgactttcttgtgttgcaattttcttcactggctttccttttgcttttgtctttcattttttctgccattggtagttaatttaatcatgtgctctcaaaggtagatgaagcatttgtagaaggcagagtgggtattgtaattttaatgtagggtagcttgcataagtatgatggtatcttgatgtgaattacttgatcttccttacctcagttatttatgtgaaaccttagctcggtcaaattcaaatgtgatcataccaatgcatagattctggcctgatgccttcattgtgtaccatttcagagtgcccgagaatttagcaagagccttaagcaagccgagaaaggaaaagatgcaacaacctaaaggggtgcttaaaggttagtgtgtggagcattcaagcgtatgcaatgtacttgaaaatgctcgagtgctaccagaagattgtgaagagagagtaatggacgaactcaactcagacttagatttgcatgtttcaatcacagggataatgatgtattttaataggctgtgtggttctttccaattttgcagtcttcacgaagtgaggagtagtaaatcgaaacacgaccttttgaacagacaaattgaactgagcatgctcttctgtttagctttattccacaacatctaaattataaatctctcatgtttctataaagtacatttctttcttggaac

SEQ ID NO: 11933 - DNA, 458 bp, Glycine max
  unsure (1)..(458): unsure at all n locations
  Clone ID: PAT_MRT3847_110783C.1
atgcacaatctctgtcttttatttattcacataagggggggacttagtattgtgttactaaccattacgttcaaacttaacaggctgaccaatttaagacatcctgccttctctaacacataatcaaaaaggctggcaaaactcttattaaacgaggacactccttcaagttaaaattgtgaaccaacagtatttcaatccacacttaattcctttccactattgtatattacacactttgaaaaaccatcaaatttttttgcgctttatacgggtccctaatcaataaatgcttgaaagacacggtccggaatggttgatacacagtctagtccaataagaggcgcctcatgtaaggtgccacaacagggcggggggtgtactctgtgtgagctccaaaagcaccttagggtgcaggcctccttaataactagaggttnacacattggaccataaaa

SEQ ID NO: 11934 - DNA, 1407 bp, Glycine max
  Clone ID: PAT_MRT3847_110784C.1
ttgggtacccctcgagggccgggcccgggctttaaaaaaaaaataaaaaggatgttgctggttttgacagttgacttcttgtggtgcggtttacttcattggctttccttttgcttatatctttcaatttttctgccattgggagttaatttaatcatgtgactctcaaagggagacgaagcatttgtagaagacagagtggggattgtaattttaatgtagggtagcttgcacaagtatgatggtatttttatgtgaattacttgatgcttccttacctcagttatttatgtgaaaccttagctcgggcttaaaattcaaacgtgatcacaccaatgcatatattctgggctgaggccgaggtaggggcagtgtatctgagtaatatcactgtccctttccctctccctttcatcagaaacacaaacaaaacaccgattcactatattaccagatcggactcaattcctgaaccgatgaagttgaagccgcagtgaaccaaaccatcatcatcgcgttaccggaataatcgacccatcatcaattagatcgaaatgaaggatgaggacgggcttccgacgacgaccgcggttacaaagaaggaaaacttggattcgagtctgtttggaaaaggcaggtacaaattctgggcgttagcggccatcttgcttctggcgttctggtccatgttcaccggtaccgtctcgctccgctggtccggcactctcaattccctttccaacgacatcgacactcccatccacgacgacctagatgttcttgaaatggaggagagggagaaggttgtgaggcacatgtgggatgtgtacaccaacagtcgcagtgtgaggttgccgcggttctggcaagaggccttcgaggctgcctatgaggatttgacgagcgatgtcgctgaggtcagagacgctgccgtcgccgagatcgccaagatgtctgttcgctccattcattttgatccacctcctcttcaatccacgagtgcccgagaattcagcaagagccttaagcaagccgagaaaggaaaagatgcaacaacctcaaggcgtgcttaaaggttagtgtgtggagcattcaagcgtctgcggtgtacttgaaaaatgctcgagtggtaccggaagattgtgaagagatagtaatggacgaactcatactcggatttcatgtttccatcacagggataatgatgtattttaataggctgtggttcttgcaaattttgcagtcaaaattcgtagtcttcacgaagtgaggagtagtaaatcgaaacacgaacttttgaacagacaaattcaattgagcatgttctgtttagctttattccacaacatctaaattataaaactctcatgtttctataaagtagtgcatttcattcttggccccaaa

SEQ ID NO: 11935 - DNA, 216 bp, Glycine max
  unsure (1)..(216): unsure at all n locations
  Clone ID: PAT_MRT3847_110785C.1
anagcnacgcnatacgtnaagntcggaaattcggnncgnncgcttgcaagcngtttnnnatggatcncangccatcatngtntccgannatagnctgntagacatggtatcccncatanatccnnttttangtangnntgtaanaagngacntgnnaggntntgtcggcgtagtgctnttcaggtnacgctgatcggntaaagntgcanntantng

SEQ ID NO: 11936 - DNA, 208 bp, Glycine max
  Clone ID: PAT_MRT3847_110786C.1
gagtaatacagacagcaacatgcgcccagcggttattctcaaaactaccatctctcttttggaggcgtcgtcgtcctcaacaccctgtgatggcagactcaacactctcgctagacacgtccttccacaaatggcttctcatgacatgatctgagaatcttcaacctacgcatctgaatccgtcatcaatcatctcgttcgtactccc

SEQ ID NO: 11937 - DNA, 226 bp, Glycine max
  Clone ID: PAT_MRT3847_110787C.1
tccacggcgtgcgaagagctgcgagaggaccacatacgggaatacgactgaatggtcccagttggcagaggacgacagatggtgactgctcaaagctactgatcatcgcagtgcttaaattcacatgtatggcctgcatgcttgcgctaattggatcatcatacttaacgtaatccactacatgcgtgtggcacctgcccttcaactactatgccttatcatgctc

SEQ ID NO: 11938 - DNA, 442 bp, Glycine max
  Clone ID: PAT_MRT3847_110788C.1
gggggggaaaaaaaaattttttttgggggcccccggggggccccctcgtcccgccccggggggagcaaaagcctcttttcccccccccccataaaaaattggggggtaaccgcgggcaaccgcggggggttccccccccatctttaatcccccccccccccccccccgggggtcccctggtctgggccagggggggcccccccccaccagggaaaaccccctcggggccctgggggggtctggaccccccggaagggttccaggcccaaaaccaaacttttcctttacccccccccaaaagggacaagggccccttgggggaaaaaagggccggccccgccttttcgggggcaaattttgccccacaaactttgttttgggggaggggggccctcccccccgggccaaaaaaaaaaaaggggggacccaacgcggggggggg

SEQ ID NO: 11939 - DNA, 347 bp, Glycine max
  Clone ID: PAT_MRT3847_110789C.1
ggatatgcagtaaggggactcaggcttaccgcgagactcgcttttcccaaatcgctgttcactattaagaaaatgggacgaagatgaaatgcccacttgttttatagcagttgtccttaatcggagttggattaagggcaatctatttacgcggacgggtaacagggcctcccgcacacttataaatcgactgatgaaacccatgtttgaatagccaaatcggccccccgattggaaccgggggcaacgcccactaaaggagcgcttggatttcataaagaggcgcttatattattccacggcacattcatccctatctcaaaaccctcatctattaccagaaatac

SEQ ID NO: 11940 - DNA, 294 bp, Glycine max
  unsure (1)..(294): unsure at all n locations
  Clone ID: PAT_MRT3847_11078C.1
aggatctgcattatgagtacncctntcgttcgacgcatttccgaatncntcatcnagncacatcgnccaatcgaagnntctatcgcatntatnttatttagcacctngggatattattctantgnctaatcactatatccagnngggtctacncttcaagaagcctncaacacttgtcgatcnacagaatttcataganaatctgttggagangntcaannactctctcctngtnnancctctgcccatttctatcctnangctggtcggcttgtcangnacacaacgcaggng

SEQ ID NO: 11941 - DNA, 790 bp, Glycine max
  Clone ID: PAT_MRT3847_110790C.1
tgagtgaaaacaaccttggcactagcccttccgttgcaacagatggaatgacaatcataagcacaaaaacgcctaaaacatccaaaatagctgccagctgtcctaagaatgataacaatgagataggaagactatttattacaccgtgtaggaacagaattcccccatgaaaagcaataactacatatttagaggcctcatatccaccaccatttttgccaccagtactaaggagaataataacctgaataagttgtgcaagtgaataatctacacttgttgtcactgcccacttgaagtgaaaagtgaaggatgcttaaattctttaaaaaaatgtgtcttcttaagaatacctggccaacaatattgaactttctgtgatagattaaaaataaaaatatcaattcttagttagcagaatcacatgtctgctgcacacaatagtagtgcatattacaatcctcaaaagccttttctgtggtctgaaagatcaaatgatgatgattcttcttatgcagcatcttaaggttgacaataaaatccttctattatgctatagataaatcttctattaagtatcaacctaccaccccactttccactccctctacctttcaaatatcacccaatacctcaccattaaattacaaaaattagtttgcccaaagttcacaaatttgggtttttttttactgttataatgcacggcttgctcatctctatgaccgccgacccaggggcaaaatgaaacttcaaaaaattaaaatcaaatgaggcccacataaagatc

SEQ ID NO: 11942 - DNA, 837 bp, Glycine max
  Clone ID: PAT_MRT3847_110791C.1
ccattcgtcagaatcaaaacgtgctaataaagccggattaaggaaagtgaatgtcccggagggatattcactgggaaaactcaacaatgatgtacaggatagcaagagagatcaaatgtcaagcagctctgattcttcaagaccattctcgtgaatattttgatgcaccaaaggcattttcaagatcacattattctattgatgatgaagaaagtgccaaaataatctcatcctctgtgcctctatccgttttgcttattccttcattaaaagaggcccttgctgatgatccagatgggtcaatagtgcaaattgttatcaatgctcttgtaaacatggagagtacaaagccccaatcctgtgatgtttttgtcaaaaagtttcttcagcagttggcaagttcaaaggaatcttcatttaaggacctgcaagaacttgctggccaaatattcagcaagacaaagtcatctgaagaaacccgaaatgcagagtctgataacaagaaacaaaacaaggaagtccattcaaatttcaattaaaaccctcttgcaagatttcttctatcataaatgcagcttgaaacctctcgggatctcatttctgtgtgaagtttctgtttctacatttattctgattaaatgtacatatctggttattaatatatttctttttcgttttcgttattaatatatttattttttgttttccttataaaattttctttatagagatcatcaaaacattattatataattagtggttgtttgcttagttgcatcaaaattgtaccataatacattgattcctatttactaatagatgcatctttgcattttt

SEQ ID NO: 11943 - DNA, 420 bp, Glycine max
  unsure (1)..(420): unsure at all n locations
  Clone ID: PAT_MRT3847_110792C.1
ggactagcgtcgatctatgggtaccaactgtccaaggtccgtcactgttttggctcttcttctactaagcggcatcaatgttctagttcctccgcatctgttggtgtctccggggcagatcttcatctgccattggcaagtcctcctctgctgttatctcagtgttcactagcctcccgatctcgatcgcactagcctcctgtgcctcctaaatcctcataggtctctcctccacctcctcgctcacagcctcgcccactactgctatgtccccttcgcctatgtccgctgcttccgcgcctctcatctggatgttagcctcgcttgttgtcgcctctcttattatgattctaatcttcacggtacccatctctggnaccggggccagggcccaagtagtagcccacctatctgttgttc

SEQ ID NO: 11944 - DNA, 248 bp, Glycine max
  Clone ID: PAT_MRT3847_110793C.1
ggaaagggtgcttatgttactcggtgctatcagtactctagaaacctagttgaaaaacaaatgattttgttcaaacccataaaagtatattgcgtataaccttttttttacaatttcttttgttatggacactaaatacccacgggggggcatgtggatccaatatccgatgctttatatttgtcaccttgtgtttggggaaaaaatcaatgaacccgaaaatttgcctacttaacactaaggaacca

SEQ ID NO: 11945 - DNA, 225 bp, Glycine max
  Clone ID: PAT_MRT3847_110794C.1
atttttatttcctctgcatctcatattatactttttaaaagagttactgtttgtatgggactaatcagttactgtctttgacaaaacttagatacaatactatagttactttagttactgtctctaatcagaattggaattttacctcagtaatctatataataaaatctccattaaaagattttgcggattacaaaggtaaaacttcaattctgattagagaac

SEQ ID NO: 11946 - DNA, 360 bp, Glycine max
  Clone ID: PAT_MRT3847_110795C.1
gtcgcatgcacgcgtacgtaagctcggaattcggctcgagggagactagcaggtgacactgtgataattacagcactgtctgtctgtaacggattgctctatcatggaccgcagcttttagacgattcttgtttctaggtatttatttcatcatttatgggtttacagagacaggtgacttggggtttcaaaattgcaaatgctagttcatattctggagtacattgaacacttccatattatgaaaaatgagatcatcaacttgtaaccagggtatgtatggtcttttagtgttaattctcccctttattgggaaaattttaattattttttccaaaaataaatcatacatttccctaa

SEQ ID NO: 11947 - DNA, 138 bp, Glycine max
  Clone ID: PAT_MRT3847_110796C.1
ggagagagaagggaagcaaccaccataccctacaccgttgacaaaattagtactagagagtgcgcgggcgcctgtgatgcgttgcgttgcctcagatccaggcaactcatggtgagttgacaaaggtagacgaagttg

SEQ ID NO: 11948 - DNA, 484 bp, Glycine max
  Clone ID: PAT_MRT3847_110797C.1
tgggaggtttcctgtcatcactgtatgacgtcctccttctttgggggggggggggggtcgatggtgcgggtgggcggtttctgggaacatttgcttaccgaacatggttgtgtaaccaacgatagtaaaatagaatgtaacacatgtcaccagtagtgtggatcatgggttgtaagcgttaaccgcacagaggtagcgtgcgtagagtggctacggttacgtaaagggggaggggtttgcgaccagagcgcgcgacagcggcaatgagtgtccgagggtggagttaaattaaaagtaagcgtagaaattgccggcgtatcttggttgaagtttaggacaaacggagttctgcgcagagtttcacgtacaaaccaggggcaagcaacgaatgtaatatccggcagtaggcgagtacctactagcacaatcggtgggaggcagacggggtgatcgtacaacggaaaggcagtggtaccaatgcccg

SEQ ID NO: 11949 - DNA, 397 bp, Glycine max
  Clone ID: PAT_MRT3847_110798C.1
ccggataccgcgtacaggtacccatgctttaggccgaaaacccattttggtctgggtgggggtctatacatcgtattcatgagccccagagtggaccgtttccattaggccacctatatggtcacattcctgttgaggctactcaaggcattactggtccgcgaggcatagctcctggctatcaaaacgacagcgccaaaatgcatgtctaagggccacatcgtgctatggcggtagctactgccattgtgcgtgaaaccttgctcgttatagtccactaaaacctatatgcctatactcatatgtactcatttgatgcaacggatgtatgatgggtactgccttatgtcatatcgcgcgtttgtacgatacatgcagggagatctacagcgtcatg

SEQ ID NO: 11950 - DNA, 275 bp, Glycine max
  Clone ID: PAT_MRT3847_110799C.1
gctcgaaaaggccaagctttaaccttgtaaaacattccaaacttttaaaaactgaggataaggcacaggcccaaagcaaactctaagggctccgattgatcaaataagcagggttcggaaccgaacacccttccccaggggagttgttaagtaaataccccctcactcacaaacggtgtacgtaatactgacctacccaaaactatgaccttatgtgtcacagcccccaagtgacaacatagttttaaactgtttagcatgagcgaggatatccc

SEQ ID NO: 11951 - DNA, 2055 bp, Glycine max
  unsure (1)..(2055): unsure at all n locations
  Clone ID: PAT_MRT3847_11079C.1
attgagcgcaccgaaagcaaagtgtctctctaacctctgcaaaagtccaaggtcagtctttcctctaaaccctaatttcccaatcccctcctcctccttcttccacaacacacttcgcttcaatctcggtgatgggttagatcatcgtttgtgtgcacaatttttgttctccgattcaaaaaaaattaacttttgcgatgtcagtaggtggtcgtgcgtttttgtttcttgggttaatccatgtgatcgtgagaagtgaaattaggggttgattggaattttgggtgcaatactcggtttaattgctttgtagaatgaaattatcgagcttcaatttagggtatataaaacaataatgtgaacatgttctgatggtttgttactttgttttgttttagatggatgatactcttcctactcctatagtgggtagacctgagagaagttttttttgtgtgtgtgtatgtgtgtgtggtaggaatgaaaatacttacatgtgcttacaagttccatttgctatatgcgagagaaatgggtggtagccccaattccccattgagcgcaccgaaagcaaagtgtctctctaacctctgcaaaagtccaaggttgcacggttttaactgcttaggtttttgtcttcaaaattaaaactgtgcaactttggttgcantcgagctctaactatggaaagaaaagtcataggggttaagttgtgtttgcatgaaagtgggcttgagataattgtgcctcttgtatgatggaatccctttggaagcttttgtatttgctggagcctgcgcctgtcacacttatcactacagctgtggctgtgacatttggtgctgcttttcgagctctaaactatgggaaagaaatggagcgtaatcgggacttctctgaagcatcgattacattggataggtctcaggcattgatgatcccagtgatgagctcttttagcttgcttttgatgttctacttgttctcatctgtctcacagcttctcactgcattcactgctgttgcttctgcgtcctcccttttcttctgcttgtctccttatgctgcctatttgaaggcacagtttggtttagctgatccatttgtttcacgctgttgttcaaaatctttcacacgtatccaagcaatactattgttagtgtgctctttcacggtgggctgcttggcttgtttctggtcattggatactgaacaatttgttaggcatatctatatgcgtcgcgtttgtaagccatgtgcgtctcccaaacatcaaaatttgtgcaatgctccttctttgtctattcgtgtatgacattttttgggttttcttctctgaaagattttttggtgcaaatgtcatggtatcggtggcaacacaacaagcatcaaatcctgtgcacaccgttgccaatagtatcggtcttcctgggttgcaactgataactaagaaattagagttgcctgtaaagattgtttttcctagaaatttgttgggtggtgttgttcctggagagaatgcgacagacttcatgatgcttggtttaggagacatggctatcccaggcatgctactggctttagtcctctgctttgattatcgcaagagcagggatacagtaaatctcttagagttacattcctcaaaggggcacaaatacatatggtatgcgctacccgggtatgccattggcctggtaactgctttggctgctggtgtcttgactcactcacctcaacctgcacttctttatctggtgccttctactttgggacctgtagttgtgatctcttggatgaaaagggaactacttgagttgtgggaaggaaacaccccaaatctcaatgataaagatcgcgaaatagaagtttagtctagtgacaggtggtttatagccaaacagaaagctgtaaatttactgagaatctttaatcgtcagactcatcaagaaaatttacattaattgttcactttgctgtcttgatgtttctatttatataccatacataaattgggggaaagaagtttataaaaactctccttcgtgataaaaa

SEQ ID NO: 11952 - DNA, 249 bp, Glycine max
  Clone ID: PAT_MRT3847_1107C.1
gaagctagaattcttattgataccaatttagggggacatcttgatgatagaattacggatttacattttacatgatagctgatccaacatatccattgacatagaatgcaccaagggacttgcaattcatcatagtcaatactaatataatatctaacaactaatggattaaaccttgctatgcacatagcagattagcaaatgcttgcaacgcatcatggtattcactaattataatacatagtgacg

SEQ ID NO: 11953 - DNA, 335 bp, Glycine max
  Clone ID: PAT_MRT3847_110800C.1
ccacgcgtgcgaatacgacattacgaccctttggttcctctccaaaaagacggcggttgggggctgctttcacaagacgacacattcacccaactgctatattacgacttaaaggtacatccactacatgacgccagacctggactccattacctagacattgctcttatctacatacgccatatctccttatatactcttgatacatatctgcctgcatatccactatgttgaatacaccgtaagattccacctggcctttaacgatctgttcaagcatcatataaaccacaccttaactttacttcctacctgcatctaggaaacggacaaca

SEQ ID NO: 11954 - DNA, 265 bp, Glycine max
  Clone ID: PAT_MRT3847_110801C.1
tttttgaaaatacaaattccagatcatgcagtggatcgcgctttttcagtagatctggcagggggctgtggcacggagaaagctagaattagagaatttccaggaggttcattatgaagagaagggccaagcagaatgtgaaagactgtagactgccagacaccgtggattgggcagctcaggcgccatgatgactgatttgggcactcagaactccacagttgagaaccatcgtgaggagcacacacgatttccagagaagatc

SEQ ID NO: 11955 - DNA, 263 bp, Glycine max
  Clone ID: PAT_MRT3847_110802C.1
aaaaaaaaaaaaccaacccccccctaaaatgggggttttacttccaacaattttggcaacaaaccccctttggaaagaaaccaaccctgaccaaggaagggaagagtacccgactggcccgccgtttgaaaagggctaaaatcaaaaaaaccaaaaaaacttaatttttggggaaggcaaaaagggcacagctcgggatatacccgggggaggggtaaacgggaaagggttccccaacgagggggcccacggaaacaagggca

SEQ ID NO: 11956 - DNA, 236 bp, Glycine max
  unsure (1)..(236): unsure at all n locations
  Clone ID: PAT_MRT3847_110803C.1
tgttttgcttttctttataatcaaaacacaacctcgtgtgattccattgagtagttnttcctatttctgcaagtagtggtggtgtcggcggcgacaccggttgtggcagcgaatagtgtggacaacaactggctgcattattcttgctgtatgtcagtgggatattagttcagtggganttactacgctgagctttctaacccgctccaatggccacagtgcaggaaaaaacgacg

SEQ ID NO: 11957 - DNA, 194 bp, Glycine max
  Clone ID: PAT_MRT3847_110804C.1
cggacgcgtggggcttggctctaatgggtttcatcttaaataaaaacagactctggaccgatgtcaaaatctaagactgcaattttgtcaatgtttcttatcttcatttaatagacaatcaaatgaaaatccttccttatgattgagagaaagaacttctgattaaaatttgtcacaaatagcataaataaaaa

SEQ ID NO: 11958 - DNA, 304 bp, Glycine max
  Clone ID: PAT_MRT3847_110805C.1
gtgttcttatttgctcgtccttactgagagctgaatttaccggctaacaaaaacaggtttttgctgtgcacaagatcaataaaagcaatatcgaacaagccttgatcaacgaatgcgacattgatggccctgaacagtgcaggagttgaaacagaaatggtggatgcttggacgggttaggatgacatcgaaaagactcacacgtacaaccatgagctatacgtggaacttgtacagacattgctactgtattatttaaagctggacatgatgctgtcattaactacatgttagcctacaaatc

SEQ ID NO: 11959 - DNA, 166 bp, Glycine max
  Clone ID: PAT_MRT3847_110806C.1
aaacaaccttctttctttttccgtgaacctttctttcaaggtcctaacttgattagtgtgcaatgtccaaatcaaaagggtaatttcaaaattgcaagggcaaagcatgatgtttaagggtggttccttccctgcaaaggactaccatgatcctcctccagcaccg

SEQ ID NO: 11960 - DNA, 778 bp, Glycine max
  Clone ID: PAT_MRT3847_110807C.1
ggctcgagcctccttccctctctctccgttttttttttactcatttttatattttatctatttcgtcttaacgaccacagtccacagaccaaaaacacgaagccttctcacacataccataacagaaccatatatctatctctctgttctgtcaaaacctctcgtagctaccttcaacaataactcacggtcatggcttgtcacagttggctctgtaatatctcactgctgttgctgctgctgagtttagcttcgcagagttgccacgctctcaattccttcggcttcgacatccaccaccgtttctccgatccggtgaaggagattctcggcgttcatgacttacccgacaagggaactcgcctgtactatgttgttatggcccacagagaccgaatattccggggccggcgactcgccggcgccgttcaccactcgcctctcacttttgtccccgccaacgagacttatcagattggagcctttggattcttgcattttgccaatgtttctgttgggactccaccgttatcgtttctggtggcactggatactggtagtgacttgttctggttaccttgtaattgtaccaaatgtgttcgaggcgtataatcaaacggagagaaaatcgcttttaatatctatgatcttaaaggatcatccacaagccaaaccgctctgtgcaatagcaacttacgtgagctacacacactatgcccttcctttgataacatttgcccccacgaagaaaccatctacccaatgcccctccactact

SEQ ID NO: 11961 - DNA, 304 bp, Glycine max
  unsure (1)..(304): unsure at all n locations
  Clone ID: PAT_MRT3847_110808C.1
ggagggcaaaggaaatggttcaccgtgccccatatccttcaaccctttggctattcttatccattaagtacatcttcacatattatcatgatacaccatcttctgctgcatcataagagttggatgttaagagcatggctgcacaagctcntgtctcatcatcatctcgtatcttcacagcggacgctgcacgagatagtcttggtgcaagatcactcgactctccatgttgattcaccacataagcgtccgtacatgttaaagcacctgctaacctgcctgtcaagcatcgatcagacaaacc

SEQ ID NO: 11962 - DNA, 763 bp, Glycine max
  Clone ID: PAT_MRT3847_110809C.1
aaggaagaaaggtttatgtcaacaaaagtggggaggagttgacaggccgcaatgcttatagagaatatcggaaggtacaggtagggagaaaggtttatgtaaacaaaagtggggaggagttgacaggccgcaatgcttacagacagtatcggaaggagagtggagcaggattcaagaaatcaagaaagaaaacaggtgccaagacgacaaatgccaagaagagaaactgaacacttgatgacaagacatttattccccgcctggtccacgtcccataatttacttgtgatcgtatgactagcaataccctataggttcaattcaattttgttaaattgccctaaatttccggtttcatgttttggatgcggacaaggaagctaggaatccagcgtgcagcatcacatgaggaaactgaattaaggccttgttgcttagtgaagatttgatgctaaaaaaatcctagcaagtagcaagtagatattgggagcttatgtaagtggttctgtacagtacacacggacctaatgacttgggccatcctgaaataatgattcacttttcttttattagaatccgcaatgatttttcgtttcattcttaattcgccacttggctctctttgtgcttatgatcgagcttgttgcgttgttccgtgatttgtagattaaagataataataatggaacgataggaatgatagcaaattttaagtaaatgaagacatcgaaaggacctttctttcgtctattttgagttaagg

SEQ ID NO: 11963 - DNA, 429 bp, Glycine max
  unsure (1)..(429): unsure at all n locations
  Clone ID: PAT_MRT3847_11080C.1
aatattcaacgagttcctgggattggaaacttttcatttatatctgtcaacatttacaatgttgtagaaagaaatgtcaaggtgacatttttcacgttttgttctcataaagtgatgcccgtcaatggctggtgccaaacaatagcacatatcaccaaagcctaaactgctaaaaccaagtcaatttcaaattttaaggggagaaaaaaaaaaggttaagagaataaccccttagtaaggcaaactcttggaactagtgctaataatcaaagacttcaatttagaagactcccctgctgcatttgccctctgcgttattatttccatattcctatttaaactttgtttcaccaaactcttcatcaatctcttcccttcttttgcttctctttgattcacaggtgaccccattgcanatcttggtgtttg

SEQ ID NO: 11964 - DNA, 260 bp, Glycine max
  Clone ID: PAT_MRT3847_110810C.1
ggtgtggggtttttttttttttggccggagcccaatttcgtgctaaaagacccgggcatgccaactgaaagcttttttatatggggcaccaaagagaaattcaaggggcggcgttttaaaaagggggggcgggaagaacatgtgatattcacaaaataaaaaacccagggggaaagccccctgtttggggttggagttatagcaaaaaggccccaaccggtggccctttccaacagtggcccaacctaaatgggaaaagg

SEQ ID NO: 11965 - DNA, 517 bp, Glycine max
  Clone ID: PAT_MRT3847_110811C.1
gagaaaaatgaacatcttaagcctgattttatacccttgtgcaccaaaagccagcttcaacagagatcaaaatcaccttgaaccatattcacaactcagaatattacagagaaaaaaaattaacaatactactttacttacaaataaacttagcaatactttaacaattttcaaaaagtaaaaaaattaattcttccatacacatatatagaccctctcttccacttgccagtgagaataatggcaaggcaaataatgaagaaactacagtaagtgatgctcttttatcaactgatgatagaactgcaggtggcatgctcatggtcggtgataaacatattttgttcttggatccacaatgagaccttttcctccattcacttctaagtcatgctgaaagacgaaatctgggatggtcaattgttcacggggtatgtatctaaagagctgtagtagtctatcaacatataccactttcttccaaccatattgtcaacagcaactgaagtgccatact

SEQ ID NO: 11966 - DNA, 289 bp, Glycine max
  Clone ID: PAT_MRT3847_110812C.1
accgagaataactatgtttgttgtttttacaaaacgacccggggcacaaaaaccaagacctctaggaaagaacaacaccccaaaaattgaggggagacacccccacaatcagcaatgtatgacaaacagaaggccgcccaacaaacaaacagggggccaacaaggcaggacaaaaagaccagaccatgaatcggcatcgcgaaccatactgtgctgacagaaacgagccgccaagcgcgggggggggcccaaaacaaagctcacatggcgaggaaaaagctggcaacaa

SEQ ID NO: 11967 - DNA, 367 bp, Glycine max
  Clone ID: PAT_MRT3847_110813C.1
attgttagtttcgcaagtcctgactgcaacatagtgggtgcaatgctttcggttgatacttatcataccaatgctgaaaatgcagttcgtcatatttttgttgcgcctttcataggcggcagggccattctggtgggtacattatcgaataccatcgagcagattgaaccacacatgaattgaaggtttcagcttttgagtaccactaccaatggtgatactgttcaaggaaaagatctcgcaatggctaaagttaatgtagcatgtgctgacgctgggtctacattaagttacactccaacttcattgatggaatctggtttgcaaaaagacagatggctaactgaggagtattttggaaggatgt

SEQ ID NO: 11968 - DNA, 408 bp, Glycine max
  Clone ID: PAT_MRT3847_110814C.1
ccccccccaccctaaatttttaaaaatttaattgggcccgaaaaaacttaaattcaggggacaaaaacagttccggacaaatttttttgaaaataaaccaaagtcaaaatactacaattttttgaaggggaaaaaaataaaaaaaagcggggggggaaaacaaaaccccattgggaaataaaaatattctgaacagaaagtagcattttattataaaccccccaatggcatcagctccttaaacttcaaaactcaaaaaaaaccccgggccagaaataaaaaactgaggcccttatggggaatttagggccccatggagggggcaattccaccaccatactggccttttccagatccaccctggttaattttttttttaaaaaaaggaaaacccaataaccccggccc

SEQ ID NO: 11969 - DNA, 324 bp, Glycine max
  Clone ID: PAT_MRT3847_110815C.1
cctcgtgccgaattcggcacgaggccgaccggtcgtgcgctgccccagccacacggtccgccgatgtacccgccggcagggggccacgcgccgccgccggtgcctgcacggccctccgcctctggcgtgcctcccaccgtaggggaggcgccgccgcccgtcgccccccggccgaccgattacacaccgccgccgtctgcaggcgccggcggtggagctgcccggccgccgatgcctccacggacgctacagcgctagtcgctaacacgtactcgttggggtatatgtgttgttttttgttattgtgtatggtgtacaagaaga

SEQ ID NO: 11970 - DNA, 212 bp, Glycine max
  Clone ID: PAT_MRT3847_110816C.1
ggctgccgcctcttcttcgagttgtacactctctcttcaaccctactttaaggtttatctcctaaaacccttttcatgttgattggatgacatcaacctgctcgtgttgtctgaaactcctgcggattttaccatgattcacatgctggatcaaggtctgccatctcaacttcaggatttctccagtacttcatgtactacatagtgcgttt

SEQ ID NO: 11971 - DNA, 148 bp, Glycine max
  Clone ID: PAT_MRT3847_110817C.1
ggggctgcctttcaccaagttgtacagccgactgtgtgccaaaaaagacatgcgaatactgatggtgggtctcgatgctgccgctaaaaccaccattctgtacaagctcacgcttggaaagattgtcgccaccattcccaccatcggt

SEQ ID NO: 11972 - DNA, 416 bp, Glycine max
  Clone ID: PAT_MRT3847_110818C.1
gcacgagccggttgaacttggatggttttccgggtactggttgggcattcacctattttgcagagattgaagatttggatcccgatgagtctagaaaattcaggctagtacttccgggtcagccagatattagcaaggctgttgtaaatattgaagaaaatgctcaagggaaatatcgcctctatgaaccaggatttaccaatatatctttaccctttgtgctctcttttagatttggcaagacatatgattcttctaggggacctctcctaaatgccatggagataaatatgtatttggagaaaaatgatggctctctagatggagcaacaatttccaatatactttcacactactctgcagcagactggctccaagaaggtggtgatccatgtctgcctgttccatggtcatgg

SEQ ID NO: 11973 - DNA, 319 bp, Glycine max
  Clone ID: PAT_MRT3847_110819C.1
ctggctcgagggctctacatgaaaagataatgttcatgagcgaatagtcttgacccgctcgataacgactcaagctcagcggaactcctctttgtgcacgttgttcacaatcttggttctctgaccgtactgtatcgagcaaggcatgtcaatctacagatagagaccaggttgtgcaagtacgaccggcgtccatctgcgactacgacatgctctgcacatgatcagctatagccacagtccctttgaacctcgggctctgcaacgtattccactgctacgaccattgccatgtactgctacctacacggctgagcct

SEQ ID NO: 11974 - DNA, 219 bp, Glycine max
  Clone ID: PAT_MRT3847_11081C.1
gccacaagaccacacaaggtgctccttttcattccaagacatagcaaacgaaccaatgtgtttgttcatttacatcatcaaaatgagtcctaacaacgatggtagcggcacctgtagctctaggtttttgaaagtgactagtgcagcttcctctacagccgccttttccgacggtttatatgccattctttcatcctcaacctctgctagctctgacat

SEQ ID NO: 11975 - DNA, 405 bp, Glycine max
  Clone ID: PAT_MRT3847_110820C.1
aagggcccagaaaaaaaatcttttttttaccccgggggccatccttacaggatagttaaaaggcgtttcatacaatttgggggccaaaaactgggcccctttttattttaaaggaggggaatagtggggaaaaaaaacccccccctgctgaattaatatcgaacggaaatggggatttgaccctaaagagtgggctcattacagattataaattgcgggccgcccgtatttaaaacctaaacaaaggggccccccttatgggttttgaatttggggggttaatctaccccctttaaaaatagggggccccttcatttggggagcaaaaccccgggaggagccccccaaatttttttggggcgggcaaaaaaaaacccacccctttttccctaaaaaattcggggg

SEQ ID NO: 11976 - DNA, 335 bp, Glycine max
  Clone ID: PAT_MRT3847_110821C.1
ttaataaaaaacactcgagcgtaagtgcaaatggtgtcttctttaaatttctgggggtgcaacaaactcactgagaaaacaattactactcgctaagatctgaacatatccattgtttatcacacaatagcaactcactttacaaaatttctaccccattacattaagaagcatctctataccttggagatctacatcctcccatctattctcactgctgaaattaaatctaagcagaatttaagtaacattcatattaccggcttattttacaacctcagatacaaatactggactaaacactaaaaacatcttactatgacagaatacgaaaa

SEQ ID NO: 11977 - DNA, 234 bp, Glycine max
  Clone ID: PAT_MRT3847_110822C.1
taagttcaagagaagtatattagggaataaccgattaccgtgccatgattctgttgatttatcatgacaagaacaaatataacactttgtaataccgattatgtgaatgctatagcaacaatgactttgctgttcaatttatttctgctatcattgctggtgacatagatgttgctgctgtatatgcacatgatctggcacattttggtcttgaagtaaggcttacttattatt

SEQ ID NO: 11978 - DNA, 440 bp, Glycine max
  Clone ID: PAT_MRT3847_110823C.1
ccacgcgtccggtaaaatgaatcaaattagcgcttttgcattttgggcacttgaggttatcgtcagagatcatcagatacataaggtagtgagggcaccctactagcaccaaggaaggagctttagggttattgttattgttgttctcgttattgatgctgttgttggttctgtcgctgttgtcattgtcgatggcgttgttgttgttgttgttggtgttgctgttgttgttgagggtgccctcttggttgggcttaatggacgcacatgatctatgtggtgaaagttgtgacaccattgttggagtgggtccatttccgctattcatgtttattccaaagcatgttacctgttctcactcaaactagtggataaaacaagcacataaaaacttgggtttagtgcaaaaaagggaaaagaaaaaaatcaaggtgaacatt

SEQ ID NO: 11979 - DNA, 383 bp, Glycine max
  unsure (1)..(383): unsure at all n locations
  Clone ID: PAT_MRT3847_110824C.1
cggtccgnattcccgggtcgaccccgcgtccgcagggtgttccaaatgtgcttctgagacgacctcctttagcctaactgttcaagatctgaacagaaaaaagcctccatgcaatggagaaggacaaacagaaagagtgaaagcatgcctagatgactcacaagatatttctcagatatcagaccctgatagaaaatcaaggtgtaccctncttggctaattggatttcgagaccctgcaagtgttggctgtggacagcaattgacattacttagtatagagattcttgcagaatgtagaggagaccttttacccgatcctgaatttgatgccatcaacattggagctcttggttttgagaatgacgccgatcctatccgccg

SEQ ID NO: 11980 - DNA, 310 bp, Glycine max
  Clone ID: PAT_MRT3847_110825C.1
ctatctggctcgagcacggacttgatttatgctttaaattcaccgaaagctgaatgaatgtgccacggcaggcggtactttatcacttgcatcggggcgtggaacatagtctgtagctatcgcttgtatatcatttgtatagctagacttgagcaccctgtctactcttctagacagtgtgtggagatgcctagaatcatgagagatgggcctatctcggcctcttcgaagctaaaacgcactgatgaccgacatacatgtgtcttgacggggaatgggcccatagcttaccctccgatgggagcactat

SEQ ID NO: 11981 - DNA, 282 bp, Glycine max
  Clone ID: PAT_MRT3847_110826C.1
gtattctattattttcccaaaaaaaaaaaaaaaaaaaaaaaaaaaaaaaaaaaaaaaaggaaaggggaattaaacaaattatattgagtaatgcattggacaaaaaataatgttttatagtgttacgctaatggaactaaattggcctttatatgataacaatctaaatttattaaaacgggggggggccttttattaggatcgattgtattttccggccctttagactgattaacttttttttatgggtcccatacacaaattacatgggccccgatttaa

SEQ ID NO: 11982 - DNA, 203 bp, Glycine max
  Clone ID: PAT_MRT3847_110827C.1
aagaaatataactaatattctttagaataatcaaaaagaatattaaattcaaatgaattgtgagatagaaaaaatacttaaaaaggaggtttttgtaatgcttgatctaaaaacatatcatttcgtggcaccagtattaagtactctatggttcggtgctttgtcagttcttttgatagatatcaaatcgtttttttcatatt

SEQ ID NO: 11983 - DNA, 344 bp, Glycine max
  Clone ID: PAT_MRT3847_110828C.1
tccgttccaaggaaggtttcccgtcatcactgtatgacgtcctccttctttggggggggggggggggggggggggggggggggggggggggaaggaaatatgtggtaactgtctatcaaagggaggtaaaccctttatgataaagccaatagaggagacacaggtatacctgccccagatggccccctggcaagaggaaggagagacagggtagttaacagccgccccatggtgggttagccctggttgtagtggtgggcggaatggttgggggtgtaccacccgtaggtaacataaaattgttactattaatacgcgtgctgcttctaagtgttgaggtgatt

SEQ ID NO: 11984 - DNA, 428 bp, Glycine max
  unsure (1)..(428): unsure at all n locations
  Clone ID: PAT_MRT3847_110829C.1
caggggggacctcttcttaacctatcctttttatttgactctgcccggtttattttttaaacgctaaattcacccccttttctagcaaatctttttttttttgaccaggtttaacccgggagcanttaaaccatccttacttttaacatgtncccggttgggagatttggttacctccttacccccccacttgcccttcttcaatcaatccttgctatgcttcagggcactcttttngtaaaagaaaatgggttccaggccgccctctgttcattggcttgcttcactggctctanccttcntttctccaagtcttccgcgattgaaccctttttgccctgaaattcggtaaagcgaacctttttctttctttcaaggctcaaattcttcatccctgagcgcgttctccggggccttttcttcctcct

SEQ ID NO: 11985 - DNA, 2342 bp, Glycine max
  Clone ID: PAT_MRT3847_11082C.1
ttgtctatatattatgggtaacactatctctaacgttttctctctttttggtcagagggagagtggggtgtgtgtgtttttgttgggatttgtgaggaatccattgaaggaggaagagtgggagatttatgtcgtcttggttttatttggaagtagtgattggagctttgttgaagctcgggttcggttacgcttgtatttgctgcatgctactctggctggtgttgaattctgctgaccagatgagtttgattttttaatttacttttgatttttctgttaacccagacacaggtgatagatcggtcataaaaaaatatattttgggacagaaaaatcttggccatagatttgtaatcttttcatctcaaaaaatttctcagtgtgttgtcactcaattcaccatcttctgtgcttgatttggatacatctgctttcaatttcagagggagagtagtgtgtgtgtgtgttttttgtttggatttctatgaggaatccattgaaggaggaagaacaggagatttatgtcgtcttggttttatttggaagtagtgattggagctttgttgaagctcgggttcggttacgcttgtgtttgctgcatgctactctggttggtgttgaattctgctgtttcgatgagtttgaggtcaaaaaggacatgttatggaattctggtttgttatggaggctttcagataaaaaaattctctgctttcttcctcctttggagagtggatctcacttgatgttcttgaaattatgagggattttttttttggtttattaaaaaaaattattttgttttgttgaacaatttttctgggtattttgaggggttttgacccaattttttttaccatggtggagcctcttaatcaatcgactcctaggacgaaaaaaatgaaacacaagcgaaatccgattcatgactcgaaaatgacgaggaaactgcgcatcatttgcaatgatcctgatgctactgactcttcatctgatgaggatgagtattttgggaatgttaggaagatgatcgagccgctcgagccgctcgagcggctcgaggttccggttaaccctgtggttgcagatgaaactagtactgagagcacaaacaatgatgaattgaaccagacgaagagggttatggcgaaaaccccctcagtgaagaggcaatcttgtgggaaatacaaaggtgttcggatgcggaaatggggcaaatgggccgcggagattcgtgaccctttcaagggcacgcgaatctggttgggcactttcagcactgcagaagaggcttctcaagcctatgagaccagaaggcttgagtttgaggtcatggccaaggctctatctgatgagaagagcaacaatggcagcagcaacaacaatgttgttgcttctgctgaaactgaaactgtggctgcccctgaaaataacagttcaaactattatgtttcttctgctgcaggttctgtatcagactccaagtctgcttctatggatgaatcagagagtgtgttgtcactcacatcaccatcttctgtgcttgaattggatacatctgctttcaatttgattgggagtggtaaggtttcaagcaatgaagttgttgagactaaaggattggaggctgaagttgctgagactaaaaatttggcagctgaatttgccgagctggaaatgctggaaatgccggatttgagtatgctgaatgtgccatccccatctgctgtcgctgctactgctgccgctccatctgagtttgaattggatttgttggcatttgttgattccgagtatggatttcatgatgagcatgactttgatgatgatcttgctgccctggaagactttcacatttgcggtttcgatgacaatgagcctagcgagcttcccgattacgattttgacgactttggtgctgatgagtttgctggttggattgaagaacccctcaatataccttgcgtatagattttgcagcttcataggaatgagttctatccaagagactagtactactacaacattacaagttgtgtcattgcttaaaaatgctatagttttttgagatctcaggaaaaaactagttcctgggagagttgttttgtcaggtttgttttaatttatttgtttctttagggatggaagatcaatgagaggttaagagacaatgccttggtttttcttgtgctattagagccgtccaagggtttttcaatttctattatcgtgaaagttgagtgtgtagatgtctatcaaacttgaaatctactatctttatcagaaattctatggtatccttggaaaagtaccccgcagaaaaaaaaaaaaaaaaataa

SEQ ID NO: 11986 - DNA, 751 bp, Glycine max
  unsure (1)..(751): unsure at all n locations
  Clone ID: PAT_MRT3847_110830C.1
cactcagtgacgcgtgggctcacgaatcattcagctttttaaataaataaatttcctttctccctcacaatcacaatgctcttctacccttccttccttccttccctaatactataatttgttacgtcacggagcccaaatgtctgttacggagctcaaagagcgtcactccgctgccaccgacaccgtcaacaatctcagacaccgtttaaagcagaagcgcctttcgttgctcgacacagatgtttctgggtatgcaaggtctcagggtagaacacctgtgacctttggacctacggatctggtttgctgtagaaccttgcagggtcacacgggaaaggtgtattcattggattggacttctgaaaaaagtcagattgttagtgcatctcaagatgggcgattaatagtgtggaatgctctaactaggcagaaaattcatgccataaagctgccttgtgcatgggtcatgacatgtgctttttcaccaactggtcagtctgttgcatgcggtggtcttgacagtgtttgttctattttcaatcttaattcacccactgacaaggatgggaatctacctgtttccccgatgcttagtggacataagggttatgtttcctcttgtcagtatgttccagatgaagatactcatttaattactggctctggtgatcagacatgtgttntatgggatattactacaggccttaaaacctctatctttggaggagagtttcagtctggacatact

SEQ ID NO: 11987 - DNA, 267 bp, Glycine max
  Clone ID: PAT_MRT3847_110831C.1
acggcttactcctcttaccatccttaactcccattccatttttacaccagaatcctgtacagaaagtcccgtctacaaatctatatgcctagactacacagatctactcacaaatcctacatgaatcactctaatctttcaccaggacaatccgcatgccatacatactttcactgctgcacatatatcctatcaacctcaacaacttaccaaattgttcgctcaatgtcttcaactatcgatttaccaatcctaaaaatctttgcc

SEQ ID NO: 11988 - DNA, 1865 bp, Glycine max
  Clone ID: PAT_MRT3847_110832C.1
gggggccgtgtgtggaagagttgccagcgtcagaaagtcagaaacaacttgacttcttctccttcttcttcttcttcttctctttgaacagaacaacaactcaactcatctcacgattcattcagctttttaaataaataaaattcctttctccctcacaatcacaatgctcttctacccttcaaacccaacatcacacccctcttccttccttccttccctaatactataatttgttacgtcacggagcccaaatgtctgttacggagctcaaagagcgtcactccgctgccaccgacaccgtcaacaatctcagacaccgtttaaagcagaagcgcctttcgttgctcgacacagatgtttctgggtatgcaaggtctcagggtagaacacctgtgacctttggacctacggatctggtttgctgtagaaccttgcagggtcacacgggaaaggtgtattcattggattggacttctgaaaaaagtcagattgttagtgcatctcaagatgggcgattaatagtgtggaatgctctaactaggcagaaaattcatgccataaagctaccttgtgcatgggtcatgacctgtgctttttcaccaactggtcagtctgttgcatgtggtggtctggacagtgtttgctctattttcaatcttaattcgcccactgacagggatgggaatctacctgtttcacggatgcttagtggacataaaggttatgtttcctcttgtcagtatgttccagatgaagatactcatttgattactggttctggtgatcagacatgtgttttatgggatattactactggccttagaacatctgtttttggtggtgaatttcagtctggacatactgcagatgtacttagcatttccattaatggatccaactctagaatgtttgtatctggttcttgtgattcaactgcccgattgtgggacactcgtgtggcaagccgagcagtgcagacatttcatgggcaccagggggatgttaatactgtcaaattctttcctgatggaaatagatttggaactcacgcgtccggtcgagcagtgcggacatttcatgggcatgagggagatgttaatgcagtcaaattctttcctgatggaaatagatttggaactggttcagatgatggaacctgcagattatttgacattaggactgggcaccaacttcaagtttattatcagcagcacagtgacaatgagatcccacctgtgacttccattgcattctctgcttcaggaagacttctctttgctggatacacaaatggagattgctatgtctgggacactttattggcaaaggtggtactgaatataggatctctccaagactctcatgaggacaggatcagctgtttaggtttgtcagctgatggaagtgccttgtgtacaggaagttgggacacaaacttaaagatatgggcgtttggagggcataggaggacaacttaaagccattgaaggaaaggccaaataggggacgaattgcgtacaactcttcattttagccttgcaactattgcatcagtttgtttatgctcatgtccgtttgtccatgtgtgtgatctagtactactttttccattgtactacccacttcgctaactataccatttccttataactatgatattatactacttaaaagacctaaggactgattagctatggagcttcctgaaagtgttccgaactatataaaatcaaaattttcattttcctctttaacacctgttttaatgaacgagttagtaaatgctatttttgttctataaatccataatgtagctacctttgcttcaattatcgttgaatgcagccgccaaaacctcctcc

SEQ ID NO: 11989 - DNA, 219 bp, Glycine max
  unsure (1)..(219): unsure at all n locations
  Clone ID: PAT_MRT3847_110833C.1
aaacaccctcgtcgaccacaccaaaattaatttcatataggagcatatgcgaacgaaangacgataaggtaggtagaaagcaacagctctgaattcatgttagcacacttgattaaaggctgtcggacactgtgacagatgcaatgggagcttatacctagcctgggcgtaaaaacaacgtaaaggctattcacatgtaaagattggagaccacacctt

SEQ ID NO: 11990 - DNA, 989 bp, Glycine max
  Clone ID: PAT_MRT3847_110834C.1
ccagcgtcctcccccacgcgtccgtaaaaaacagagcaactactcaattcttcactctgtttccccttaccttacacactctaacacatggattcaccttcctccttcttcaactcaccctcttccggtttctgctccgaatcttcctctccggaagccttctcgtgggaagggtacctacccttcaacgagaacgacccggaggagatgcttctatacggcatgatcgccggcgcgacaaccgaggagcactccggcgagagggcgagctcggaggagagtgctgcagcacggaaggagaagtcgtaccgcggcgtacggcggcggccgtgggggaagttcgcggcggagataagggactccacgcgccacgggatgagggtgtggctggggacattcgacagcgccgaagccgcggctctggcttacgaccaagccgcgttctccatgcgcggctcggcggcgattctcaacttccccgcggagatcgttagagagtcgcttaaagagatgaactacgctcatgatgattccaacaacgaagaagggtgctcccctgttgtcgctctcaagaggaaacactctttgagaaggaaaattaacgtcaggaagaagaagaacaacaataacaatagcaaactacaaagtagtaccgtagacaatgctgtcgtgtttgaagaccttggtcctgattacttggaacagctgttgatgtcctctgatcatcatattcccaccaccttctgattcatttattcctcaattgcaattcagatctcaaaaaccttataaatatccattgcatagtttctacctagggtttttgtgttagtagtgttaattccttcttcttctttgttcttttgtttttgtaaggctaaaatgcttaggtcatgtttggatgacagatttgaacttcttttcagttcttatctttttttctttgtttttgtttttgttttcctactctgggagaattttcttcttta

SEQ ID NO: 11991 - DNA, 736 bp, Glycine max
  Clone ID: PAT_MRT3847_110835C.1
gctctgctcggtttaggatttgcaattgctgaaactatgctgtctggcgacattgacacctcaaagttgttcaatgattgcaaggagtacatagttaccacttctcaaagtgacggattccatgagaaagtcaatgaacttgttcaggtgggtaccaatacactaaagctatagtgactaatttataaagttatactgtagctcccgatagtcttttgaaaggtctctaatattgattctcaccttaaggaagaattttttttttcctgtagtacatactcctcccactataaattgacacctgactttgtttggttaatttttttgctgttttaatttcttttaaaattaaaatacaatttttttttctttctaaagttagaaaattagttgcagaagagtaggtactttagcagtgctgaaaatttgctccttaaggaaatgatcaaaatttaacaagtggagtcagctgcaatattattgcttcatccatatctgtttgaagaagccattaactatataaagggaaacacaggactgatcatattttgagactttgtaccttttactataaccaatcctacattctggaaaattcaagttgccccttttagtatttggattcattgtgctacttaacacagtctgtgcccacatgaggatgaaaaaaatagttactttgggacgtagactgattataatagtaattataatgatagtagtggggtcttgatag

SEQ ID NO: 11992 - DNA, 308 bp, Glycine max
  Clone ID: PAT_MRT3847_110836C.1
ctctaccgtttctagctgcatcaccacatggggcatctgcgggccaaggagtcatgcgcggaacacccctgtgctcttacgctgagatataaccttaagacgtgctcaagccagaaccggtgtttaagataggccagaggatccgacctcggggacaacgagttatttcgcaaggggaagaattttctcgtttttaagaagaaaaagggccttatgtattcctctgcagaggagttcttcccccaggaggagaacatggcccgcaagatggtttgagcccagaaactttgcgctctcggcccctctga

SEQ ID NO: 11993 - DNA, 436 bp, Glycine max
  Clone ID: PAT_MRT3847_110837C.1
caaaatactacagttggtaacttattgaacagttgctgcttggaacagaggctgtctaatgatcaacattgtgatcaccggtaatgcactaatcaaaatgaataattgtacctcattgggacaagtgtttttaacaaacagctaccgtacaaatcatttttatgcatgtaagtgaacacaatcagaaccacattcctgggaattgatcttcccaatataggaatgtgtgcctaataatgcgtctgaaatgaggagttcttgaagggcatattaaactttatggcgtttgagtttacttattgacaaacccaaacagcctacaggcttagatattctcttgggaatatctaacgattttgaaaatgatggttatactctcatgccagctttttgtgttccacaagctactgtcagaccttttgaaaatgcggaatac

SEQ ID NO: 11994 - DNA, 448 bp, Glycine max
  unsure (1)..(448): unsure at all n locations
  Clone ID: PAT_MRT3847_110838C.1
ggnctattagtatggaccaatcttactaagcgtgtcttggagataaatataaaatcgggaacctgattcggggcatcctagcttttttttactggtacccatttagcagtttttttaaaataccggaaaatattccttatgggtatntttcagttataaaccagtagaattagttttttcatttcagcagtacctttttttcccgtaaaaccgcactcctttagtataatttgttttcattagcatccttttatgaacgcttgttatcgtcgatggtatacgtacgttgtttacaaatatacaatgaagttcggtggctcttgattgctggagaaaaagaggtgtgtatttttttaaaaacatatgatccgtatgaccatacgaattatcaatccgtgtgttttgaatgtttttaaaaaattataattaattttaaattttttataca

SEQ ID NO: 11995 - DNA, 511 bp, Glycine max
  unsure (1)..(511): unsure at all n locations
  Clone ID: PAT_MRT3847_110839C.1
cgtacgttttggttcgcatacaattctaatgcttccatgggttccattttttgtttgctctcaacagcagccatcacgaagggcgaaacatcagtcaaatttgttcgaacaaatgcttgaggtcagagcagtcggaacaaatatcggaaaagagcaggatgggccgtcgtacgaaatgcttttccgtttaacaacgacaaatagaagcaaatctgctccttttctggccaaaataccgacaaaaactttgaaaagggaagtcgcaaacgaagcaaaaacgaataattcaacaaatgatgacgagaggaaggaggaggagcaattcgcatctctgaaaaaccgttgccatacaatcgcatcgacaagcgcaccttttgcttcgacaaaagtgcaacagaacggcgtggacagcaatcattctccgtctgcaaaacagtcttcgtcctcttctcccgttgcatccacaaaaacttttcgacggcggactgcctttgaaacttcngaagcaatg

SEQ ID NO: 11996 - DNA, 1082 bp, Glycine max
  Clone ID: PAT_MRT3847_11083C.1
caaaggtgttcggatgcggaaatggggcaaatgggccgcggagattcgtgaccctttcaagggcacgcgaatctggttgggcactttcagcactgcagaagaggcttctcaagcctatgagaccagaaggcttgagtttgaggtcatggccaaggctctatctgatgagaagagcaacaatggcagcagcaacaacaatgttgttgcttctgctgaaactgaaactgtggctgcccctgaaaataacagttcaaactattatgtttcttctgctgcaggttctgtatcagactccaagtctgcttttatggatgaatcagagagtgtgttgtcacacacatcaccatcttctgtgcttgaattggatacatctgcttccaatttgattgggagtggtaaggtttcaagcaatgaaattgttgagactaaagggttggaggccgaagttgctgagactaaaagtttggcagctgaatttgccgagctggaaatccaagatttgagtatgctgaatgtaccatccccatctgctgttgctgctgctacgtctgagtatgaattggatttgttggcatttgacagtttcaaatatggatttgattatgaacatggctttgatgatgattttgctgccctggaagacattcacatttgcagttttgatgataatgagcctagcgagcttcctgattacgattttgatgactttggtgctgatgagtttgctggttggattgaagaacccctcaatataccttgcgtatagattttgcagctacataggaatgagttctatccaagagaattacaagttttgtgtcattgcttaaaaatgctctacagttttgtgagatctcaggaaaaaactagttcctgggggtgttgttttgttttaatttatttgtttctttagggagatggaagatcaatgagaggttaagagagaatgccttggttttccttgtgctattagagccgtccaagggtttttcaatttctattatcatgaaagttctgagtgtgtagaagtctatcaaacttgaattctattatctttatgaaaaattctatggtatccttgg

SEQ ID NO: 11997 - DNA, 2387 bp, Glycine max
  Clone ID: PAT_MRT3847_110840C.1
ccacgccgtccgcaaaagagtaagagcaacacttattaaacccccaccgaatctactccaaataactcggcttccggtaaacaggcacacttacactatcacacagcattactctcactcaacaacaatgttgccgccagcgggaaccatcgtattcaacaccgtcggaagagtccaatacggtttcgacgttttctctgtcgacctcaatcaccaacagcctccgccccacgccaccgcagaccaccgcctcaccgacggtgtctcgattaacttcaacgcacaattcattaacccccaaaacgacgtcgtcttcgtatccgaaagaaccgggtcgccccgcttctacattacaaaacccgacactaaaccccagcctttaccctttctgcccaacgctctcttccacgatcgcccaatcgttaaaaacggaaagctctacttcgtttccacgcacgaagaaaacgacgccgttttcactagctggagcgccgtttactccaccgccatagatgactccaccgccaccgtcaagagactcaccccgcgcggcgaggtggactacagccccgccgtctccctcaccgggaaattcctcggcgtcgcttcttaccgctctcgccgctggcaaaccaacgatttccgcgaactccaaacggagatcgtcgttttccccgagtccgatccaaaaaaccgagtcacggtgagcgagcgcggtggctggccatcgtggtcccaagattcaaccattttcttccaccgaatcgccgaagatggatgggtggagcatcttccgcgtcgatttaaccgattccgaactttcagaatctcgaaactcgccgattcgcgtcacgccgccggggttgcactgtttcactccggcagctttccacgacggaaagcgcgtcgcggtcgcaactcgccggagagaaagcaatttaaggcacgtcgaaatcttcgatctcgaatcgcaaacgttccaacgaatcaccgaagacataaaccctaactttaaccattacaacccgttcgtctcgttggactctcgccacctcgggtaccaccgattccgaggcgagtcgattcagggcgagccaatatacccgcacctcgacaaagtcctctctccggttcgcgacctacagttactcagactcaacggttcgtttcccaccttctcccccgacggcgatttcatcgctttcaaccacggcttagacggcaacgttaacggcggcgttaaaatcgttaaatcgaacggttccaaacgctggacgttgctcaaaggacgaacgtgcttccacaacgcgtggagcccaacggagaagaacgtgatatacacctccgtcggtccaatcttcgagtcggtttataaaacggttcaaatcgcgcgcatcgagttcgacccggttcatttaactaacgaccgtgaagaggttccgtttaagttaacgattctcacgagagaagacacagggaacaatgcttttccgtcatgctcccctgacgggaagagcattgtgtttcggtctggaagggaaggatacaagaacttgtacatagttgacgctgttaaaggggagtttgacggcgggataaggaggttgacggagggggagtggatcgatacgatgccgtgttggtcgccgaaaggggatttgatagcgttttcatcgaacaggcatgaccctaagaatagtgaggtgtttgggatatatttggtggggccaaatgggagtgggttgaggagggttgaggtggcaaagggggtcgaaggaatgaaagagaggttgaaccacgtgtgcttcagccgcgacggagagtggttgctgttcacggcgaacttgggtggcgtgagtgcggagccggtggggctgccgaaccagtttcagccgtatggggatttgtatgtggtgaggttggatgggagtgggttgaggaggctgacgtgtaatgcgtatgagaatgggacgcccacgtggcaccatggggatttggcgctgtgtgctcctagagaagatgatggcgaaggaggtcaggattgggataagttgaagggtgagtttcaagaaccactttggatcacgtgtgatatttgaattcatcaccagtgttccactggtatgtaaattacttgtaatgtaacgtgtggccatggcaaaataaatttgggtttcttttgctaatttctggctttccaaactgagaaagcgtttactagtattataagcctgtagtgccatttgattgtcatattaaattttactaaatcagggatacaattattaggagtagcgctcttgtaatgattgagaagttagtaaattttggcttctcttgagttctttcgttatcatataatatgaagccccgacatggaccccggg

SEQ ID NO: 11998 - DNA, 1107 bp, Glycine max
  Clone ID: PAT_MRT3847_110841C.1
ctcgggtccggttccgctggcgacccacgcgtccgtcataaatggagaaactcgcaaattcattttcagtgttagaactcgacgccgatgatagccacgttcccaccactgccggtagtagtgacaagagagttaatgctgacattgacattgtaccaggaaaaagcgagaaacaaaatctagaaaatccagtgacttcttcatgtgaatacaagttacctcttgtgtggattgacttggaaatgactggtttaaatatcgaagtggacagaatattggagattgcttgtataattacagatggaaatttaaccaaaacagtggagggtcctgatttggtcatccatcaaactaaggagtgccttgacaggatgggagaatggtgtcaaagtcatcatgcagctagtgggttaacaaaaaaggtgctaaagagtacaataagtgaaggagaagctgaaaagcaggttattgaatttgttaagagatatgttaatgttggtttgtacacacctctcttggcaggaagttcaatatatgttgattttcaatttctgaagaaatacatgccaaaattggcgagtctcttctctcatgtggttgttgatgttagtagtgttaaagctctctgcattcgctggtatcccaaagataaggagagagcaccttcaaaattaaaaacacacagagctttagatgacattagagaaagcattgaggaacttagatactacaaggcaaatatttttaagcccaggtccagaaagtgatagggatgcagtgaaatcagcgtacgaatgttgatgggcaggttttcagttcaagcgtcaaatctcattgttatggagggtttgctggctgagtaaatggctcgtgattttggattaagtttagttactgcaaaatcatatttaaatttgtactgaaaaccatgatgtacaggttaaattgagcttcaactcctttgattgtccattcaagaaagaaaaaggaaatgtaattgttgattacaatgcctaaagaaataatatgtgtatgtatctctgccaactggaccattgtgaaatgcttaacttcagcaatgagcatttgcattcatagatgattaaa

SEQ ID NO: 11999 - DNA, 203 bp, Glycine max
  unsure (1)..(203): unsure at all n locations
  Clone ID: PAT_MRT3847_110842C.1
gcagattattcntgtntncagtaactgcagccctttgngntctgaacttgcattactaagtttgcnanatatcagtgtatttccngagtttaaaaagcatncggtccannaaattaaanacaaaanatgcatttatagataattccttgnttaaatnaaaccagacntnncttnanggctanggcccaaancnngaaggggac

SEQ ID NO: 12000 - DNA, 359 bp, Glycine max
  Clone ID: PAT_MRT3847_110843C.1
gcccctagcgtccgcttttccccggcctcctgcgcaaacaaagtttacgtagcagaggaacggacatatggggtgtgtatgccacagtagaacctctatatagaaaaagggtaccgtaaccataaggaggcatctgtgtaccttgttgagctacattcttccatcttttctaactggtgaaattaaatataagccgaatttgaggaacattcatatttccggcttattttacaacggcagatacaaattctggactaaacactagaaaagattggttttgccagaagaggaaaagatggaggtgattagaaatagaggcattcctgctgatgttcttgcaaagcgagcttattaatttg

SEQ ID NO: 12001 - DNA, 292 bp, Glycine max
  Clone ID: PAT_MRT3847_110844C.1
gtagagtagagcagcaccaccaagccacacaacacaaccacaatggttcccatggccggcaccaccgccaccggcagtagaaaaatcgaaacatacgaagagtttgtcaaagttcacgcgctgctcctcgcggcgtcggggctaccggagcggctacaccggcgcctcttcgagaagctctcctgcgagcactttgacggaggcgatcacttccagatcgagccgtgcgaggacggccgccagatggcctcgtcctcacgtcggcgtccatgccgcgggactccgacgtctt

SEQ ID NO: 12002 - DNA, 261 bp, Glycine max
  unsure (1)..(261): unsure at all n locations
  Clone ID: PAT_MRT3847_110845C.1
ccgtcgaaaaacatgcatcggtttcggttactagttttacataaatattagtatgtatatattccgagnccaaactgtgagagtcgcatacatagagactagagtagaaggatggcatgaacaaaatttaaattgatcgaattacgcgatgatactgacatgattaccacacccaaaaagatccggaaaatatggacatgattaggcttttgtttgtttgtttatcgaggttatttttgggcatggcctaaggtcttttag

SEQ ID NO: 12003 - DNA, 266 bp, Glycine max
  Clone ID: PAT_MRT3847_110846C.1
caatggtgttgagggtttggactatatggaaagaattcctcttgccacatctgagggttttccccatgtgcttccacgcaacattcgagagtgaggcaaaaggagatttgcttctggggatggtgaagagatgacattgattccggggaccagtgtagaagaggcttacaataagctaatagtatggacttgagtaaagtgtacctacatgggactggcattagtgacccaaggatgagaaacttcctcgtcgcaaaatttttgac

SEQ ID NO: 12004 - DNA, 644 bp, Glycine max
  Clone ID: PAT_MRT3847_110847C.1
gctggctgttgcattaacacttatcggaggtgtgcaacatgttgatgcttctggaactagggtaagaggggagtcccacttactcttggttggtgatcctggcaccggaaaatctcagtttcttaaatttgctgcaaaattgagcaaccgttctgttattaccactgggttgggaagcacaagtgcaggattgactgttactgcagtgaaggatggaggggaatggatgttagaagctggggctcttgttttagcagatggaggcttgtgttgcattgatgaatttgatagtatgagggaacatgatagagcaactatacatgaagccatggagcagcagacaataagtgttgccaaggctggtcttgtaacaacactaagcactagaacaactgtatttggcgccacaaatcccaaaggacagtatgatcctgatcaacctctgtccatcaatacaacactctctggtcctttattaagcaggtttgatattgtccttgttctcttggatacaaaaaatcctgattgggatgcagtagtttcatctcatattctttctgaggcagaactggatagaaccaccaatgatgaagatctggtaaacagctggccacttctacactcaagaggtacatacactatgt

SEQ ID NO: 12005 - DNA, 499 bp, Glycine max
  Clone ID: PAT_MRT3847_110848C.1
gcacgaggtcctttccccagtcagtagtcaccaccaccacctatctatctattatccatattccatcaccatttcccctcttactctgtttcgagagatgaactcgttgaaccgttacactatcagatacccaccatagcataacactttcccccaacaccaccaactgcgtcttcttcttcttcttcttcttcttcttcatggccgaacttggtttttcgcacccccatcacctttttcgccccaatgctcccttcattatcccacccaagagacacatatgccatcaatatcatgtaccactgcacagtgtatttcgattgatgtactgtatgaagaaccataaatcagtcagaagtttagctgcattatcaacagagaaaggaaagtcagctactagtgttgatgagttatgcaagatcatttggactgtggaagcagatttagaagatggtcacctactgttcataactggtgatcctgctgtattaggctgctg

SEQ ID NO: 12006 - DNA, 444 bp, Glycine max
  Clone ID: PAT_MRT3847_110849C.1
aaaaaaaacctttttataaagggctttgatagagagggatttttttcttaaagaatgacgagggggcataggctcctttatgacgggctccacggctatgaagaaagaattgtgcgacctttttaaaaacatccggaaaagccgggctgatcaaaacattgtgggggtgaagaacaaaaataactcccagggtggacaaaacaccattttaggcggccaacaacaaatatgtgactgatgggggccttccctatctgaaacctgagggatttctgcaatcgagcctctcaacccccaagcacagtgggcaggacttttgcttcaggaacaaaaccccgccctacctgaggaggcggagactttcttcctgtggggatcttaggacaacaatgttagaaccataccctctctttctccttggatggcataactgaaaaggattgc

SEQ ID NO: 12007 - DNA, 916 bp, Glycine max
  Clone ID: PAT_MRT3847_11084C.1
gaacattacattcccggaaaagattttccggggaaagaagtgacggattttcagaggctggtgtgtaggtgggttccaaatgtgttgtggtgggcattgtgctaaacaatgattcttctctttggttatattctgagcaaagggaacaacattcactcgagactgctttgtccaaggtgttgagagaagaagcccagagcttcaagaacctctagatttgaggtcaaatccttttcaagggggagggaatgatgcaatcctaccccccaagggcattggatagaagactccaagaaaattgggccaaagatgcaagaggccctaaggttctcataagtcttatggtagattttgagcccatgggctaagtatgagcccacttatctttgtacatattagatttaggtttcattatttttgggccttgtatttagggtttcatagtgtaggaagggtaccctagtaacgtaggatttttcagcccttgtattttagggcacctggactagtttttgtattaggggtagttttgtaatttcacatgaattaagtgtattatttgatgtgtgtgtgttgggagagaaatttaattgaattgggagaaacctaatccaattaaattttggaccatcctaagggggaggtgagcatttgcttaatacatcctgttgccacatcatatagtcacactttgtgtatacccttcatgctttacatgcctcatgacaccaaagtacacttagtggagaatcttgaatttgatcttggattagtgggctgaaccatagctgaaattcactaatcataattagtgaaattttggctctaaatttggctctacaaattcaaattcaaattgaagtgaaatttgaatagaaattcaaatttccctccaattttgtatgacactgagact

SEQ ID NO: 12008 - DNA, 358 bp, Glycine max
  Clone ID: PAT_MRT3847_110850C.1
gtcatccacactaacgaacgaactcttgctccgatcacgagctagctgaggtcgacgatggcggctgtgctgaacagcaggaagacgccgcaggcggtggtggccgtgctggtggcggcggcgctgctggcttcgtccgcttcggcggcgatcacctgcgggcaggtggggtcgtcgctggcgccgtgcatcccgtacgcgacggggagggccagcgcgctccccgcgtcgtgctgcagcggcgtcaagagcctcaacagcgcggcgcggaccagcgcggaccgccaggcggcgtgccgctgcctcaagagcctcgccaacagcgtcaagagcgtcaacatgggcaccgtcgccacca

SEQ ID NO: 12009 - DNA, 334 bp, Glycine max
  Clone ID: PAT_MRT3847_110851C.1
gggaagttcatgaaatcgctgggcttgtaattaccgctcagtaaaatggcaatcactttcaatacaacccatacccgtgggatttaagggatattattacaacctaaacccgtcaaaatccaggactacaaaacccaaggggttttttgaactggcagtttaataagcaaggaggggtttgtatccctgggtaaagtgcccctttaacaatttttaaacttttgattaccaactttgggcctcaaaagagaacatggtctctaaccgggtttatgcccaaaaactggtcgtcaacctttagttgagaaaaaaccaggggaacaaattcatcccc

SEQ ID NO: 12010 - DNA, 210 bp, Glycine max
  Clone ID: PAT_MRT3847_110852C.1
cttgattgttgcttgtatgaatcctcagctttataatgttgccaaaactttgatagaacttggagccaatgtcaatgcatttcgtcctggtattgttctcttttcggttttttttatggtttcagactaaattaattagtttattgggaaagggtgctgactgctttgaatttaattgggaattaaatgattacaattttgctgataaaa

SEQ ID NO: 12011 - DNA, 474 bp, Glycine max
  Clone ID: PAT_MRT3847_110853C.1
tacggctgcgagaagacgacagaagggatttcagatataggtgcttttccctacttcatgctaaaattatgttgtaacttgtaagtaacttgaaacagataatttacgcgaatgttttcaggtcatcaatacatggcacacctgcttgactgaaaaagttataatcatttcattgaatatatactaaggtttgtaattttgaataataaagatcaattactatattaagattgatagaagtattcaaatcatacaagatattgtttaattaattgtttatgtagactttagatctccttgcgcccaatgataaatcgtacccttcctttcgttactattctgtcaaactcattaaatcacgaaccattactcctacgtcattcactaaaaaaattaaatgaaagaagtgtttaactagaaatcataaaagaatgtaaaaaaagttatcaacaacgcatttaataaaaatatttt

SEQ ID NO: 12012 - DNA, 220 bp, Glycine max
  Clone ID: PAT_MRT3847_110854C.1
catgatgctccaaggacactctattgtcacctactcaggaaagttacaactcagtaaggtggacaaaaacgggcccacagaaccttcgattcttgtgcacgccctatactacacccccatgcacatttgggacaaagaagcaggtatcgatgccagcttggccgatgccttcaacttcaccttctatgacgatgacacaaaaatgcttgcagatgggatt

SEQ ID NO: 12013 - DNA, 357 bp, Glycine max
  Clone ID: PAT_MRT3847_110855C.1
agaaaaaaatttgggacatattacactttttttcaaatttaaatgggtgcaatgataagcatttgaagcttattaaagttttgggaaattttttttacatgcccttttaaagggaatgggcggatttttgaaagccccctaagagatttaattaaagacaaccttgttaggtgcttcaggggagggggttccattccataccacttttacagatgggtttttgcatgaacccacaacaatttttgggccattgacctgtttgggtcctccacaaccaacactttggctgaaggtgtacctcccttcatgccccaacaaggaacatgcgggagttcaaagccatattttttgggtttt

SEQ ID NO: 12014 - DNA, 294 bp, Glycine max
  Clone ID: PAT_MRT3847_110856C.1
tacggctgcgagaagacgacagaagggggctgctggaatatgacgacagctatagactgcgctatagtgaggagagagctataatgtatgttatctgttaggagtgcatgaatttgggtagcatgtctcttgcatggcgcatgctagcaacaggtccctgtcctggtgcaagctggctatggttcgctctcttcatgagtactgtgtgcgaggattatgcttgctacgaaagctgacaacattccaggcttggtagccaatcctacaaaatgcgaggatccaacaccagtcttc

SEQ ID NO: 12015 - DNA, 192 bp, Glycine max
  Clone ID: PAT_MRT3847_110857C.1
gggtgtggttgacaatgccacgctttccacgtacgcttgggacacgtttgcacatccacccaccctttttcttccacaatcattctcttatcttcggcctcgggggtcaacacatatagtgtctagcgaaccatacatctaaacaacatggcattgcaagcagcacctagccttcacaccgtcactggcaat

SEQ ID NO: 12016 - DNA, 1053 bp, Glycine max
  Clone ID: PAT_MRT3847_110858C.1
cccacgcgtccggcccaccgtctacttatactatacacattatttaaggatcaccaaagcctatttctttagtccttatgttatggtctaactctacctcgttcaagatcaaacattgattcttagttgcatagcccttgtcatatctctttttttaatcaaaaccttccattcaacacttatagttgaataaaatgtctgctgcaacttttgcagctcatattgctggggctggctttgtaggcttgaagtccaactcatcaaatctttgccccagtactggatccataggatggaaaaggaagattgtttcaaatggttctaaaacttactgcatgaagacatggaatcccatcaacaataagaagtttgaaacactgtcctacctgccacccctttcagatgaatccattgcaaaggagattgactacatgctcaagaagggatggatcccttgccttgaatttgatgagttggggtgtgttcgtagagaaaacagccatatgccagggtactatgacggtaggtattggacattgtggaagctaccaatgtttgcttgcagtgactcttcgcaagtgctgaaggagatccatgaatgcagaagggtgtatccaaatgcatatatacgttgcttagcatttgataaccagcgtcacatgcagtccatggcttttatagttcacaaacctgatatcactactaccacttgagcctttttgctcttgttaatttatcttcatttccccaatttctctctctttaaaaaaatgtaatatggactttgctgtttacttatctagcggtatgaataagatggaattggaagtcgcagccgtttgtttgaatagaacgtaaagacgttattgagtttgttttcattttgaagttataattctaccacacatttagcttgcaattgattaccaaaaaataataaaaaacactaaataaaaaataaaaaaaaaaaaaaaaaaaaaaaaaaaaataaaaaatataaaaaaaaaaaaaaaaaaacataatgggggggccgcccctttttgggcttgtccc

SEQ ID NO: 12017 - DNA, 252 bp, Glycine max
  Clone ID: PAT_MRT3847_110859C.1
ggcacttatcagtgggttgtcaagcccaaaactgtcaaatatgaatttaaaaccaacacccatgtccctaaactaggggtaatgcttgtggggtgggggggaaacaatggctcaaccctcactggtggtgttattgctaaccgagagggtatttcatgggcaacaaaggacaagattcaacaagccaaggtgtttgatatcgacctgcagaaacagttgaggccgtacatggaatccatggttccactcccc

SEQ ID NO: 12018 - DNA, 761 bp, Glycine max
  Clone ID: PAT_MRT3847_11085C.1
ccacgcgtccggctctatctctaacgttttctctctttttggtcagagggagagtggggtgtgtgtgtttttgttgggatttgtgaggaatccattgaaggaggaagagtgggagatttatgtcgtcttggttttatttggaagtagtgattggagctttgttgaagctcgggttcggttacgcttgtatttgctgcatgctactctggctggtgttgaattctgctgtttcgatgagtttgaggtcaaaaaggacatgttatggagctgtggtttgttatgaaggctttcagataaaaaaaatctcttgtttcttcctccttttgagagtggatctcacttgttattcttgaaattttgagggactttttttttggggcgagggtttattttaaaaattttggttttgttttgttgaacaatttttctgggtattttgaggggttttgacccaatttttcaccatggtggagcctcttaatcaatcgactcctaagatgaaaaaaatcaaacacaagccgaattcgattcataactcgaaaataacgaggaaactgtgcatcatttgcaatgatcctaatgctacagactcttcatctgatgaggatgagcattttaggaatgtaaggaagatgaagagaactgtggttgagattgctcttccacctgtttctgtaaaccctgtcgttgcagatgaaactagtactgagagcacaaccaatgatgaattggacaagatgaagagggttttgggtaaaact

SEQ ID NO: 12019 - DNA, 989 bp, Glycine max
  Clone ID: PAT_MRT3847_110860C.1
ccttcttcttcttctcttaaaagttatgaagagcttttgctttgctttctgcgcgcttttcccaattaagtagttcttccttttctcaaagcaaaaaaaatgttcatcgagagtttcaaggttgagagtcctaacgtgaagtacacagagactgagattcagtccgtgtacaactatgaaaccactgaacttgttcacgagaacaataatggcacttatcagtgggttgtcaagcccaaaactgtcaaatatgaatttaaaaccaacacccatgtccctaaactagggttaggtaatgcttgtggggtgggggggaaacaatggctcaaccctcactggtggtgttattgctaaccgagagttagtttcatcttcaattcctaatcattaacgttttaatttatttcttcttcttcttattttttgtggctatggtaatggctataaaataatttaagggtaaccatgtatgtatgtgaattatgtttctcacttctcaggggtatttcatgggcaacaaaggacaagattcaacaagccaattactttgggtcgctgacccaggcatcagctatcagagtggggtctttccaaggggaagaaatatatgctccattcaagagcctgcttccaatggtgaaccctgatgatgttgtgtttgggggatgggatatcagtaacttgaacctggctgatgccatggccagggccaaagtgtttgatatcgacctgcagaaacagttgaggtcgtacatggaatccatggttccactccccggaatctatgacccggatttcattgctgccaaccaaggagaccgtgccactaacgtaatcaggggcatgaagtaagaacaagttctacaaatcatcaaagacattaatgagttcaaggacagcactaaggttgacaaggtggttgtcctgtggacagccaacacagagaggtacagcaacgtatttgtgggactaaacgacaccagggaaaa

SEQ ID NO: 12020 - DNA, 249 bp, Glycine max
  unsure (1)..(249): unsure at all n locations
  Clone ID: PAT_MRT3847_110861C.1
attnaatctncanaattcncngacaagagatctttttctgctccnttgaanaaagaagggtntttgnttgattttggagangtctctgctctgagatctcatgaaccttaacccgtacgatanccaccgagaaggtgatcgnagagtacatatggatcggtggatcaggaatggacctgaggagcaaagcaaggatctcccaggaccanntagngaccntcagagttcccaantggaantangatngnc

SEQ ID NO: 12021 - DNA, 2582 bp, Glycine max
  Clone ID: PAT_MRT3847_110862C.1
ggctcgagctcgagccgaatcggctcgagctttcttcttcttctcttaaaagagcctttgctttttctttaggcctttccgaattaagtacttgtttcattttctctcgaagcaagaaaaatgttcatcgagagtttcaaggttgagagtcctaacgtgaagtacacagagactgagattcagtccgtgtacaactatgaaaccactgaacttgttcacgagaacaagaatggcacttatcagtgggttgtcaagcccaaaactgtcaaatatgaatttaaaaccaacacccatgtccctaaactaggggtaatgcttgtggggtggggtggaaacaatggctcaaccctcaccggtggtgttattgctaaccgagagggtatttcatgggcaacaaaggacaagattcaacaagccaattactttgggtcgctgacccaggcatcagctattagagttgggtctttccaaggggaggaaatatatgccccattcaagagcctgcttccaatggtaaaccctgatgatgttgtgtttgggggatgggatatcagtaacttgaacctggcagatgccatggccagggccaaggtgtttgatatcgacctgcagaaacagttgaggccttacatggaatctatggttccactccccggaatctatgaccccgatttcattgctgccaaccaaggagaccgtgccaacaacgtgatcaagggcacaaagaaagaacaagttcaacaaatcatcaaagacattaaggagtttaaggaaagcactaaggttgacaaggtggttgtcctgtggacagccaacacagagaggtacagcaacctagttgtgggactaaacgacaccatggaaaacctctttgcttccttggacaggaacgaggctgagatttccccttccaccttgtatgccattgcttgtgttatggaaaatgttcctttcatcaatggaagccctcagaacacctttgtcccagggctgattgatctggccatcaagaggaacagtttgattggaggagatgactttaagagtggtcagaccaaaatgaaatctgtgttggtggatttccttgtgggggccggcatcaagccaacatctatagtgagttacaaccatctgggcaacaatgatggcatgaatctctcagcccctcaaaccttccgctctaaggaaatctccaagagcaatgttgttgatgatatggtcaacagcaatgccatcctctatgagcccggtgaacatccagaccatgtggttgtcccctacgtaaggcacatacttaataacaacaacatggtctggatgttcaccaggctcatagaggatggcattgctgttgaccatatcgtcaacaacgttgctcttggagatttccttggagcggaaggtttgtggagccgagagattcataccatcattgtttcccagatggttgtaactaactatagatgttggcttgataccagcccccacaagaaaatcaaccaacacagatttcattttggtctgaccactcttgaagtcatctccaccaatcaaagtgttcctcgcgatggcaagatcaatcagccctggtacaaaagtgttctgagggcttccattaatgaaaggaacattttccatcacacaggcaatagcatacaaggtggaaggagaaatctcagcctcatttctgtccacagcagccaagagattctccatggtgtcattaaggcctacaaccaaattgctatacccctctgtgttggcagtccacaggacaaccaccttgtccactttggtggcttccttaaacgccttgatgtctttgatgatttgctgaacttgctcttgctttgtgcccttaatcacgttgttggcacgctcctcttggttggcagcaatgaaatccgggtcgtagattccggggagtggaaccatggattccatgtaaggcctcaactgcttctgcaaatcgatgtcaaacacctttgccctggccatggcatcagccaggttcatgttgctgatatcccatcccccaaacacaatgtcgtcaggattaaccattggaagcagactcttgaatggggcatagatttcctctccctggaaggatccaactcgaatagctgaggcttgggtgagggagccaaagtaattggcttgttgaatcttgtcctttgtagcccatgaaatgccctctctgttagcaataacaccaccggtgagggtagagccgttgtttccaccccaacccacaagcatcacccccaattttggaacatgggtgttggttttaaattggtagttgacggatttgggtttgacaatccactgataggtgccattcctgttctcgtgaacaagttcggtggtttcgtagttgtacacggactgaatctcagtctcggtgtacttcacattaggactctctaccttaaaattctcgatgaacatttttcccaacgattaagaatgaaactataaatgttataaaaggattgaagaagaagaagaagagagggttggcgcggttcctctcctctactacacttagaaaaagatttgtgaacggttgttggatc

SEQ ID NO: 12022 - DNA, 2018 bp, Glycine max
  Clone ID: PAT_MRT3847_110863C.1
ttcttctgcttctcttaaaagttattaagagcttttgcttttctttctgcgcgcttttcccaattaagtagttcttccttttctcaaagcaaaaaaaatgttcatcgagagtttcaaggttgagagtcctaacgtgaagtacacagagactgagattcagtccgtgtacaactatgaaaccactgaacttgttcacgagaacaataatggcacttatcagtgggttgtcaagcccaaaactgtcaaatatgaatttaaaaccaacacccatgtccctaaactaggggtaatgcttgtggggtgggggggaaacaatggctcaaccctcactggtggtgttattgctaaccgagagggtatttcatgggcaacaaaggacaagattcaacaagccaattactttgggtcgctgacccaggcatcagctatcagagtggggtctttccaaggggaagaaatatatgctccattcaagagcctgcttccaatggtgaaccctgatgatgttgtgtttgggggatgggatatcagtaacttgaacctggctgatgccatggccagggccaaggtgtttgatatcgacctgcagaaacagttgaggccgtacatggaatccatggttccactccccggaatctatgacccggatttcattgctgccaaccaaggagaccgtgccactaacgtaatcaggggcacaaagaaagaacaagttcaacaaatcatcaaagacattagggagttcaaagaaagcactaaggttgacaaggtggttgtcctgtggacagccaacacagagaggtacagcaacgtagttgtgggactaaacgacaccatggaaaacctctttgcttccttggacaggaatgaggctgagatttccccttccaccttgtatgccattgcttgtgttatggaaaatgttcctttcatcaatggaagccctcagaacacctttgtcccaggactcattgatctggccatcaaaaggaatagtttgattggaggagatgactttaagagtggtcagaccaaaatgaaatcggtgttggtggatttcctagtaggggccggcatcaagccaacatctatagtgagttacaaccatttgggaaacaatgatggcatgaatctctcagcccctcaaaccttccgctcgaaggaaatttccaagagcaatgttgttgacgatatggtcaacagcaacgccatcctctatgagcctggtgaacatccggaccatgtggttgtcattaagtatgtaccttacgttggggacagcaagagggccatggatgagtactcttctgagatattcatgggcggaaagaacacaattgtgttgcacaacacttgtgaggattcactgttagctgctcctattatcttggacttggtccttcttgctgagcttagcactcgaatcgagtttaaagctgaaaatgagggaaagttccactcattccacccagttgcgaccatcctcagttacctgaccaaggcccctctggttccaccgagtacgccagtggttaatgcactgtcaaagcagcgagctatgctggaaaacatcctaagggcttgtgttggattagctcctgagaacaacatgatcctggagtacaagtgaagttcaaagtcttaagagtaatggtttgggatactgtagttgaatgagatcaaaacttaactcatatcccataccctcttttctgttatatatttatggcaaatgtgaaatttaaagatcgttggatctctctatctttgttcctgctgactaatttgagagcaggctatctatgctatgcatgcatgtaaaataatataaagttatcgaagtattttgtgcttaaaaaaaaaaaaaaaaaaaaaaaaaaaaaaaaaaaaaaaaaggggggccccccaaaaagaaacccctccccccgggaaataaatccgggccgggaactggagggggaaaaatttcccccaaagggggcccaaataaaacctgggggaaaacggggcaaaagttt

SEQ ID NO: 12023 - DNA, 537 bp, Glycine max
  Clone ID: PAT_MRT3847_110864C.1
atatgaaaagataagatgcgtagcacaaaccaaaccagcctcatattcttgattctttaggtggcttcagagagtgagctttatggttttggtaattccattttgttcatcaagatacatttctagagttcaacctctatatctttcagcaagtgaatcacacgcactatagatgaattgcaaaataaactccttaagctcaccaattccatgcaaactttacaccaagaaaccaaggcttagaagaacaaacaccatcctattttccttttcctcaagtgaaaaacaacaaaaaaccatttccaccagcacaagcattgaggcttacactgttagcttcaagacagaaaagggttgcaagcttggcatttcaaggtatcctgactttgaatatgatgcggaagggggaataggaactggggttggtgcaaaggacacaaagaatgatccagccaacaatgaccttccagtttcatttgatcttgaaactttgtatattccaccactaacaagttctaccaccaagtttcttggttt

SEQ ID NO: 12024 - DNA, 884 bp, Glycine max
  unsure (1)..(884): unsure at all n locations
  Clone ID: PAT_MRT3847_110865C.1
cacnngtacgtaagctcggaattcggctcgagcccaagcaacagctgctgctgctgctgtcataccctggaccaagcatggacaagctgctgctttggatgtctgtccttcaccagccttctttgcagaagcctttgctcagacagacctcaatcagaaggtatttgtgttccccgtagaatctgaaactgattatgtgaagctgatcccatggctagaaaaaccgctgcagaattttacactgtgtttccgagcctacagtgacctttcccgctctcagagtcttttctcttacagtgtcaacagcagagacaatgagctactaatttataaagacaaagttggacaatatagcctatacattggaaattcaaaagtcacagtccgtggtttagaagaattcccttctccaatacatttctgtaccagctgggagtcctcctctggtattgctgaattttgggtcaatggaaagccttgggtaaaaaagggtttgcagaagggatacactgtgaaatcctcacccagtattgtcctgggacaggagcaggatacgtatggaggagggtttgataagacacagtcctttgtgggagagattgcagatttgtacatgtgggacagtgtgctgaccccagagaacattcattctgtggacagaggtttcccacccaatcctaatattttggattggcgggccctgaattatgaaataaatggttatgtagtcatcaagccccgtatgtggggcaacaaaagctcatgaaaatgagatgatcagtgtgtacgaggtcaaggtggcagaactcactctatctggagttttttcttctttatgaatgtcctgtctacatatctgcccaataaaaatcctatcaaatttt

SEQ ID NO: 12025 - DNA, 1130 bp, Glycine max
  Clone ID: PAT_MRT3847_110866C.1
ccacgcgtccgctacaccgttcatcgtaaaacaaaaaacctcacattaaattaatacaaaattatcacgaatgtaactttaagtaattattataaaagttagtaaatttattatatataataaattataattgaataataatataaaattgttttagtatataatttattttctcataaaaaaatgtttggcccttataaataaagaattcaatatagatgtatttaaaactgttttaaattgtcattgtataatctattttctaaaaaaatcctactaattaaataaggaaaatgtttattagtataaatttgacatttgtatcagcatatttttaaagggaattgttgtgattgaataacataataaaaatattttatactaatggataatttattttctaagtataatatattatactatttagtatgatataccgataatatatattaataatttatatgaataaaattgttcatgaatatgacacattgtatcttgagtttggatcctctgtggtcatcctctctacagtccctctagacctctacagccgtttcatctctctattatctaacttcaattttttatcctctctctttttctttttgtattttttggctgcaaaggcaacacgcttcaagcagagaatccatacgtttacatcattagtttaaaataattatattaacaatatattactttttttaatccctagacattttataacagtttttaagtactttgtgataattttttttaatattttatgacagttttcaaattcaaatgattaaaaaataaaatttaatttaagacaactaaaaattatcatttattatattagggactaaaaaaatacaatcttcaaaatttagggacaaaaaaatacacaccttaaatttaaaaactaaaacagtaagcgaaatattttttaagtgtttataacctattttgagaatttatgatctgctaacgactcggtccatcaagcctttttctgctcttgaattgcgtaataaagcatttttcttagtgtatttttaaataaactcatgtcaacgataaataaaaaaacacaaaaatgattattcatgttaaagcttttttaactcattttttttatcatc

SEQ ID NO: 12026 - DNA, 340 bp, Glycine max
  Clone ID: PAT_MRT3847_110867C.1
cccacgcgtccgcaagcatgtccttctcaaactagcagtattatatttccattcatactgggtgttttcacattagaggatgaaatcaactcccctgtggctcctgctactctttacaaggccctagttacagatgccgacaacgtcatcccaaaggctcttgattccttcaagagcgtccaaaacgttgagggaaatggtggcccaggaaccatcaagaagatcactttccttgaggatggagaaaccaattttgccctgcacaaaatacaaagcattgttgacgcgaacttgggatacagctacagtgtggcccaaccgcgcctatttccaaacaccc

SEQ ID NO: 12027 - DNA, 281 bp, Glycine max
  unsure (1)..(281): unsure at all n locations
  Clone ID: PAT_MRT3847_110868C.1
ctcaacggtcatatttcattagagagagagagagagagagatgctgattttttgggtgcatctgcagnggttttatttgtataataaaacgaaaacgaggattgtgaaggaaatggtttctttgcttgctacctcttgacatccctcagcccccgctacaaaggcccacttatatcgggttcctctctcatctcaactctcttaatttcacctctcaaagaacccattttggaggcccccctttacctcaatccaaaaacaccccccccccttttggattt

SEQ ID NO: 12028 - DNA, 424 bp, Glycine max
  Clone ID: PAT_MRT3847_110869C.1
actcacgattttcaaatccacccgcacgctaggggattgccctctcttcatggtccacaatgaacacaagaatcacactctcttttccatattacaccctttatgtggcactttaacagcccctgcaaagaaacgctctgcgcagctaatagatatactaagccaacttaacactgaaattattattcttacattatctaaaacacccatagttgccgttgttgttgaaagaactaccagccatagacaactttgttggacctgacctcgaaccacttgtaactctcctgtgagagcctttgaattgtgcttcaacagcagagaccccgtctctagagacccttttttttctatggaacactgggtcactaaagctccaacttcttgatgaggacccactcgatggctgtcccttctgaaactt

SEQ ID NO: 12029 - DNA, 283 bp, Glycine max
  unsure (1)..(283): unsure at all n locations
  Clone ID: PAT_MRT3847_11086C.1
ggaaaggattttgtgaaggtggtnagaattgatatgatggggttggtccatgtnntgagtgtnggtggtgnctcctttggtttacgaccctgtgcnttgttttttgttctctctttntgnnnntactttgggggatagccgcgggttttttttccttatctcttcanattttgggggggtggaggtgcccgttgagagagccccacacccccgtggttggttggggggtggttctttggcctgggtgcctgggtgcccctggggttgggggggggtggggggg

SEQ ID NO: 12030 - DNA, 273 bp, Glycine max
  Clone ID: PAT_MRT3847_110870C.1
gatcttttgcttctgtctctctccaccataaccaatacatcaaagacacccttcaataacttctttctcttctctattggatttcaatctctccctgtcactctgatttttttgtcgttttcaattttcatggagggtcatcatctggatcacgggctccagcagttacaacaacatcagcacactcatcacaacatcacaactactaacgtagagtggcacttataggttcccccaatggactcatccaagataccatatacttcctcgtga

SEQ ID NO: 12031 - DNA, 198 bp, Glycine max
  Clone ID: PAT_MRT3847_110871C.1
agacttgttgatccttctctttagggggggaactcaaacatgggagaggaggtggttctgctagattactggtcaagtccatttgggaagagggtcaggattgcacttgctgaaaaggatatcaaatatgagtacaaagaagaggacttgaggaacaatagtcctattttaatccaaataaacccaggtcacaagaag

SEQ ID NO: 12032 - DNA, 433 bp, Glycine max
  Clone ID: PAT_MRT3847_110872C.1
atcggattgctgaagaccacattagggcaccgctggcagagaggacagaagggtacgactagatagaccacgacagatctcgtataccgcctcgagtcccagatctatggtgactgtgagagagctatgtaccggtagatgtcgctttctagggatcgagattctgacgcggtgaatgcagcaattaagaatggcatcatggactcccatgtgaatgcactgtgacgcttgtgtcctatcagctgatgagctattgctgggaggcccaacttccaccgcctgtacaagagttccttgttggaagatgtggcaattaacaccaacggcaatcttctccagcttttggatagattggcgacctgatataggtatgaggctgatgccatcaatgtaaaattttcacagactgaagctaatgttcttcatgaatctg

SEQ ID NO: 12033 - DNA, 286 bp, Glycine max
  unsure (1)..(286): unsure at all n locations
  Clone ID: PAT_MRT3847_110873C.1
cagacatgtctctccgtctcttgaagccattggacggaaaatcagaaacggcttgtcgcataccgtaattttgacaaacaagaaaaatccaaaactccgattaacggcgccaccacatttaccgttttgccagtatcagtgtgagacaccactctagggttcgttaaatcgtatccaatttaaaanatctccttcgaattttgcactattttcattttcgcaccagaaattttcgatccatttcgacatngttgttgtnctcttcaccctangnaattcttcggnc

SEQ ID NO: 12034 - DNA, 469 bp, Glycine max
  Clone ID: PAT_MRT3847_110874C.1
agcgcatctggtttggtcccatatgatggccagattcatctcgtagaagaccaagacctagctactccgtcattccgaatcggctaagggcgtgatagtgggtggagatcgacggagtgaggctgttggaggatcacgtccaccgtcttatggtgaagaaggccacacccgattggcttcccttcctccccggttcctccttctgggtcccacctcctccttcccctctccttcacacattctccatcccctctcatcccttcttccttcaacaagacgacgaatctgggaatgctattgccaccccacgagggacagaggttactgtgcaactcaaggaattgtctttggattcgacttaaagcacatgccttgctgagctcaaactatgtataattttcagggttgcaaccttaactcaatgagagggaactaaactattttgagatcaagaagcttgcttgcataa

SEQ ID NO: 12035 - DNA, 261 bp, Glycine max
  Clone ID: PAT_MRT3847_110875C.1
gacaaatcatatgatgattaatggcgaagtttatggcgaaggcagatgagacgagaaatggggaatctgctgcattacgaatgacagtaaatcagcactacaaggacatacaccttggtctatagagagacattcagagctaaatataggaagcacacatgagcttgaatactttcaaggacacaatagaacaagcctagctcaatctcagtacagcactcacatactcaacacttctaaatcgatcacgttcaatgcacg

SEQ ID NO: 12036 - DNA, 354 bp, Glycine max
  Clone ID: PAT_MRT3847_110876C.1
ctcgctttttttttttccagtccacgaagtgcaccaaaattaaagaaattcttgcgtgcctgagagcatatgttcaaaacgaaatatgacaggacctggtttctgacactcttaatatatggttgatatattatgcatatcctactcctttatccagcgacattgattctagctattatttacacaccccctgattcatcaaacacttaactggattgtttacctgaatgttaaagaacactacccagttaatagtccgaacctttgcactaggcgaccaattctgttcttgcctcaaaactttttcagagaaactagcccacgttgcctagattcagattcaagccttgcctc

SEQ ID NO: 12037 - DNA, 697 bp, Glycine max
  Clone ID: PAT_MRT3847_110877C.1
aaaccaggttcaaaggcgacttctagatgagtccatcgccgacgaaccttctgcagcagtttcaaagccgtggattgaactttattgtggtgcagtctcttcccacgtttcagttcaagaaaaacgagagagaacaagacaagacaattagtgtggagtgtgccatctgcctcggagagtttgaagaaggggagtggctgaaacgtcttccacactgcagccatagtttccatgtttcatgcattggtacgtggtttcagtcgcattcaaattgtcctctttgtagatcttttgtgcatcatcacatcctacagtgttctatagcttctcacacattgctacagcctttgaggagggaggactttgaaagggttcagagataaaagtagctaccctttttgttgtttgcttttagttttgatattttcgtgaggtgaagccttgttggaaaatagaatttggatgcaaagctaacagctaaagaaacctcattttaggtgggttataagagtgtctaagcgtacataacgaagcttctattgtgttttgtgagtattgtcaatcataaggcgtaggatgattatacaagatgtttcggagttcaatctcaaatttgtagatccacgaatcatgatcaacataactgttgaaatcaagatttagcatactttatagttacaacataaaaaggacgacc

SEQ ID NO: 12038 - DNA, 454 bp, Glycine max
  Clone ID: PAT_MRT3847_110878C.1
gaagagcggactaaaaaaactgatgcctttctttcacttgttcttgacacttaacatacattgttttgcggaggagattacaatagagtgcatcggctgatgtcacaacctatagtgatgtgccctgtagagacaacttgctcaaatgcttttttcatcaatggggggcaacaaacgatagttggaatattgaaaatgatagtgctttcactactgattcacctcttatatgaatatagccgaagaccattgatactgattaccatatacacgactatattaacctttgttttacttgtgtggcgtcaatctgaggaatatgtctatgcctactatgtgcttcacacagtttcaaatataatcactcaacgcagtataatatcgatatgtgttgcatatgcaacagatgttgtcaatgaaagcaaagaggcaccagttatttggttggattact

SEQ ID NO: 12039 - DNA, 957 bp, Glycine max
  Clone ID: PAT_MRT3847_110879C.1
tttctcacccttttctcatactcaccaactccaaaaagaaaaaaaggaaaaaaaaaatacaactcccatttcattcgttactttggcttcctctgtgctactttccttctctcccactatctctccctgcaggggtcttaagacacccatgtttcgttcttgctaggttacacctcaaaagttaaactttcctaggaataaaaaagaaaaagaaaaaaaagaagacgacaaaaacatggttcgagctggggaacaagagcaggaaggttacaaggccaaactgtttaatttcagagggatatttgagggcactggtaggcttactaagagccttagcgttgacactgctaccgtattggaacctacagaagatggagcagcgtcatcaagaagtcaaggatcaaagcctcttaatgatttagataagatgattcccaaagcaagggtaataagcaaggaggaaatttcagtgaaggaagccaaagagaagctattgcaagatatggaacagatgaaggagagattttccaaactgttgttgggtgaggacatgtccggtggaggaaagggtgtttcgtctgctttggcactgtcaaatgctttcacaaaccttgctgcttctatttttggtgaacaaaagcgcctagaaccgatgccggcagaaaggaaagcaaaatggagaaaagaaattgattggcttctatcagtcacggattacgttgttgaaatggttccttcacaacaaaagtctaaggatggttcaaatatggagattatgacgacacgacaacgaacggacctccacatgaatgtccctgccttgcgcaagcttgatgcaatgcttcttgaatgtctagataatttcaaagatcaaaatgagttctattatgtgtcaaaaggttcagatgattcagatcaagacagtgcaaagacaaaaaatgatgataagtggtggtt

SEQ ID NO: 12040 - DNA, 291 bp, Glycine max
  Clone ID: PAT_MRT3847_11087C.1
tgggtcggcgaaagtaatgcgtctagtcactcgctttccagttaggttcggtcttaccctatttcacttgaaccttaattacgacagttgacaatctggttggtgaccttggcttaggagtaagtttatgttgaataacatcaattctctgcttgatcctttgctgatgcaatgctatactcgtgctggtaaaggagttgtcatattctgtcagaccaaatggtggaaagctgcaccgacaggatgaaaaatgattatttaacaagatctaaagcgtaagaagacttgtgc

SEQ ID NO: 12041 - DNA, 327 bp, Glycine max
  Clone ID: PAT_MRT3847_110880C.1
cccacgcgtacgtcctgacactgctacatactgagagacattgcacgcggcatcacaggggggatgtggtggtaaataaggagcactggcggatcctgggtggcgcaactgcttcaacgaccacataagaggagttagacgacaattccctgttcaaaaaacaaggtgtcagacaaaacgacaccgatacggctgctcacctcctatacctatccgtagagggtcaaatcagggactcccacaccctgcgtttcgctcttgagaacttgactgagaaaattgatgaaccagttgtagatgcggatacacgctcttcatttaacatgt

SEQ ID NO: 12042 - DNA, 381 bp, Glycine max
  Clone ID: PAT_MRT3847_110881C.1
cacatggatgctgccaagaagatagattgcggtggcaagtgcaattccaggtgcagtaaggctaggaggcaaaaaatgtgcattagggcatgcaatagttgctgcaagaagtgcaggtgcgtgccacccggcacttctgggaaccgagaattgtgcccttgctatgctagactcaccacacatggaggaaagctcaagtgcccatgaaatgatgactcgatcagagacgtctagctaagactagcaccatatgcatgcatgcagttaaataaatgcaattaataatattttgtctgaacgtaactacgtggtaatatggtcgtcgatcgaggaatgaggcaccgagggaagaacatagatagcaccaaattaacgagctcc

SEQ ID NO: 12043 - DNA, 358 bp, Glycine max
  Clone ID: PAT_MRT3847_110882C.1
aataccaccaggaacactagaataaactattcaacacagttccatcgcctttatccccacgaccaataggcctcccagcttaatgtcttttatccacgtagcgaacgttcgagtcaccgcacccgcgcgtggatctctgtcttgttccctagccatgagggacctaatcatctcagaaaaagacgctctgatgcaagtccttgggattcttaacataaactgtgccttcgaccgaaagccattacctatgagtcttcctaacgaaccccctatagagcatgtacatggactctagcctgatgatcctagaggtctctatgactcctttcttcgcattggtgtacgacgagcccgtgcc

SEQ ID NO: 12044 - DNA, 368 bp, Glycine max
  Clone ID: PAT_MRT3847_110883C.1
aatctaaattcatatttattgtgcatagaaaagtttttttcgatacatttatttgttttttttttcaatctatctaaaagagaaattcccaacttcttatcagggggggggggaaaggaaacctcccgcccttttgttcgactccagggaaacaacctacgccaatagggcggggtggttattacccccgccagaaaaataaaagcccctaaagaccaggccctctggcgggaaaaaagcttactacttccaaggcggggggtgggggataactaagaccagcaccccgcactatatgttaaaggtgcagctcccacattctaccttttttaggctaaaccctggacggggagggaaccactgttttt

SEQ ID NO: 12045 - DNA, 1016 bp, Glycine max
  unsure (1)..(1016): unsure at all n locations
  Clone ID: PAT_MRT3847_110884C.1
tcgcgcccaacccttcatcaattgcttctttctcactcactgaaacccaatccctactttgctgcatttgcattcccagattcatttttctgacaacacaatcttaattttcccacatttcgctaactcaattaccctttcattcctttcattcctctttccagattctatttaagttggaatagagaattagagctgggtggatggaggatgacaagaggaagaggaagaacaagaagaagaagaacaagcagaacaagaatgtggaaaatggggttggagaaactgccaatagggatcagaatctggtgagtaatggaaaggatgagcatactaatctttccgagactgcaaatgagcaaagctcgaatgttgattcgaatggggttggagagacatcaagtagggatcacaatctggtaaataatggtaaggatgaacctgctcttctttcaggagtcacccatgagcaaagtatgaacgcagatcggaacggggttgttgaaacccccaatagcgatcaaaatctggtgaaaagtggaaaggataagaatattccaccattggagtttgcagatgggcaaagcactaatatggattcaaatggtcatctgccaaatggtaaagaatgtgccatatcagaagagacaatcaggaaattaaaagaagaaaatgatatacatattcagaaagagactttatcaaaggagacaatcaggaaattaaaggcagaaaatgatatgcacattcaaaaggaggccataatggaagagacaatcagaaaattaacagaacaaaatgacttgcatatgcagaaagagattgcatcagaagagactatcagaaaattaaaangaaaacacatgatatggagtgttcaagaaagagggcctatatctagagagatagcaagttagagaattctgagaagataaaaacatgatcgcgcacggtgcagaaaagaggacgactaataaaataaattgaaaaaaaagagaaagaaaagcggcgctcac

SEQ ID NO: 12046 - DNA, 360 bp, Glycine max
  Clone ID: PAT_MRT3847_110885C.1
atttcacggcctgaagatggccactattataaactgtcaaccgggtatcccctcaaacctaacagacattatgtctttttcagttagtgcgtgtaccttcactgattctatcatgatggtatcagagacgaacagtgtttgtggtgaccatggaatagatttgagggataccacacgactgatgctgggactgtgtgcatgggtggccctatgatcaaatgacggtggttgagttaatgtgaaaggctggatcgcggtgattcactggtctgactaataccgtttgaggtgagccacctaacaagtctagaaatgcctcgttacggctcaaggcaagatagactccgatgtaaccccaac

SEQ ID NO: 12047 - DNA, 502 bp, Glycine max
  Clone ID: PAT_MRT3847_110886C.1
gggctcgagctgaaaccatgcctgtcacaaacacaacaacacctacagtggcagaacacatcaaatggagaaggcccagaaaccaattcaaccaccaccatcatcaccatcaccaccccatttcagaaacagatccaaaccctcaaatcccttccataatccaatccactaggtgcaagtccaccatttcctccctgctcctctccactttctccaacaacacctccaataatgccactgcccacagcaagaaaaaaagcaacttttctgcatcaaccttcagagggttgggctgcactgctggctcgtcgcagcaggtgtcggtgccggcggtgattcgctcctccgccgattggcaagggaagaaaacaagaaaaaagaagcacaagagaagcaacagaagcagcaagaacaagactttccatggtggggttctggaaggttccaatccagggtgtgtggattctcaagatgtttggtgtggccctggaattgtgttctc

SEQ ID NO: 12048 - DNA, 1349 bp, Glycine max
  unsure (1)..(1349): unsure at all n locations
  Clone ID: PAT_MRT3847_110887C.1
tccagtcgttgatatgatcctgcaggaccccaacaagtggtgaggaaggcacatcaccaaagacatggattgaaacagtagatatagccatagacagtggcctcaaactaggttttacacaacggagagaaacataatttacaggagcctgagtgacaaaaatcagtagttcacccatagagatgatgacacgcttgctgaagatcaagccttgctcaaaggatccaagtcaacatccaaattgtggaatcagttcaccatcttctccaaagatatgaaggagctcttgcatgaccaagtgtatgttataaatgttctagggtacatagcatacaattttgtcattggagcttactcatactggggcccaaaggcaggatacagcatttaccatatgaataatgctgacttgttatttggaggcattacaattgtttgtggtattgttgggacattagctggaggcttgtttcttgacaggatatcttcaaccatctctaatgctttcaagcttctttctggagcaacatttcttggtgcaatcttctgcttgatcgctttccttttcaagagcttgtctggtttcatagtcttcttctctatgggtgaactactgatttttgtcactcaggctcctgtaaattatgtttctctccgttgtgtaaaacctagtttgaggccactgtctatggctatatctactgtttcaatccatgtctttggtgatgtgccttcctcaccacttgttggggtcctgcaggatcatatcaacgactggaggaaaacagcactttgtttaacatccattttctttcttgctgctgtaatatggttcataggaatctttttgaaaagtgatgtatatgacaaagatgatgaggagcaatctgccacaactagaggaggaaaactgacgccattgcttgacggcagcagtgacactacatccagtcaagtttaattcttttcaaattttagtactataactatgcttcaagtgtatattaacttctagtgtgaagagggtaaaagtcggtagcatactagcatctttactactactaccagtcatgtggaaaatggtggacggtggtttgatactatgttggatatgtatatcatatatgcacatgtggggctgatcacaagtggtatgacaatcctcctgaaaaaaaaaattgaaaaatgatattggattttacgatatgtttggaagagtctgctgattcttccaccgctcaatttgttgttatatgtaaatttgtaattatcaaaaaaaaaaaaaaaaaaaaaaaaaaaaaaananaaaanagggggaggaacgatagaaaactgaaccggacgcgtgg

SEQ ID NO: 12049 - DNA, 1308 bp, Glycine max
  Clone ID: PAT_MRT3847_110888C.1
atatttccaaccgcaccatcatttttttcatctatatatataatatctattcacaacatattgcaagtttcaggtagcaaaccccttcaacatttttcaccctcagaattcatatcatgagttttcatgatacatcaaacacagggcttggacttggtcttggtcttggtcttgttagcttccatgatcaatcagggaattgcatgaagagtacaaataatgatcccatgagagaaagccataagatcaaaaaagtggagaatccatcatcaaaatgtaacaacacatacccttcacttacattaggaccaccagatgatgatgatggtgatgatgatgatgaagtgaataataataatcaaccaagttcaaagactgagtcctatgaatattttcgtccccaagtttcttctcctaagtgcggtgtcttcattttccaactcttctagcatcaagagggaaagagatcaggtcttgggaggagaagaatttgaggtagtggtagaagaaagttccaacaagggttgttggtgatgttgatgaggatggtaaccccagaaagaaacttagactcacaaaagaacaagcagcagtcttggaggaaaatttcagagagcattctactctcaatccgaagcaaaagcaagaattggcaatgaaactgaatctgcgagcaagacaagtagaggtgtggtttcagaataggagagccaggacaaaactaaagcaaaccgagtcagattgtgaactactcaagaagtgctgtgatactctaacagtagaaaataagaagctgcaaaaggagctgcaagaactaaagtcaatgcaagcaacgccagtgcctctttatatgcagattccagcagccacactttccatatgcccttcttgtgagagaatctgcggtggcaacgaaaacaacggtgacaacaacaacaatggctcttcacacacgacaacgttgctcattggctcaaagacgcatcatcattccttttacaaaagtaacaactatccattccctcattcatcatccgcggcatgctagatatatatacatatatatatagttccgagctaatatatatatgtaattaaagataggtgattagtgattattactattagagatcaatcccccatgcaccacatgctttcttatatatatgtatacttcataaatggaaagatcaattcatagagatttttctaatttgttgtaatttattttatatgtaatatatttatggtctatgcgtacattacatatgaataacaatgcagggttatcacatagttcaatcaaaa

SEQ ID NO: 12050 - DNA, 465 bp, Glycine max
  Clone ID: PAT_MRT3847_110889C.1
cagctatgagcgcgcatgcccacctcggaatgctgctcaagctctagccgaatcgactcgagctgcgtctcacacaattgaaacacccaccctacacgccccagcgacataattaggctgatcgattactatccttggcgataccatcaccggatcctgcctagtggcctgcgctgctgccattggtctccaactgcagagatgagaggatgccactacagcaggatctacactgtacataaacctggaacaggatgcctgagatgagcccacaatcgactgggataagaccggctatgtcaatgatagcaggctactcacatactacatcgcattgggacgctatcagactctctaggacgacatccaatgttgcaaggatcatgtatgctacacttggtgatcacatcatgatgctgctgactgcaaatgactatatgctagcttctgataagataatagatg

SEQ ID NO: 12051 - DNA, 232 bp, Glycine max
  Clone ID: PAT_MRT3847_11088C.1
atccttttctcttattttatgcgctgtacctttactattctatcatctcagcatttttcccccttaacactccaaaatccaatcccttttcattcatttctgctaaaacattaccccaaaaaagaaacattccccatttcctttcatttcacttcacacctttgaattagggatcatcacccactcttttcgccaccattgttgaaacctcacaacattctccatagtttca

SEQ ID NO: 12052 - DNA, 232 bp, Glycine max
  unsure (1)..(232): unsure at all n locations
  Clone ID: PAT_MRT3847_110890C.1
agtctccannccgcggtgnngcggccgcttctatgagacatagtggggatcccccnngggctgcaggggagattcnnggcacgagggggcagcgacagtgaatatctgttccacgttgaaaacgctgactgagaagactttactactaataagttcgcctttgcctaagaagcataagaagacgaaaggggcatgccatgaacgtttactagctctnnagaaacctttcgga

SEQ ID NO: 12053 - DNA, 796 bp, Glycine max
  unsure (1)..(796): unsure at all n locations
  Clone ID: PAT_MRT3847_110891C.1
gcacgcacgcgttcgcgaagagtgagagcgaccgcttccctttcctctctcttcttctccgctacacacacactctctctctctctgtttatttgagacaagtatgatatcagttccccaaaccctccatctttaattttatattgttgtgaaacccgcactttctttttagagaaggtgattgcagaaaaacacttaccgcggagagcaacaaaagaaagaaaaggagagaaagagacgataggcgacaacgtatagagagagaaagtgagtgagtgtgtgtgagatatagagagagagagagaagaaactgtagaagctatcaaaaccaccgaggggaaaacgatgtctgagagctttacatcctttcataccctgcaactctaagagtgtttgttgatgttggatatgcttgttctccttattataactgatcgataattcaactattggacagtggtaataattagaataagctagctgaggaggctagggccgggattagtggttgttgctacttcttgctgggaaaggaaaaagagatgaagatgatggttttaatatgggaagaacagcaacaccgtcacattcaacaataatactagtgctacacaccattggttntctcttggatcttgtattaattcctgcaattctatgtcccaagattttcaacaaggaatcttcagcttcccgaatgggttggagagaggaagggtgatgagtccgcagcagcagatccggcgggacaaggtaaggttcgaggcggcgccattggtagggatagaggaggagg

SEQ ID NO: 12054 - DNA, 150 bp, Glycine max
  Clone ID: PAT_MRT3847_110892C.1
caagttgatagtaggacttgataaaagtgtgcctactttggttggcattgggatgtcccaaggatgagaaaacttcctcggcgcataatttatgacaaaccgtagacgcgctgttttcatatttttcctatggcggtgaatcctgtggcc

SEQ ID NO: 12055 - DNA, 466 bp, Glycine max
  Clone ID: PAT_MRT3847_110894C.1
ggagaattgaggttggagttggagtgagtaacccagcacagcaatggcattgagactgagactcaaagtgtcttcaattgggtcaccttttctgcagttaggttcttctgcaagtgcagcatgctctgtttccaaacttggttttcatccaccacgcttgcaactcaacaaaaattcacacccaataaggctttttgttcgggctgctagaattgagtccaaaggtgttaccttgggtttcaggaccccacaatttcagcttccggagccccttaccgggacgacctggacattggatgattttgaagcttatccagctctactggttatgtttatatgcaatcactgtccatttgttaagcacctgaaaaaagacattgtaaagcttacaaagttctatatggagaaaggacttgccgtcattgccatatcttcaaattccgtagccacacacccccaggatggt

SEQ ID NO: 12056 - DNA, 295 bp, Glycine max
  Clone ID: PAT_MRT3847_110895C.1
gataacggtacaccctgagaagaacgaggggaatgtttttttttttaaaaagaggcactgggggagatactccgcgaagatcataaatcccggcaataagaaccgcgcctggatcggaaccgtctacactttataagacgcaaagtgtgactacgacgacacagacctagagtttctcggacctaaagacaagacaaacttacctctcccttacgaaaatgttaacaactcgaaccccagacagagaacaaacaaccagacctccagccgccactgcgacataaacaccgataac

SEQ ID NO: 12057 - DNA, 425 bp, Glycine max
  Clone ID: PAT_MRT3847_110896C.1
aaaagattttatttgactagatgttgaattttacgacggagaattttttttaagtcaaaagttaagtaattattttgctcagctagaagaaagatcttacgagagaatagaaaaattaaacacttatgttaatgatttgtataaaactttagactttgattttttattttttaatgaaagtttagatataaaacaagatgatgaattagattatcttgaaaacttaaaaaatgaaaaagattttggtgatattggacgcatttacgaaaatgaatttcccgaaattaaaattcaatatggtgaagaaaaaattatgcctggagattgtaatgaaaattttttagatgataatctagatgaagaatatgataaaattttttcagaatggtgacgatgatgaccatgatactatttttcaatttttt

SEQ ID NO: 12058 - DNA, 497 bp, Glycine max
  Clone ID: PAT_MRT3847_110897C.1
agagaatgggatctgttatacgcatccagaaaagcttccaggtgtttgatattttattcttgccttcagaaatttttattattattaatttcatcatgttttttggtgattttggaaacgggttttaaattattattatgacaataatagtaaaatacttatcatttatttgctctctcttctatcccacttccatcctattttcttcttatctcttacttccttttccgttgacgtcacatattgcatctatcattttctctctttattttttttcttttcttcttatcacacacctctttctacagtcaatccactccattttgaaatagacaaatataattgctcataataattttatgacaagtcttgatatattatgaaaaattacaaactagtatgactcaggaactacttgtgaacacaattgtagttgcaaatggtttagtaaagccttggaatggaaatcccgtttgattcataggttaaattccaaa

SEQ ID NO: 12059 - DNA, 826 bp, Glycine max
  Clone ID: PAT_MRT3847_110898C.1
attctggggtagtccttttgtcctcagggtcatttgggttcttgaactaaaaggggggcgggaccaatatgtggaggaggtcggcaacaagagtgccatgctcctacagtataaccctgtccacaagaagctaccggctctcgtgcatgacggtaagcccctggcagaatcactagtgattcttgagtatattgatgagacctggaagcaagatccctcccttcttccacatgatccctatgaaaaggccaatgcgattctggtccgaattcgttgatgaaaagctgttatggctaccttttccaaaggaggggaggaacaaaagaaggcagcacaagaagctagagagaatctgatattgctattggttggcttggatactgggtacgaatagtggaggaaattgtgggcgtaaacctcattaatgaagagttgatggctaagcttgatgcttggttcgataattttcttgagcttcctgttatcaacgaatgcatgtcgcctcgtgacaaactgcttaaccacaacaaggccttccacaagctcttgacatcttcatccacttgaaaggctttgcctcacccatatcatgcaatatgtgatgcttagttaatgcttgatatgtgtgtatgatacaacaataaaagtattgccataaatagacacgtacctgagctcatggccaacgacctatcatgaactgcaaggaaattatcgtttcttgtaatattgaagggaagaaattactcgcctgtaatagtagtttgaaagacattgccgttgaccattgtaatatatttacacgaccattatatgatgctaaaaa

SEQ ID NO: 12060 - DNA, 1658 bp, Glycine max
  Clone ID: PAT_MRT3847_110899C.1
attcgagcctcgtgcattcttccgctcgatgatccgacttttgcatcccatgggtactcagtaccaatctgccgcatagtgctggcttttcttttccctcaaatcaacagaagatccttcaacgcgtacaagtataagcaacttctgattgattggttaatgataaatcactaaaaaatacctataaagacatgacgagaatgagagaactgcaagtgtttggtttttaattcgcaagttaaaaagaagaaaaatggcaagagaatcatcattgacgttaataggattctggggtagtccttttgttctcaggatcaagtgggctcttgaactaaaagggattcagtaccaatatgtggaagaagatctcagcaacaagagtgctatgctcctacagtataacccagtctacaagaaggtaccggttcttgtgcatgatggtaagcccctcgcagaatcactggtgattcttgagtatattgatgagacctggaagcaagatccctcccttccacatgatccctatgaaaaggccaaggcacgattctggtccaaattcgtttgatgaaaaggtagtaagaaattagaagttaaaactcagcatcagcatgctatcatgtgctttttttttccttggtaactaacagtctaacactcaacctttcttattctccgtgtgtgccagctgttatggccaccttttccaaaggaggggaggaacaacagaaggcagcacaagaagctagagagaatctgaagacccttgaaggaggattagaggggaagcgctactttggaggtgaaaaaataggcttcgctgatattgctattgcctggcttggatactggatacgaatagtggaggaaattgtgggtataaacctcattgataaagagttgatggctaagcttgatgcttggttcgatgattttcttgagcttcctgttatcaaagaatgcatgccaccttgtgataaattgcttaaacacaacaaggccttccacaagctcttgacatcttcatccacttgaaaggctttgccccatccatatcatgaaatatgtgatgcttagttaatgtttgatatgcttgtatgatatatcaataaaagtattgccataaatagacacgtacctgagctcatggccaacctatcatgctgtaatgtaaatgctgaaaactacaaggaaattatcgtttcttgtaatattgaagggaagacatttactcgcctgtaagagtagtttgaaagattgccattgaccatcttaatatattcacacgaccatgttaaaaaaaactctctttatgtttaaatcaatgaaacatgttgaaatgatatttaccaatatgctggaactgattgatgaatggatgaaacttctgggtttgaccacaaagcttttctgtgtcagttccctcgaaatcgcccagcaccggttctgtggtcctcctctcggcttcacctccaaacacttcagcttgaacacatccagtgaaagctttaagaatggaaagtgtctcgttatccatctcaattttatcttcatccatcattttaaggatatggaacggtggtttgttggcagaaaggtgcattctaagcaatattttatacaatgataaactaaaaagaccaaaattacggggatctgta

SEQ ID NO: 12061 - DNA, 272 bp, Glycine max
  unsure (1)..(272): unsure at all n locations
  Clone ID: PAT_MRT3847_11089C.1
cgcaacttcgaggagttcaaggtccccgtcnacgaaatcgcntgggantctcggtcgatnctcgangcttcggcgctgtggcggcccacgnngcgtnncctngagacgtngangangacgcancntacgatagctagtgaacgcgaatnacgacattttggagnggttcgaccgtgtcgncggacganttccgnnaagttgtgcangatnagcagctcggcgttcnggngntgcattccatngnaggaagacgggnttcattggtttctggg

SEQ ID NO: 12062 - DNA, 294 bp, Glycine max
  Clone ID: PAT_MRT3847_1108C.1
aaggacagatacgacatgacgaatgggttgtcatttgcaatgcgccggttctgtccgagactggggagaattacaacacggtggtgtgtctagccttcaagattatattcttgtcatgacgaacactggacacacatgccgtaacacaagcaaacttacagaatgctggataccacacatgggaaaaattaattctcaaagatccacacgatccttccactccaaatgcacattcatacacagcatccatgagacgaaaactgattacgcatggatacagcattcatgagatca

SEQ ID NO: 12063 - DNA, 603 bp, Glycine max
  Clone ID: PAT_MRT3847_110900C.1
agacagctacctccaccacgcacttacctctcctcactcagccaccaaccagcagccagtcaccacgacggcgccatcacgactcctccatttgcgtgagcagtcacgcagactcctctctctcgcacgtgcactcctcctctccttgtgctgcaccacgcgccgccacgactcctcaacacggctcgcacaacaacagtctccctcacactccctattaatcctttgtcaaacaaacggcactcaaattgtcgcaaaagatccagccatgctcttgaggaaaaccaagatgaaaaaattaagcctttcaaacaaatcctttcctttggtgcttcaaacaagttcagtcaaagccatatacttagcttgtgtacataatgaaattgaaggaccaagacagtagctttccaagtcactaatgaattaccaagagtgaaagcgtaacctgtggtaactgatcttgtagcatccaaactagccgcatatatatacttttaaataaataacacgataacaccatgtataagctccatatataagcccaacatttgattattgtgcatgactcatcttctataagcagccaaggtgatattgtaattt

SEQ ID NO: 12064 - DNA, 408 bp, Glycine max
  Clone ID: PAT_MRT3847_110901C.1
ggctgatctagcagcgtatcaatgagaaaatgtagatagggaagaacaaccatttttcaatgaccaagatctgttgaaggctgtggttgatttagctacatcaaccgaccttgatctccaggaaaaggtgattgttgatacagcacctgatactatcgttaaagcattgtcaaatgatctgttttgtttgtgactaaccttatctgtgcaatgccaatgtcataaaaacacattttgaactatgcctctttcatatgcaagactccaagccatgttccattatggtatgtctacatctgaaattgatccaatgaggttgttcaatgttatctgctttccaatctatgatctctcaatttgcccacaatgttgtgtttctggtgatgttaagcatccttctggaaatca

SEQ ID NO: 12065 - DNA, 243 bp, Glycine max
  Clone ID: PAT_MRT3847_110902C.1
cactcactcagttgcgaacggtggagttgatttgaactgcgacgaacattcaatcaaaaccataaccttctctaattaacttaatcactttttgttttctttcgttgctttttgactgcgttttgctacttgaagcgaaagcaaaaactagctctcttaggtcgatagtatttttttccttcaatatattttgctttttatatatacaatactctttcatgttcagcttatagccaagagtgt

SEQ ID NO: 12066 - DNA, 1136 bp, Glycine max
  Clone ID: PAT_MRT3847_110903C.1
agatacccaatttccagagactaacgataagttgagtttattggtataagttaaaacccttttgcaagttcgttgcagtttagccgctaactgtggccaaagactacggagaagttgagttgtttggtgtggggggaagcccttttgccagaagggtgcagattgccctggaactgaagggagtccaatacacttactttgaagaagatcttaggaacaagagtgatcttcttatcaaatacaaccctattcacaagaaggtacctgtgcttgtccacaatggaagaccattggctgagtcccttgtgatccttgaatacattgatgagacatgggagaaccaccaccccatcttgcctcaacaaccttatgatagagccttggctcgattctggtcaaggttcattgatgacaaatgcatgcctgcaatatcaaaggcagcatttactgcagacaaggaggaacgtgacaagggcactgaggaatcactcgagtctcttcaaattcttgagaatgtactcaaacacaagttctttggaggtgagactactataggcatagtggacatagccgctggcttcatagctttctggctccctgcgattgaagaggctgtggggttgaaattgctgaccaatgagaagtttccaaaactctacaaatggggtgaagactacaccaaccaccctgttgtgaaaaagaatcttccccaaagagatagggttgtggggttcttcaaagctcgatatgcatccatcactgcttccaaatagaccaattgtgggtgtgatagagactcatgattttgggaaattgttgtgtaataaatcttgtaaggagtaggtggtttcttaagggagggtctacatgatggaatttcgagtaaaattgtagtgtttgtgcactttgtgttcaatttggtatttaagtaattatgttctaatatatataaaattctctctgaatatcattgttaaaagaaaaagcatcttcttcatgctttggtataagttatcatgcgaatgttaagattggaagatttatcggggatgtctggtttggttgttttctgttttcattttcattggaaatagaagatggtgatgaaaatgtgtttggctaaaaaaaaaaaaaaa

SEQ ID NO: 12067 - DNA, 409 bp, Glycine max
  Clone ID: PAT_MRT3847_110904C.1
ggaaagggaaagaccaccactttataatataacacccccacacctatcaatacaaagcagcttgttattatgaacgggccctaaaaatatacgccggaatgatcctcgcagcataaaaaaaaaaaacgaacttttaaacagaatccttcccttcagatgggaaatcttttttttcccaaatattccaaacccattgaacaacccatgctatactatttataaagtgaaccgagaagtcagtttaggttgtttgccagaagataacattgaataaacttttcctacactgatatgaaggtggaggtggggatcccgctttaggtcctaatgcatgtgggcaacatcaaaggccaaggtcccgcgaaaactctggtgggaagactagcttccggctgcaggaattgtaccc

SEQ ID NO: 12068 - DNA, 185 bp, Glycine max
  Clone ID: PAT_MRT3847_110905C.1
gccaaaaccaacaagaagaagaagactaagaagaagcaaaagcagaatcccgatgacgccggaggattagaggatcctaagaaccgaaaccctaaggcattcgctttcacttcctccaacaaagccaagcgcttgcaatcacgcgccgtcgagaaagagcagcgccgcctccacgttcccgtcat

SEQ ID NO: 12069 - DNA, 342 bp, Glycine max
  Clone ID: PAT_MRT3847_110906C.1
cagatcaggggaatgcatacgttgattcgtgaccgagacatatcaaagcatgatttcgtgttttattcagatcgacttatacgcctggttgttgagcatggtctaggtcatctgcctttcaccgaaaagcaagtggttactcccacaggtaatcatccgcccttgtcctcagtccttgcaatttttatgttctttataactcctcttgtttggggaacaagatttatgctttgtgaactgcaacatgtctgggaaagaagtgacagatcgacagtgggtcacaaatggaggtttatgttgacagtgctaattaactgaaatgaggtttatattgcaggatct

SEQ ID NO: 12070 - DNA, 379 bp, Glycine max
  Clone ID: PAT_MRT3847_110907C.1
tccttttttttttttttatgaacattggattacattcctcgaatgcatatgtcacgccatgatttcttctctctttatataataatacgcggcaaccttctatacatttctacttgcctgagccaaccttttgttagcttgatgggccttatgagagacaaggtaccatcttcttttagtcactgaaagaatggcggccaccatcatttagaagccaattggccctgttaaccaaccattcatgcccacctacagccctttggcttcatcacctgccattgcatgcgctgacagagcaccaatgggaatgagcctgcttgtccccccttctgactacctgattgctttttgttgcctcatccccatccatctttggcat

SEQ ID NO: 12071 - DNA, 275 bp, Glycine max
  Clone ID: PAT_MRT3847_110908C.1
ggaatttatacaccatttgtatccacaggaaatcagctagcaaatgttttaacaaaaggattaagtggctctacatttcaatctattgttagcaagttgggaatggataacatccactcaacatcttgagggggagtgtcagaatcccactatatattttatttcttgttatagataggatttaaatcccattattaggagatttgattagctgcatattttgtatttatgaccaagaatcattgacccttaattataggaattgacagcgggta

SEQ ID NO: 12072 - DNA, 266 bp, Glycine max
  unsure (1)..(266): unsure at all n locations
  Clone ID: PAT_MRT3847_110909C.1
gcagcaagtaaaatcccagacccaaaaacaacaccttgccgtatccttgttcttcaaaattacttcctctactctctctatccgattcttcaataatcacgcgtttcttatacggtagtattcttcttcgggatcattgatcattcatttgcttagaaagcgtttctgcatcaaccgatttgattcccactgataactccccaattattttccaattacttccactaattattgtgtcanctcttatttatattcttcatttttgg

SEQ ID NO: 12073 - DNA, 122 bp, Glycine max
  unsure (1)..(122): unsure at all n locations
  Clone ID: PAT_MRT3847_11090C.1
angtctgcatagcaacgcgtacgtaaagctacggaattcggactcgagnntcctgtgnnagagagctcaaagcgttaaactgnttgcttgctgtcnntcaatggnggcancaattcatactc

SEQ ID NO: 12074 - DNA, 456 bp, Glycine max
  Clone ID: PAT_MRT3847_110910C.1
tcgtgagaaatgatagaaggggaacccaagctaccgagggacgttccctctccttcaataaacagcccccgcttttacgaacctcctctttatccgcctaccaataagcaatacaaataaacacccctaaccacaattaaaaaccgaaatcagacccgtataaaacgaaattaaactcgaagacggccctctctcttcttcccctaacggtggcctgtggcaagcgcaggtataatactgacgacgaaaattagcgcgtgatgactccgtccgacgggcgtacgatcgctacgtccgacgtttactttccatcaaattaaataatcgtaagttaccgctactagccgcctcgccagacttcagccccagctagactcagcccccaccgccgtgacgcgggccccctactggtgatagcgtgatatttcggcctgccccgcgcagactcaacccgcc

SEQ ID NO: 12075 - DNA, 227 bp, Glycine max
  Clone ID: PAT_MRT3847_110911C.1
ctgctaatgatgaagttgacataactagtgatgtgactggtgtatcagcagaaactggagcccatgatagtgtgagaatgttgcatcgtgaaagtgctttgagttcaagaaatgtaaatgggtctggcttcacatttgctgctgcttcttcgactgaagctcaatcatgtagcccaaaacgtcttcacaataagagaaatcatggtcacgattcttacaactacaca

SEQ ID NO: 12076 - DNA, 353 bp, Glycine max
  Clone ID: PAT_MRT3847_110912C.1
cgcaataatacgtcgtcgtttccatgcacgaaaaatcaaaaaaagaatgtttttgcctttttttttcctaaccgctaatcacgctcaaaatcacccacaccacaatctcagcctcagcaaaatcctctgacgtggcgcatcctcattggtcacacttcacaacacgtaaccacaacaaaaaaaaaccaaaacctttgcattttcttcctgaccaaccacaccatagtccacaccgtaactccacgttaccatccccaccctatcatccaccccctcagaagcgctttccgccaccgctcctcctttttttcttttttttctctcttttccgctttcccctttcgcttgtagtg

SEQ ID NO: 12077 - DNA, 393 bp, Glycine max
  Clone ID: PAT_MRT3847_110913C.1
gaaggggcgcgagctgggtttgatcttgaaaaggattccattctttatatttatctgtcaaaatcaaactctatatctaagcgcacatttatatattacaagaggggtggcccttattataaatctagaggccttacaccatcataggccactcctgattcttttaagattatgttgttggtttggttttagtgcttttactgtttactctctattaggcttgagtcaaatttccctccatttaactatcgtcaaccttactgtctcttcttctccttttgaagccactttaatttttgattatatccatgcctacttttttactctcttatcttcattcgctccatctattttgcaactcttcttctactttttttgaattttttccatcat

SEQ ID NO: 12078 - DNA, 346 bp, Glycine max
  Clone ID: PAT_MRT3847_110914C.1
gaagaaagaaagcgagaaaacaagaagtagtgagaagaagggagagaatggaggaaaaggcaaaagctgagcagaagaagataggtatgaccgagacttggttgaagaagcaccgtcttctttacaatggagccactagacaccctcttattattagcattcgcgatggcaccatcaacactgcttccttcaaaacatggctcgttagtaattcttcaccctttttttttaagttattagtttaacttccttttcatatttagtacaattttgggtagccatgtcaagattcaacaaaaatgtttgcaatttaactgtgactacaattctttcatacttgttatgc

SEQ ID NO: 12079 - DNA, 366 bp, Glycine max
  Clone ID: PAT_MRT3847_110915C.1
ggctcgagctatatcactaatagctggtgagagtacagattatctcgaaccattcagcagctatgaatcacgattagatacttcaactaggacacattgttcatgttcttcagagctgaagcaagctcacattcacataagatcgaagagctgaatgaaacacatattaaaactaggagtataacacggggctgaagctatactatagagccatgatgccatctgccgacttctctgcagccatattcaggaacttgcccagaaaaccctatgatgaatgacactctctctcgtttggtgacagcatacaagatcatgcatcatgatagcaaatctgtacaactttacgaatgccacagaacagga

SEQ ID NO: 12080 - DNA, 813 bp, Glycine max
  Clone ID: PAT_MRT3847_110916C.1
tctcgagccgccggaattccagaatcgacccacgcgtccgaaatctcctcttcaaacttctccaataccagtagaagatgaagaagaagaaaaaaacccctccctcacactctttctagggtttcacttcgcgattgcattctcgccgaggttgccttgatatggattctacaagtcaggcataccaacatcgcccccttaccatcaaattatggcctcctagccagagtactaggctaatgcttgtagagcggatgaccaagaaccttacaactccgtcaattttctctagaaagtatggccttcttagcaaggaagaggctgaggaggatgcgaaacacattgaggatgtagcttttgctactgcaacccaacattttgagaaggagcctgatggtgatgggagttctgctgtgcaaatttatgctaaggaatcaagtaagctcatgttggaggctctgaaaagaggcccaaaagtgaaggaggatggagagttgataactgaaaagtctggttcaactgctgaaactgtttttgacatatctgggggtcgcagagactttattagtggggaggaagctgcagaagttttgaaaccattgacgggaccaaagtattataccaagatatgttttagcaatagaagttttggcttggatgctgcccgtgttgctgaacccattctattatcagttaaaggatcaattgaaagaggtggatctttcagatttcattgctggaagaccagaagcagaggctcttgaagtgatgactatattttcttctgcactggaaaggagtgttttgaggtat

SEQ ID NO: 12081 - DNA, 539 bp, Glycine max
  unsure (1)..(539): unsure at all n locations
  Clone ID: PAT_MRT3847_110917C.1
atnnnnaannntcattttctgattctttttctctaggaaaatgaaaaaggtatataataaaaaagaaaataatgagacttgctttaaagcttcacctaaacattcttttagacttttaatggtaactaaaagcctaacgtgagactcctaacaaattttctgctccaacatataatactcgatcaaatcttcagtttagagaattattaaaagtcctccgtgcaagcaaagtcctccccagaatgtcacacatacagaatacttatatccaactagtggaatttgtgtatccctggcataactccacaacctcttcaaatcatcatagagttcatcttaaacatgggctaataaaattaatttgtcaaaactgttttgtcctgcacaagttgttcaacttcaacatctcctaactccatttcacttccttccctctcatgttcattcttaaacatgatctctatctgctccaatgacttccctttggtctcaggaactagcatgtagacaaagacaatggcaagagaacggacgcgtgg

SEQ ID NO: 12082 - DNA, 419 bp, Glycine max
  Clone ID: PAT_MRT3847_110918C.1
atttgtcacatcaaggttctggctctctaaccccagattctataagatccacaactcaagctagttctcttccaagtcactgggtctctattgaagtgtctgcccaagaagtattcaattgtgtggaaaacatggcaggggcatggactaaaccactttcaaaactcaaaactgatgcaccgggagaagataattcatgagaagtccttgtcaccgatactcccagtgatgcaccacatcagaccgctgacgatggagatgtggaaagagctcatcataaggatgaatgtataacattttctgctgctaaagaattcaactttgataatgcagaaggaggggattctgctgctcctaatttacttgctgactggtgggctaaggagaaatgtgcaagcaaggaaggaggatcctctaat

SEQ ID NO: 12083 - DNA, 414 bp, Glycine max
  unsure (1)..(414): unsure at all n locations
  Clone ID: PAT_MRT3847_110919C.1
agggggcggtggggctcgagacnctgcattactttcttctctttttcttatacacaaagctactatatatgggcctgcttattcaacaactacctgcccccactatctttctgctccatcacataaatgccattttcttatacactctctcatggaaggtgtttcatcatttttattacaaactgctactaaaccaattaaacatatttaactttatatccaaaaccactattacataatcaaaactgatatacttttttatccctacaaaattatttaaccctccatataatagaacactctctcatgcaattattttttctactatccagatttacacacttcaaatatcatccattatttccctacccagacttttcactttgcattcaatactactttaataggcttttt

SEQ ID NO: 12084 - DNA, 603 bp, Glycine max
  unsure (1)..(603): unsure at all n locations
  Clone ID: PAT_MRT3847_11091C.1
ccacgcgtccgggaatgggatgtaaattatatgatttactgtgaaaattgatttttttatcttaaaaaaatatagaaagcttcctgtgccaagtaatcctatctccaaattatgtctgtcttcgcaatttttataataattcaatactcatggaattgttgttggtgtttgtgctcataagaataatcccaagtcttttccttctcattagctcttgattagctatttagcatccttttgtttatgatgtagatctacgctaacctaaaaatgtatattttctaactttcaatagcaaacattagttgcaaatccttcacttgtgttttctcactattggtactggtagataattnggtttgttcacttgtgttgagatagtccatgtttgctcacgtgtgtcgaggtagataatgacctaatcgggtgttgtangaaggttgtgcaaatatgtagttctgagtagattagagttttaaactcccttcagttatgtaaggtgagatttgaagctttttatttcttatttgactanttanagtngcnnattaattatgattttgtcttggcacttttattattataaaccacttgctttatatt

SEQ ID NO: 12085 - DNA, 244 bp, Glycine max
  unsure (1)..(244): unsure at all n locations
  Clone ID: PAT_MRT3847_110920C.1
atctaaccaaacttgaggttcttgatttgtctcagaatccatacttggtgagtgagattcctgaggacattggtgancttggaaatctaaagcaacttctgttgcaaagctcttcttttcaaggtgtaattccagaatctctggtgggccttgncagcttgacccatttggatctctctgngaacanccnacaagntggggtnnaaanggtnnaanaacnatcttctctcaagaacctggtttc

SEQ ID NO: 12086 - DNA, 270 bp, Glycine max
  Clone ID: PAT_MRT3847_110921C.1
gcaaacactattgcctggaaagggctaacacgcaatgacattaggagggaacaagaacaggggattcactgaccaaacattaccagatgagcttgtcaagagaggatcgactgccgaggaaccctgtgccccacaaggtctcatgcttgagatagacgactaccctaatgcatgacgatggacttgaaatattggatgctaataagacatgtgaacatgagcatgtctatgtgtattacccaacaaatgcagcaatataacaggacactg

SEQ ID NO: 12087 - DNA, 415 bp, Glycine max
  Clone ID: PAT_MRT3847_110922C.1
aggaaaaaatacaaagaaaatgacataaaacagaaaggaaatacaggagaataattatttattctgggatagaatgtggcatgccatttattttgcttcttttttaaaataaaaaatattctgtggctcttgtacggtagtgcgcgtcctttctttcttttactttttagacttctggctggaaaagctatagacagagggttggcaagctgtggatgggtttacacgcgtcagcggaagcttgtttcacagcgaatagtgtgggttcaaaagttctgttacgagaactcaaaagttcaaactcctaagtatttattatttaaacacaataaaagttcctaaaaattaatgatattttttttagtagaaatcacgaaaataaagttatactacaatgtactaattaataatattt

SEQ ID NO: 12088 - DNA, 307 bp, Glycine max
  Clone ID: PAT_MRT3847_110923C.1
gtgaggtgtccgatatgcgctagctatactcataaggacacctgaatatccatgaagaagtgtgctggcgcaaggaaaaacatgcaaatgaagatggtgattctaggggcgagcgtgatattcacatatctgcaaaccctggatctaatgcccaccagaacataaaaacatcccatttttgcttatcttacacagggaaagaatttgctagcataaaggcaagtggagatgccaagaggaaagacgaactcgatccgaatgcctatcggccacctgatcggaaaatgatgaggctgcgaccacaaca

SEQ ID NO: 12089 - DNA, 1573 bp, Glycine max
  Clone ID: PAT_MRT3847_110924C.1
tacggctgcgagaagacgacagaaggggctcgtggctaaaccttaaaccctaattttgcaatcagagagtgaagagaagagaagaggttgatgggtcggcgaaagaacaacagcaacaacaatcagtgctcctcaagcaaggaagacgctgacatgaatagcaaccaccttcggtttgaagaagctgacgaggctgtcgacgagagttccaacctcgaccaatccatgtgcgacatcgaagaatccgatgataaaaccagcgccgactattacttcgattcctactctcattttggaattcacgaagaaatgttgaaggacagtgtgagaaccaagacatatcaaaatgttatttatcagaacaaatttttattcaagaataaagtagttcttgatgttggtgctgggactgggattttatcactattttgtgccaaagcaggggcagaacacgtctatgcggttgagtgctcccatatggctgacatggcgaaggagattgttgaagctaacggttactctaatgttgtaacagttttgaaggggaagattgaagaaattgaacttccagttgctaaagttgatataattatttcagaatggatgggatatttcttgttgtttgagaatatgttaaattctgtgctctatgctcgtgacaaatggcttgtggatggtggagttgtgctaccagacaaagcatccctacatctcactgctattgaagatgctgactataaagaagataaaattgagttttggaacaatgtatatggatttgacatgagctgcatcaagaagcaagccataatggagcctcttgttgacacagttgaccagaatcagattgctacaaactgccagctactcaagacaatggatatctcaaagatggctcctggagatgcttcatttgcagcaccttttaagcttgtagctgaacgcgacgactatattcacgctcttgttgcatattttgatgtatcatttacaaagtgtcataaattgatgggattctctacagggccaagatcacgagctacacattggaaacaaacagtcctatacctagaagatgtcttgaccgtttgtgagggggaggcaattgtggggagcatgactgttgctccaaataaaaaaaatcctcgggatgttgatataatgctcaagtattcattgaatggaaggcgatgcaatgtttcaagggttcagtactacaagatgcgttgaacctggtttttattggctcttgttttcctattgtttctccaatttgtaagattgacatttgctgcttctattttaagatagaggttgccttttgatggatgtaacttgtttgctattttatttgaattctttctcatcattgctcaattatgttatcgatgtaatgataaaatttgaaatctatttattgtttccaattttttttgtttccctctttctccgtattttacattgatatgtcaccaagaaatacatgcatgcagccttgcttgggaagtatctgaatctgctgtactgataagtgtccattgtactaaatgaaaactgcaacacactttggggt

SEQ ID NO: 12090 - DNA, 233 bp, Glycine max
  Clone ID: PAT_MRT3847_110925C.1
gtagtcggctcggtatgtggtttgtctgtgatgttgttagttgattctggttcttatatcattgcggtgttgtgtagtgttgaggtctgtttgccggtgttgatatgtattcggaggatttccgggccagtctatagactgctgtcgttgacgtttgggctctcatggacgcgtccatcgctgtggcctccacctatcacgctcacgagttggagctccggatagtgtgaatc

SEQ ID NO: 12091 - DNA, 135 bp, Glycine max
  Clone ID: PAT_MRT3847_110926C.1
gacccaggcgtacgcactggtgctagatgactatcagaatggattgttgctatcttaaattccattgtagatatgaaggaggggatacatcttttcattgtagggaacaattattatgaatacagaatctaattt

SEQ ID NO: 12092 - DNA, 316 bp, Glycine max
  Clone ID: PAT_MRT3847_110927C.1
gggaatcgaaccttagcctgggtttattcttggtggatggtgggattcacacactttttcaggggactaatttggattcgtttggtcaagggttaacaacaatggattaaaaaatcccgttttgggaaaaccgaagaccgaagcccttggtatttttggattttcccagcagagggcagattaattggaacagagaccacaactgggcccaagaagaaggcaagggagagatggaagccaaaaagggacacagaaaccactggcgtaagaagcattgcaactgaaggagaatacactttcacaatggtggcagcat

SEQ ID NO: 12093 - DNA, 190 bp, Glycine max
  Clone ID: PAT_MRT3847_110928C.1
tttctacagccaatcacaatgacgacaggaacgacgaaccatttgaagaggcttaatgccccaaagcattaaatacgaaaccaacctaccgggacacatcctcctaagccctcatctgcaccacacaaatccacggaatgcccgacactcacactcattttgccaaaccggctgaagaatgctctaacat

SEQ ID NO: 12094 - DNA, 257 bp, Glycine max
  Clone ID: PAT_MRT3847_110929C.1
gagcttctgctacaatctagcgtctagtgatcctctaaacactccggacaacaggtccccaccgtacctgcgaacactccaacttttcctatcgcgattctgattatagctaaccctattcatacacataactacaccctgtctgaaaatgatgtccactcacaatttcacacaacatactatccggaaccatacagtgtcacccctggatatcctaatcagttatctaacttacacttatctacttacactcactg

SEQ ID NO: 12095 - DNA, 1217 bp, Glycine max
  unsure (1)..(1217): unsure at all n locations
  Clone ID: PAT_MRT3847_11092C.1
cccacgcgtccgcacgatggcaattacaatacaattgggtcgcggtggagtggaaaagcagagtcaggttacaacaacattcttcagtgagagcagtatttataaaaaaaattggtgtaaatactttttttattgtttgtgatttaatattttttttcttttcattcttgtacttttttttatttttcttcttacaaattatgttttgtccctagaacattgtaaatattttttcttactgttctgtttaaatcgttttaagaactaaaaataaattaagcaaggattaaaaacatttaaaaaaataaaataaaatatactcagtgacaaaaagtaaaaagatatttaattttattaaataaaaatattagaagatgtttgacccttcattggtgggatttacatgatccgtgaaggatttgaagactcataggctcatagcctttacttggctttctctggttcctaagatggtgttgcatttggtgcctctggcgaatctccacttacaagccacgagacccgcggtggttgggttcgcgttcccactgctcctcaagttcttgatgggcttcaggatcttccgagacaacgcgcttcaccagtcaagactcttccttttccaattgggtcaaattgcgttcaacaccgaagcccgagtctccaacgtggccagaatggaacgtgctctcaggttaatttggagaacactcactccttctccttcatccaccaccgataattcccaagtcactcaacagagcctccatgacctttctatgctttcgctctagtcaccactcactttgggtttctttgcggtgaaagaaacaaagaaaaaagttaaatcaacgcggaacgtatcctctacttccatcattccacctccggttagtcgtttccggttactactttatcatccttgttgtttcttgtatattaatattaaccactttttactattgttgctgtttggaatctgaaattgatgtatgtttcggctttgtcctatgaattaggttaattttcatgagacatgttggacagaggttgtttgtggtactgtgtgtctaattaatcttacagcttgcaataattttgcataacgcaatttgaattttccgcccgacaaactttgtcggatgaatgaaaaggtattaaaaaaaaaaaaaaaaaaaaaaaaanntagcgcccgctctagaggatccnagctaacg

SEQ ID NO: 12096 - DNA, 478 bp, Glycine max
  Clone ID: PAT_MRT3847_110930C.1
gaattcggctcgagaaagaataggaatccatcgcaacaacaccaacaacatggcagcgcaacgagaggaggacattaaaatgatgttggccgctcaggttcacattggtacacgcaatgctgactccaagatggcggattatatctggcgccgtcgtaacgatggcatccacatcattaacgtgggcaagacgtgggaaaaactcatgctcgctgcccgtgtgatcgtggccgtggagaaccccgaggacgtgattgctatttcggctcgtccgtatggtcagcgtgccgtgctcaagtttgcgcagtacactggctgccaggccattgccagccgttttacgcctggcacgttcaccaaccagattaccaagcagtttcgcgagccgcggctgttaatcatcaccgacccgtgcactgactcgtaggccgtgcgtgaatcttcatttgtgaacgttcctgtgattgccttctgtgac

SEQ ID NO: 12097 - DNA, 386 bp, Glycine max
  Clone ID: PAT_MRT3847_110931C.1
agacactagtcaccttgtccttgctttttttgtgcaggtggcggtgacatgacttgcgtccgccaaccattaagatgagaacccccacaatcccacgtctgagtatgcaccagcaaatgccacttatttcatttccgcgtctgttgcaccaccccctactaatggtgaaaaggaggatgaaattggtggacaccaccctgacagcaactcacgcgcaagccctatctcaaactatactactgcgtgtcactttcgacgcgattactgaattaacatgcactcattgacagactagattaagacgcctactgacaatgtcatatctacagctgaacgtttatgatcaaacagcgatgctgctgtcaacattcatgatagaactgttt

SEQ ID NO: 12098 - DNA, 474 bp, Glycine max
  Clone ID: PAT_MRT3847_110932C.1
gacatatttagcagttaattgtcatattaaggattaattaacattttttttattatgaacttacaaatattgtgtatgataattgtaaatttgggttaagtatttgacctaaaattttagaatatgttatttcttgtaattattttagagattaatattttattgatataaaatatttattaattttaatttattgataattaatttttattaaaaaatttaatggaccatgataggattttttttaaaattctatttacaaaatttgaatacgaaattttacctaagaaattgagtttagtgcgctctcctttttatgtattcattgttaggtttatgaaaataaatttgataacattattttttcactgccttagttttactttattgtataaaactacataactgttatattactatcactattgcggtgcaggtatccatccatccattattatctaatgaattgctcaa

SEQ ID NO: 12099 - DNA, 306 bp, Glycine max
  Clone ID: PAT_MRT3847_110933C.1
ggtgatccgcgctggcaatattggcttggatcggcgagggggtggaggcggcgctgtacttcgcgatcccggtgtctctaggtcacctgccaggagcgagggcgcgcagttgaggctcacggacctgatgagctggcgggcggtccagaaaagcccgatggaggagtgcaagcaggggctagcatcaggagaaaccactgaatgttgtagcggccgcgatgggccaaattggaggagcaccggggtgcagatgcggggctgcccgtagctacaccaagtgagccctccgcgccggtggccaggcat

SEQ ID NO: 12100 - DNA, 496 bp, Glycine max
  unsure (1)..(496): unsure at all n locations
  Clone ID: PAT_MRT3847_110934C.1
cggcgcgcccaagcactggtggacaataaataaaattcgctcattgtttatccatnnctatnnaaaattggctaattgttagttaaagagccgttaaaccgctgcagctgaaagcatttaaatttaaacttcgtttttgacaatgtcgctggtcgaattaagcaaatcccggtggttcaatgggtatcagaaaattttcgaacataacagtgcccagttaaagtgccgaatgcgatttggggtttatttaccggacaatcagccggaaagcaaattgccagtgctcttttatctttctggtttgaaatgcaccgaggaaaattttgtcgtcaaaagcgccatgcagcgattcgcatccaatcgaaaaatcattgtggtcaatcccgacacgagcccccgtggcgttgtcactggagacggcgatgaccccagttttggtgctgcagcaggattggaataaatgctacacagcagagctcgcattttgataaagcct

SEQ ID NO: 12101 - DNA, 687 bp, Glycine max
  Clone ID: PAT_MRT3847_110935C.1
atcttctctctcatccaagaaaaaacttcttcatcttctttactttctttttctttctgtccgagagttcttgaagttttgtattgaggctccagaaactttatgagttctgttgattgattttcaacttggcaatataatgaaagagcatttcatgtagattttcttcaccactatctgctctatgcacttcttgtgctttctgcagttctgaattattcaagtaactggttcagtttaacatatgatttagtataaaagaaattgacacacagtcatgaagtttatgaaacttggatctcgttcggacaccttttacactgcagagtctgtaaggacaatctcttctgaagtttcaagtgacctcataattcaagtgaaaggaactagatacctacttcacaagtttccactattgtccaaatgtttgcgcctgcaaaggttatgctcagagagttctgattctccacagcaccaaatagtccaactccctgattttccgggtggggtggaagcatttgagctgtgtgccaagttctgctatggcataaccatcactctcagtgcttacaacattgtggccgcgcgaagcgcggccgagtacttgcagatgactgaggatgttgagaaggggaatttgatttacaagcttgatgttttcttcaactcttgcatcctcaatggctg

SEQ ID NO: 12102 - DNA, 335 bp, Glycine max
  Clone ID: PAT_MRT3847_110936C.1
gctaagcgggggattcgagtcgagaaaaacacctcacgaaagcctcatttcattcaatgcgagatcacacacctcgggccttttaaaactcattcgggactcatcaccatacataaatcattgtttcgacagactgaaatgtccaatggtataatggtcaatggtgaatgaccccacatatagaataaatcatgctgtgttataactgtaaacgtgacgttctaccactctttcacatatgatatattttctcctaaagcatagcttcgagcaaacatcaaaacataatgtttggcagtacaaaagcatcataagtggccactttctctcgttca

SEQ ID NO: 12103 - DNA, 273 bp, Glycine max
  unsure (1)..(273): unsure at all n locations
  Clone ID: PAT_MRT3847_110937C.1
gtttcaattatctcaatgagagcataatggaacttgtgggcgttctcccatctgtcaagantttaattcttgctgctaattttatcagaggaccctttttgaaagaattatcacttttaccaaacttggaagtgttggatttgcatatgantatgctcggcaatggcagccactttgcaactgnagattataaaaacaagtcaacattgaaaaagttgaagacattagatctcagtatcaataatctcaacgagagcataatggaatttgttg

SEQ ID NO: 12104 - DNA, 527 bp, Glycine max
  Clone ID: PAT_MRT3847_110938C.1
ggctcgagtaaattctttaaatacatcattgcatacatcaagggaaatatcattcaagtcccttcatataattgtagtttctagtaagcttgcaaatgaatgaagggcttggtttatggaaatttagatttatttctacctatgctctttggattatgatacactctttgaaatttgaatattttataaagcatcaaagctggagttacctgccatcagggctgtaaatgaggagcaccataaaaaatcattgtcattccaaattggagaaataatttttaagaatcttgatttcacttaaaataatagcatactttctaaacaacacaaaaccatcccagaaactccattttttttcaaaaccttagttgagttgacaccaactcctaacatttttatgcagagggttagactgcctttttgtcagttatatgtagacaggtttgtggtatgattattgtctccaaattgacttatttgatagcaattaatccccccactggtgggatagaactatagaagtacta

SEQ ID NO: 12105 - DNA, 315 bp, Glycine max
  Clone ID: PAT_MRT3847_110939C.1
gagtcggaaggtgggctcattgagacctggaaccctaacaacaagccattccagtgtgccggtgttgccctctctcgctgcacccttaaccgcaatgcccttcgtagaccttcctacaccaacgttccccaggaaatctacatacaacaatgtaatggtatttatggcatgatattcccgggttgtcctatcacttatctatagccgcatgactctcagcaacgaggactaatccatatgccccaataccgtcacctaacggtacatcgctacagatacgttgatttgatcgcagtgcctacttgtgatgcatgg

SEQ ID NO: 12106 - DNA, 272 bp, Glycine max
  unsure (1)..(272): unsure at all n locations
  Clone ID: PAT_MRT3847_11093C.1
ttcggttaatgggcattcgggtcgggtcaaaaccgctacaggttccaaaggaaatcttcgcgccagatcatanccggggncgggtcagacaatggnttgattncgggtacctcgattcancttttcttctcggttcggtttacactgctttgaggaacgagtttgtggcgcagacgagaggggtgttgacccttttggaggatccgaatttcgtgtttgaaggggcgatggatctgtgctttatggttagaagagggggtgcngctcctccg

SEQ ID NO: 12107 - DNA, 462 bp, Glycine max
  Clone ID: PAT_MRT3847_110940C.1
ggctcgaggatgctgctgacatgtctacatcaaaactagaagtttctgatgaaaccggacaggttagtgatggaagtgcaattactgccaaaaagtactctcgagatttccttttgaaatttgcagagcagtgcactgatcttcctggagggtttgaaatcacggcagacatagctgaggctttgatgggtgctaatgttagttctcatgttattgaacattcttctactggaagaattattgataggtcaggtgggatgtctcgtcgtgggagtggtgttattgaggaagacaaatggaataaagtttctaatgcatttcattccggtatgcgattggatggtgctggaggtaatgcaagatttcgacctggccaaagaggcaattttggtgttttaaggaatccacgcacacagacaccattgcagtaagctggtgggattctttctggttcatgcaatc

SEQ ID NO: 12108 - DNA, 301 bp, Glycine max
  unsure (1)..(301): unsure at all n locations
  Clone ID: PAT_MRT3847_110941C.1
gcactacaccatgctctactcatacaccaaggagcacacagatcctctaaagcccagtgtggacaccgtaaaagaagccgggaaaaccgtcntagctcgcatctacgatangttgcaccttatgcccgacaangtcctcaaatacgcgnatcanaaagtgtccganttagacgagcacnttccctccaacatnaagaaagtctcctccgagacctgctccggcgtctgtgaagtccggcgcgatgagntctccacctacgccaagaccagtgactccaagtacgaagcgtacacaaacgag

SEQ ID NO: 12109 - DNA, 284 bp, Glycine max
  unsure (1)..(284): unsure at all n locations
  Clone ID: PAT_MRT3847_110942C.1
tcgctcgctcctcgtggacactatttaaattaaaaacctcttcctttcactctctccatcctcttcatctttcttcttctcgtntttactttgacggtttctagagagagaaagtttgttatagagagagaaagcgcnnnnnnnnnnnnnnnnnnnnnnnnnngacagtgagaagagagagagaagcgctcttctccgtaccgtttctagagagaganactgatggccggagttaatccgaacggcgtcgcngattttccggcgactccaacgcaggcggacag

SEQ ID NO: 12110 - DNA, 168 bp, Glycine max
  Clone ID: PAT_MRT3847_110943C.1
cacgattatgtttatcatggtgcttttgagagggagtggaatacggtgaaacatatcaggatttcctcttttctaacatgttgccaacaaagaaaaaaaggaatgggcaaacattacaaactattttctagaaagcacatgaatgccatgcgacaataatactgactc

SEQ ID NO: 12111 - DNA, 456 bp, Glycine max
  Clone ID: PAT_MRT3847_110944C.1
cctcgtgccggcacgaggttatgccaggaaagaaggcactgtcaactcttgcttttcaatggcccatctctccagtcccttgaaaactatgttcgtatactcaggtcccttgtctatgaagtcattattgccaaggtgaattgaacctaaggtctaaggcagggcaccactattaatttgtttacttctgccacagttgtcggcaatattaggttcttagattgtgtgagtgggactacgtcctacatctttttcttcatggattttagtgcaatacaagtaacagtttgataccatattgcaagaacgttgttctattctcatagaaggtgaaagtttctggcattatctgacttgtttggaactgaagagtttatctacagaaagaacataattgtaaagtgtgaaatttccataagatataaataacatcatgttccttggtaaaaaaaaaaa

SEQ ID NO: 12112 - DNA, 347 bp, Glycine max
  Clone ID: PAT_MRT3847_110945C.1
gctcagtgaatccatctttgcaacggccggctgttagtaaacagcctactgctggagtccgtccacactctaaatggaataatgacaatatgtcatctttagacaccaggcctagtgacaggccgccacagaaactatctcctagtctacccactccaaagaaggagactctgaccacacactcatttataggaccaaatggccttgaccgccaatggctaggacctagtgccgaaatacaggatcaatgtccacgcagatctgatcccacacatgccaaggatacaagcctgaatcaggctgcgctatatgatccaggggcaccaaaagatggcgaacaaggacct

SEQ ID NO: 12113 - DNA, 661 bp, Glycine max
  Clone ID: PAT_MRT3847_110946C.1
tttttgtatgcaaaatgctcttttatctataaggctaaaatatatatgcacacacatcactgcatcagcaagtttgcttcaccctatgaagcaccaacaccgacacggacaccggacacgacacggatacggacacgtggacacctgtaatgtccaaaatatagaacgtaatacgggtgttgtgtcggtgtcgaacattgacacggacgcgtgtcggacaccgaacacgacaagggactggagtgtccgtgcttcacatgactagtgtattggagcatgactaatttaaacatagatagcagatactccaatcatcaaacctatccctttattgtaattttaaatacagtcttacatgacactatttctggaaccctgcaagcttgctcattgttatcatgccaaatggctctgcaagacaagcctgtgtagtagccgatagttcttgtgccacagcacgcatcatgggtctggactctggagccgcacgtgtgcatgccaaagctatggtcattgtgaacactactgcttctgctaattggtccgttggtagtcgaagccgttggtcaagcacatccttcagtagcatctgaggttcctccattgatgacaaatacttgtttgaagacagcatagtcaagagttctccaggatgctttcc

SEQ ID NO: 12114 - DNA, 610 bp, Glycine max
  unsure (1)..(610): unsure at all n locations
  Clone ID: PAT_MRT3847_110947C.1
ctcagccgcacttttattacttcatcaatcaaacacaagttactgaactttggaagcattatgcatgcatggttgtgggtagattgacaatgattggaggaatggaggctgaaacctctagtgttccttgtgttccgtaacatctcaacaatgcaacacaagcagtgataattaactgaataccaaagttgtttttggaatgctctgaattccatgacatgtgatatctttctcatctttggaattgagtttaaagctagtttttgaggagtgagtgagtgagtgagtgagtgagtgagtgagtgagaaatgggttttgttggaggggaagaagccattcaagagcctacagggcatgatgagaggattcttgtttcggttcgtcttcgtcccctcaacgaaaaggagcttgcaagaaatgatgtttcagattgggaatgcatcaatgacactgccatcatatacaggagcaacctttcagcttctgacaggtcactctacccaacagcatattcctttgacagtgtgtttcgaacaaattcttctacaaagcangtgtatgaaaaagcagctaaagaagttgctctttcanttgtcggtggcatcaact

SEQ ID NO: 12115 - DNA, 657 bp, Glycine max
  Clone ID: PAT_MRT3847_110948C.1
ggctcgaggcggcagacaatgattggaggaatgtatgtctgaaacctctagtgttccttgtgttccgtaccatctcaacaatgcaacacaagcagtgataattaactgaataccaaagttgttattggaatgctttgaattccatgacatgtgatatctttctcatctttggaattgagtttaaggctagtttttgaggagtgagtgagtgagtgagtgagaaatggattctgttggaggggaagaggcaattcaagagcctacagaccatgatgagaggattcttgtttcggttcgtcttcgtccccttaatgaaaaggagcttgcaagaaatgatgtttcagattgggaatgcatcaatgacactaccatcatatacaggagcaacctttcagctactgacaggtcactctacccaacagcatattcctttgacagtgtgtttcgaacagattcttctacaaggcaggtgtatgaaaaagcagctaaggaagttgctctttcagttgtcggtggcatcaactcaagcatttttgcatatggacaaacaagtagtgggaagacatacaccatgagtggcataactgaatacacagtggcagacatttttaactacattgaaaagcacacggaaagagaattcatgttgaagttttc

SEQ ID NO: 12116 - DNA, 150 bp, Glycine max
  Clone ID: PAT_MRT3847_110949C.1
tacggctgcgagaagacgacagaaggggacacatcaaacacataagtttgattgtcctagctttgagcaacattcatggaagatctccattctgctttatcacaatctgtttcttgatggttttccttggaaatggttgtactcaaatgc

SEQ ID NO: 12117 - DNA, 654 bp, Glycine max
  Clone ID: PAT_MRT3847_11094C.1
tatcatttcctcaggcattacttgaaacctgaaagaccccaagaggtgtaaaagatcttgaaactaagtactggtgactttgtataacattttattttcccttgcttctcacattttctgggcattgtggggtctaattcaggcaaagatgtctgcaattgaatttgattatcttggttactttttccttcgataccacgagtacaaaaggcacaaagagaagtatttcttgctggcacagtcctacctttcaggatgcaagaatgagatgagtagatagatagattatacttatactcagtcattcgtgggatttttgtacgtcaagtttgtagcatgagtcccctgattcatgtagtttaatgtttgtgtaacatatcatttttagacgcttatcacaataatggctaattaggcgtttatgtttgagctacaggctcttctacattctatgttgtaatcctagtacataggctatataaattgatatatcattctttttcttgtattgttgtcatcataaattttggtctgataccaatagtttttgttatccctttcctttattgtttattccccgtcgattttgtactaggcgaaggatgagacttgagaagctgggcatatgtcctataaatagatttaacttgtata

SEQ ID NO: 12118 - DNA, 745 bp, Glycine max
  unsure (1)..(745): unsure at all n locations
  Clone ID: PAT_MRT3847_110950C.1
cggctcgtgacggggctgcacgacgacagaagggggagataagtaagaagaaaaagaagaaaaaaaatagagaaagaaagtggtaaatgtgacaagtgatgtaatagaagagagactacgagagaaataagaaaaaaaaatgtcaggtgaaaatgaactagggtgctaaactgccaatttttatttttttttgcttttgaaaatggaaatttgacgatcatagggtaccccatcaactattgtttgatggggtttctgcctctctgggtgttgaatctgtctccaccagaaatttagctataaaatgtatcatttaagattttgtcaaaaatagtaagaagcttaacttaaagacctcaactcaattccacaaacctaacttgtaaagagagaattgtctaaactttgtaaagaatacatcaattatttctctagttgaagagggactaaacagtaaacacttctctacctagtacattgaaaatgctggaggctacaataagaaaaatgttacatgagcatccaatatgttatttgacaccagagacacggagaaaaaagagacaaaaataagaggtgttgaaggggtgttaaaataagagatatgataggatttttgatgtgatagaaagagagataaacaaaaataagaagtgttgaaggggtgtttaaaataaggaggtgtntgtgtatgatcactccacaatgaaggtagcccaaagacacaacaatcatttaggcgact

SEQ ID NO: 12119 - DNA, 162 bp, Glycine max
  unsure (1)..(162): unsure at all n locations
  Clone ID: PAT_MRT3847_110951C.1
cccacctggtttttatcacgacattccttaaaatcattgcaatttaatttgtggcatatcatatatcgaaggcctcaaagaatagacagcacagaaatatcagcaaaacccgtttcttttgacaacacagtctaanaaaagacagcacaccaaagatataat

SEQ ID NO: 12120 - DNA, 246 bp, Glycine max
  Clone ID: PAT_MRT3847_110952C.1
atatttttttttttttttcttccggggatactagggaatagtataagcagggattgataattcagattacccgaactttatacagaagcgaccaattaccaaacattaaaaaaaaaaaaaagggggggcccgtgagcttaacacacccgtcacaggtgcaaaacactttgacttgttgaaagggaagacatgaccactttatggtaaggggggtggggtaacacaaaacaccggggggcgcgaaaa

SEQ ID NO: 12121 - DNA, 246 bp, Glycine max
  Clone ID: PAT_MRT3847_110953C.1
gtggtgttgggtggggttttggaacaaaaaaatttgcagagttttttggttttgaactttactggagggattctggatacatgtatgataatgtaaattaaaaattatttgaaaatttaaattaagattaccgaatatgatttatgtagtttaacagaagagggggaggggtatattatctattggtcgggtgagtttaatagacagaatctgtgagctagggaaagatccatcccagggggagtg

SEQ ID NO: 12122 - DNA, 281 bp, Glycine max
  Clone ID: PAT_MRT3847_110954C.1
caacggtatcgttgctacagcacgacataaaggtcaggctgcgataataccacagaatggggaccatatcaagtagcagtgacactagatctgtattcagattatattgcaaaactggcatcattcagcatgacagtatctatcattgcctgcacatctgtcaccagactgtccgcaatatctgctcagtggagattattcgtggtgagtgctaccagatttcaacgggataccgtcatttcttacatctatgaaacctctggaatgaagaacttgatgtt

SEQ ID NO: 12123 - DNA, 315 bp, Glycine max
  Clone ID: PAT_MRT3847_110955C.1
ctgagtgtgggcgtcagttgatgactgacaaatgactgggctgcttgcgtctcaaaaaagagaagatgaggcaaagaccgacgacgtcggaatctccaactcagaactacgcccttcagaactccgaacagtccagggctgccacaacatcaaagagaccaacaccggatgcaaaacctgatgatccgaatccatctgaggatgaatcgtttcacgccgaagatcctttggacgactgcaactaagactacaacctgctgtagaacaactcacctgatgcattcgagacatcactctatttcttttgaatcatat

SEQ ID NO: 12124 - DNA, 532 bp, Glycine max
  Clone ID: PAT_MRT3847_110956C.1
gggcaaaaaaaaaaaagggttggaaaatccccgggccaaaaaccaaaacaaaaaaggggggggggggggaaaccaccccccccggtttaaaaccccccccaaaacccccccccgaaaaaaaaaaaaaaaaaaaaattttcaaaagcattaatcttttttaaaacggcccccaaaaacccactactagaaacgggaaaaaccttttaaaggtcccttaaaggaaaaaccccccccgggggccccggcccccccccgggaaaaaagcaaattaaaaaccccctccccccccctttcccgggggaagccaaacacccccccttgggagcggggaatctttaacaaaaaaaaggccgggggggggaacccgaaacccgagggctttaaaagccccccttaccccaccccgagggggggcaaaattttggggtgggcccccccccaggggggggggccccacgatccttaaataaaccggggggccaagggggcccaaaccaaatggggaacaaaacccgtttggacccaaaaaggg

SEQ ID NO: 12125 - DNA, 397 bp, Glycine max
  Clone ID: PAT_MRT3847_110957C.1
ggaattcgccacgagggttggatttgaactgcatgatggtgcagttacttttgaactttagagaatcataatcccaggagaaggtacaattatgatcatgctaaggttgctgcttgggctgtttggtatacttgtgtataactttcatcttgttagttgggtgcttgctttacaacacgtgttgaagacagatgtaaggtatacacatgaatatgctacttgcacatttgtggtccgctagtcttggctgtgtatttttttgcattatctaatttaagtggcatgtcccgttgatggagtgtgttatcaatattgatggccattatagtgattgtactttttgctttttaaaacaatactccccatttgcttcctttttccgcattgatttttcttt

SEQ ID NO: 12126 - DNA, 500 bp, Glycine max
  Clone ID: PAT_MRT3847_110958C.1
ggtcaattatatgaattatgtagcattgaaatattgtccatttttcatatttttttcagccttgcagatttttatttcatctcaccgtttgtttcttttattagttctattgtcactaagctatggattgccttttttatcattaacaaaattatttgtggatatatttatatgctatttgacacctaataagattaaaaaaaatagagaaaaaagagagtgctagctatgcattctctaccacaatctttataacttatattttatttttgattaaaatttattaaaaattattaaattaagagagtagagcaactcattaagtaagaactaaaagtgtgactcatcaatttatgatatttaataaattttaaaaaataacaataaagagtgtgttgctagtaatttttgtggaaaaagataaagtataatagattatatgatattaaagaaagagatagataaaagtaatatatattcacaggtatttctaactaaga

SEQ ID NO: 12127 - DNA, 512 bp, Glycine max
  Clone ID: PAT_MRT3847_110959C.1
agcggtttcctttgttggtgttgctggaaaccgttttcctggcatcagtttgtgtctccttaaaggtgagagaggctgagattaaccttttcttcttgagaagctctaaaagcttccaaaatctctttgagaactaaaacggtcgcattcgtctcccccagagcttcaacaaacgccccctaaaacttgagaactttcgagcaaactggattgtcccgtttcagtcaaaacctaaaacaatctttctcccccaccatgccgacgccgatttccctccctttgtctctagcgggagagccatacttactttggtggaaaccgacaaccgagacctcttacaccttcaccttggcgaagccaagagaatcctagcttgaaccaattacaatttggttaacctctcacgccacccgaatctcaaaataatcaaaccttgcccttcccgtcaccaaacctggcagatagaatgatttcttcttatcaacaactcaagcccaaccgtcctaattgca

SEQ ID NO: 12128 - DNA, 609 bp, Glycine max
  Clone ID: PAT_MRT3847_11095C.1
accagaatgtatcgcactagcatgtctatgccgttaatggtggtgttaggcatgactctagtaatttgcttggcaaatgggcaagctacacccccttgcgctaaacacctaagtccatgtcttgatgtcatgaactccactaagccacccgacacatgctgcaatccaatcaaagaaacccagagtacatgtttctgccaacttgtatcaactccgggtatgcttgaaggtattggtaccactatcgctcaggctctcaaacttgccaacttatgcggtgtcaacttcacactcaccacctgcaaagcctctacttcggctccgcctccgtccttggtgcaacccccggcaacgttaggaggtgatgaaggaggtgcaagcagagctgcatttaccggactctccttcgcactgttcttatgtgcttgtgtgttgtttaattaggaaggtggacttttagaataccttacctctattggagttgataattccttaatttccattatatcgaccaatatgtagtctctcaaacgattacattctcctttgttttacgatttcttatcaatgtttctaaggttggaaaattattcaattagtccccccaaa

SEQ ID NO: 12129 - DNA, 152 bp, Glycine max
  Clone ID: PAT_MRT3847_110960C.1
ggtgggcaaaaatgatccatagccacctatcagcgctctcctgtttggtctcacccaatgactccatcagacattcatttcatcttattgggaaatcagcatgtaaggttcatttcgttgggcaatgagagtacgcgttgtgttggtgatcc

SEQ ID NO: 12130 - DNA, 217 bp, Glycine max
  Clone ID: PAT_MRT3847_110961C.1
accacacgtacgtccactcgtcctaattaaaacaaaacataacataaaacttacagagaagacttataaaagctaacagtgacataaaaaaaataacttgcaaaccccatcaacctcacactgtgccacaaggccagcttcatctgtctctatccctgtctcctttaagactgtagctcttttctccaaaaagaatgctacaccttcaaaaaaaaca

SEQ ID NO: 12131 - DNA, 377 bp, Glycine max
  Clone ID: PAT_MRT3847_110962C.1
ggctcgaggaacaagagaatgggttgggggcaatcgtagaaagaaagaagagacaggaggacaagtcggtaatttggacttaaagagagggacagcttcgttcggcttgtggttgggcgcggcgcgcagccaatgccatgagcgtggcaccctttctttcattatgcatcatcccaatccatactcttccttccttcctttcttccatgccaaaaccaatacccctttgagtaatcttctgcagaataacagtgagccgctcaaatccctaatgcctaatcccaatgccatcgcagagcgacagcattgatatcggatgcatacctgagaccactacacgatgcgatcgctcgatcagtgaccatgctcgtggcagc

SEQ ID NO: 12132 - DNA, 295 bp, Glycine max
  unsure (1)..(295): unsure at all n locations
  Clone ID: PAT_MRT3847_110963C.1
attttgcaaanattatgaaccttanacaaagtgttgttggtgatcttaaacttctnactgatgggtnnttgtatgagggtaagcatatncctgtntcnaatatnagtgcagggganatcatgtagttcanataccctnaatggcacaggatgaaattctgtcttctagtgcaagtgnattcagagttgccntggtgggtnatacttangcaagccttnaggctantggnatggcatgtgggggntnatggnnatnntcattnntagtttnggaagtcntgnctgtgacatagttg

SEQ ID NO: 12133 - DNA, 205 bp, Glycine max
  unsure (1)..(205): unsure at all n locations
  Clone ID: PAT_MRT3847_110964C.1
attgctatatcctatttaaactttcacccttttatgagtgtatcccctctttcgctatcccaccgagtgcgaaggccacacaacattttttttttttgggnaccacacccccggggggggggggggggccctcataaatgcctcctgtgaaaagaagcaccttggggggggggggggcgccgggattgcgtttgctaaggtgaac

SEQ ID NO: 12134 - DNA, 414 bp, Glycine max
  Clone ID: PAT_MRT3847_110965C.1
gtttcacttctcaaggcagtaaagtaatgaatgatttcatatcaaggtgaacaaattgttttcaatgggtggatatatgttggtgcttacctcagaggactggcaaagatgagagtagagcttagggagcacatatatgatatgaaacaacagaaatacgagaacaaggtaaattttataaattatacatggactattattgtgcttttaggatgatagaaccgttaagataagaacttagcccagaccgaaaagaacctatttctctctgttatttctttgttccactgtttctgtcattcatttacagtctatctcttagaggcagagtatgtctcttaacactttaaaaaaaacttcatctctatcaaagataatgctcggcttttgacccatttccttaaatttgtaatt

SEQ ID NO: 12135 - DNA, 348 bp, Glycine max
  Clone ID: PAT_MRT3847_110966C.1
aaccaaccaaaaaaaagaattttaattttttttttaaatccctagggcacacccttaaacaactttggaaagggaccaagacttttggttgggtcccttagggggggggatttccttccactgggaccaagcccccttgggggaaaggggacaagttaggccaagtcgaaaacggccagggggggccaaactaagttttttcgctttttatgggggggcctttagatttcgggtggaaaaaaatttttcttttcccttgggggcccatccctccccaaaaacccaggggtccccccccccaccgggggggaggaaataaaggattgccccgggagggggtcgtttttt

SEQ ID NO: 12136 - DNA, 350 bp, Glycine max
  Clone ID: PAT_MRT3847_110967C.1
aacaccaaaccaaacagttttttttattttataggaagctcgggtttatattataaaagaagcatttgttttttggatgtctcaatcctaaaacttgcaccataaccaaaggacattggtttttatttagtaagagcttttacttagcatcttctttggtataattttttaggggttttttttaaaaactggacaggaaaaattaccccacacacacacacacacactttttttttttggcctttttgaaactgagttgggaattttgatctcgaactccaatttttatttttagcacaaagctcaatttcaggccttccttttggggcaagatttgttggccctttccc

SEQ ID NO: 12137 - DNA, 600 bp, Glycine max
  Clone ID: PAT_MRT3847_110968C.1
tcgggcacatctattgacactgtaatggtgccaaattaagtgcccatttcttcttgtagtggttattagaggatttgctcgctatcatatcacagtatatatcttcttatttgtttaatttttatgtttcttaggtgaattactcaagagggctcgacaatcccacaaagtgtaagtctaactttgtttttacttctatttgtttactttttctcgcttatgaactagatcccgcttgttctgtgttgtattcgtgacctaaattgtgttttgttcgctttattttattcaccatgattgactttatgatttacctccctggaacataatcacttttttatgttataattaaattaaatttagatccttttttttttatttgaacggtacttctatttttttttttttttactaatgtgttattccttcagagaacaactgtgaaaaatgaagtttgtaacatcaatttatttggtctaaaaaggaaaaaaattatgttagcctaggaggtgtttgtgaatttgtctgattgaggttgttatgttatgtgtagagaaaaagaggttatgttatggcgggcaaaggtgttagttcggtggc

SEQ ID NO: 12138 - DNA, 436 bp, Glycine max
  Clone ID: PAT_MRT3847_110969C.1
ccggactgcactgaagagaatagtaccttataagaagaaatgttactgggcaaaggcctgctaacaaaagcacaaggacaaatcaggaaagaatgtcaaaagactaaaatgcagaaagtgaaagtgaatgtaattatattatattatatacgggaaatcgatttcgaggcgaattttgccgtcttgaagagcataagagagggaattcgtaggatttaggtttgtaaagggagacaccggccatgggatcagaggctgaaccttctctttcaactccaacgctctgaatgaagatgatggcggagtcaaagaaagaggttcaagttggcgaggacgaaggaatttcagcttgtaagatggagatgaaatgcccatcaccatcttcttctcttctatgtcttccccctagttttacataaccttcagaaactcccga

SEQ ID NO: 12139 - DNA, 1865 bp, Glycine max
  unsure (1)..(1865): unsure at all n locations
  Clone ID: PAT_MRT3847_11096C.1
aattcggctcgagatttgaaagtacccaacacaccacacaaacaaacccacatccccccttttttttcttcatatcatttcacacacctccttgttcttcttgttgttttttttcttccctctcttctctttgtttttcttctccttcggttgaatcaatgggtgcagaggttaagatctggaatcccgttgaagtcgctgagcaagctcgccatgactacgcttcgcagattcatccctcacatctcaccattgatccctccctcgagcttcctcaaatgacacctctcgtcctaaagttgtgcaaggatatgttcaaggcgtggtcgaatttggatgattcttgctttgttgttgagaaaatttccgggggcataacaaatttgttactcaaggtttcagttaaacaagaaaactgcattgaggaaactataactgtcagattgtatggacccaacactgagtacattattgatcggcagagggaattgcaggctaccaaatacatcacagctgcaggatttggtgctaagtggcttggcatatttgggaatggcatggtgcaatcttttataaatgcacacactctatctccttcagatatgcgagagccaaagctggctgctaaaatagctaagcaacttcaaagatttcatcatgtggaaattccaggctcaaaggaacctcaattatggaatgatgtctggaagttctttgagaaagcatctgttcttgaatttgatgatagtaaaatgcagaagacttatgagacaatttcattcaaggaagtccatgatgaaattgttgagctcaagggattgtgtgatctactcaaatctcctgtaatttttgctcacaatgacttgctttctggaaatataatgatgaattgtgaagaagataaactttacttcattgattatgaatatgcatcgtacaactacagaggctatgatataggagaccactttgcagaatatgctggctttgaatgtgactacgacttgtacccaaatatgaatgaacaatatcatttcctcaggcattacttgaaacctgaaagaccccaagaggtgtctgagaaagatcttgaaactttgtatgttgaggcaaatacattttcccttgcttctcacattttctgggcattgtggggtctaattcaggcaaagatgtctgcaattgaatttgattatcttggttactttttccttcgataccacgagtacaaaaggcacaaagagaagtatttcttgctggcacagtcctacctttcaggatgcaagaatgagatgagtagatagatagattatacttatactcagtcattcgtgggatttttgtacgtcaagtttgtagcatgagtcctctgtctcatgtaacttcatgtttaagtaacataaaaattattatttcttactggcacagtcctacctttcaggatgcaagaatgagatgagtagatagatagattatacttatactcagtcattcgtgggatttttgtacgtcaagtttgtagcatgagtcccctgattcatgtagtttaatgtttgtgtaacatatcatttttagacgcttatcacaataatggctaattaggcgtttatgtttgagctacaggctcttctacattctatgttgtaatcctagtacataggctatataaattgatatatcattctttttcttgtattgttgtcatcataaattttggtctgataccaatagtttttgttatccctttcctttattgtttattccccgtcgattttgtactaggcgaaggatgagacttgagaagctgggcatatgtcctataaatagatttaacttgtataaatccccttgtggnnnnnnnnttt

SEQ ID NO: 12140 - DNA, 365 bp, Glycine max
  Clone ID: PAT_MRT3847_110970C.1
gtcgacctttttttttgtttttataaaccttcgctcactattgttcttttctcttcattaccatagatttctggtggttttcacgtgccttgctctgtcccccctcagataaaacaggtcgaatctgatgttgcaagattgccatgaaattactgaggggacataagaacgaggttcctgacctgactctttcactgtatccaatccggaaagatatgactcctctagtggccctacttctgtctgtctaagctattgctatttgacctggcgctgtgctcttgttgggatctcttcagctttgcgggccaggcctatgctgtctcggttcctgggggtcaggggggggttgcctgactaaccta

SEQ ID NO: 12141 - DNA, 267 bp, Glycine max
  unsure (1)..(267): unsure at all n locations
  Clone ID: PAT_MRT3847_110971C.1
tntttcntcnngnttagctatccctctcttgaaanatctagatcncgtatcttccttganctacgnnacgctnttngtgaccggatctggatggatctgaaccagatctacacgccgatggtggtctttggcctggtctttcatagatctgatgtcatggaggctcagatctactgtacagnnnnactgtngataatcgatgagaagaacgcagatccagccgcttccgcttgtncgntcgctacagacgcttgtatcggattattc

SEQ ID NO: 12142 - DNA, 443 bp, Glycine max
  Clone ID: PAT_MRT3847_110972C.1
ctgaaatcaatcatgctattggagctgaaggagttttaagtgtagaatgtaaggaagttgtttctgaatatggagaattgttatgggatctcttggtatctggggtaagttctctttgcccaaccttgaagttttctcttcacctcaatttgcagtctttgctctttcccttcatgtgttttcacccccccacccttaaatgagtttgatcttgatttgcaggtacgacccgatgatgtatgctcacaggttggcttatgtttcaaaaggactaaatcagagaggttaggatttgttcttttaaaatcgtaattagcatttttatatttcaatatttttgtatcccctttttatcatatttgattcagtacacttcaattgagtaatgatttgaagatgttggatgaatgcttaataattctggctgtgagcttaaagtcaag

SEQ ID NO: 12143 - DNA, 235 bp, Glycine max
  Clone ID: PAT_MRT3847_110973C.1
aacgcaattagttcgtcgaccctcagagatattcaacgcgacttggagaacaccgccaatgatctcagcaagcttcacaaggaaattgcgtcgactcaccacatgagcacgaaatacacggtccagccaggcgagaacgagctcgtccttaagagcactggattcattgatagacgatgcaaatgtatataagtcgattgggccagtacttgttcagcaagatttggccgaggcc

SEQ ID NO: 12144 - DNA, 3101 bp, Glycine max
  Clone ID: PAT_MRT3847_110974C.1
tttcaaaaaaggggaaaaaataacaaagtatacagatgggctagggggacattcattcacctcttctctttacacccccctctctattttgcgttcattctgttttccagttgaagtctttccctagccaatggccactgatcgtttgacccgggttcacagtctccgtgagaggcttgatgaaaccctcactgccaacaggaacgaaattttggcccttctgtcaaggatcgaagctaagggcaaggggatcctgcaacaccaccaggtcattgctgagtttgaggaaatccctgaggagaacaggcagaagcttactgatggtgcctttggagaagtcttgagatctacacaggaagccatagttttgccaccatgggttgctctggctgttcgtccaaggcctggtgtgtgggagtacctgaaagtgaatgtgcacgctcttgttgttgaggagttgcaacctgctgagtaccttcacttcaaggaagaacttgttgatggaagttctaatggcaactttgtgcttgagttggactttgaaccattcaatgcagccttccctcgcccaactcttaacaagtcaattggaaatggtgtgcagttcctcaaccgccacctttctgccaaactcttccacgacaaggagagcttgcacccacttttggaattcctcaggcttcacagcgtcaagggaaagactttgatgttgaatgacagaattcaaaacccagatgcactccaacatgttctgaggaaagctgaggagtatctgggcacagtgcctcctgaaactccctactcagaatttgagcacaagttccaggagattggtttggagagagggtggggtgacaacgcagagcgtgttcttgagtcaattcaacttctcttggatcttcttgaggcccctgacccttgcacccttgagactttccttggaagaattcctatggtcttcaatgttgtcattctttctccccatggttactttgcccaagataatgtcttgggataccctgacactggtggccaggttgtttacatcttggatcaagttcgtgctttggagaacgagatgctccatcgcattaagcaacaaggattggacattgtacctcgtattctcattatcacccgtcttctccccgatgcaatcggaactacttgtggccaacgtcttgagaaggtgttcggaaccgagcactcccacattcttcgagttccctttagaactgagaagggaattgttcgtcagtggatctcaagattcgaagtctggccatacttggaaacttacactgaggatgttgctcatgagcttgccaaagagttgcaaggcaagccagatctgattgtcggaaactacagtgatggaaacattgttgcctctttgttggcacataaattaggagtcactcagtgtaccattgctcatgcacttgagaagaccaaataccccgaatccgacatttactggaaaaaattggaagagagataccacttctcttgccaattcacagctgatctatttgccatgaaccacacagatttcattatcaccagtaccttccaggagattgctggaagcaaggacactgttggacagtatgagtctcacacagcctttacccttcctggactctaccgtgttgtgcacggcattgatgtctttgatccaaaattcaacattgtctcccctggagctgatcaaaccatttacttcccccccaccgaaactagccgtaggttgacctccttccaccccgaaatcgaagaacttctttacagctctgtggagaatgaagaacacatatgcgtgctgaaggaccgcagcaagccgattatcttcaccatggcaaggttggaccgtgtgaagaacatcacaggactcgtggagtggtacggtaagaacgcgaagctgagggagttggtgaaccttgtggttgttgccggagacaggaggaaggagtcgaaggacttggaagagaaggccgagatgaagaagatgtacggcctgatcgagacctacaagttgaacgggcaattcagatggatttcatctcagatgaaccgtgtgaggaacggagagctgtaccgtgtgatctgcgacaccaagggagctttcgtgcagccggctatatacgaggcttttggtttgacagtggttgaggccatgacttgtgggttgccaacattcgccacatgcaatggtggtcctgctgagatcattgtgcatggcaagtctggcttccacattgacccttaccatggtgaccgtgctgctgatctccttgttgacttctttgagaagtgcaagcttgacccaacccactgggaaacaatctcaaaggctggtctccagcgtattgaagagaagtacacatggcaaatttactcacagaggcttctcactctcactggtgtctatggcttctggaagcatgtgtctaaccttgaccgccgtgagagccgccgctatctcgagatgttctatgctctcaagtaccgcaaattggccgagtctgtgccccttgctgttgagtaaactgaggatgaagagttggataaagaaatggaggaaccggctttttgtttctcatttggagtttgtcttacttgagttctataaataatatgtccctgatgattttaattttgtgattaagctttcgataagagacagagagagaaaaaaaagaaaaaaaaaaaaagccttttactttttttcttttgcatgatttgaatcttgattggaaaagcttcgaattggggtgttttacccatcaattcaattttaagccgtgccttcttcaaaaaaaaaaaaaaaaaaaaaaaaaaaaaaaaaaaaaaaaaaaaaaaaaaaaaaaaaaaaaaaaaaaaaaaaaaaaaaaaaaaaaaaaaaaaaaaaaaaaaaaaaaaaaaaaaaaaaaaggggggggccccttttaagggacccaattttacttccccgggcttgcaagttaaaagtttttttttggggcccccaaaataaaattcctgggccgcggtttaaaacctgcgggatgggaaaaccccgggctttccccaattaaatcccttggaagaaaatccccttt

SEQ ID NO: 12145 - DNA, 1476 bp, Glycine max
  Clone ID: PAT_MRT3847_110975C.1
gaaaaatattaaatctaatttactcgcatgtaacgaatgttattcacgggaatgaaatcttctatcttgaaacaaacacctcaaatggttcccatttcatatgttccttaactactgctttcccattggttactggttggatggtgatttacaaattgtacctatgcctatggcaacaaaaaagggtgctagggcattgcagattacaacagattaggtctacaaatcccccacaaatgtaggcaaaatgtgatctcctatctgtccttccttttctgacagttacaagagctttccaggtccagattgcccttcttttccaaagatatacaaggcctcttttagtttctcagccatcaaccacgctcagtacaccaaagttatatgccaaacaaggtgtaattatgttacatctcaatcgaaccattgggaactgatgtatcagattccagtttgcagtcagctttacaaaatgtatcagattccaatttgcagtccctttgtaaagccgataaccaagagaccacctgtattttagaattgcttgagcactcatagcgcaatccatggcgagttaaaatataaaaggcatattgaattttaccatcttctcgcttaaaacatggtaaatcttccaacttcaacaatatcagatagaaaggttgagtagccagggctctacttcagtatcttctaaaggtggaggttctcctgcaatggttgcccatctagttcgaatgtataaatatccagatagacgagcaatccgcaaaacttcatcaatatgttccaactgagctttcgagtgagctaccttctctgctatatcagcaagctccgatcgaagtgactctaattctgcagctgttagctcaaccttttcctgacctccagtaatgaaacaccatgacagccgccgtggagtaaacaagtttaacatgaaagccgtccttaatttacttcgagtccgttgtaggcacgaggacctaaaatgaagattgatcggttccaggttctgcaatagatgatgttctgctcgcagtagattctatacttgatgatggaacttgaacatgatcagggattatttttaattttgcaggaccatcatccatgtcattgaccttctagaaagagaaagtattaaattaatgataagagtcaagactggaagaggtactatccaatggagagaaggaatgttccataacccacgtgtccgacgtagaaggataaaggggatcggacgaagcgcgctttatccagtcttgcgcttgtgcccaaggtcatttcagcaaggcatgtcgcaatcagaagtcttaagtagctcagatccacaattgcaaccctaatatcgcgaccgagcgaggatcgtaagataatgaagtacatagaacatgatgcacgacagctccagctacgagtcacaacgtgcattttaagtctagcgagtagagggcaatagcagctcgagcc

SEQ ID NO: 12146 - DNA, 790 bp, Glycine max
  Clone ID: PAT_MRT3847_110976C.1
tcaaacccaagtagcaatattcaatattaagcaattggtatgccagattaccagccaaaaccagcaagtctgcaacatttgcggttaaactactaaaattgaagagaaaaagtctgttccgttgacttaacatcagaagatcataaggaaaatgctggcggccaatcacataaagtaagccagttctagagatgatatccgacggactcatcactgcattggtttgccagcagtctttttccattgtttccccccatctcaaggtaaaagaagcaagtcttctatgaagatcagaatagatatcagcaagctccaatcgaagtgactctaactctgcagctgttagctcaaccttttcctgacctccagtattggaaccccatgacagccgccgtggagtaaacaagtttaacatgaaagccctccttaattttcttcgagtccgttgatggcacgaggaccttggagattgatcagttccaggttctgtaatagatgatgttctgctctcaggagattctatacttgatgttggaacttgaaaatgatcagggatgaattttaattttgcaggaccatcatccatgacattgaccttctaagtagtgtgaggaaaagaagagttcaccaactctaatggtccacgtgattaaacaaagtccaaaccaggaagaggagagagagaattatggattatataagggtagctgggaatgaacactttcctttgtggaaatagaaagtgactcaaagcccaagaggaagcggacgcgtgggcgaaagcgtagaa

SEQ ID NO: 12147 - DNA, 1019 bp, Glycine max
  Clone ID: PAT_MRT3847_110977C.1
gccctaaaccaacagtatcaccacttcctgggggattaccaatagggctactattacaacctcgtatattgccacaacatagccacaagcatgaaaagcacaaacaatacaataatcacatcaaaaccttgcacataataattgtcattatttgccgtatttaacgtcctttaatgaatgaaggtggggggacaatggaattaaaaatcattcagttctgagtttgagtccctcaaaaataaaatcgcaagaggctgtcaggaatccatgaaagcatcacttatgaatctggcactgcatcatttatgaagcaatcctgtgattaagcatcaagatcattccaaagtccttaacatgtatccaataaattgggggttttgtatgatcatcattaagattccccacctcgcccttattgaccctatcatcaataatatccaaagatgacagcaactcgatctccattaacctcatatacctctcctctctgacctttagttaaaggcctatcctcatctctaactttaacagatggcccaatgtacttcacacggtcaccttttcttagctggcatccagattcatcagaagatttgacatcattagacttagatgactcagaattctcagattcaccagacacttccttttctaattcttcaacattgtaaggaacaagtttccgaagaacagctgctttaaccttcttaaggtgtgcctcagcagccgctattgcatcttcattatcacttgcatctgacttggtctcggtactgctagcccactcttcttcatttgtagcatcattatcatcctcattctctgattccaaagaaccctcctccccagactctgcattatcctcgtcagactcgtaatctgatgataaatcatcatcaatatcataaggagcaagaatgctgttatcaagcactaacagaggaacttgtaaatcttgtgcaagagccctaaccaatctctctcgatacagctcagttccaggaatgctaagaagcaat

SEQ ID NO: 12148 - DNA, 530 bp, Glycine max
  Clone ID: PAT_MRT3847_110978C.1
tcagtgcacagatacagagctgggaagacgaggtatgcacatttccggcagacggacgacctcctggctgattcagggtggcactgcagcttctgcttccgctacataaacgacttcatcttcaagatgaaagcctacagccacgtcgaccggatcagattcaagtacttcctgaacccgaagaggattcagcatgtgatttgcgaaggggctgaccttttccacatgcttcccgaacagtacacgttccaagagatcatcgccaagctggggcctatcccgagtacattctccgacgttcatctccctgcctatctgctggagcaattcgatcggtacaggtaccttctcccaggcaactgcgttagagacagtggctaggcacctggctgcccgacgtctgcatcatgaccctgaggcgcacggacgtcgctctctcgcggatgtctgtcttatggcggcggaggttgtgtccgatacgattggctgacttagctgagtgatcgcttggctgctgggtgagttcatat

SEQ ID NO: 12149 - DNA, 1181 bp, Glycine max
  unsure (1)..(1181): unsure at all n locations
  Clone ID: PAT_MRT3847_110979C.1
gacaaataaattgttagtctttaataacttactgaaaacacttcaagacattactgtcatatttacaaagtagcttagatttacaaagccgcttaaactcaccaaacaaggtgtaattatgttacatctcaatcgaaccattggaaactgatgtatcagattccagtttgtagtcagctttgcaaaatgtatcagattccaatttgcagtcactttgtaaagctgataaccaagaggccacctgtatcttagaattgcttgagcactcatagcgcaatccatgacgagttaaaatacaaaaggcatattgaatttcaccatcttctcgcttaaagcatggtaatctccttacctcaacaatatcagatagaagggttgagtcctgggggcttaggtctgtacacaacaaatataaaaatatacatgctccatggagaacgacaaaacgaggaagccaatcatctacttcagtatcatctaaaggtggaggttctcctggtagtgttgcccatctagttcgaatgtntaaatatccagatagacgagcagaccgcaaaacttcatcaatatgttccaactgagctttcgagtgagcttccctctctgctatatcagcaagctccgatcgaagtgactctaattctgcagctggtagctcaacctacagagtttgttgaacaagaccttcactaacggaaccccatgacagccgctgtggagtaaacaagttcaacatgaaagccgtccttaatttacttcgagtccgttgacggcacgaggaccttgaagattgatcggttccaggttcggcaatagatgatgttctgctctcaggagattctatacttgatgttggaacttgaaaatgatcagggatgatatttaattttgcaggaccgtcatccatgacattgaccttccaaaagaagaaaggatggcagtaatgataagagtgaagcgcgctttatccagttttgtgtttttgcccaaggtcatttcagcaaagcatatcgcaatcagaagtattaagtagatcagatcaacaattgcaaccctaatatcgagaacgagcgaggatcgtaagataatgaattaaatagaacatgatgcacgagagctacagctacaagtaacaagtgaaatttaagaatagagaaaagagggaaagagttgctcgagcc

SEQ ID NO: 12150 - DNA, 662 bp, Glycine max
  Clone ID: PAT_MRT3847_11097C.1
ccacgcgtccgcaattcacaagaaaattccagttctcatccataatggcaaacccatttgtgaatctgcaattatagtgcagtacattgatgaggtctggaatgacaaagctcccatcttgccctctgacccttatgagagagctcaagccagattctgggtagattacatcgacaaaaaggtgaatgatacttggaggaaaatgtggctttctactggagaggagcatgagacatggaagaaggagtttatctctgtctttaagcaattagaagaggcactaggtgacaaacctttctatgggggtgacacgtttgggtttgttgatcttggtcttatccctttttatacttggttttatacttttgagacatatggtaacttcaaaatggaagctgagtgtcctaaacttgtcgcttgggctaagagatgcttgcagagagaggctgtgtccaaaactcttcctgatgaaaagaaggtctatgatcatgtgggattgaaaaaggcatttgaatcataatagagggatttcttgcatcaaccaaataaaaaatttgcattttaaataaggtattgtaaggttttgtgcatttgtgtcagtggtttgttaggcttgggttattcgtggtttgctagacactttggtgtgccttctatgtaca

SEQ ID NO: 12151 - DNA, 447 bp, Glycine max
  Clone ID: PAT_MRT3847_110980C.1
gtacctcagcattcggctcgagtaagaaggcagctgcagctgctgttgctgctaagcttgctgcctctacatcctctgcccttatgcttacatctgttctttcttcccttgttgcagaagaagctgcctccatgaatggtagcttaaactctactgggtttacttcagggttacctgttttccgtccagagaaaagacaaaaacttgaaaaacaaatgcatgcttctgagtttaacagtactgatatggggagctcttcttttctgggcactttacaacaaccatcagtagcaaatgtgccactgacacactcaatcagcttgcaacccataccacaaccctaccaatgacacgctgcatttgcttcatgtcccccaccttctcattcccccgtggacccaccagcaaatcagtttgttcaatctactggattaatggttgggggaa

SEQ ID NO: 12152 - DNA, 708 bp, Glycine max
  Clone ID: PAT_MRT3847_110981C.1
atgttccaactgagctttcaagtgagcttccctctcctctatatcagcaagctccaatcgaagtgactctaactctgcagctgttagctcaaccttttcctgacctccagtattggaaccccatgacagccgccgtggagtaaacaagtttaacatgaaagccctccttaattttcttcgagtccgttgatggcacgaggacctaaacttggagattgatcagttccaggttctgtaatagatgatgttctgctctcaggagattctatacttgatgttggaacttgaaaatgatcagggatgaattttaattttgcaggaccatcatccatgacattgaccttctacaagaagaaaggatgccaataatgataagtgtgaaggccggtttatcctaagtagtgtgaggaaaagaagagttcaccaactctaatggtccacgtgattaaacaaagtccaaccttaaccaataccacatatttcatgaattagcaaccctaccatccagactgagcgaggatcgtaagataaagtcatcatttagaggggaaaaggaacctctaacctcttgaataaaataaaaggcacgccagctccaagttccaagttccagcgaagccggcatattattataagtgaaccctacaccatagagaaaagagcgaaagagttgcataccccccttctgtcgtcttctcgcggctcgag

SEQ ID NO: 12153 - DNA, 469 bp, Glycine max
  Clone ID: PAT_MRT3847_110982C.1
ctgatgcacgccgccggcggctgggagttcggcatgagctttaaggtcatcacttccgcaccttctccaatcacgctttctttgactggacagggagaggggcactatccgacgattcataaccacacaacagcttcgacttctacccataacagctgtcaccggatgcgtaccattcagacttcgaagacctatcattgctccgatatgcagatagagtggattccaacaactaatgactgcacacacgaaggatactgcgcatcactgtcttgaacatctgaggcacccggattgatccaattacatgtgtgaaaagtgttagccataatgagagcatcactacaggactgcctgagactagagacgtgcgcacgaacataactatgtatctactggatgaaagaccagagtgagagccatccaacccagagatgaagatagatgcagtagagcgcgaacgttgtct

SEQ ID NO: 12154 - DNA, 108 bp, Glycine max
  Clone ID: PAT_MRT3847_110983C.1
gaccggccggattttcttgactccaagcgccgtttatttccaaacagagcaggagaaccggggacacttcaaaagcccactatttaccgaccagaaataaaaaaacat

SEQ ID NO: 12155 - DNA, 338 bp, Glycine max
  Clone ID: PAT_MRT3847_110984C.1
cttttactcacaatttccattgcatcaaaacggtaacattgcataaccaaaaaataaattgtgagtaaaaggagaaaaggaaattttatcagaattttgtaccaattgattgcattttgagagggtgaaaaaggtctctgcaatgtattctttaacgaaattgaaaaattgtttcctttgatcctcccaagcaaaccgacattgaccttggggaggagttcaagttcaactcagttgcgcaggtcacattgaccggtttgattttgtaatacgatgatacaataggatttgaactcaagcaatgacttgtttggaatgcatcgacaatattgatttgt

SEQ ID NO: 12156 - DNA, 609 bp, Glycine max
  unsure (1)..(609): unsure at all n locations
  Clone ID: PAT_MRT3847_110985C.1
ccacgcgtccgtgcacttttcaatgattccattgacatccattatcctgtagttgagatgtcaaacagatcaaggctcagttgtgtttgctggaataactacatccagaactatcttgcctccacagactatgatggtgctgttaagctatgggatgctaatacaggccaagggttttctcgattcaccgaacatgaaaagagggcttggtctgttgatttctctttgttatgccctactaaatttgccagtgggagtgatgattgttctgtgaaactgtggaatatcaatgagaaaaacagtttagccacaatcaggaatgttgctaatgtctgctgtgttcagttctctactcattcctctcatttgctggcctttggatctgctgattactcagcatattgctatgatcttcgcaatcttagaaacccttggtgtgtgttggctggccatcgtaaagctgtaagctatgtcaaattcttggactctgaaacacttgtttctgcatcaaccgataacatgttgaagatctgggatctcaataaaacctctcctgtggntccatcaactagtgcttgcagcttaaccctgtctggacatactaatgag

SEQ ID NO: 12157 - DNA, 447 bp, Glycine max
  Clone ID: PAT_MRT3847_110986C.1
tttttttttgatcctttgttcacgaattctgatgagaaattttattgctaatgctatgtccaaggaaagcgttatttactttcatatcatgtacatgcctccttcaataccttctgaacacgcagaagcttaaagacgtagctttcaaacatcacctgacccgacaagctaattttaccatttttatgttttccaccactcatcgtggttcttccttcaggtgaccaaaatttcacttctgtgaaaaaagaaatgagtgtggcatgtacatccacagcataaggaaatgtgaactgaattttgatttcaaaagcaaagcaattagatggataaagccaaatgaatcgcataccttcttttgtactcttattacatttaagaggagtttcagcatcacaattgttctttcttttatctacttggctttcttgtttgtcaggcttcttc

SEQ ID NO: 12158 - DNA, 210 bp, Glycine max
  Clone ID: PAT_MRT3847_110987C.1
caacccacttttgggacgtgaatctgcctagcactgatgagaattcacaaatactcatcatacattttcaacaacttgaatactgatccacccaccaatctaaattcttatgcatcaactatctactctatattactacaccactcatacactaatcttattattaaaacttatacagcttaatagctacaatcattaataaataaagat

SEQ ID NO: 12159 - DNA, 380 bp, Glycine max
  Clone ID: PAT_MRT3847_110988C.1
actaattattggtggtaaaaaattgtactggaaaaaaggagcaatttgtatttggaaaacaaaataagggggtatggggaacaaaaaggcccggaaaaaacccaaagggggaaagataaacgggccctttggttttttataaacccgctgtgggaaaaaaaaaaaaagtggaaaaaattgtgtggccccaaaaggaaaaaagggggggggggggtggtgtctctttaaaaaaacacacaaaaagttttatatcgaaggttttaaaaaaccccctttgaaaaaaaaagggtatatttttttttgcggagcaaatataaagtgattataaagcccccaaagggggtacccacaaaaaaaaaaattgggaaaaaggggtggcc

SEQ ID NO: 12160 - DNA, 280 bp, Glycine max
  Clone ID: PAT_MRT3847_110989C.1
tctcactgcaattttatatttcctacaagaaagagagagagagagattgttacgataccaagggagaaaagcaaccaccgaacaaaccaccaccaacaacttacttcttactgttgttacattgccattcattttatctcaccacgaatcctaatgaagcttcgctacaacaccgtcacaaaacccgtcaactcctcttactctactctattctcgactctttctacatgtccctacctcctacctgctatgatacccttcccatctatgcatctttctt

SEQ ID NO: 12161 - DNA, 545 bp, Glycine max
  Clone ID: PAT_MRT3847_11098C.1
tcctctagagcggccgcttttttttttttttttttttttttttttttggggtcgacaaggggctgcccttgctcctatgtatcctcaggtgtgatgaggaattcaaacttatgtagtactttaagtctaaatgtttctgtattaaatagattttatgttttttgaaatatttattttaatcgcgaacaaagagtcattgaggcgttggatcttgaaacaacgtttaaaaatttgaaaagcgaattgagtcgttaaggcgttggaccctaaaacggtctcaagtgatatttgataaaaataagaagtttgggttgagaattgatttcctttatttggtttttttttggttattagtttctagtcccacaaaaggaggaagcgacttcatgacactgatgatcagctagaactaaaccttacaagtaaagtgaaattgcccaccgtaaatgggagaagatgagttcctataaaataacagagaggacccataagggtatatggattatattcaactcttaagaaaagaaaagaaaaatgaaaaagaa

SEQ ID NO: 12162 - DNA, 237 bp, Glycine max
  Clone ID: PAT_MRT3847_110990C.1
gaattcccataccgacccacaacgtatctacgtacattcatatacagtgctacacaacatagcaacaatgccccagccaggtgttcatgctattactatagacacatatatacacacagttctagttcaagtcttaaatattacaatgacctcagtgatcgtgacatacttcattcccgtactcagtctcataatgagcaacgtgttccccatttacctatatgttcatgcaatgct

SEQ ID NO: 12163 - DNA, 239 bp, Glycine max
  Clone ID: PAT_MRT3847_110991C.1
ttacccctcattcactatatttctaaactcacttctaccttctccatctcgctatttttacatattcggtctctcaacctacctaactcccttctcccaacttcaacccttactcattctcccaaatcaccctaccatctccctcttcatcacaaattacttcacaccaaacatcacattcccaaccatacccctacttcataatacaacaaccactaatatcataaatcttcaccaac

SEQ ID NO: 12164 - DNA, 156 bp, Glycine max
  Clone ID: PAT_MRT3847_110992C.1
ggacaattgatatgcactggggtgaatattatcttatttttatagaaggttccaacggacagctggaaaatgatgagggtgctggatacatacactctcgatgaactagtcaaagagacatacaacaatgggaatcctttgcctgaattcaacaat

SEQ ID NO: 12165 - DNA, 311 bp, Glycine max
  unsure (1)..(311): unsure at all n locations
  Clone ID: PAT_MRT3847_110993C.1
ctaaccncccanaccncngaacacnactcnanctcnancccaanaancatcccanatncaanatngtnacnacncnctcnacanatnacgacacacacnaatcaccgngantcnccncantacatanaccnntcaccantgccacnccacnaancaanacacaccaananacngcnncaaanccnttnnccattccacatnnttnanctncnactcgtcactanncnnagtcnnncnactnannncctnnncgngnnncnnctnnncnncaccaccanccntcctcnntacncatnnnncannncactact

SEQ ID NO: 12166 - DNA, 785 bp, Glycine max
  Clone ID: PAT_MRT3847_110994C.1
tttttataccggctgccagaagacgacagagggggacgtaaattcaacacatgaaacagacagagagaaattcacacataaaaatcatcacttcaaattaagctagagctagaaagattgagaggtagctatagagagagaaacagaggtcatggatggtttgcaaagatctgaggtgtctttcaggagacagggttcatcagggcttgtttgggacgacaagttattgtcaggggaattgaacaaagtgaacaacaacgaagaccaaaagggtggtggttctggtggtgaccttaaccttaaagttagaactacaccacccaacaccaccatccagagaagccgctccaacggcggctaccgcaccggaaaagtctcgccggcgatcgagcctccctctcccaagctctctgcttgcggcttctgcagcgctttcgggaaaacaagggaaaagggccgtgctaagcatcgatcaaggtaggttttttctcgtcgccggagacggtggttcatgcagctcttcaacacgttctgtttatgtccacttaagatttagggtttgagtttgagttcgtatatgggaatagagaagggtgaattgtagccctccgtttcgtctctgtttacgagttttggtttgttttcatgtttcaattgtctctgtggaagaagagatgatgatagtttggggtgagttgggttgtaatcatgtgtatgtttgttgggtcaaccaggaattttgatctctgtacaaagtaaaatctccaataagatctatctttcat

SEQ ID NO: 12167 - DNA, 278 bp, Glycine max
  Clone ID: PAT_MRT3847_110995C.1
cctaaacaactctttctcttcttccttctctcttcgttctccctcacgtagatctacaatatcgcatgcttagactataactttccacgctcatatcaaccatctcctcattctcatcatcaacaccttctactccaacaacgagattttccttcctgaactcatcatcaacacctcctatactttttacaaaattctattttaaaattttacacataataacaaactccatactcatccccaatttttcaatccatatatttccaaacaaaactatc

SEQ ID NO: 12168 - DNA, 625 bp, Glycine max
  Clone ID: PAT_MRT3847_110996C.1
ctctttttttttttttttttttttttttttttttttttttttttttttggaaaaataaatgggcgaaaaatattttacccatgcaactcattttttttatcggttattatacaaattctcagcgaataaaaagattaaaagaatgcaacggccaacaacttacccaaaataatggggcaaaaaaatggacgggttttgctgcttttttaatgaatgaaaatttcaacctatcctgctgttgtctctgccgaaaactaatgggggggcccagttcactgccacgtaaaacctgttcctccagctaaggacacgggtaaaatatgcaaagcgccttatcatccagctaacaaaaccagcaggggacaacccctttgaatcctttgactggcgaaaatcaaccagggctttgtagccacctactgatgccatactcccaagatgcctatacacaaaaggctctccaaatggcatgccttttgcaaaataagccttgcctccattctgattccctatttcgtggaacaattccacaaaaaactttccctgcctttcagcaacctgagctaaagctggaacacaggtcttccagtgtgttcaagaaaaccagcacaatctccaagggcaa

SEQ ID NO: 12169 - DNA, 351 bp, Glycine max
  unsure (1)..(351): unsure at all n locations
  Clone ID: PAT_MRT3847_110997C.1
cagctacttnagagttctaatgcggaaggggatctacaaacagtgactttntcangaggggggggggagnagangggcngtccatctttagaggctgagtctgagcaacattctgaaccatcaaatgcgaaccgagggtggattccttcanttaggtgcgaggctgaaaaatcatgcctgcggtctccccaggagtgacaaagcaagcgaggaaggaggtgtgcaaaggtgcacatncgaggagatgggtggtnggagnggtntggatttaacacnagttgagggggttnaggatcttctcangagattgggaaatatgtgtaacatcaagactgagctctgtgggggcct

SEQ ID NO: 12170 - DNA, 390 bp, Glycine max
  Clone ID: PAT_MRT3847_110998C.1
caccacaataagccattgaaatataaatggactgcacctgatattcgtaaattatatgaattcactaaatcaatacactggtaccaccatctgagaattttccactatagttaccagtcgcatacatatgaagcttgacaggttaaggcgtgacacaattatccccgtgcgaaatatgttcttctaggataatgcgaaattggcctgccaaacttcatatgtgcactttccattgataaaattaataacatgttcgacagccacaccaggttcaacaggtagagctgccaaatcctgcaagaatccttgtacaaaagctttgccatcatcatcgctagtagtcacaggatttataaaaaattgcaggaactgtcatgacgtcggcaacat

SEQ ID NO: 12171 - DNA, 1060 bp, Glycine max
  Clone ID: PAT_MRT3847_110999C.1
gttcggtctccttctttacatttttcgttttaaatcctcagccttcctccccgctactcctcttcattttttccctttaaatttctcattctctcttcctctttctctattctgcgtctctttctgaatatttgaattttttcgtttcaaatcctcagcattgaaaccaaaaatgatcttcaaatagcatcgccgaagactcaaatccaccccaatataaaggacattacattttttttaggtttctattaaaaggtgtctttgagagaatgtaaattgtaccgtttcaactcctcgacgttgaaaccgaaaatgatcttcaaatagcatcgccgaagactcaaatccaccccaatataaagggctctcacaaaaaggggtgaaagaaagatcgaaacttgaacactgaaaccacgttgaagttgaaagtggctgaaaggggttatggagagttccgttgggggagagatgcgtgaacgcgtggcactttaagagttggtggcagattgtgtgaagcggtggttcagagatgcactgaaagaggctaaggcaggggacataaacatgcaagtgttggtgggtcagatgtactacggtggttatggggttccaagagatgctcagaacggaagagtttggctgaccaaagcatcaaggactaggtcttcggtttggaaagtaggtgataagcacccaggttataatgcaagtgactctgattcggatgaattgaaggaggattcataagcaggcataatttggtttcatgctaaaaatgtataaggtctgcccggggcaccttacccatgcaatagccatcgtggatgttcgtgtaacttgcagtttaaaatctagtttttgatttgtgtatgatttgctactctaattattattactttggttatagagggaaggaaaaatgagttaatgctcatagtttggaggacatgtataaaatcattttgggtatcgtgactatcatgttaattacttgaatgtaatttgtcttaattataatatttttgaaggttaagttacgccaccattttttggataaaaa

SEQ ID NO: 12172 - DNA, 340 bp, Glycine max
  Clone ID: PAT_MRT3847_11099C.1
aagacaatacttttaaagtcattttttctgatcttacgatacaaatgaaggattctcttctcttctctctcactatcacttttcccactcccttttctcctttatttgactacaacactaaacaactccatgaaagagtggaactagggggagataaaaaggatgatggagtaataaatagtgtttttgagcagaggtttttggattagttgttgttgttattgttttgcgactgattcaggaggtggcaatgcaatagggttcccagaacagaaacgaccttctagaatccttgcaactcttcaaattgtgaaccaagtaatcaccattcttccctctc

SEQ ID NO: 12173 - DNA, 243 bp, Glycine max
  Clone ID: PAT_MRT3847_1109C.1
ttactggagacgagtgattttaaacggttgttaccatatcattgtgtggtacaccctataaaaaaccggttacactttccaatataggggtccggccaagggattcatatatggtattgaccccattacaaaagcttttcccaaacccaggtttaagggggggggggaaggcccaaaggtttccaggatggcccaggctttccaccttttaattattattttaaaatggaggcacattttttt

SEQ ID NO: 12174 - DNA, 580 bp, Glycine max
  Clone ID: PAT_MRT3847_110C.1
tccggagattacgcaaaaggaaaggcttgtgcaaggcctgaagatgaagaaagagaacctgagtttcctcacttgtgtttctggaagagagactcaaccggccgttaataagaccactatctttggagccatctcgagaagctaatacttattctgcacctgctgtgattcctcctcacatggcaattccaccaccgccttcaaagcacattgagagggagagatattttcaggaaaataaaaaggacggtgctactttggctggccacttgagtggcctctccttacatagtgacaatggcagcagctctggcagtggaagctttgattttagtgattgatctcttaacataagaacctcttttttaaacttttatttttcaattctatggtgttgggaattgaagttgatggtttctgatttagtccttttgtgtgtgtgcgggggtggggggagggggtgatatgcctgcttcagtttgtaagaatgcatgtaattaagggtgtttatgagatcatgtgctatgagaccggaggttttgtaagttgcaatcctagtgtgataatgctttctctttct

SEQ ID NO: 12175 - DNA, 888 bp, Glycine max
  Clone ID: PAT_MRT3847_111000C.1
cccacgcgtccgcggacgcgtgggcgcatttctgcgtcaatttctcttctcttaaacccattcataccttcatcatacatctttttagggttttcaatctgatttcctcttttaaagtagcacacgccctcgatctgaattgtgccgagaaaatcatggtggacgcagcagaacgtagatacttggaggatgatgattcatctctcatgaaaactatcaagggcgcaacaactggtttagtggctggaactatctggggtactgtagttgccacctggtatgatgtcccccgtgtcgagagaaatgttgctcttccagggctgattaggactatcaggatgatgggcaactatggtttgacctttgctgccataggaggagtctacataggtgtagagcagttggtgcagaactataggatgaagagggatttagtcaatggagctgttggcggatttgttgcaggtgcaactattctgggttacagaggaaggagcatcaaaactgcactttctgctggatcagcattggcattcacatctgcattccttgatttcggtgatcagacattaaaacatgatgctgggaaggagtatgcggcttacaccacaaagaaaagacccagtactgaagcataattgttaatgtgcacttttatgattgaagacatttcaagttgataggaaagagtggatcactcttttgttgacccagttgtttgttgagttggaattacatactgggctatctttccatattgtttcttttgtaagttgctggtgctgaactggttaaattccaataaatgtgctattgtgttagttcaccataacaaattactcaatagacgattcttccttggatggagtgaatgaaaccaagaagcgg

SEQ ID NO: 12176 - DNA, 1064 bp, Glycine max
  Clone ID: PAT_MRT3847_111001C.1
gcttttcttcatccacatcgcatttctgcgtcaatttctcttctcttaaacccattcataccttcatcatacatctttttagggttttcaatctgatttcctcttttaaagtagcacacgccctcgaggctaactgcagcagcgctgagtcgagggcgttcagtcgagggtgttcaccacagtttacactcacgagagtacccattttctcttctcaatttctcaagtgtgccgagaaaatcatggtggacgcagcagaacgtagatacttggaggatgatgattcatcactcatgaaaactattaagggcgcaacaactggtttagtggctggcactatctggggtactgtagttgccacctggtatgatgtcccccgtgtcgagagaaatgttgctcttccagggctgattaggactttcaagatgatgggcaactatggtttgacctttgctgccataggaggagtctacataggtgtagagcagttggtgcaaaactataggatgaagagggatttagtcaatggagctgttggcggatttgttgcaggtgcaactattctgggttacagaggaaggagcatcaaaactgcactttctgctggatcagcattggcattcacatctgcattccttgatttcggtgatcagacattaaaacatgatgctgggaaggagtatgcggcttacaccacaaagaaaagacccagtactgatgcataattgttaatgtatgcacttttaagatcgaagacatttcaagttgataggaaagagtggatcactcttttgttgacccagttgtttgttttgagttggaattacatactcggctatctttccatatttttcttttgttaagttgctggtgctgaactggttaaattccaataaatgtgctattgtgggttaatctatattacataagttctccataaccgtatattactcaatagttgatgttcttccttggatggagtgaatgaaatttgtaagattttgttatattattattctattggacgtcatttgtcttaaaaaagctcaggccggggggtgggt

SEQ ID NO: 12177 - DNA, 549 bp, Glycine max
  Clone ID: PAT_MRT3847_111002C.1
tatgggactccgcgcttcgcagcgaccctcggctgctcctgattcgatttgtggaagtacgagtaggtcactgcagttctgcgggcatagatgggttttgggacactgagtttatccgtggtggtccgatttgaggccactaatttcaatggtttgcccccatctcggtcgtccaattcgttgcctcatctctcgttcacaaagccatcttgggttgtgagaacggagtctaatgttcggaagaaaagaagaaagaagccagatccgcattgcgtggtatgtgaggggagtggaagagttgattgtcaccagtgtcatggaaaggggaggacaaaccaggttcatttggaaatgctcccgaaaggtgaatggccaaaatggtgtaggacttgtggtggaagcggtcttagttactgctcccgctgccttgggactggagagtataggtatatcatgggcttccagttcatgaacagggacaataatcaatcccaagaaaacaagtcttagcttcttttttttttgtcagggatgatggtatttggttca

SEQ ID NO: 12178 - DNA, 328 bp, Glycine max
  Clone ID: PAT_MRT3847_111003C.1
tcgttttatataaacaaaaaaaaaaaaaaaaagaaaaagtaaaaaattaaaaacaaaaaaaaaaaaatacaaaaaataaaactaggggcggccgctcttgtggttctcacttttgcgttccctgtgcttgcatcccccatcccgtctttttactgttaccttatctggggttccctgtttcggggctcctcttttccgccccgggtatccccccgctttttccctttttggtcgtctcgcattcctctcccatcttccccccttttccccctcctcctctgggtcacccctgggcgccccccccccttttccccttgctttcctcccc

SEQ ID NO: 12179 - DNA, 2238 bp, Glycine max
  Clone ID: PAT_MRT3847_111004C.1
aactacctttaatttatttagctgcaaattctggtgcccgtttaggtgtagctgaagaagtcaaatcctgtttcagagttggttggtctgaggaatctaatcctgagaatggctttcagtatgtatatttaacacctgaggataatgctcggatgtggatcatcagtgatagcacatgagttaaagcttgagagtggagaaaccagatgggttattgataccattgttggcaaagaggatgcccttgtctatgaaaacatgagcggaagtggggctattgctcgttcttattcaagggcatgcaaggaagcctttagactgagatgtgtgactgttgcaactgtcgtgagttggagttacctggctaggccttggaagagttgcatacaaatttgtgatcatcccattgggtaagctggtttctccaaagtaaacaaagcagttgcatccctcattgctaaagggatccgttgcttcagagtgtaaatgaaatgaggtcctggatggtaattaatttatgcagttaggggttcacaaccagcatcaccatgttccatctatttatttgctggtagattgattcttttcgtagagttgaatacaattataaagatgtgtaatcctctttttaatgcagatggagtatttcccagaaaactcgtgtgatcctcgtgctgccatttctggaaccttggatggtaatggaagatggctgggaggaatttttgacaaagacagctttgtggagacactagagggatgggcaagaacagttgttacaggaagggcaaagcttggaggaatccctgtgggagtagttgctgtagaaacacagacggtaatgcaaataatacctgctgatcctggccagcttgattctcacgagagggttgttcctcaagccgggcaagtgtggttccctgattccgcaaccaagacagcccaagcaatattggatttcaacagagaagagctcccgcttttcattcttgcaaactggagaggcttttcaggagggcaaagggaccttttcgaaggaattcttcaggctggttccactattgtggagaaccttagaacatacaagcagcccatatttgtatatatcccaatgatgggcgaactccgtggtggggcatgggtggttgttgacagtagaatcaattcagaccacatcgaaatgtatgccgatcgaacagccaaaggtaatgtcctagagccagaaggaatgattgagatcaaatttagaacaagagaattgttggagtgtatgggtagacttgatcagcaattgataactttgaaggtaaaacttcaggaagccaagagtaacagggacatcgcggcctttgaatccctacagcagcagattaaatcacgcgagagacagcttttgcctgtgtatacccagatagctaccaagtttgctgaactgcacgatacttccttaagaatggctgccaagggtgtcgttagagaagttctggactggtgtaactcccgtgctgtcttctatcagagactgcacaggagaattggtgagcagtcactgatcaacagtgtgagagatgctgctggtgaccaattgtcacatgcatctgcactgaacttgctcaaagaatggtatttaaattctgatattgccaaaggtagagcagatgcttggttggatgacaaagccttcttcagatggaaggataatcctgcaaattacgagaataaactaaaggaattgcgtgcgcagaaagtgttgcttcaattgacaaatattggtgactcagctctagatttgcaagctctacctcaaggtcttgctgcccttttaagcaagttggagccatcgggtcgcgtgaagttgaccgatgaacttcgcaaggtacttggttagaggacctttttcgtgtcttattattgtaccacatttatttgtgttgattcccttggttaagttgttatacccaagtgaaaggaggctgtagcatccctcattgccgaagggatccgttgcttcaaagtgtaaatgacatgagtttggatggtaattaatttatgcagttagaggatcacaaccggcatcaccatgttccatctatttatttgctggttgattgattcttttggtatatttgaataaaattgtaataatgtgtaacattgtttttaatgcataacaattttgggtggtcgatgtcacaaaaaaaaaaaaaaaaaaaaaaaaaaaaaaaaaaaaaaaacaag

SEQ ID NO: 12180 - DNA, 260 bp, Glycine max
  Clone ID: PAT_MRT3847_111005C.1
tcctctagagcggccgcttttgatttttgttttttttttttttttttaacccccctgaacttactatttgcttttcggggccctataattgttgatgttgatgggcacgttaaatagttcatgataaagaatttttgtgggtcatcctatttattttatcgggttggctcataataaataaggattggtcctattttagaatcttaaagaacccctatcccattttaatccctatattatttatgaattttgggatttct

SEQ ID NO: 12181 - DNA, 744 bp, Glycine max
  Clone ID: PAT_MRT3847_111006C.1
cacgcgtccgctgcattttagcgcgtaaatacctaaatcctcagcggcaacgtaaaagcttcagtttttgtatcaattcgagtgatccaattgcactattccttaattgcaacctcaaaaaaatctagggtttttatcgtaaaaagtagaaagtatagctacccttttcttccattctgatcctgcgcctcaacaaattcaaattcattcaggagttcgcgcagagaatcaatgggtcgctctcgtctcgagccgattcggctcgaggaggaccccaaccagaggtcaaggagaaaaaagaatgctgccagtggagagaattcagaatctggagctgcaggccaaggagcaggtgaagggaaaaaggctctgtaccactgcaattattgtaataaagatataacaggaaaaatccgtattaagtgtgccatgtgcccagattttgacttgtgtatagagtgcttttctgttggagctgaggtgacacctcataaaagcagccacccttacaggggtatggataatttgtctttccctcttatttgcccagactggaatgcagatgatgaaatcttgcttctagagggaattgaaatgtatggcttgggaaactggacagaagttgctgagcatgttggaaccaaaaacaaagagtcatgcatagaacactataggaatgtatacctgaactccccgtactttcctggtccggacatgtcttatgatggtgggaaaaacagaaaa

SEQ ID NO: 12182 - DNA, 311 bp, Glycine max
  Clone ID: PAT_MRT3847_111007C.1
gcttctccacattctttatactattaacctgcaaaggaacatcagggaaaacccaaaaagatggatgccccatatacacaaacaatctatcctcaatacaatgaggttcaggctcatattgcaacaaatttgataaaattgcctcttgactatttttaaactactaaaggttccatgttggacctgaaaatttctcaatctaaaatagcactctccaacaacacagttggtggaaccattctccatagtgatctattgacaaatttttttacaaagcgcctttttttaacaacccttcatttatgaggcac

SEQ ID NO: 12183 - DNA, 529 bp, Glycine max
  Clone ID: PAT_MRT3847_111008C.1
ctgaagcatccttattcagcaagggtgttggctgaaattttcacaaaagaggtggtgcatttacatggtgttccggcttcagtcctcagtgacgaggatccaatttttgtgagttcattttggaaggaattgttaagttaccgggaacatatttaaaaatgagtacatcctaccacccataaatagatggccaaacagtgaaccattgcttggaaacatttctccggtgctttgtagctgatcaacccaaaatgtaggtgcagtggttgtcgtgggctgaatattggtacaatactaattttcatgcgtccacagggaccactccttttgaggtggtgtatgggaggaagccacctgtgctgaatagatttttgccaggagaagtgagagtggaggctgttcgaagagagctgcaggatagggatgaggcgcttaagcagttaaagtatcagttgcagcgtgctccaaatcgaaagaaggatcaagcagactgtaagaggaaagatagacagtttgcattaggggaatg

SEQ ID NO: 12184 - DNA, 706 bp, Glycine max
  unsure (1)..(706): unsure at all n locations
  Clone ID: PAT_MRT3847_111009C.1
ttcgcctggtttttaaagtcggggtggcccacatgctccgcggcggcgtcatcatggacgtcgtcgacgccgagcaggcccgcatngnggaggaggccttatcgttgggaacataccatttcgtgtgtaggggtccaacaattttacaataaaacaatttttcaccaaaacagggtagtattatgttcttgaagaaaatagatgatacagataatcctgttgggctagccatggctcgttatatattgtagtgtatattcactatgtgaaaattaaataatagatctgtctatagcgctgttcagtcgctaaagggaggcaaaacatctatacattaacaaaattgagatcgaaaacagcaaagctgtaaattttcagcatttatagttcatcttaagacaacattcaatttgctctgcacctgttctcttactttccactgcagatcgtttatttcctcatcagtgagagaacgttccatagacctatatgcaatcctatagcagtggctggtcattcctttcttgttggtgaagttgtctattaattgcacctcctctacaagatccccggctattcctctaacaacttcacacagattgttttcagtaaatgattcactgatccagaaactcatgtccttgtaacaaggaggatactttgaaaatggcttaaatttgactcccaactgacccttggaaaactg

SEQ ID NO: 12185 - DNA, 496 bp, Glycine max
  Clone ID: PAT_MRT3847_11100C.1
gtaaacggtttccactataccactcttttggaatccaggacgtgaatatagcagaaactagtagtctactcgtatggtattagaaggtgcacttcaatacactactgaaacaggatggcttgaatgctgaacaaacatgtacgtgcatcctaaccccctctaataaaatgcgtggagatataaggttgatggtgtgcgaccaatagtttttgatttaaggacggaccctaagaggaactagaacactcttggagcttactagaaggacacacagcgaagacatataatgaacacaagatgtggcttgaatgcttaacaaacatgcgcatgctaagcactgaatataactagtggctatataaggttgatggcgtgctaattaacactagagaactaaaagaaacagaggtagtatttgtggataaaaaatatccaataaaaaaaggagtagaaaaacaccgctttattacgctgataaaaaatacacataaacaac

SEQ ID NO: 12186 - DNA, 361 bp, Glycine max
  Clone ID: PAT_MRT3847_111010C.1
gttgaggaatgatgtgtcctatgggaaagtagtacctctggtatgaaatgtcgctctagatcgggaataggctcctgaacataagctcacttacgatgaagggaatacctgaaagagctatatatcaggcgctggttcacagtctgcaggggatgttactgcaagggaagatgggagactctcatagagatcgataccagagttgagacctataatgagatctcttcaggactagggaaggaacaagctccagatagagagactcatatccgaaggatctcagttctgtaggagatgaagcaccctgctgtaggcaatatttactatcataaaaggatagaagcatgcctagcaggtgcta

SEQ ID NO: 12187 - DNA, 328 bp, Glycine max
  Clone ID: PAT_MRT3847_111011C.1
agacttgaatcacagtggagccttatacctgagcgaggccatggtgaccttgctctgtcgtagatctctaccttctctacgccgaacgccgaaaccatggccggaaaaggacagggatctgctctcagaatggatctctgaaccacctactcttgcgcagcagcgtggaaacatgaccgaattgaactatcttcaacgaccaacggaacagaaccacgccgccttcatgctattcactgacaccgagcgtatcatctgtgaagcggccaataatcaagtcgtcatgaaccccatgaacaccgaactcgatgccaagaggctgaatggc

SEQ ID NO: 12188 - DNA, 305 bp, Glycine max
  unsure (1)..(305): unsure at all n locations
  Clone ID: PAT_MRT3847_111012C.1
ccacgcgtccgctaaaatgaattgaaagttgaaaccgttccgtgctctatatgatgaggtgtttcttgctatggattttgcgcgcattttttgaactgcctcgacttgacgatagagaggacaccaggcgtaaggtactcacttgaaagatggggaggagaaatgggagttgggcgcattgggaatgagggaggagacgtagtgggtatgcatccagatagggnatcaagatgaggaagagagctgacaacaaagatgcccagatgcctctgaacctcatcgagtggtggatcacttctacctca

SEQ ID NO: 12189 - DNA, 568 bp, Glycine max
  Clone ID: PAT_MRT3847_111013C.1
gggatgcttatagttacccttaattagattgacatcacccaagccatagtattagtaactcattcccctgcagcttcatgcaaaaattggaaaagaatggaagtacatttgtggtagggaaaaagtaccgccaagagaaaataacaactcacaaacccactcccaatgctaatttcctatcaaaatttccccactatctacatgatcccgcaaatcaaatcactataagacacatgtttataatatgcctaattatgatataatcttcgtactttgtgaataagccttcggcatataggacacactatgctctcctcatctaaaatcctctgtgcacagtcatagcaagtggcacaatgtccacaaggaacaaagaagctactgcgttgttcatcataacaaatgcaacacaatttttcatcatataactcctctgaagagctactggatgctcctgaatcttcttcttcatcatcttttgcatttgttccatatgtcaatcgatttgtctccacttgcatcaagggctgagtttcggtttgccttgcaactacattacttgttctgt

SEQ ID NO: 12190 - DNA, 358 bp, Glycine max
  Clone ID: PAT_MRT3847_111014C.1
ttatgggggggcttcttgctacggttcgacaaaaaatgggggcaaatgggaaaggccgtacgagactggagatgccaaacacgtgacattgtttctgagacacactgcatatgccgctgacgaccagctattgcgtaccattggaaagtggcagattgcgcagttgtacaacaatgctcacaggcatcagtggacggatctgatcaaccggatctacatgtctagacccggcaccttcgccattgcatactttgagatccatatgaacttcctctactagcgcttaaattacctcacgctaatcgtgttgacacatggcgggtttatcattacacatgggatcacgctattcttcctg

SEQ ID NO: 12191 - DNA, 368 bp, Glycine max
  Clone ID: PAT_MRT3847_111015C.1
atctcatctcatagatgtctctctgacccatgatgcaaatcttaactgtcattaatcttctcttcgtgggttaagcctaaggaaaaccacaccccatcactgttcaaggtccttttcttctataacacaggtgtgaaaggtgaaagcagagtgtgaatatcaggtcttgtccttttttcgaaggtgattcactatgtcgattattcttgtgcataggctaataccaagcttctatatcagcacctaacagattacggcctattgcgttttggcattttaatctatgccatctgacatgatttctctgtttgtttgagctcagttgtaattaaaaaaaccccactcttgtcaaggtacgctctctcact

SEQ ID NO: 12192 - DNA, 423 bp, Glycine max
  Clone ID: PAT_MRT3847_111016C.1
agccgggggaaattagtagggcctttcaaggtaggcggaaattggggttggaccaacgccttaatggaaaagctttgcccatttttacactggtccatggtattatggcaattaccaagaaaaatgatgggtattattttccccaaaccaattatgaaattcttaaatgggcccaacttatttggagaaccttaattttaccgaaggatggaccaaaacctttggtggaaaaaatggatttcaccaaaacctccaaaaaaaaatggaaaggggttttggtccaattttttcccagaaaacctaagggagaggtggggctgggtggggtccctttttcattccttggaaaggacctccatggcccaaaatttcttccttcttttttttgtcaatggactcgacacctagtggttaagctgcctt

SEQ ID NO: 12193 - DNA, 389 bp, Glycine max
  Clone ID: PAT_MRT3847_111017C.1
cggctctaggcgagaagaccacagaaggggaatggtgagaatgagaagttttgtaacggggtgcagcgatcttgaggccaaaggagaagaggcggggctaatccgaggctgatcaatcccccaaagcatttgaggagggagcacgttgcaactgcatggccaacccggctcactgcattttgttggtaatcactcagcggctggattccgctagaggcccacacctatgagaaaattgatacgagttgacagcgaacttatcgtaacgtgtacacacctaaagacatgatgacaggtaaaactgttgccctaaagaaggttccatttgacaatttggaacctgatagtgtcaaattcatggctagagagattcttattttgcgaccatt

SEQ ID NO: 12194 - DNA, 251 bp, Glycine max
  Clone ID: PAT_MRT3847_111018C.1
cccactcgttcgaagactcgctcgattactcatgcggctgatctatgctgcttaacggagcaataataaagcaaagcaaatatggaagaaaaaagaaacaagagataccgtaagcaaagaaaaaagacaacataaactgattaaatgaggggacctagctttgaagaacaccatgatatcttacacataatcgaaactggaaaccttctaagaggcggcacaaaagctcattctacagacctagcatttac

SEQ ID NO: 12195 - DNA, 124 bp, Glycine max
  Clone ID: PAT_MRT3847_111019C.1
aacagacacttattttcattccgtaccccttccaatagatcacaatcatccgtcataaacatcacctggccgtcattctggctgttaacagacatcttgcacacaaaagggcagacactctact

SEQ ID NO: 12196 - DNA, 291 bp, Glycine max
  Clone ID: PAT_MRT3847_11101C.1
aaccacggatgctataaaacgacagaacggggggggagtttttttttggttcacactataagggattttcattaccccataatttagtaagtcataccaatgtttcttaaaccagatacatcatccattcacaaaaaaatttggatactcgtgtttcaacctacaacataccccaattttatcctggtggacagtaatccttacaaatggtggcatgcctggacacaattatactatccttattatattcccttcaagttttcttaccaaatgcatgacttagatctttat

SEQ ID NO: 12197 - DNA, 419 bp, Glycine max
  Clone ID: PAT_MRT3847_111020C.1
cgcggcgttacctggtacagcaggaactaggctttggggggccatttctgaacctatttcacagcagactgtgtggcatcaaatggccacagtgggagcaccattgaatcttgattctagcaggcagagcttctgacattttctagtgaccttgtcggtggaggaattgtagaggacgaaactggagacaggatcacacgtaatacaggctcactccaagtaagtacattgttgtgggtttgcgggcacgattaaaggctgcataatgcagaagactgtgaggactcggaatgcagcagtcaaaacgccatagagggccgaatctagccaggagagttttagaaacagttctattgcccaacactgtggaggaatttaaggggacaaaactggagccccgatcacgggaatgcaacttc

SEQ ID NO: 12198 - DNA, 249 bp, Glycine max
  unsure (1)..(249): unsure at all n locations
  Clone ID: PAT_MRT3847_111021C.1
gctcgaattcgctcggggaagttccaatctggtgggttccaacatattgccaacccctttatggtcttaggaggacagnnaatcccaccttgttatgtaaaaaaggagcaaccgcggacctttacacctaaagagtacacgggtgggggtttcacaaaccatattagatcttccccctaaattcaccgctcggtaatacacacgaacacagccccctccacgagagctctaaaaccccccagaaaacaa

SEQ ID NO: 12199 - DNA, 799 bp, Glycine max
  Clone ID: PAT_MRT3847_111022C.1
tacggctgcgagaagacgacagaagggtacggctgcgagaagacgacagaaggggagatttaaaatggctccaggagattgcaaaattctcttccgtttcaggattagggtttcaccgttacagtgaaacatggcaaaaccaaagcgaatctctctgcgtatctttgcgctgctcctcttgatttccacctcttcgtttcagcttctccgcgcttccgatgacgccgatgatgatgcgatcttctatgattcgttcgacgaggattttgaagaccgttgggttgtgtctcagaaagatgagtacagtggtgtctggaaacatgccaagagtgagggacatgatgattatgggcttcttgtcagtgagaaagcaaggaaatatgctatagtaaaagaacttgatgaggccgtgagtctcaaggatgaaacagttgttcttcagtttgaaactcggcttcagaatggccttgagtgtggtggtgcatatctaaaatatctccgaccacaggaggctggatggaaatccaaggaatttgataatgaatctccatattctatcatgtttggtcctgacaagtgtggtgccacaaacaaagtacacttcattttcaagcataagaatcccaagagtggggagtatgttgaacaccatcttaagaatcccccttctgtcccgtctgacaaattatctcatgtgtacactgccattttgaagcctgacaatgagttgcaaattttgattgatggggaacagaggaggaaagtaaatttcttatctgctgatgattttgaaccccct

SEQ ID NO: 12200 - DNA, 480 bp, Glycine max
  unsure (1)..(480): unsure at all n locations
  Clone ID: PAT_MRT3847_111023C.1
atgaatttgttttgctaagatgagacttgttttgtagtaatggtttgatcacttgcttttcctcttgttgactgctttatgtgtctctaataagatgaatttgttttggaaacaaattcattggttcttggtcagaaattggtatggattccactgccaaactcaaatatgtgtaaggcacctaaagccctttaagtacacttcttatttatctttgggtctgtgtgcatgcttggtctattttgttattcataatttctctagcataaataatttttttaattataggacaactccaaaacctccaggcaatatcactgtcaccaaccctaactatttcctctaactttgaggtacattcccctaaggtttattatttgtgttgactgatggtgtgcttattgngtgcatgtgctacgacatggttttccattctttgacttttacacaatatgtttgtttatttccatactcaattga

SEQ ID NO: 12201 - DNA, 242 bp, Glycine max
  Clone ID: PAT_MRT3847_111024C.1
atggtggcgctaatcgcggccagcgtggcgggggaggaaaagaaaaccaggacgctatgacgttggggagggcgaagcacggaaaaaagtactgcgaccgagggcgggaatgtacgggcaggtcaattcactgcaggggggggagtattacagcagaggggcagaactacccccgggggaatcaaatgtaaaagcggaactccccaatggcgcacgcccacgaaccgggggactaccacaac

SEQ ID NO: 12202 - DNA, 345 bp, Glycine max
  Clone ID: PAT_MRT3847_111025C.1
tccgcatgcgcgccatgcgtaacgcttgaagcgtgactgcttgtacattcaatatcctgtcttgactgtcttaccagaactataatgccagaccgctgactgttacacaccgtagcatggtattatcaaggatgcacattttattactcgcgacgcactttaagccatgatttaatgagatagacaatgtcgcggggcgaggatacatgcttgttgggctcttttgcgatcaatggatcaatgacgttttgagactcacacaggcgaatcaggacacctaatcatcttactcaatggactacattgagttatacacataactatgtataactctagatagaacat

SEQ ID NO: 12203 - DNA, 243 bp, Glycine max
  Clone ID: PAT_MRT3847_111026C.1
agatctcctgacataaaaggaaaaaaagacctgttcaaaccgggaacatgttcaaaacactagaacgggcaaaatgccaaaattccgtcatctggagggggggggcccccggggaaacacccaagaccaaagagcggcctaaaacggggggggtgggggcccaaacatgacagcgcacatagtttttataatgatgtaaaagggcgagctgggggagaagcgggaactatccaacaccccact

SEQ ID NO: 12204 - DNA, 353 bp, Glycine max
  Clone ID: PAT_MRT3847_111027C.1
ggaaaaaagcttagtctttaattaaacctattggaaaacaggggatacccctaaataggggcttaatgtcataaaagggaatgaaattgaccaggggggaaatatgcatttccccatgatgggaatggggagaggggatgggttaaaattccccgctttttaaagctggtatattactacccaataattgttggggataaaaaaatacccctatcccaatgactaagcccgtgtgttagcatccgcttcctggtgagacgggacactttgctctactcttccatcctagaataagagcgccgtttctatgttgaagcctataatgtatattgaatccattcagcatattccta

SEQ ID NO: 12205 - DNA, 714 bp, Glycine max
  Clone ID: PAT_MRT3847_111028C.1
tattttttttttatttttttttttttatttttaactaatattcttcttaaaaaataatcatgttgaacgcacaatcaacgttgaacatctacatttctcccagtataaacaataattaatgcagtgtatttcttagcaaaataaaattaatgcagtgtatttaacactatgctaataattttttataacaaaacattatttacaaatatttttttttgtataattaaaaatccataaccgggcatagcacgggtaactacactggtacatatacatatgttgctaatccaaggcaatgacaaaaacgcataacaagatacctttttgctaaactgacagtatgtaatctgcagtttcaattttaattgacttattctatgtttttaaactcgattttaaaagtgataatatgtaatctgcagttgagctgattacccaaggcaatgttcttacatatttttattttttaaattcacaatcgcataagtaaccccaaaaatgaaaaagcattgagaacgtttcagcttccgcattgagctgatgcagctaatttcagaaacattcgacaacattgcttgcacaagagctgcaagtttaacttatcctttttaatttgaaccagctagaatataatctgtgaggtcatttgacatgtgttgattcacaatttaaccacttgaggaaggaagcttgggtccatggagacaacaacct

SEQ ID NO: 12206 - DNA, 435 bp, Glycine max
  unsure (1)..(435): unsure at all n locations
  Clone ID: PAT_MRT3847_111029C.1
ggggaaaccccgggggaccgaaccggaaaaaccgggncgacccacgcgnacgcccttttgaccggaaagggacacgggagaccagagggggccacactggcatngcctgaaagtcaaccaccgaactaacaaacctactaccctttggaattggaatgcaaaccctgtgaagggctcgacacgccacacacaggcacaacagcaacagcacgcaaacaccatccactcactccccgaatcccacgcaaagcaccacctactgaggggcgaaaccctaacaccaacacaaggcgacccgaccacggcacttgcgccaccgacgaagcccacaaccggcgaggggacactcgggacaagcgagaccaaacctaccccctcgaacaacgcgtacagaagagccacaagcaactgggaaggggccaaaaccccgaaaaa

SEQ ID NO: 12207 - DNA, 686 bp, Glycine max
  Clone ID: PAT_MRT3847_11102C.1
atgtcacaactacaacaagcatcgaaggatcaatcctgaagaaacttgtgttgtataatgaagaagaatgaagctgaactatctacaaagacacatccccaatattcattctagagcaactgctatagattaagatctactactcaaaaaaatatcagaaaccctttctgatatatgcttcactaagttgtactttagaatgaaaagttcataatgacttttaaattctggcagaacataacacagctggcacaaattttgaatttctgcaacaacttacaatgtggtcactacatccaacaggcagtttaatgaaagtcttcttaaaaaagtccaagttgccattcgaagcaaacaactccattgaagcaagaacaaaaaatatgaagccttctccgagtgagaaaatttgcttctgcctctttgctgagagtcacccacttccaacttgagcttacattgtaaatatgagaagtaagatttgtattcctgagtggaaaccttctattttatgaagaatttgtatatgtgtagtaccttcacagaaaacctctttttctataatatgagataagtctccaatccaaggtcaagggtttggcgtttgtggtgagggaaacaactgtgtatgccttaagttagtggggattgtcattgatttaaggtttgagcctctgttctaggac

SEQ ID NO: 12208 - DNA, 235 bp, Glycine max
  Clone ID: PAT_MRT3847_111030C.1
agaaaaatctcttttaaatagaaaaatttcccaaacttttcaccggggaaaaccctagcccaattttacccttccccaaattcaattcctttaaatccccttccttataattcccaatttactttggtccaatcccttttcatccccattggacaacatggaaaacaacccaaggtcccctccaaagtcctttttccttaaaccggcaaaacccttccacaccgcccaaaacccc

SEQ ID NO: 12209 - DNA, 1709 bp, Glycine max
  Clone ID: PAT_MRT3847_111032C.1
ctcgctttcaaccttacttttctctgtgagcattgtccgctatggccgaagaattggtgaagggctctgctcatcaaaacggcgacgctggcataaccctcgatcgccccaaagctctcaacgccatgaacctagatatggatgtaaagcataaaagctatcttgatgaatgggaatctgacccaagggtcaaatgcgtactggatgatagcagctcgcctcgagccttttgcgctggtatgattgaggcatcgagggaaataaataattgattaatcttttaatgcacagcgcgtttctagcttaaactgattaaaaattagcttcttttgcagatactctgctttcgatttgaggttatttggtttttgagtgctaggtaaggttttgagagtcaccattggtggtcaatgcaggtatggatattaaaggggttgttgctgaaatacaaaaggacaaaaacactcctttagtgcagaaggtcttcactgctgagtattctttgatatgcaaaatttctgattacaagaagccatacataagcttcatggatggaataactatgggttttggaattggtttatctggtcattgccgctatcgcatcataacagagagaactgttcttgcgatgccagaaaatggaattggtttgttccctgatgtaggttttgctcatatagcggctcaaagtccaggggaaggatccgttggtgcttatcttggattgactggaaagaggatttctactccttcagatgcaatatatcttggccttggaacacactatgtgccatctggaaagttaggttcattcaaggaggccctcttggccacaaacttttcccaggatccacatcaggacatcaaagtacttttagcaagatatgagtccaaccctgagtctgaggcacagttgaaattgcttttacctcagatagtttctacatttggaggaaataaatcagtcactgaaattattgaggagctaaaaaaacaccagtcaagcactgaccctaatgtcgtggagtgggctaatgaagctctccaaggcctcggaaaaggtgctcccttttcccttttcttgaccaacaagtacttctctttggttgcctctgcagtggggaataatgacggtgaactatccacgcttagtggcgtaatgaaaactgagtatcgtattgccttgaggtcttcactacgacatgatttttcagaaggtgtccgagcagtgctggtggacaaggatcagaacccaaaatggaaaccatcaagcttggaggaaattgatccgagtgaagtggaagccgtctttaaacctttaggaccggaagttggggagttgagagtgtaattttggatggaaaatgtgcttttctcatttcttcaaatgcattatagaattgtaagcactgcataaaataaatagatggtgttttcattgggtctggcatccagttcaggtccagcgtgttgcttgtactgtcaccatataataacatgaggtccatgtttttggaaaggtcaaatgatcatgttgcttccattatacccatttggaagaaatgaaggctagtttcctcaatcaacatctctaaatgtactcaatgaatttacgtgaattatctcattaagaattttgcgcaaaaaaaaaaaaaaaaaaaaaaaaaaaaaaaaaaaaaaaaaaaaaaaaaaaaaaaaaggaaaaa

SEQ ID NO: 12210 - DNA, 152 bp, Glycine max
  Clone ID: PAT_MRT3847_111033C.1
caaaacggtgaaacagttcttactagacctgtgtccttttttgagtcttacaatcttacaacgcagacctattatctagctataagaaatatacctatgtactaatgatctggcaaggctgatcagattatgttgattgcataatatttttc

SEQ ID NO: 12211 - DNA, 718 bp, Glycine max
  unsure (1)..(718): unsure at all n locations
  Clone ID: PAT_MRT3847_111034C.1
aaaaaaaagagtatctcgtagcctatcaaatttnatgcctcgtgcttcttctcaagggcattgcatacccatggaactgccactacagccttcagagttagcacaaccatgtgcgcctcctgttgtccttgatccatcatcaattcctgtaattcaagatccggtttcatcatctgatccatcatcaatcctgtaaatcaagatccggcttcaccatctgatccatcatcaattcctgcaaatcaagatctggcttcaccatctgatccatcatcaattcgtgcaaatcaagatccagtttcaccatctgatccatcagcaagtcctgtaactgaagatctatcattacacaccattgtccctccatctactgttactcaccaaccccttgccccttattttcgtcattgtagaggacgagaatgggctgtacaagctatagatcaacacggaaatacaaaagagattcaggtgacaaaagcagatgtgtttctgatgcctcctggtcaacacatagtagtgccatttgatggacaattgcgagcctatggagatgcagcaacactgctttctggagcttgtggacgaattgtcaccgattcaaaaaatgttcctattaactttgaaagttggacaaaagtgccaaaatcatacaaggataattgctttaacattttaaagactctgtttcattttcaagcctctgaatcaactgcta

SEQ ID NO: 12212 - DNA, 609 bp, Glycine max
  Clone ID: PAT_MRT3847_111035C.1
ctacatcaagagagaaattaacatagagagagatgggggcttgtttttcttgtaactcatcctccacgttgaagaatatccgtgtggttcatctcaatggttatgtagaggattttgatcaaccaatttcagtgaggcaagtaattggatacccccaaaaacactttgtttgcacttccactcagcttctttccccttgctcaacatcaatgaatggagacacccacctccaacctggtcaagtgtatttcatgctaccatactcggtactacatgccgatgtttccccggtggacctggctggccttgcaaagagactcaccgcaatagcaaaatcaggtcctttgtcaagccaaacccaaacattttggaattcaccctccaggagtcctggtagagttggggtggcagagcaatatggtgttggtatgatgaatattggaggaaaaagcccttctaaagtgcaaccttggaaacctatcttggacaccataacagagaagccattccataagagaactgaaccggatttgcaagaaagttgttgatgtctggaagaaattggatttaggcaaccagataggactaagacatgttacatgtaaggtg

SEQ ID NO: 12213 - DNA, 942 bp, Glycine max
  unsure (1)..(942): unsure at all n locations
  Clone ID: PAT_MRT3847_111036C.1
tcgaaccaatgtgggagaagatggagagtttgggaccactattgcttcgttatcctccatcagcacagatgtaagtcttagctgctacttaatttttctttggctcttacacccactcttctagctccaaggccacacaaaaccaaaaggaacatgggaacaacaactgaccttaactttgattatgttttgagtcaacgcaaagcatttgatgaaacaaaagctggtgtgaaagggcttgttgatgtaggtgttaagaatgttcctaccttcttccatcaccaaactgagaagtttgagaaggcctcaaatataggcaacaaaagccatgttattccaatcatagaccttgcagatattgacaaagatccaagtaagcgccaagggcttgttgacatagtgaagaaagcatctgaaacatggggtttctttcaggtgatcaatcatgatatccctttgagtgttcttgaggagatgaaaaatggggtaaaaaggtttcatgagatggatactgaagccaagaaagaattttattcgagagatagatcaaaatcctttctgtataatagcaattttgatctatacggctcacagccagcaatcaattggagggattcttgtaggtgtttgttgtatcctgatacccccaaaccagaagaacttcctgtagtttgcagagatatactgctggaatacaggaaacacataatgagacttgggattttgctgcttgaattgttttcagaagctttgagtttgagtccaaactatctgaaagatataggatgtgctgatgggctattagctgtttgccattattatccttcatgtgctgaaccagatttgactatgggaatcaccatgcattctgacaatgattttttcacaatacttcttcaagatcatatcggttgccttcaattaagattgaaaaacnaatgg

SEQ ID NO: 12214 - DNA, 247 bp, Glycine max
  Clone ID: PAT_MRT3847_111037C.1
attataaatgcttttacttttatcagacctggtgttgccaaaacaatgggaaggggtgtgcctgtttacttttaaagtttatcatttgaggccagaaattagactcacaatccataaatatctaacgcggcggagtaaaataacctgggagccatatgtggctcttgggttataagaaccaatataataattaacggcctttactttttcgggggctttcgcacttcatggagggaccctatagggg

SEQ ID NO: 12215 - DNA, 580 bp, Glycine max
  Clone ID: PAT_MRT3847_111038C.1
cccacgcgttcgcaagtacttgtttatgtgataacactttgaatttgattatcagaatgtaaacgcatgcattttagagttgaaaccactagcctaatttggttgaggtctctgtcctctatgtgcaattaatttttctgaaattgattcagtctatcttggaagtaggtatgcaaccccaaggttataaattataaattggccattttcttattgctcagtggtaccctcacgacatcaataaagacgatcctcttgtcatggcccgtcaagaacaagaacgcttatcaaagcttgaaatgttgaagcggcgaggaaaaggaccacccaagaagggccaaggaaggcgtgctgccaaacgcaacaaataaattatactttcacctctctctttctctttggaattattttgtgggtactcttttgagttttacttttttttatcagaatgtaaactaatgcattttagagttgaaaccactagcctaatttggttgaggtctctgttctctatgtgcaattaaattttctgatattgattcagtctatcttggaagttggaatgcaaccacaaggttat

SEQ ID NO: 12216 - DNA, 500 bp, Glycine max
  Clone ID: PAT_MRT3847_111039C.1
atatttcaaacaattcttgcttagctctcacaagcaagctttgacaacgatgaaggtcagaacaaaactctcatgagatgtaacattaatgttttttgagttttctcagagctctagactattttagttgcgctagggcttgtatatagttgtattaacttttcctttcatgttaattagaagtaagtaatcctcgttgagtcttaacttgacagcttttttgatttcttgtgaatcagaaagtagtgctaaaggtggagttgcacgatgatagagtcaagcaaaaggctatgacaacagcctctgccctttcaggtatcataattttcacactactaatacaactttgcttttgtttccaataacaaaatacatggcatgcatcatcaaggattcaatgatttttcaacaaaaataattgtatttgtaattatttttcaggggttaaatcaatttctgttgacctaagagacatgggaatgatcttatgaggggacact

SEQ ID NO: 12217 - DNA, 272 bp, Glycine max
  unsure (1)..(272): unsure at all n locations
  Clone ID: PAT_MRT3847_11103C.1
ttcccggctcgacacgangtaggtggacgccctattcgtctattatatggtcaaactttttaacgaaatgaggctaggcttttacatataaaatgcacacattaacagcaagctgaaaacctttaccttctaactggagcaacacattcctggtatcttaaagcagccattgcaacacagattacagctactgcacgatacgctatctatgtgatcaaagcaggtcctgcttaacgcataacaagacagctatacccttctttcattctcat

SEQ ID NO: 12218 - DNA, 299 bp, Glycine max
  Clone ID: PAT_MRT3847_111040C.1
aaaccaaaaacactttgggattatcccttggaaattgcattgagctgaaagttaaaaaggattaaaacgagttatagggtaacaaagaagaggctttgccaatcctgtaaagaaggatgaggctttttccatacaaagcttctctccggctttgattttccattgaaaacattggataagcgatgcaagcgtgacttgtttgagcgttaatgcaagggaagatccagggcacccccttctgccaaacccaaacggaagatagctgaaatcagcggggttgatcccattcaaaaaccttt

SEQ ID NO: 12219 - DNA, 565 bp, Glycine max
  Clone ID: PAT_MRT3847_111041C.1
cctcgtgccgaattcggcacgagggagagagagagagagagagagagagagagagagagagagagagagagagagagagagagagagagagagagagagagagagagagagagagagagagagagagagagagagagagagagagagagagagagagagagagagagagagagagagagagagagagagagagagagagagagagagagagagagagagagagagagagagagagaattcggcacgaggttcggcacgagggctctagggggaggggtcacattggggatatggggagtgggaactctgcgatcaggggggttgcctgctcaaggggaggagtggtatcctctctaagggggaggatgtgagcgctctatgtgatgcgcaaatttgcgttctctactttggggtctctgcgcatatgcttgtgtgtgtctctgcctccacgaatgagattgtcgccctgtccagatcccagagagcctctgtgaacacactgtggagaggttctggtgagaccctccgcgatgctattgatgtgatcctgagagaggatgacggg

SEQ ID NO: 12220 - DNA, 902 bp, Glycine max
  Clone ID: PAT_MRT3847_111042C.1
ccacgcacccgaaaacacaattcatttccttgtttccttcccaatcaacacatagaaccagagtgcaaagcttttgcagtcagcaagagaaccaaaaaaaatcccacaccatggatttgctcctagaactgaaaaccgcactggaaccgttccgcgaaacactattgttcacaatcccattgactctattgctgctgggcatagtgtcccgaatccgcagaaaaacggcgccgtatccaccgggcccaaaaggcctccccctaataggcaacatgaacatcatgaaccagctcacacacaaaggcctggccaacttagcgaagcaatacggcggcgttttgcacctccgcatagggttcctccacatggtggcgatctccaacgcagaagcggcgcgtgaggttctccaagtccaagacaacatcttctccaaccgccccgcgacaatcgccatcagctatttaacctacgaccgcgccgacatggctttcgcgcactacggtcccttctggcgccagatgcgcaagatctgcgtcatgaagctcttcagccgcaagcgcgccgagtcatggaacaccgtcagagacgaagtcgacttcatcatccgttctgttacgaacaacctcggaagccccgtcaatgtcggagaactcgtcttcaacctaacgaagaacatcatctaccgcgccgcgttcgggtctagttcccaggaggggcaggacgagttcatttcgattcttcaggagttctcgaagctcttcggggcttttaatgttgcagatttcgttccgtttcttgggtgggttgatcctcaggggctcaacaagaggcttgtgaaggcacgtgcctcgctggatagcttcattgacaagatcatcgacgagcacgtgcagaaaggagga

SEQ ID NO: 12221 - DNA, 982 bp, Glycine max
  Clone ID: PAT_MRT3847_111043C.1
ggaaaccatgccgcagcattggctttggctgcaaaactacgggggatcccttcgtatattgttattccaaaaaatgccccaacttgcaaaattgaaaatgtaaagcggtatggtggtcaggttgtctggtctgaagcctctgttcaatcaagggaagaaattgccaacaaagtgtggcaagaaagtggtgctatctttatacatccatataatgatggacgcatattaagtggccagggtaccatatccttggagattctggaacaagcaccacaaatagatacgctagtagtacccataagtggtttgttcacttttttttctgacaaattgtgaaccaaaatgttgtaaaaatcgcataaattccaaaatctgcttcttgattttccaacaaatgaaactgcaggtggtggtttgatatcaggaatagcattggctgccaagtccattaacccagctattcgtatttttgctgctgaacctaaaggtgctgatgatgcagcacaatctaaagcagctgggaggataatacgattgcctgagaccaacactatagctgacgggcttcgagcatttcttggagatttcacatggcctgttgtacgagatcttgttgaggaaattataactgttgaagacagtgaaataataaaagccatgaaactgtgttttgaaattcttaaggttgttgtagaaccaagtggagcaattggccttgctgctgttctatccgatactttccagaaaaatcctgcatggaaggattgcaaccatataggaatagtagtttcaggaggcaatgttgatctggccatgctttgggattctttgaacaaaggaaagtgacttctttttgttttgcttatgtggaccttcattgttctctatgtgagtgtaaatgatccaatttgtatggacaagtctattccattccttttagttaacttgttgggttgaaattcttgtttgtcaagaattattt

SEQ ID NO: 12222 - DNA, 247 bp, Glycine max
  Clone ID: PAT_MRT3847_111044C.1
tccctcgtttccccaaatgtcgtcaaactgctcactccacctcagtctcataagagacttcatcctcgtcttatcgctccgtcacacgtgcgagcctcgttaccactgcgctaatatcccgagaaatgtctccacggatctcgagatcttcgacactgcatcaatggctagaccactatgggaaagtttactaggatgcagcataacactacaaacgaatcttagtattcaacaacactgtgcagtt

SEQ ID NO: 12223 - DNA, 908 bp, Glycine max
  Clone ID: PAT_MRT3847_111045C.1
caacgatgacgatgacgatgacgacgataacgatttggatttggaatgggatgaggatgagaccgaggaggatggctcggagcatggcccaaagttgcaccaaaagaggaagttcaaaatcaagtggaggctcatgatggagtggattttgttcctcaacatattggcatgcttggtgtgttctttgaccatatcttccataacgaacatgcaccttttgggattggagatttggaggtggtgtgtgatggcaatggtcacgttcagtggccgtttggtttctgggtgggtggtaggtctaacggtgttcatcctggagcgaaacttcatgctccgagagaaggtgctgtacttcatctacggactccgaaacagcataagaaactgcatgtggctaggcctggtgctactctcctactggagcatggtgttcaacgacgtccaaaagaagaaccacaagttcctcaacaaggtcttccaagccctagtagcagtgttagtgggcgctaccatctggctcgtgaagatcgtgctggtgaagatgctcgcgtcctcgttccacgtcaccacctacttcgaccgaatgaaggagagcgtcttccatcactacattctcgagaccctctcgggtcctccgatggaagacgccgaggaggtgctgcggcagcaccacctcgcgggatcgaagtcgatgcccgcgaggtggaatgccaagaacttgtacaagtccaagaggttcggatcgaggaagattgatatggagaagctgaggaagctgagcatggagagcaccgctacagcgtggagcgtgaagaggcttgttaactatgttaggtcttccggtttgtccactatttcgaggactgtggatgattttggcaacgcggagtctgagattagtagtgagt

SEQ ID NO: 12224 - DNA, 533 bp, Glycine max
  unsure (1)..(533): unsure at all n locations
  Clone ID: PAT_MRT3847_111046C.1
caagagaaggttaaggagagaaatgagagagcaaaaaaagcagcaaatgaagttgccaaagagagaaacaagcagacaacaaagggaaaagatgtcacaagagagaagggtcaacaaggcaaacttaaaacagaaaatgggacacaagacaatgcagcaaatgaagttgccaaagagagaaacaagcagacaacaaagggaaaagatgtcacaagagagaagggtcaacaaggcaaacttaaaacagaaaatgggacacaagacaatggccagaagaagggttatggtggagcaaattaaggacaccattcgtagtgtggaccacattactacaccacttgctggaaagaccaaagttactgctagcaccactgctcagtatgttgaagagaaatcagcacaagccaaaaatgctacagtaggatcaatggagaaaactacagaggatgctaaaggaagagaaaaagctggaaccaaaggtcaaatcaagaagnggtggtggtgaggaacaaggaagaagaagaagagaagaa

SEQ ID NO: 12225 - DNA, 516 bp, Glycine max
  Clone ID: PAT_MRT3847_111047C.1
gcctagcgagtcgagttgttcttcgatcccatccataattgaaatgtttcccccaattttccaaaccctagctttcccactcgcgcttttccccactcgcgcctcgtgatctcccgcccttgaaggttgctcatgaagtgcaatttatattgtagcaggtattcagaaagcagtgcatagtggtgcagtgagtggaaatatgggtgatgcactaaatgaagtgcagcacatgggtggtgcacctgctgcttctcccaagagggacattacattgcttgagggagacaaagattttgagctgcacaatggcattgaatttgaatcccatgaagcagcatattcattttatcaggaatatgccaaatctatgggattcaccacttcaataaaaaacagcagacgctcaaagaaaacaaaagaatttattgatgccaagtttgcatgctctaggtatggagttacacctgagtctgacagtggcagcagtcgaagacctagtgtaaaagacacagattg

SEQ ID NO: 12226 - DNA, 925 bp, Glycine max
  Clone ID: PAT_MRT3847_111048C.1
gtttaaatggtataacaacaggcaacaaaaggaaagaaacacggaacagaaagagcaagccaatctgtacacgtgtcagcctcagagacagcccatgtcatactctgtggttttactccggataatggttgtgtccgaatttcatttctcatttcccattttcttttttgttttttggtgaaattctaatttcccattttgaaccataatatttcagactgatatttgttgctttggatatatatttggtgagaaggcagagaccctccaatcaccactcatttccatcaacaagaaaccaagcaagaatccaaaaactcacactctcacatcacaatgctctcttccacattcccctccttctccttcttccttcacttctccatggccaagaagaatctacctgaataatcccacacagattccaaaacaaacacacacatacacccttttcacatcactcttcattgcttaattaaataactaactaacatgaatccctcttgtcgcttctcatcaactaaacacagccccttccttcacaactctcacacccacctctccaaaaccacttccccttatgtcttcctcggacactctcactctcagaaaccttttctcttatcaccaccaataacaacaaagccttatccttttaataacattctcaggttcagaaacatcaaactctcttaccctttcgcaacgctttcatctttcgctgagggagaacaacaagagaatcaggagggaacagaaacaccaccgagcaacgatgaattgggaggaattgcgaaggccttcaacatatcgtctcgaacggcttctgccatatcgatatgcatggcattggcggtgttgacttttccgttgttcatgacttctttggggcagggcatggttctgaagaacaaagtgctgtcgt

SEQ ID NO: 12227 - DNA, 403 bp, Glycine max
  unsure (1)..(403): unsure at all n locations
  Clone ID: PAT_MRT3847_111049C.1
acccacgcgcgcgtgctataaaacgacataatgagtaggttgagttagcagaagccctcaccaaagttgggtcgctttctcatggtgtggttggttatatatgtagaccaaatcttgggggacactgcactgtggagtggggtccagaatattatatcctccaacaacaaatttcacttctatgggactgtacaagttaacttgtcattagtcattcattacattagatggctcctcctttatgctattactgtttcttcttcttgttatcttgtttgagtaagttcttcaggattgcttatatgaaaacaatttatagcatttgtaagtacttccatgataagtacatattcaataaacacttaattaagttgtttacccaaatagactcttgatanngaaa

SEQ ID NO: 12228 - DNA, 482 bp, Glycine max
  Clone ID: PAT_MRT3847_11104C.1
aggaagtccccctcatgtctggtgggtgatgctgctgtcatctgggagccaagctggggccaccaagaagcatgtatacacttgacctctccatgtggcttgggcttcttacagcatggcacctgtgttctgagagggagcatccagggagtgagtgtcccaagagacaggaaatagaaactgcgggctccctaacaactgaatctggaaaccggcacagtgtcacttctgtcgggtgctattgggaggaggcagagcccacctaatgggaaggggttcaaagacttgaccacttctaatctgccacacgggaaaagagatcagagaggtgggcaggggtcaaaacacgcgggtttataggccctgtgaggcaatctgataagaagcctgtgaatgattagtagggatgaatttgaatgtgtatgaacatttaacattaaacatttcttaagatacaggatacttccttgctatgcatattt

SEQ ID NO: 12229 - DNA, 258 bp, Glycine max
  Clone ID: PAT_MRT3847_111050C.1
tcgagcgccttcatgctactgttggatgagcagtcaccgcggtatcctattagaccatccagctcacatacgggcatcggatgacctctcggcatggcacgaagaagcttaccgtgcctgccaatctgacaagccttaacattttactcttacaaggtggcaagctcattacactaagcgaggcatgagactgattatgcacccaacccatgctaaagatttggtctttatatacagcaccaatatgctggctttagc

SEQ ID NO: 12230 - DNA, 259 bp, Glycine max
  Clone ID: PAT_MRT3847_111051C.1
cagaaagaccgatctatgtgcactcgaatctttgatacatggcccactcttacgttactctgcgcacgcgcaagttcatcctcaaccccgtactgggacattgtcacatggtccacaatttcctacactccaacctgtcaaacgttttcaaagacaagctccttggctagctccgatagctcctcatattcatgaacgactatgtatgagtgtcacatttcaagacacactcttgatgcggtaagagcaccatcttatg

SEQ ID NO: 12231 - DNA, 451 bp, Glycine max
  Clone ID: PAT_MRT3847_111052C.1
ctcgagccgaactcttcgaatgtctagctctgagagcacaaacgcgagaactagaacagcgtcatggttggccaccgcatcctttgatatcgatgtcccagaggccaaggctgcgcttatataccggcgtgaaaccattcacgcacgttcttgagccattccagctgggacggtccaccgcggcggttccctctcgtcacgggcacatgcgggagggatcggaacgtgggggtgacggacacttggagggcccggaagacttggcctacggacgctagctcacagtgtacgttcataccgggtgggaggacgagtcagatcaagcgagacacggtgaatgacttggaggttgactctgaaggtgtagatagggtcatcacaagacgaacgtcagttgaactaactgtgaaccgctatggcaaacttatctatgctgatgcctaaaagggac

SEQ ID NO: 12232 - DNA, 267 bp, Glycine max
  Clone ID: PAT_MRT3847_111053C.1
ctttcttttcttttttttttttattcttcatttaaccaattttctactctttctcacccacaaaatgaatatcatctcacaatgtttttttcctccctatttctaccatgagagaccaaagagacaatattttattgacttgcattgcaagaactataacctctattaacaccaattatcccttcaacatttttaataaataaaaactctttttgcacaggctctgctcacaaacaatataaatcgtaaggaatccttgtctcaaca

SEQ ID NO: 12233 - DNA, 361 bp, Glycine max
  Clone ID: PAT_MRT3847_111054C.1
accacgcgtacatccacgcgttcggaatttatctcagagagaaacccatcatcatcggaggggcactcattcattcccccaaaacccaaaacgatgtcgttttctcaccaccgtcgatctcaatcggagatgcatttccggatcagcgacaacttcgacctcgaggtcgatctctctccgtcgcatcatttccaatatccggccccgctcctccaagattccggatccataccccaatctccgcaacccgaaaccgcccgctccgctcaccatagaagcaactccgccgacgcctcttactccttcttggtcgacggcattgaggccaagaaggccttgtcccctgataagctcgctgaat

SEQ ID NO: 12234 - DNA, 909 bp, Glycine max
  Clone ID: PAT_MRT3847_111055C.1
cccacgcgtccgacggctgcgagaagacgacatcgtgccattaagaaatcctcttcagcttctgcatctctaatacttcaactcactgtattatcttgagtaatttttgcagagaagtaaaatatgagcaggccaggagactggaattgcaggtcatgccagcacctgaactttcagagaagagattcatgccagcgatgtggggacgcaaaatatggagatagagttgattttggtggctttggaggaagaggagggtcttcatttggtttaactggctcagatgttcgccctggtgactggtactgtgctgctgctaactgtggtgcccacaactttgctagccgctcaagctgcttcaagtgtggtgctttcaaggatgacttggctggaagctacaacagttctgacatcttgcgctccagagcttttggtggcagtggaagacctggatggaaatctggtgattggatatgcagcagatcaggatgcaatgagcacaactttgctagcagaatggaatgttttaaatgcagtgctcccagggacacgtactagaaaaaatgagtttatcctagcaagaaaggctacattaattaatggagatgctgcaagatttctttattaatttctttgggatgttgaagacagtgtgaattctgaaaaggtggtttaaaatcccatgttacagagaagctagccagctgcatcccttagggtctttctcagatttacctcaagagctacaacaatgttgttttggtgctttaaactactttctttagttttggcgttagagagttcatttattgtatggtgcgtggttttcttaaatgaatatgaatctcttttcttgtcatggtgcgtggttttaataccacaaaatgaatatgaatctcttttcttgtc

SEQ ID NO: 12235 - DNA, 265 bp, Glycine max
  Clone ID: PAT_MRT3847_111056C.1
ggggggacaacatttggggcataaaaaattaaaagggcttttgctttttaagggaattaaggcccaattaaaaaaaaaggggggggtttcccaaacccccgggtttattttgttaaaatggccaaaacggggggaaaaacagctttttaaaaaggttttccccaaacaagggaaggaaggggatatctcctgttaaatccaaatttaaaacgggggggtagccaatttaacagggttttaaattaacccacatgaaacaattttt

SEQ ID NO: 12236 - DNA, 1664 bp, Glycine max
  Clone ID: PAT_MRT3847_111057C.1
taaggcttcgagaatcgacagaaggggaccacaccaccctactacattcccacctttagtcttgttcttagagatggcttgtgaaaccaagtcatggttggttatgtttcttgttttcttggttgctaattgcatgcaacattgtgtccacggggtgtctcaagtgccttgcctttttatctttggggactctatgtctgatagtggaaacaacaatgaacttccaaccacttcaaaatctaatttcagaccatatgggatcgactttccattaggaccaactgggagatataccaatggccgaacagaaattgacataatcactcaatttctgggatttgagaaatttatcccaccctttgcaaacactagtggttcagacatacttaaaggtgttaactatgcatcaggtggatctggtatacgcaacgaaactggctggcattatggtgctgctatcggcttgggattacagttagcaaatcacagagtcatagtatctgaaattgctaccaaacttggaagtcctgacttagctcgacaataccttgaaaaatgcttgtattatgtgaacataggcagcaatgattacatgggcaattacttccttcccccgttctacccaacaagcaccatttataccattgaggagtttacacaagttctgattgaagagttatctctgaatttacaggctttacatgacattggagcaagaaagtatgccttggctgggttgggccttataggatgcaccccaggtatggtgagtgctcatgggacaaatggatcatgtgctgaagagcaaaatctcgctgcattcaatttcaataacaagcttaaagctcgagtggatcaattcaacaatgatttctattatgctaattccaaattcatctttataaacactcaagcattggccattgagcttcgcgataaatatggttttccggttccggaaactccttgctgcctaccgggattaacaggggagtgtgttcctgatcaagagccgtgctataataggaatgactatgtgttttttgatgctttccatcccaccgagcaatggaacctactcaatgcattgacatcttataattctaccactaattcagccttcacttatccaatggatatcaagcaccttgttgatcatgaaattaagatggaattggagctcacaaatgagtccacttcacaacttagtgccactgaataagttctggttatcatgtagtcgttcatatggagttgaaataattgtgagttgaatatgtattaagtaatggcctgccactgaattgaacgacaaagtggaatgaatcaagtgaataaattggctatcctgcctcagatttgatccaatttatattggattacttgattaactatatggtgtatgctgtcatggaatgcaggcacagttgctgttacgaaatgcaattcaaaatcgttacaccataatgatttggtttctaaatctctctctctgaaattagattccatactatgtttatcctcttttctttgttgtaaatagcattttgaatcaatatattggcatgagtcatacttaaaaaaaaaaaaaaaaaaaaaaaaaaaaaaaaaaaaaaaaaaaaaaaaacgatcaaaaaaaaaaaaaaaaaaaaaaaaaaaaaaaa

SEQ ID NO: 12237 - DNA, 210 bp, Glycine max
  Clone ID: PAT_MRT3847_111058C.1
cccgcgtccgcggacgcgtgggcggaattggagctccaaatgagtccacttcacaacttagtgccactgaataagttctggttactcactgtagtcgttcacatggagttgaaataattgtgagttgaatatgtattaagtaatggcctgccactgaattgaacgacaaagtggaatgaatcaagtgaataaattggctatcctgcctcg

SEQ ID NO: 12238 - DNA, 478 bp, Glycine max
  Clone ID: PAT_MRT3847_111059C.1
gttacactaacattctgtctcacagtttttgcaaatagccttttctgggggggggaaaaagaaaaaacaagatccacattcgaaagaagagaccgtcaccacaaaaatatctgaactaagcttcaagatcacatacacaggtggttaactacaccccatatggttaaaagactaagcatctaaaaaaaaaacaaaaaaaggggatgctctacatgcatccgaagatggatagttaaaggactcgagaaaaagaaaaactgccttgctttcttgacccccaagctctatgaaaagcaaacttagcctgcccttaggatactgttcgcggggggggttctgagaaagacttggcccaagccaccctctttgaaagacacatgaatctccaaaaagaaggggtcatgaacaaccccaccaaaataactttggcggagtggtcccctaaacttgagaacaactgatacactctggtcactaa

SEQ ID NO: 12239 - DNA, 1064 bp, Glycine max
  Clone ID: PAT_MRT3847_11105C.1
gtggaatcttaagtgaaaggaaaagaaaaaatgatctttgcatcaaaccctaatcctaaaaatgtgtacctcatcggaggtttgcaattggagtttccctaccaaccatatggatctcagtttgcgtttatggctagagtgatttccacccttaatctaactcagaaagaaggccattgtcacgcgttgcttaagtctccaagcggtactggcaagtccctttcgcttctttgttcctctctcgcttggcagcaccactacaaaccccaccataccaatctcaagcccgcttcggaggaaaccaacgatcctctggctctggtggcggatttgttctcgaggaggtttcactttcttctttttcagaaattcccgaccatacgcaaactgagatcaacaacaagaagcagaagaaaaaggaagcaccaaccatatattatgcctcataggagaacgcactcacaaatttctcaagtggttcgtgaattgcggaaaactgcatacagggtgcctatggttgtgttggcatggcagaaacactactgcacaactaaaaatataattggcaaagagaacatctatgacgaatggttgcttttaccttgacattttatactttatgataatctttctttttttcatttgataaaatgttctcatcttacaatcttcatactgataattttcataaaatgttctcagtaaactattattgaaagatcaggcaacagggtgtccataattcaaaaatgctcataaagtcaaaggtcatccttcccttcagaaaggaggatgcaatgtggtgcatgacatagaagatcttgtaaaagttggacaattggtaaaaggttgctgttcgtgctcgttctatgtcaaatgatgctcaattggtattttgtccatataactacatcaataatccagtcatttgggcaccaatggaagtggatattaaaataatatatggattccggatgtctttcacaaaccatcagttgcatgctatccaatgttgcagcaatatggaggacattactcgtgatgctagcagtgtggataatgaa

SEQ ID NO: 12240 - DNA, 744 bp, Glycine max
  unsure (1)..(744): unsure at all n locations
  Clone ID: PAT_MRT3847_111060C.1
aagttgatgnagttcatgaaannnntcnnnnnnnnncaggtccaagttctnnaagggtgtgtactgctgnnggtggtgatattggttttnnnaagtatttctcccatacagaggataaagcagatccaggaagcttctggttcgacatccaggctgcaaaagctttccttgcacaaaggtggaaggaagctatctcatcagaacatgtgacattggttatttgccccgactcggaacctcctgggtgcgaggagatacaggatttgaaaacagcagcatgtcaatcttctgatatggatggatgtgacattgtggcaaatgcagataaaagattgcctgcaacctccaaagttgcgaaatccaaacccaggttgaagaagtctgaaaagggaaccaagataaagtatattccaaaacagaagacaaatacctagtgtgaaagaataaattggagttgttagttatacagatatacagagtttgactttgttgccaatttatgttagcagaggtccaagttttaccggatggtcttctgtcagaatgttgaaagtaggtttttgccggaaaatctttacattccgcccctgttgtccgaaagatttcatatgggattttggctagttagattctttttacttgttgaattattacctttttttttttgtaataaacttgtttgatttccgtacaggttgactttttatgatgcatttgtcatcattaggcaagattttttcttcc

SEQ ID NO: 12241 - DNA, 240 bp, Glycine max
  Clone ID: PAT_MRT3847_111061C.1
cgcatgcacctgacgtcagctcggcggctgcgagaagacgacagaagggtatgaaatgcaattcaaaatcgttacaccataatgatttggtttctaaatctctctctgaaattagattccatactatgtttatcctcttttctttgttgtaaatagcattttgaatcaatatattggcatgagtcataaaaaaaaaaaaaaaaaaaaaaaaaaaaaaaaaaaaaaaaaaaaaaaccaaaa

SEQ ID NO: 12242 - DNA, 1266 bp, Glycine max
  unsure (1)..(1266): unsure at all n locations
  Clone ID: PAT_MRT3847_111062C.1
ccacgcgtccgcggacgcgtgggctacattcccacctttagtcttgttcttagagatggcttgtgaaaccaagtcatggttggttatgtttcttgttttcttggttgctaattgcatgcaacattgtgtccacggggtgtctcaagtgccttgcctttttatctttggggactctatgtctgatagtggaaacaacaatgaacttccaaccacttcaaaatctaatttcagaccatatgggatcgactttccattaggaccaactgggagatataccaatggccgaacagaaattgacataatcactcaatttctgggatttgagaaatttatcccaccctttgcaaacactagtggttcagacatacttaaaggtgttaactatgcatcaggtggatctgggtgctgctatcggcttgggattacagttagcaaatcacagagtcatagtatctgaaattgctaccaaacttggaagtcctgacttagctcgacaataccttgaaaaatgcttgtattatgtgaacataggcagcaatgattacatgggcaattacttccttcccccgttctacccaacaagcaccatttataccattgagngagttacacaagttctgattgaagagttatctctgaatttacaggctntacatgacatttggagcaaggaaagtatgcccttggcctggggttgggccttataggatgcaccccaggtatggtgagtgctcatgggacaaatggatcatgtgctgaagagcaaaatctcgctgcattcaatttcaataacaagcttaaagctcgagtggatcaattcaacaatgatttctattatgctaattccaaattcatctttataaacactcaagcattggccattgagcttcgcgataaatatggaggatcaaacttgcgaccttttcaataattgaggtgtgtacaatacatataaccatacatatttgatgtgtctcaggttttccggttccggaaactccttgctgcctaccgggattaacaggggagtgtgttcctgatcaagagccgtgctataataggaatgactatgtgttttttgatgctttccatcccaccgagcaatggaacctactcaatgcattgacatcttataattctaccactaattcagccttcacttatccaatggatatcaagcaccttgttgatcatgaaattaagacggaattggagctcacaaatgagtccacttcacaacttaaaaaaaaaaaaaaaaagcgggcc

SEQ ID NO: 12243 - DNA, 329 bp, Glycine max
  Clone ID: PAT_MRT3847_111063C.1
cccaaaaaccaaaattaaacttttatttgggccttggggcttttttagggatccaaaactaattagtggaaggcatcaatccaattttagggggcctttttttcacattggggggttaaaaaaattaagaaagggaaaggaccttattcctttttgctcaggctgggaaacctcctcctttataaacactggacattcttccggttggaaggctatgggcaaaactaccccttggggtttcttttggccaaaaaaaagggaaaagtggaccccccttgttgggttatccaatggcaaaagggaacccaattttgggagctttgaaacaa

SEQ ID NO: 12244 - DNA, 261 bp, Glycine max
  Clone ID: PAT_MRT3847_111064C.1
gtctgtgatggactatcttcatcacaacatggtggattgcaatctccatgggcggcgaacccaggtcaagtatcaatggctgacattgtcaggatgggtaggccacaggccaaggcatccatgcctaactcttctctccacagtggtagccatcagaatgattttgcactcccatcagcttcacaaaacaatttgcattcagtgcaagttcatgcttccaagttgtcagagacaaataatgaccatggctttgctattgac

SEQ ID NO: 12245 - DNA, 372 bp, Glycine max
  unsure (1)..(372): unsure at all n locations
  Clone ID: PAT_MRT3847_111065C.1
tacaaaaatctttntatattttatcattctctttcctgtaatatccccctctcaaccccaattccattgtaattctttacaccatgtttcatgctcccccatatccatataatttatcttacttcatttaacaattccatatattatatcacatttattcataattcaccttattcaacaatttcttctgcatcatccttaattatcatatcctatccccaactctttttattatatttcttcttaacactaactaccattaacattctttatatcctacacatctatcactaatattccttttcttctatttcactaatcccaaaaactttttctcttatacctttacctcaatatctctataatcacctt

SEQ ID NO: 12246 - DNA, 421 bp, Glycine max
  Clone ID: PAT_MRT3847_111066C.1
gggccataacacaggggcaaaaaagatcattagaggcaatggtttttggtttaccggacaaaaaaaaaagcaatgccttaaagctgaaaggagagggtttgttcattttcaaagggggggaaaagaggggaattttttttttacagaatttcccaaagggcagaaaaaagggagtggagccaaaaatggcttgggactcaaatccgggaagggaccataggaaaaggggcccggtagtattcgctggcagcatgaactcccctttcaaggttttcaggaaagcccacattttttagaataagttccacaccaggttgacatcccaacaggtggaacttattcaaggtggcaagaggcccaattttgaaaacctctcccccaactttttgtaaggcaagacctaaccttaaattgtgttttt

SEQ ID NO: 12247 - DNA, 361 bp, Glycine max
  Clone ID: PAT_MRT3847_111067C.1
gcggccgcccttttttttttttttttttttttttttttttttttttttaaaattttcattttttgagcaaagtaacagcaaaagtaggatccaaacgaaaacggaacgcttagtttccaaacaacattaagtgctaataagaaaagaaaaaagtgttattagacaacaatgaagagcaacatatacccccaagcacataaagctagaactcagccggcacagaatcttggtaaatacttaaacggaaaaagacagcagatttacaagaattatctatggcttgcaaggtggaggtggtggtggtggtggttggtaaactgctgctgctgcatgttgctactggctcttcctctaaaaggcc

SEQ ID NO: 12248 - DNA, 614 bp, Glycine max
  Clone ID: PAT_MRT3847_111068C.1
gcacgcgtaggcacgcgtacgaaaccgctcgagcagattctgattcgtctaatcctatataaatactcatcatcatcgttattgtatcgtcgcagacacaacaacctaagcagaagaataacagacaaatcaacaaccactgccttcatcagtttttacaaatcctcacaacatgttcatgtctctcttcagccacttcgagatcgcacaggcccagaagtggaggttttctttgtcccccgtaaaaggtacgaattccaagcccaacgcggaagccacctcttcctccgcagagtccaaaaccgccggaaaagataagaatccatcacaacccggtgggcccaggtttgcgccggagttggatggactacactgcttcgaatccatcgtaccctgttagatgagatggattccttacacctccaatctaaattcgtttataataatcacatcatatcaaagatcataggttattcaattcaatttatttttactgtatagtttaatcaatttgttggggaagccatgtactatacccgagagatcaatttgtgtttccctgtaactcgaaatttgaaatagtaatattcttcttattgctgattaacttaaaa

SEQ ID NO: 12249 - DNA, 810 bp, Glycine max
  Clone ID: PAT_MRT3847_111069C.1
gcaatcaaagttcaactcttgatacttaatttaactggtttcatgcttatggaggttgctgtggaactggaagatgacctattttttgcagacttgagcaagcaaatttctcaactaattatggatgaagatgaagacccccttcctacttgtcctcctgattctcttcagacttttcctggatcaatctatcctcctccacagtctggtttcctctacgagcaggctttgataagacaaagcaaagggacaggggtgtttatcccccaatctacacagcctagaaggaagcacaggaaaggaagatcaagctcaaacgctaagtatcaaaagcagactcaagatacaaaaacggtttctcaagttcctataacaagttctttcaaacccaaaaatggttgaggatatatatattttcccacaaattaaactgcataagttctattgattaattactttgccaagtttaattacttacgggtctaattctttagtctttaggcaataatgtgtggttatatagtttgaaggattgatgtataggtcaatatgcgttgactaatgaagtggacaaattaatgtacataattaagtgggggataacccctatcttgtgaaatagttttcggaattgccatatatacttgctagtctttatagcaaggtttagtcaaggtcttgtaacccttcaccgtgtgcacaagcacaagcgtgatttattgttatctggtttgatgaaattatcttagttttctatactatttctttcgaaaaaaaaaaaaaaaaaaaaaaaaaaaaaaaaaacccccc

SEQ ID NO: 12250 - DNA, 234 bp, Glycine max
  Clone ID: PAT_MRT3847_11106C.1
cacttactcctaaattacattttaaaccatcaataatacttttgcgtctgggtttttctccagcgtgggtactcccatatcaaccataaccactcaaactcactagctaccaactattttataaacatctctgattgctccctatcccaacctatcatctcacaaccacactacactgattatataactccttattcgcctcttcaatattatctatctacataaatcaatcac

SEQ ID NO: 12251 - DNA, 537 bp, Glycine max
  unsure (1)..(537): unsure at all n locations
  Clone ID: PAT_MRT3847_111070C.1
gcacgagattagctagtgatatgatcaaaataatgtatataagtgagagaatcctgatttccagtcgtttgagctgaacaaagtccaaacccaaattctaaaactccattccaaaaagagaaattgaaaaaggaaaaacagcgaaatctggaaaacgccaagttttttttaaaacaaaacatgcagntttttttgaagtctagcgaaaaatggatcgaacttgccagcaacatcttggccatcgtagatgccccggtggacagtgccgaaggttcccctggctatgacactcttgatgatgaggttagaagggtcaatttcccactcctgcctctgcttcttgaaggtagtggcaccagcactccccgccacacttttgaacttagtggcagtggcaaaggagctagagtgtcgagaatggtcagaaccagcatcatcctcttctttttgcttcatcaaaaccttgctgaggtgcctctcgagctgctcatcgatgctcttcagatcaatctgatctgctctcacacacccatcatt

SEQ ID NO: 12252 - DNA, 287 bp, Glycine max
  Clone ID: PAT_MRT3847_111071C.1
attatggtctttattgctcttgctgaatagggtatcaaattgattacaaagaataggacttgaggaacatgagtcctcttctcctccaaagagcccggatcacaagaagattccggttctaaaacacaatggcaaacccattagagaacccctcattcctgaaaaaaacataaaggagggccggaaagacggcattcttttagaaaccttctgacccttagaggagactgaagctagaagggggagctgcctttgtcgagaggaagaatatgagccccggaaggaag

SEQ ID NO: 12253 - DNA, 757 bp, Glycine max
  unsure (1)..(757): unsure at all n locations
  Clone ID: PAT_MRT3847_111072C.1
cctcaacctctcttatactggattctagttaatgattcctcctcagattgggaatctctctaagcttcgatatcttgacttgagcgacaatgattttgaaggtatggcaattccgtctctccgtggggcaagctcctccgtgacgcacctcggccgctctgatacggccttcttgggctggtttccagctctggttgggcttcgccccgagcggctctttcttccttggagttggtctgtcctttccttcgctcctcggggccttcactccctccactctcctcctcctctctcccaccggtcccagggggatgtgtcctcctcagattgggaatctctcaaatttggtgtatcttgacctgagttcagatgttgccaacggaacagtaccctctcagatcgggaatctctctaagcttcgatatcttgacttgagctacaatgattttgaaggtatggcaattccttctttcctttgtgcaatgacctccttgactcacctcgacctctctcatactggattcatggggaagattccatctcagattgggaatctctccaatttggctatcttggccttggaggtcattctgttgtcgaaaatgtagaatgggtatcaagtatgtggaagcttgaatatcttcatttgagttatgcaaacctatccaaagcatttcattggctacacactcttcaatctcttccttcttttgacccactatatttgtcaagactgnacacttcctcactattaatg

SEQ ID NO: 12254 - DNA, 148 bp, Glycine max
  Clone ID: PAT_MRT3847_111073C.1
ttatttgcaggccgttgagtgaagatgaaacgaggctgcacacgccggtggtgatttggtgtaacgaatatagaatagagtttctagctgttcagtatatctatctacaaacagatctgttgaactttttcacttgacatggttttat

SEQ ID NO: 12255 - DNA, 366 bp, Glycine max
  Clone ID: PAT_MRT3847_111074C.1
ggggggaacaaatagcaaagccgtttacatttcaaaaaatcgttaatgtttccaacaactttttcccaaattacttttgcaaaccgccccattatgacggaaataatagtcaatttccaacaaattcaactccccgtttttttgtggagggggaaaagccccccgggggatttttctttatttttttaacccccctggggctttgggtgagggaattatgagttaaatacccggctggctccgtgttaaaaatgatgccaaaatttcccttacaggaatttacaaagggtgtaggggggaactcatttgtttgagaaatatctgcactgggtttacccccccaacgccaaaaatcataccttaagt

SEQ ID NO: 12256 - DNA, 298 bp, Glycine max
  unsure (1)..(298): unsure at all n locations
  Clone ID: PAT_MRT3847_111075C.1
antntnatgncgngttngatggatgcgtatgtnagctcggnattcggctcgagcnttanctctttttnnaanctctaaaaatttagngtncacnggagcangnnatgatggcntnagggcncggcnttangccntcatgatnngaggcagtggcgggccagccaggcaaacttctgggtagcgnccncatctgcancgttatngtgtangccnatgagnttgtaaagccccttctnngtggtactnncnagggggtgnggggntnaggnntttgntnagntnnccntaatagggggcc

SEQ ID NO: 12257 - DNA, 532 bp, Glycine max
  Clone ID: PAT_MRT3847_111076C.1
cctcgaattccgcctcgggaaaaaaaaaaaaaattaaaaaaaaaaaaaaaaaacaaaaaaaaaggggcggcctcaaactattagagaaaaacaacccaaaaaataaattacaaaccgataccatgaaagcaaaccaaacataactaaaaaaaaaacaaataaggggcgccccccacttatggccctcgcccccccgctatttatttcggtcccgggccctcaaggccacccagtttcccatttcggaagcctattaaaacctggccgaattaacgaaaaaacctgctccctgggaaaaattgttttccgctcaatttccccccaaaattccggccccaagccataacttttaaacccggggttccctaatggggcactaacctccctttatttgattggccccaattgccctttttcaattgagaaaccattcgggccacttttttttaataatcaccccatcccccggagagagccgctttgctttttgccccccaggttgttttttttttccacaataaaaacggaaaaa

SEQ ID NO: 12258 - DNA, 225 bp, Glycine max
  Clone ID: PAT_MRT3847_111077C.1
tattggaatattttcttggatttatgggtttcccgcataggtacttgagttactcattacacaagggcacattgggggtatacctcgggtggcacactcaacaaagggcatttaagcctaagtatgtgacattaagtggttattactgcttccagaactaggtaaaggcccaaaggacaaaataattgtagggcattctaaatgggggctcataaaccacattta

SEQ ID NO: 12259 - DNA, 383 bp, Glycine max
  Clone ID: PAT_MRT3847_111078C.1
aatctgtaaatatatttggtgctctggtgtctccgacatcccaacttcgaagagggttcggcaattgaaaaatgaaagaaaatacgtcagccttcattgttcgttgcaagttgagtatcctatccatgctatttcggtatttcctatacaccccaggtagcaaatcacccttttaggagaagtataaccaaaataaatttcacaaaagtacgagagtgcctattctattacaaacatactccgtaattatctggtctttactttaaatattaatctaggtccatctttttttaaaaaacaattcttgtattacaattctctcatatgtcaaggcagcaaactttatagcctgagctaaagaccaaatcttgtcccttttcccc

SEQ ID NO: 12260 - DNA, 927 bp, Glycine max
  Clone ID: PAT_MRT3847_111079C.1
ccacgcgtccgtggtgttacatggcaagacgccggaaagtacggttctctgctgttatcgaacatttctattttctatcgtttgatgatgatgatgatgataattagagatctgataataacacaatacttctagtacatatccttctgtttgttgaaattcacgtgatacttctatctgtttattggaattgacgtgagtctattagtttaagaataagatctactattaaatactccctcccaccttaatcataagatattttcagaattttgtttgtgaatttttataagattttttttctagttttaagaattattaattattttttttcttatatattcttatttaattatttttctctaaacataaacattaatgaaaaataattaattgataaatataatatgattaattaaattaattatttttcttaagaaatattaattagttaaaataatgttataattagaaaattagttgaaatgattttaataagatggtagttttacatgaattatgtcaaattgaagagattgtcatatgtctgactaaaagaaactttacattacaccacacttgtatactaactaaccggattgataattgtttcagcttagagattatttcaggttaattagtagtctagagttaaatatacattttattatatcttattgatcgagtaaaattgtttttagtaagaagtgactgttgtctcatactaaaacatttatctgataatttgcataataatatcagtatattttttttatatatttgtaatacaaaatttttataccgtggattaattagaaattattctaaatttaaattgtaaaataattattaaaaaatgtttttgtattatatgataatttgatgacagtaaattatatgtcattgaatcttattataattattttg

SEQ ID NO: 12261 - DNA, 140 bp, Glycine max
  Clone ID: PAT_MRT3847_11107C.1
gctcggaatgcggctcgaggatggcctgaacgtacttgcactacgtgcggaccatgcacgtgtagttgacatcatgcagaaggctgggcacaatccgaacttgtgaataccgtatactgatatgcagtatcaaatgcaac

SEQ ID NO: 12262 - DNA, 274 bp, Glycine max
  Clone ID: PAT_MRT3847_111080C.1
agcattgccccttctgctcctcctcctcctcttcctgttctctccctccgcggcggagataaagtcgcagacgataaactccgacagccgccccatgatcctcttggagaaattcgggttcacgcacaagggctacgtgtccatcgccgtctcctctgtctccgtgggcgtgctctcctcctcggtgcaaccagaatcctctcgcctgggattcttcctcctgaacgaagaagccctcctccaggtcctgatggagatccagcagaaccctctt

SEQ ID NO: 12263 - DNA, 1120 bp, Glycine max
  Clone ID: PAT_MRT3847_111081C.1
tcccacgcgtccgacggctgcgagaagacgacagaagggggattcggcaaagttgatttcaattcaatttgatttccccctttttcttctccacgtttgtgcctgcaacctcaaataccgattagggttcatgctacactgaacttggtttcggtgttccaagttagttagaggcattgttgcttgcatagatctctgatctgaaaatgagtgcgtcgaggttcattaagtgcgtcaccgtcggcgacggtgctgtcggcaaaacctgcttgttgatttcctacaccagcaacacttttcccacggactatgtgcccaccgtttttgacaatttcagtgctaatgtggtggtggatggaagcaccgtaaacctaggattgtgggatacagctggtcaggaggattacaatagattaagacccttgagctatcgaggagctgatgtcttcatacttgccttttctctcataagcaaggctagctatgaaaatattgcaaagaaggtttatttcttcggttcaagaattcaattaggatgatcttcgggatgataagcaattttttatggaccatcctggtgcagtgccaattactacagcacagggagaagaattgagaaagctgattggtgctccggcctacattgagtgtagttccaaaacgcaacagggttgtgtgacggtgaattgggtagaagaagatgagaggggtgaagagagcagtatttgtaggcagagccctaagaagcaattccaacaccgccgtgtacggtgttggtgccacccttcatcgagatcgaatggctccccatggctgcttaaccccatcaaatccaaatccttctgtttctgttactgggttttagatacctttctgcttctgctgctgccacgtctcttgcccaagacgctcagaccaaggccttcaaacccaaggaacttgtcctctttcagtaccaggcctgtccattctgcaacaaggttgcagtggttgaggtgaatcccataaacaagaaggagatcaaatggtccgactacaagaaggtgcctatcctcaccgttgatggtgaacaaattgttgactcttcagacataattgataagttgatcaaaaggataca

SEQ ID NO: 12264 - DNA, 1808 bp, Glycine max
  Clone ID: PAT_MRT3847_111082C.1
aataagagccttcatttatttattgttgttgaaaaagaagaagcaaaaccctaaaccctcaagtatatcctgttgtggttgtcaaagggttgtgtgacggtgaattgggtagagagatataattcttgtccttttttctcttgtacatttcattcgtcaaagttggtttctccccctttctctgcactctgcaactccctccaagtttggtttgagcattagaggcattgttttttggatagatctctgatctgaaaatgagtgcatcgaggttcattaagtgcgtcaccgtcggcgacggcgctgtcggcaaaacctgcttgttgatttcctacaccagcaacacttttcccacggactacgtgcccacggtttttgacaatttcagtgctaatgttgtggtggatggaagcaccgtaaacctggggttgtgggatactgctggtcaggaggattataataggcttagacccttgagttatcgaggagctgatgtatttatacttgccttttctctcataagcaaggctagctatgaaaatattgcaaagaagtggatccctgaactaaggcattatgcccctggtgttccaataaattctcgttggaacaaagttagatcttcgggaagataagccaatttttttaataagacccgatggttgaagacaacagtattggaaagcagagcacaataataaaattcaaacattgccgttgctcattactagtgctgtccttcaacaaagctccaatggcttccccatggcttgctcgacccccatcaaatccttattctactgtctcaggtacaagggatttagatgactttctccttaagctgctttacacgtctttttcccaagacgctcagaccaaggccttcaaacccaaggaacttgtcctctttcagtaccaggcctgtgcattctgcaacaaggttgcagcgtttctggactattatgatattccattcaaagtggttgaggtgaatcccataaacaagaaggagatcaaatggtccgactacaagaaggtgcctatcctcaccgttgatggtgaacaaattgttgactcttcagacataattgataagttgatcaaaaggatacatccagattatgacctaaatgctgaagaagagaagaagtggcgacagtgggtggataatcacttggtgcatgtcttgtcaccgaatatatatcggaatgttcctgaagctcttgaatcatttgattacatcaccacccaaggaaatttcagtttttctgagagattagtggcaaagtatggtggggctgcagctatgtattttgtgtcaaagaaattgaagaagaaacacaacatcactgatgagcgtgcagcactgtatggagctgccgaacaatgggttgatgctttgaagggccgaaaatttcttggtgggttggatcctaatttagcagatcttgctgtgtttggtgttcttagacccatccgccatctcaagtcaggtagagatatgctagagcacacccggattgggaaatggttttctcagatggatcgtgtggtaggacagtcttctagggtgagtgagcagagctagaaaaactatagtgagtttcaacatatgaattggttaggtaatgctatatgggtgaaagaaatgacttttattctactaagtttggtgagtcttagtaagctttaaatgctttgcacttgtaatttatcttgtggctatagtggtgatttgtgatcacatactgttctggtaaatccgggtatgtattcaataaaagagtttagctcactttgggacaagc

SEQ ID NO: 12265 - DNA, 307 bp, Glycine max
  Clone ID: PAT_MRT3847_111083C.1
gaggcaattgagcttcactgtaagggccatccaattataaaagccaacctatcaagtgattcaaccagtctacggtgatcccttcattgcaatgccttgaatccccagttacattcacccccttgattgcatggtacttatcgaacctccccgcatacatgacccggagtgaggcccactactaagtaggatctatgtgggcctgtcccatggctaccttctggtgggcccattcgtgaatgccgggcctctgaggaacactgaaattaccgggcatgcaggctctctcgtcgttggtgggcttgtg

SEQ ID NO: 12266 - DNA, 607 bp, Glycine max
  Clone ID: PAT_MRT3847_111084C.1
gtttggtattgtcactactgtggcattgttttggactcaataatcaatgtagaatctcaatccttttctttttctttctgatcagtattactgggctagagtagtgattgatacttggtttaataattttagcattcaatgttacattcataatgtgggtacctgtagggtcggacattagtaattcagactccctctttcaatataatggcacgatcatgtcttctctttggtggcagccctcggggttctcagaaaaactcttaaaagatagttgtaaaacctcttgtagttttggctgcaaaatatgttctttgtcctgtatttttgtcagtagattatctgctgcatcttgtagtatgttatacttgtagatagtttttaaagatgctactgagcaatatatggaaggatctcccttaagaatgacattttgacctgccacctgaatcttcatggttagctctctaaatttacccttatctccccaacgcaccctctagcccacctaagcccacgaacacatctggttctcttcctcctaaaagctgaatagaaagaaatctttgcacacctgcatgccctgaatctggaatataatctgtaa

SEQ ID NO: 12267 - DNA, 844 bp, Glycine max
  Clone ID: PAT_MRT3847_111085C.1
ggtcaggaggattacaatagattaagacccttgagctatcgaggagctgatgtcttcatacttgccttttctctcataagcaaggctagctatgaaaatattgcaaagaagtggatccctgaactaaggcattatgcccctggtgttccaataattctcgttggaacaaagttagatcttcgggatgataagcaattttttatggaccatcctggtgcagtgccaattactacagcacagggagaagaattgagaaagctgattggtgctccggcctacattgagtgtagttccaaaacgcaacagaacgtgaaagctgtctttgacgcggcaatcaaagtggttatccaaccaccaaagctaaagaaaaagagaaaaacacagaaagcttgctccatattatgattgagaatcagaaattaacagtaggcagtgactgtttgaccaatcttcactgctgcctctccatcaatttgtattattttgttccttgtcctccctctgtagtttgcaggaagttgtgtacagtttgaactagcattgtaggatcatgcctcatttcatactttgtaactacaatgaacttaattatataactgtcgatttccttcctatctttatatgttagtaacccacgaaagcactgcatgcttgtgaatgcggtcatattcatatggcatgcttgtgaatgcggtcatattcatatggcctctgtgatgtcttctatgaatttctttaatggttttgggcagttgttgcacattttaccttttacacttaaggggatgttattgaaggataaaatttcaccttggagcatgggatgttccatttaatcatttaa

SEQ ID NO: 12268 - DNA, 1218 bp, Glycine max
  Clone ID: PAT_MRT3847_111086C.1
gtgtttggatggtgcatgtcatttcaatttaatttcgatttcatttccccctttctctgcaactccctccaatttagtttgagttatagaggcattgttgctgtttggaaacagatctctgatctgaaaatgagtgcatcgaggttcattaagtgcgtcaccgtcggcgacggcgctgtcggcaaaacctgcttgttgatttcctacaccagcaacacttttcccacggactacgtgcccacggtttttgacaatttcagtgctaatgttgtggtggatggaagcaccgtaaacctggggttgtgggatactgctggtcaggaggattataataggcttagacccttgagttatcgaggagctgatgtatttatacttgccttttctctcataagcaaggctagctatgaaaatattgcaaagaagtggatccctgaactaaggcattatgcccctggtgttccaataattctcgttggaacaaagttagatcttcgggaagataagcaattttttatggaccaccctggtgcagtaccaataactacaacacagggagaagaattaagaaaactgattggtgctcctgcttacatcgagtgtagttcaaaaacacagcagaatgtgaaagctgtctttgacgctgccatcaaagtggttcttcaaccaccaaagcaaaagaaaaagaagagaaaagcacagaaagcttgctcaatattgtgattaagaatcagaaggcttgctcaacattgtgatttaataaccagagattaataggaggtattgactgtctggccaacgtttaatgttgcctctccattggtttgtcttgttttgttccctatcctctgtagcagagcaggaagctgtgtatagtttggactgacttcttaggccttataatcaatcacatgattactgccttgtctgtctcattttcatactctgtaattaaaactagctcaattacatagctggtgcctacctatttccttctactattattatgttagtagcccatactgcttgctttgtgaatgtggtcatattcatttggcctttttgatgtcttctatgaatttctttaatggttttggtcagatgttgcatattttaaattttaacactcaagggatgttattgaaggataaaaaaaaaaaaaaaaaaaaaaaaaaaaaaaaaaaaaaagaaaaaaattttaaaaaaaaaaaaatttaa

SEQ ID NO: 12269 - DNA, 127 bp, Glycine max
  Clone ID: PAT_MRT3847_111087C.1
ctctttccttggatcaaacaaaacgttaatcaaagggttctacgttgttcaaacaaaggtgatgagcccctagatatctgtggctgaggaatcatatgtggcagattgaatttaaacttaatgtcat

SEQ ID NO: 12270 - DNA, 234 bp, Glycine max
  Clone ID: PAT_MRT3847_111088C.1
cccacgcgtccggctccctctccccgcttctcttctgttcaaacaatgtcgcaaaccgtggatgcgggcgtcgccaaaaaacttggctggggaaaggccgaaggcaagtgtctcccatggtcaggtgtttctggaagaactgctgctggatattcctactctgctctaggtcatcacagaactcattcccgcggccaacttagaggactaaagcgaggctttaggggcgcatct

SEQ ID NO: 12271 - DNA, 146 bp, Glycine max
  Clone ID: PAT_MRT3847_111089C.1
cccttcttttttttttttttggcagactacgaagggaaagttgacgtttagtgagcctagggacaagagcgcagatcatatccatgaaactcaaatcaacgtgaacatgagggtaattggccatacaccagacaggaaccaccaca

SEQ ID NO: 12272 - DNA, 321 bp, Glycine max
  Clone ID: PAT_MRT3847_11108C.1
cgcgtccgtttattttaacgattgaggttcattggttgttgccacggttgcaaagcgcagacagagagctggaactcatgacggtggaagcgaaggaagacggggacatgcttcatggataccatattggtgcgccgagagagcaagctcaaagagctgaagtttactttgacttcttccctgtggaggttgatagaagtgaatgaggagctcacattggtgaatagaaatccggggtctatgttccactgcctacaaaaactaatttggtggaaactcccaaggaatggcaactggatctaccttgtgacaaaaatccta

SEQ ID NO: 12273 - DNA, 507 bp, Glycine max
  unsure (1)..(507): unsure at all n locations
  Clone ID: PAT_MRT3847_111090C.1
ctgacgcgtgggtttcgcagcaaactgtttggaatcaaatggcaacagtgaggacaccattgaattttgtataagtngaaacatttcttgtggaattaatcgattgttattttctttaaaggatgtaaataaacaagtgattctgttaatgattaatttgataataatgatgatggtaaagaatatttatatgggtaggattaaggttaaacatcacatgctttattcatagatagacactgtgtattttcacccagttagtatgaaaacttgtctgtggaaacagactattgtgagattcatgattattttggagacatatattttgtctttgtagagactttttattaagtttctataccttgttgttcggatgattaaaactttacatttcaatgaatataaatttcataggtttttgaagcattctgttttttgtcataaattaatagattttttttttgttaacattatatgaagtacaattatcacattttttttttaaaa

SEQ ID NO: 12274 - DNA, 383 bp, Glycine max
  Clone ID: PAT_MRT3847_111091C.1
tatagaaatgcaagcagaagctgtgtgaaaaaagagagctcaaaatcttgtgggtgaatgaaaaagacagactcacataaaccttgctcatggatataagagaccattgttcttaaaatcagaagctgccaggatggatcaagttaacatagctcaatgtgaagctgaaactatccttgctaaatcaaaagcaacggcttagggactggctgttctctcaaaatcaatgaaagaaaatggatgacctgatgctatttgtttaacgatagcagagcaatatattcaatctttcagtaacatatcctaagagggcacatctatgtaacttactaggtttgcatgcaatcctgctcacatgatagaccaagctcttactatgtgta

SEQ ID NO: 12275 - DNA, 1046 bp, Glycine max
  Clone ID: PAT_MRT3847_111092C.1
cccacgcgtccgattaaaatattgtcacaaccaacttcccgaaacattgtccatcatgtggagccgatggatgaaaatggaataggaacacaatttgatgaaaaggttaaaggcattagtcagagaaaatttacctaaaagacaagataaaaacgaatggaccaaaatgatagagaatttgcagtactcaatcttctgtagtacccatggtatctaaaaaaaaacaaaaggtttccaaaatcgattacctaatgacaaaaaatagtaggagtaaattcatagattagtcttccaatccccttattatttgaacaagaaagtctagctgcggtagttacttatacatggtgatatattacaatgacaatacaaacatgcttacaacataagataaaggataaagggtttacaaagaaaagaaaaaaaacaagaaaaataaaatatttaagtagttcggtgctctagaagagttgtccaagtctaatcgcagggaactgttctgctaaaggtgatttccccatcagctttttagacacctgatccatggttgggcgagaacttggattttcacttatgcaagaaaatgccaagcttgcaaccaaaatgacatccccgacaactgattttagaggttgaggtagtctttggtctaacacatcaattagtagcaaattaaaagtcattgttgctgatgaagacgaagaaaacaatgaagaaatgagatctcctggatgcttccccgtgatgatttcaagagaaagcactccaaaactaaatacatcacatttctcagttacttccatagtctgggcaagctctacaataaatgaaagttttaaagttacactaaaccggtgtatagatttttgtataagctacaagttcctactaatattttctaaatggattttgtattggcacatgtcactttttacttcaattttgcatactaattgttgcttacggattagtctatttaattcctctacaagggaacaatgtttgtacaaaatttgaatataaaagtggtgtacattaattgcaaa

SEQ ID NO: 12276 - DNA, 405 bp, Glycine max
  Clone ID: PAT_MRT3847_111093C.1
aagctatggccattgattggttggctccaccattttttcttggcagataataattaatttaagtcctggggctggtaacctgtggatccatgatcatggactaaggggtggcggaggaacgtcccctgccaaaataagcctaatggcctcccaaggtggatataccaacggtggttccttttcaactgggggcaccactgccaaattggccggttactttccttccagggccggaactacctgcagtacctaaggtcccaattcctgaggtaatagtaattaccgccaaaataatccctggggtcccaaggacctatccagccactactactaatttggcaactggctaaataaactggtggtggccatcccaggggggttctggtttggtgggggtttaatttt

SEQ ID NO: 12277 - DNA, 1123 bp, Glycine max
  Clone ID: PAT_MRT3847_111094C.1
aaatctgaaatccacatcttttttaaagtacctgttacagttattgtacacggattggatgggctgaataacgcccaacaatttctcatttttgggggaccctttgaatgtaaaaatactataaaaaaaaaatgactatctaatctacataactgagtatcacgctgcttctggttgcaaagcatggaccaagggctgcttagattgtgccacaggaagagacctgatcgtaacttcctctgggggcttataacaaaatttatagttctattatcatacatacacattggcttccctgataggaaactacaatccctgctctcaaccataatgggaagcttcagtaatcattgtcttcatctttcattattgtgtttggaccatcatcgaaacccgtgctaggggcaagctcattcaaatcaaggaagcgtctctttcctgtgctgctctcaacttcctcctgaccaggactgcttaatttttcaggaggctggttttgttcattctcttctactgctggatatggaacaggctcatctactttcttttcttgttcttcattatcactgccatctgaatcttcactttccatcatgtattcaccattctcactgggatctgagtgatcagctgatgaattagacttctcagatttgatcaactctgtttctgattctgatgcctcacattgtcggtaatttatacgatttttagttgccctcttactgcgtcttagaccggattgtatctcacccacagacctgagtttggtttctctccttgtgcggccacgcaactgtttgaccttgaggggtttgtcactatcctcacttatgcttaaggaatcgtcatcgtcatcgtcatcttcttcttcatcatcttcaacattgtattcgtcccactgatattcttcatctccttcggagccactagaagacatccttttctgcttgcgtttcttgagatattcttcatcatatacggcttctccaacaatatcatcatcactgtcgaagtctgtctcattatctgatactgcctcaacaaactctctttctgtataccgtttaggtctccgtctttgacgattgctactcgagccgaatcggctcgagctcgagcc

SEQ ID NO: 12278 - DNA, 439 bp, Glycine max
  Clone ID: PAT_MRT3847_111095C.1
atgattcgaggtcttgatacagcgagatcaggggttgtcttagctcaaaaccggagacaaaagcaatcgatacttgattgcaagaatctgccaattgcttgctacttcttggtgcacgatttcttaagggaaagaaaatcactctctgtgctgggcacagacttcgagagtcatgatgtttggcactcttaggttatttgctgaacactcagctattggatataggacttcgagtcagatttaaactacatctgtctctttgctgagaactctggtgaagggcaagctcacgctggcgaaatcttggattagtgctgccactctcctatctggtataggacggcaggagcagacgcaactattgctgacctcacgtacactgcctactgctgactgatccggatggccgttcaaagtggacttatttgaaaaacacttg

SEQ ID NO: 12279 - DNA, 378 bp, Glycine max
  Clone ID: PAT_MRT3847_111096C.1
atcggggcaagccaaaacgcattgaaaaacattccaagccaacactcacaaaaaacccaacccaagaatcccccccaaccacccaaaatcaaaaatttacccccgtgaaccgaatataaaaaattaaaagggtacaccgacttaaaaaaccacaaaggcaaaagttccctaaaacccacgaatgccaaagggccccctaaaaaaaggaaagtaaacggaaaccccatgaggctcaaaagaaaaaaaaaccctacgtggaaaaaccgttaatccaacctggcccggaaaaaccccttaaccagtaccgttggggcaaacaaacaaacacgaccccccgaggataacaaaccatgggaaaccgccaaaaaaaactccccc

SEQ ID NO: 12280 - DNA, 447 bp, Glycine max
  Clone ID: PAT_MRT3847_111097C.1
atttgttctaatttattctataattaaaacatttaaatataaatcacataactttaaaatcaatttcattgataatcaatagctcaaacacacacttgattagtgtcatttataagtatatcaaaaaattaataagactttaataacttctttacattttttaattgttggatataattataccttattttctaaagggtgcgtttgatttgttaagaagacatgacaaacagaacaacactgaacaagtaattaagtcatatgataaccttttgtattatatgttgtttgatggtcaatgcacattataagtaattctatattgtatattgggcgatgtatttatatattgaataaaataatataaattttactataaaaattgaggtgcatgaacagcacaccttaatggcgcaacataagagaggcaccttgagcagccgctga

SEQ ID NO: 12281 - DNA, 370 bp, Glycine max
  Clone ID: PAT_MRT3847_111098C.1
aaaaattattttattaatggacaaatcctattctaagggttatggcaaaaaaaaaaaaaaaggaaaaaaaaaaaaaaaaaaaaaaaaaaaaaaaaaaaaaaaaaaaaaaaaaaaaaaaaaaaaaaaaaaaaaaaaaaaaaaaaaaaaaaaaaaaaaaaagttaactgttttaaagaataaaaactaatataaactcgtaaaacaacaacatttccatttattaaaaactaaaaaattacttccatttccccagctattacaatatcccaaagggaaaaaccctgccttcctccaaaataattgccctctaacaaaattcccttttgcccagttttcttaatttcaaaaaggccaaaacctcttgtatttt

SEQ ID NO: 12282 - DNA, 206 bp, Glycine max
  Clone ID: PAT_MRT3847_111099C.1
cgccgctcgagccgcctgccggggttcgactccgactcaaactttgtactaccagacagcgtcttcgaccagatctctctccttctccctcaaatggcttcctatctccaaagaaacatgcccctcggctctctttccaatcgagctctggtacccggtacgaggatctccaacccaagggcaggttccccggctatgaagggaag

SEQ ID NO: 12283 - DNA, 931 bp, Glycine max
  unsure (1)..(931): unsure at all n locations
  Clone ID: PAT_MRT3847_11109C.1
gccttcttttcttgaacnngaataggaaaaaaaaaaaaaactggtcccagccgtgtaaaccagctctcagtttataacagaaggtaccggattgtgtttgtttagaacagaataaaaacatgtgccacatcaacctggccataaaatgaggcatccttggactcagactacaataatgagaagaccaactttcaccccgtgcacctgtccttgccaactattaattccagtatccatttgttcaatcaacactactaataacctagtatcctacaacatacgattttgaaattcaccagagccacaaagccaagaacttattacttacatttactctttctagatattagtatcacaccttcattcacaatgtaagacatccaaaataagacaaattttcagaaactattcatcaaaactttctcccatggtaagggaaaaatgcaaaaagtatgtgtttcggggttgcctaatagcaaacagcaatatcattggggaagaaccactactgaacccctagattgcagccatgatgtagctgcttcactggtagccaaaaaccagccagccttattggcagccttatgaaatggagctttaagttccttcagatacaattcaaatacagtaggcaaaactttatctgaaaatctgtgtttcccacccccagtattaattccaagtagtggtggaagctcctcccctagttccaaagtcttagacaagtcatttatccaaacacttaaggcggtcagagcagctccaactgacagtctctttaggtgcagagaccactttgcttgagatcttgactgtatatctgtatatatctcaagagtcagcccaaggtccagaaggtcacgagctctgtctggcacatccaggttcacacaaagatcaattagacaattgcacatggacttcttctcgt

SEQ ID NO: 12284 - DNA, 261 bp, Glycine max
  unsure (1)..(261): unsure at all n locations
  Clone ID: PAT_MRT3847_1110C.1
cgcgcgtgcgcgggtcccctctagtgggggcgcccttcttttnctcnttttttnanaannaaaaanccccggggggctttttttttggactcagaatccccccccncctaaaaaggttcgtaaaaaaaaacaatgggcggggctttactacctcttggcccgagcaaaaattaagacaggggaacccagggcggctttaatttatttatcaattgagaataacccccttggcttaaaattgacaggtccccgaactttttt

SEQ ID NO: 12285 - DNA, 270 bp, Glycine max
  Clone ID: PAT_MRT3847_111100C.1
taagcaggaatagtataatttgaaatcaagcaggacaatgcacacatcgacccgaatctactctcatacaagaagaacctgcatacagggccacctagaacgcgctttacagaaaaaatggatcatgtaaaactgggagacacgccagtctattgatctaactttaaaggcactcccaacactggaaagctgaaaccggtgaagaaaaggcgtgcacgggagattaaccatgtacctttacacacatgcggttcgagctgactttaatag

SEQ ID NO: 12286 - DNA, 507 bp, Glycine max
  unsure (1)..(507): unsure at all n locations
  Clone ID: PAT_MRT3847_111101C.1
atttggccctcgaggccaagaattcaagcgttcagaattttctgtttttggactcttttttacttgaacttttttgggttttagttatttagataacaagagtcatgaaccacgacgatgatgttgtgatcgatattgaggcgatactggaggggacagagccgcacgtaacaaaagagtgttgcatctacaaagtgccctttcatattcgcagactcagagaagatgcctacactccaaaggttgtttctataggccctttcaaccacaaccgccatgttcacctccaaaacatggaaaaacacaaactcatgtactgcaaggcatttcttaaacgaaccaaaacaagttcggacagctggatgagctacatagaaggggtggagcccaaatttcgtcgctgttattcagaaacccttgagttcaggaagaaagaactggtcaagatcatctttgtggattccggttntatactcgagctctnttggagatcttgttctgaatggt

SEQ ID NO: 12287 - DNA, 414 bp, Glycine max
  Clone ID: PAT_MRT3847_111102C.1
cagggactcatgccatgcatatgctgatggactatgactctgatcatgtcacatccatggctgcatgctcttgcaattcccaaatgaaatatcccccaaagccactctagatttattcaacatatctacacacattatacaaaattccaacttgtcaatcgtactcaatcttctatccatttgtcaaaccataccattcaacctacctcgatgcttattgagatcactctttgaaccaccctcattgatattgatcagtcttagtcactctctgatgatagctacctagatttcacatgaataggctacgaagcataagccaatgcaaagttcctttcgaaaattggactcaaaaggagtctttaacatgtactacttacgctcatgaccaccaccaacgttgagaactcaact

SEQ ID NO: 12288 - DNA, 201 bp, Glycine max
  Clone ID: PAT_MRT3847_111103C.1
gccggctcgccccagcgtccgcagaacaaatattaaactcccaattttgtcttcgttctactcatcactcattctctaacctgaactttcaatgaaaagtatcattacttttcactgctccagtctcccctctttgatcttactccaaccacgtgatgctcaaaagtacggctttccaaggtcgccactttcggtctaatt

SEQ ID NO: 12289 - DNA, 502 bp, Glycine max
  unsure (1)..(502): unsure at all n locations
  Clone ID: PAT_MRT3847_111104C.1
attcaaaaaaataaattaaaatgaagatatacttcatttaatcatggtggtttcgagctgaggataccagttgctccaatagccggcgctaaacaacatggcagacaaggcagtcaccatccgaaccagaatgtttatgacaaccaggcttctctccggaaagcagttcgtcattgatgtccttcatccagggagcgctaatgattcaaggctgaactgaaggagaagctaaggagaatgtatgacgagaaagacaccaaccctgtatttgccttcaagttccgaactcattttggtggtgggaaatccactgggtttggtgtttaatttatatgattcagttgagaatgctaagaagtgtgagcctaagtacaggcttatcaggaaaggaagaganatcaaggaagcaaatgaaggagagaaagaatagagctaagaagattcgtggagttcagaagaccaaggcttctgatgctgccaagactggaaaaaagaaatgagt

SEQ ID NO: 12290 - DNA, 313 bp, Glycine max
  Clone ID: PAT_MRT3847_111105C.1
tgaagaatgcatgatcaaatccaaagacctacagaattatgctgacaaagccaaaaacattcatgaacaattgttccaaattctcaaggaaattgcgtatttccatggagagatggtctctctcaaaaactataatgcccttcactacataggattattgaaaatactaaataattttgacaagaaaactggagctattattcgcttgcctttcattcacaaagatttgcaacaagctttttttaccacttaccttctattcaaccttgggtaaggatgggaaacaatgcttaaccacctttttccggacaac

SEQ ID NO: 12291 - DNA, 517 bp, Glycine max
  unsure (1)..(517): unsure at all n locations
  Clone ID: PAT_MRT3847_111106C.1
ttcatttactccaataaggcaacattggctaagggcatcaataggtttgagtttggaattgggtggaaaacagagaaaccacacgcaagtcatgtgacttgctttgttgtataaattttcaaaggatgaccttcaatggtgacatgtgtgtgacaagtagggtattaatgatgatctttgttagacaactcattacttaacaaattctcatctatgatgagaatcaattatggttttttatttttatttttttaaaaaagggatcaaaatgaaagaaatttttttataggaaccaaaattgaaatttacttattttatgggtacattttttttaaattttttccacgtttgactgatggcatgatactccaatagctgtgttagtgttgttttttcaaaatggctgtacaactgttaagcttgctgagaaagctctctttctctgataaaaatatcaataaggttgtgagcccgtgacagaagtcacacttttcatcatcattangcattatctact

SEQ ID NO: 12292 - DNA, 307 bp, Glycine max
  unsure (1)..(307): unsure at all n locations
  Clone ID: PAT_MRT3847_111107C.1
ncgtcncngcacgcgtacgtaagctcggaattcggctcgaggcnagananannggatgccatcangtnatnggtgnnncantatntgncatnctactacnngtcaacntncancnattngacaagnccccgaactccaagctggtgganataacntgagncaantgggtcatggtnncttganagatangccatggtggcanaagatgcnnacttgtnangngtnnattgangcctaggccaccctccatatggnncgttcaaacnttcatgnangtncttaactttnnacagnatcnntanggagn

SEQ ID NO: 12293 - DNA, 1455 bp, Glycine max
  Clone ID: PAT_MRT3847_111108C.1
ctcttgttccaccaaccccaaaattgtgaacctttcaaagagacgaagccttcgaatctctctgaaacttttctcttctctttgattcttctctatcagttaaacattagaatgagccgttcacaggatccacacccttcccgatctttcttcccttttggaaatccttttcggatgatatcacctaaaggctctcgcatgtctccacaacttcttgcagtgttgcaagcttttgaggcaacattggcagagaggctgaaaaatcttatgcctaaaagcaaggatgaaatcctcaccttgtcttggatgactttagctatgaagtcactttgtgaaagtcacaatgacatacggacccttatgactgcccttgagcttcctgtgagtgattgggaggacaaatggattgatgtgtacttggacataagttcaaagttgctagacatttgcaatgcattcagctctgagctttcacgtctgaaccagggaaaccttcctcttaagtgtgcactgcacaatttagactctgcctcttcaaagcagtatcttcgggcatgttccctacttgatgattggaggcagcatgttagttctaggaaccctagaattgagaaatgtagttctatgttagataatcttgtgggctcacttgatcttcctaaggttaaaaattctgccaaaggaaaggttttgatgcaagctatgtatggagttaaggtggagactgtatttatttgcagggtgtttactgcagcattctctggctcgtcaaagaagttatcagacttgaatgtggccgacatacattcatgggctccagattttagaaggttgcaggatcttgtaaatgaggaaattagagttagattttctggtggtaaatttactgtattgaatgagttggaagcggttgatgcctctgtgaagatattatatcctactatccaagctggtgtagataccgttgagacagaatggcttgtgaagactgttgaggaattacgtgcgggtgctgagaagctttcacaaggaattgatcttcttgcaaagggagtagatgggttttttcaagccgttatgactagtcgcgatactttgctcagctctgtgaggtttgataaaactgtaaatgatcgttccccaggccgtaacagagacatgcaggtagttcactaattatgcagtagcctaactctggtaggttttgggggggtgttcctttgtaggattagtagtattttcggtctttagtagtatttagccgaaatgtatatgagtggggatgttatgtgtaatgtcaaacaattacaaaatgcagatctttgttaaaggcgagctatggtggtgtaatttatcgccaggtgttcgcttttttgctttccttggtctcccccatcgctgtctgtttatgatgcttaatgtagcggcttgccgttccgtgtgtgggacaagcct

SEQ ID NO: 12294 - DNA, 414 bp, Glycine max
  Clone ID: PAT_MRT3847_111109C.1
gcacgcgcacgcacgctcggaattcggctcgaggagacgaagccttcgaatctctctgaaacttttctcttctctttgattcttctctatcaggtataattcttcaccctctcttctttgatttctcctaaggaataaggaaagaaaataagctcttattttctatttcgtgagaataactgtagtcagttaaacattagaatgagccgttcacaggatccacacccttcccgatctttcttcccttttggaaatccttttcggatgatatcacctaaaggctctcgcatgtctccacaacttcttgcagtgttgcaagcttttgaggcaacattggcagagaggctgaaaaatcttatgcctaaaagcaaggatgaaatcctcaccttgtcttggatgactttagctatgaag

SEQ ID NO: 12295 - DNA, 354 bp, Glycine max
  Clone ID: PAT_MRT3847_11110C.1
cgagatctttgttatgcttttggagccactcatagcggtgttttctattttgagctacgccgatttctaccagttggctggcgttgttgccgttgaggtcaccggtggacctgaagaaaccaaacatactggaagagaggacataccctgcccaacaccaaagggtcgggtgcccgatgccactaagggttctgaccatttgagagatgcgtatggcaaaactatggggataaagaaccgagatatcgctgctctgtctggagggcacactattggagctgcgcacaaggagcgctctggattcgagggggcctggacctctaatacacggacttgcgacaacccatacttcac

SEQ ID NO: 12296 - DNA, 297 bp, Glycine max
  Clone ID: PAT_MRT3847_111110C.1
ctcgagccgaatcggctcgagttttggagttggtaactagggttgctccctcttgacccagagtatggagaaagtgatctatgaaaatgggttgaggccacatgagatcacataggactggatgatgtgattgatcccactttggatattcaatttacggaagaaatcagtacagtactcaccgtggggctatattgtactaactctcttgctataacccgaccttcaatgcgtggggtggttcaaaagcttattgaaggtaccgtacttccaaaatccttaagaggaaaactttct

SEQ ID NO: 12297 - DNA, 338 bp, Glycine max
  Clone ID: PAT_MRT3847_111111C.1
gggaaattaactctcgttaattgcagggcatccataggatccttttgagggtgtccgagggaaagtgattgatcttcaaatggctacatggtcaacttcaaagatttttgggttagaacatgtattacatggtggacactcagcgcaccttgttgggaaaaccttattaattttttgtggacgagatgcagaacggacacttcttgagtgatcttaatatgcttgacttggaacccatcacatgagactaaatttatgctgttggggtgcgcactaatggaacgacagttgatgctgctcgtgaacacgacgagcgatacttactgatattcggtggg

SEQ ID NO: 12298 - DNA, 369 bp, Glycine max
  Clone ID: PAT_MRT3847_111112C.1
aaggctttgactgaaagagctgtgaaggttgttgaagaggtcaagttcttcccaaattatgcgcatcatgttgccactagtgatcatgcaggtgatatcctaaagagggtctacatgattccagaagaaagggtccatattattctcaatggtgtggaccaacacatttttaggccaaatgtttcaaaggggaaggacttcaagaagaggcatggcattccggattcgaagtcattggtgataggactagctgggaggttggtcaaggacaagggacaccctctgatgtttgaggcattgaagcagataattgaagataatagcactctccaagagagtagcatggctgtggctgcaggagatggtcct

SEQ ID NO: 12299 - DNA, 397 bp, Glycine max
  Clone ID: PAT_MRT3847_111113C.1
tcgggaagaaattatatgatgattagaagcatagttcagatgatttatctgtgattaattctgtttttagtctttcgctcctatctgatgacagagaaaagaaaagaagaaaaaaaagtgagtatttacttttacctatttgtcagaaaaattgctgctctacttgtattggaagcctctttgctcgtttctccgacagtatcaactatcaactgcatatttttaatgtcatgtatgccttataatagcatatgtactgttattgtattcttcagtggttaacaatatgatatggtaatatatcatgactgaaaccataagaaggtttggtaattaactgtcttgtaaaatactatctatagttttcttctgttgtataagtgcaatcttttttatg

SEQ ID NO: 12300 - DNA, 455 bp, Glycine max
  Clone ID: PAT_MRT3847_111114C.1
atctgcctcatatgggaaaagtaaggagcagaaaacatgccttacagtttctaagggtagctgatgaattgataagcacctctgacaacaggggaattatcacttttgcggatggggatgcttttgagaaagtgaaaaataacttgaatttcaggtcattttttgatgggcacttggtgcattaccaagccttgttagaatcaatggaatcacatttcccaaccagtttctcagaagcaagaattgccatggagaaattatttttgcaaccttgcatctcttctcttgattggttacaaacatgggaggagatgaaaaggggaggccatcttgaggaagaaactagcttagagggttgccaattgagcaaaaatatcttaatggaaattagagaagtgttgagaggaagtgatggttcctatcaggccaggattgaaggacaacatgacaatgaa

SEQ ID NO: 12301 - DNA, 340 bp, Glycine max
  Clone ID: PAT_MRT3847_111115C.1
ttctttttttgtttttccaaaaaaaccatattttaaaagctaacatcgtccatttgttgtagcggggataataaagctaagacgtccaatggggacgacacccaccatataaaatcgccgtcttttttaaggtaccaaaacactggttgcacaagatgcaaacccttgtacagaaactggaatacaaattgattggccaaatgccaaaaaaaattattccacgtgaaacagtaacaatcatcggtcaaacctttttatcaaaagaggccatatgaccaaatcgagggaaaccggcttgagtaatgttgaactggcggaacctaaaactagaggttggaaa

SEQ ID NO: 12302 - DNA, 1156 bp, Glycine max
  unsure (1)..(1156): unsure at all n locations
  Clone ID: PAT_MRT3847_111116C.1
tgttaacatggttaacttgtcaggatgcacctcatttctttgtcagtcattaccatctgtccaatcagtagtttcttctactggtgataggttgacgtatacggtcgaacccaatcagttggttgggtctgaggatcagcagtttgtctccagaacacaggacaacataatttatgccaatgacttgtccagttctccttgtatccataggatagacagcacagaaatgcaagagccatcagatgttgtgaaagatgattcaaaattggtccctgtaaatagttttggctgtggatcagacgctaagcaaacttcctatccaacggatgaaaagccaaatgtgcctacagaacaagaggacacaggtgctctatgttatgaacctccccgctttccaagcttggacattcctttcttaagctgtgatcttatacaatctggaggtgatatgcagcaggaattcagtcccctaggtatccgccaccttatgtccgcttctatgaacatgaacctaactccttttagattatgggactcaccttctcgtgatgatagtccagatgctctgttaaaaagtgcagctaaaaccttcacaggtacaccatctatattaaagaaacgaaaccgagaccttttatctccactatcagataaaagaattgacaagagacttgagattgaaatgacatcaaccttgataaaaaacttttcccgattggatgtcatgtttgacgacaatgaaactccggtagcagatttgcttcctgcatcttcaatgcaaaagagggactctggtacctctgttgaaggtgataaagggagttgtcgacaagctgttaaagtggaacaagtagaggataaaaagaagtctgcaattttgaacgacaaaaaatcagaagacgattcgggtgataacaattctctggataaaattaagcagcaacctcttgatgttgattctgagataaagaatgatgctagtgctgctgctgaaattgtgcaacaaccatctggaattttggttgaacatgatatgaatgatctgttactgtattcacctgatcaggttaatttgaaatcagaaaaagtcttagtttaagtgctagaactaanaaaaatccatgctcaaggattaaactcacatctgtttgggtaa

SEQ ID NO: 12303 - DNA, 333 bp, Glycine max
  unsure (1)..(333): unsure at all n locations
  Clone ID: PAT_MRT3847_111117C.1
tcggtacagacgaacggcccccgcagacgcggccggcggcgaccagaaaagcggacccgaccaccaacccagaaaaaaggaacaccagaagagcgggagcaagccaaccagaaaccacaccgcgccncaccgagccaccgnacacaaccacacncccatcaggacccaacacgaacacgaacaacaacaccnccacgaggggcacgacgaagacgacaagaacaagaagcccaagaaaccccacgnccaggcgcaggcccaagcccaccatgcccaggcccnggcccacaggacagccgcctacaccgccccggcgggccacaaccacggcgc

SEQ ID NO: 12304 - DNA, 502 bp, Glycine max
  Clone ID: PAT_MRT3847_111118C.1
tctcaccattcctgatggtgttgacaaaactagtgcatctttgcaatttagaaagttagcacattgtgattttctcaagagaaactttaagcatatgtctaatgttctgtgggtggctcctgaggacaaggcgagtttatggtcacaaacttcattatgtttcgtgtataatctgtaaatgcaagaagctgatctcgtctatctcgtaaatgtggtacgagaattgtatttgcacagaccagaggaagctcgccaactgagaaggaaagctctgtctcgtattgtatggctgctaacagctgatgtgcctaccatagcacagattgaagagttccattcgatgcacaggatgatgactgctcctgattcaagtgattatgttgatctactgttgagcattgatttgttgggtttacaaggagtcagtaaagcttttacaaacaagattgcttttgatgattaacttgtgttggctaacacacaagaattctttgatggaaat

SEQ ID NO: 12305 - DNA, 1277 bp, Glycine max
  Clone ID: PAT_MRT3847_111119C.1
cgcaagcaacggagactcggagtcgagacacagtaaagcactcatgatacatgctctctcttcggagaccaattctccagttcccggcgatgacgaacaagagaaaaagatcccagaaacataccccaccacctcctcctccctcaacacccccaactccacaaacccaagcccgccactccctcaacaccgcaaaagcccgggcctgggcccctctcagcctcacccgccacgaactctccttacccctcaccttccccacgggccaaaccttcctctggaaaaacaccgccccttcacaatacaccggagtcgtcgggccccacctcatttccctcaagcacctccaaaacggcgacgtttcctactgcctccactccccctcccactccgacaccgccgaaactgccctgcttgacttcctaaatgccaccgtttcgctcgccgacttatggaagacgttttccgcttccgacgcaaggttcgccgagctcgcgcaccacttaagcggcgcccgagtcctccggcaagaccctttcgagtgtttgattcagtttctgtgctcttctaataacaacatcggaagaatcacgaaaatggtgaattacgtgtcctccctgggaactcacgtgggagacgttggagagtttcagttccacgctttcccttctttggaacaactttcctccgtctcagagcaacaactcagagacgccggtttcggttacagggctaaatatataattggtacgattaatgcattgaaatcaaaacccggtggaggcgaagaatggcttcgttctcttcgtaagatggagcttcgagatgttatatctgcactttgtacgttacccggtgtgggtcctaaagtggctgcttgcattgctctcttttcgcttgatcagcaccatgctgttcctgttgacacacacgtgtggcggattgccaccaagtatctcttacctgagcttgcaggttcccagttgacacccaagctctgcgatcgtgttgcagaggcgtttgtaaccaaatatggtaaatatgctggctgggcgcagactctattgttcatagctgaattaccctcacaaaaagccctcctaccttcacatttgttgactgttaaacaacgcaatgctgcaaagatagaaggcagcgaagaagaagttgattgagatctacagttggtgtggttctcatgatataaatggacaagatgtaggtgtgacatgctgttgccaagaattcattaagtagaacatggtgatatcacgctg

SEQ ID NO: 12306 - DNA, 352 bp, Glycine max
  Clone ID: PAT_MRT3847_11111C.1
cgaaaaaaactgcatttacatgaagcaaaaggggattattaacctggggaacaccttttcacttttcgggaacctatgtatcttaccgacggggcacccttctacgcagggccaccccaacaaaacaacttcggacgtgggccacctggggacatttaggaaagaaaacagcttccagggaatggggtccccaccgaagaggctccgagcccctacagtttcggaaaagaactcccaccctcttggggcacttgccattgccgccatagacccggtggcaggcccggctttaccctggggcgtgacacccactctccccttggggagccccacctttgccatgaagccccct

SEQ ID NO: 12307 - DNA, 799 bp, Glycine max
  Clone ID: PAT_MRT3847_111120C.1
aatgataatactctcttttttaaagatcacgttgttgataatcaaatgattattgaagatagggtaacattttagagaaaatattactttatgcgttttatttgcatgcatatagtctttgattttgttttaattttcaatatctcttatatatcattcaattattgcattaatgtgtcgcgtccgcccacgcgtccgcccacgcgtgcgcacacacacagctagcagatattacatacacgtgaatcactaattaagccatggagaagaaatcaatagctgggttgtgcttcctcttccttgttctctttgttgctcgtaagctactacttttaataagaagttgtggtgcaaactgaggcaaagacttgcgagaacctggctgatacatacaggggtccatgcttcaccactggcagctgcgatgatcactgcaagaacaaagagcacttgctcagaggcagatgcagggacgattttcgctgttggtgcaccaaaaactgttaaatggatccattcactccaacgtgaagaagatgcatgcagcgctattttataaaaaataaaactactatatactatatataataagactggcgctgcatcaatgacctatgtattatagtatatattattaccgatgtcagaactatagatgcatgtactgtgcataacggctgagttatgtacttatgttaagaataaaataaagtgctgttgttgcaaaaaaaattagatgcatattgttcttagtacgatcggtttaattaatctacgctaaattccgcgtgcatgcaag

SEQ ID NO: 12308 - DNA, 357 bp, Glycine max
  Clone ID: PAT_MRT3847_111121C.1
gtaaacaaaaattagtgctctgggaatcagctgttgggaatagacacactggggggtgggttaaagcaacacaccaaggaaaaggggggtgtttatgtaacaacataaaacaaattcagcgtgaattcggtccccaaaatttaagaagaagcttagccagcaaagtctgcaaaaaattttcttggcacatgggcacgggtaccttactatgaatctgtcggggctaggaaaataaaaccttgcctcttatgagcctaacaaggggttttttctcttatgaccaccggtggttttcagcatatttattcgtcatagaatcaacatatatagacgggtttttttccatgctttcgtgaa

SEQ ID NO: 12309 - DNA, 931 bp, Glycine max
  Clone ID: PAT_MRT3847_111122C.1
ctctctctcagttcttcatctcttctttctctctctctctactcagttcttcatctcttctttctctctctctgtctaccctcacaacacacattgagaaaaacaaccctcactccctagatggggccttccgagaacgagccacttgtaaattcccaatttttcagttgaattttaactgcaattggtagattacgatttcccctacctgaaaccctagccatttgtagatgactcacttgtaaattcgcaattttgttgctgaatttcagctgtgattggtagtttcattgcatcttcgcgaccaattttcgggagaaaatggcagaactcgatctgtccaagaaagtagccgataggtatctcaagcgtgaagtccttggtgagggtacatacggtgtcgtttacaaagccattgatacccagacagggcagacggttgcaattaagaagatccggcttggcaagcagaaagaaggggtcaattttacggctctcagagaaattaaactacttaaagagctcaaagatccaaacattattgagttgattgatgcctttccacataaagggaatttgcatcttgtgtttgagttcatggagacggacctcgaagctgttatacgggacaggaatattgttctttcacctagtgatataaaatcttaccttcagatgacattaaaaggccttgctatttgccacaagaaatgggtgttgcatagggatatgaagccaaataacttgttgataggatccaacggacagctgaaacttgcagattttggtttagcacgggtatttggaagcccagatcgcaggttcactcatcaggtgtttgctcggtggtatagagcacctgagctattatttggcaccaagcagtatggtcctggggtagatgtttgggctgcagcttgtatatttgctg

SEQ ID NO: 12310 - DNA, 672 bp, Glycine max
  Clone ID: PAT_MRT3847_111123C.1
tcgcccacgcgtccgttttccccttttgccttggcttttgacgccttataatagagtgaacgaggaagatagttttggttccgctgagagggccttcaatactgcgcatgacaatgcgatggggttgcttggggatgcgtttgcgaggcttcgtgccagctggcggcttctcgcggcttccaggaagtggaagcgggactgtgttgagcatttgccctttgtgcttgttgctggttgcttattgcataattttgttctcaagttcaatgaggcaatgccggatgaaggggtggaaaaggaagaggggcttccttcgtttgatggagtggaggatgagagtgctgttagggtgagagatgcacttgctttgcatttgagtaggttgagcttgagaaaatgaattaatgaatgttggaagaactagtgggtgtttcattggtgaacttgtttgaaaaccatctatggccatcagttccattatgtagtagcattttgtcatatcctaggattttttttctgaaactgctagttaataagtaaggagcaagttatcaaaaaatttcctttgaatgacaaaggtgtatgcattagagttaggtagaaaaattcacatgattaaagtgtttgagtagaaagaaatctgcaatgaaactaaattccaattgttgttat

SEQ ID NO: 12311 - DNA, 397 bp, Glycine max
  unsure (1)..(397): unsure at all n locations
  Clone ID: PAT_MRT3847_111124C.1
gttgcctttcgggcaaaaggggcgaaagataaaggggactatggcgggtatggagaagaatgggtcggatatcaacagcaacaccagtgccggagggaccgaggaccaaggccgaggcttcatagggaggggcagcgatgcgctgacatttgttttttccaaaatccccatccagctgattagggcnaccaatgttgatggcgggaaaggaaaaaggggaaagaggacaggattnagaggaaagataacattaccaacctagggaggtggggaaccaggatnggacgagactcgtgaatgggacggggacgncggagatcccggtgacanatctatgaagaaattcgtgcagnatgagttgtaccgcggggccccaattctcggggaagtggcagaa

SEQ ID NO: 12312 - DNA, 514 bp, Glycine max
  Clone ID: PAT_MRT3847_111125C.1
ggcagaatgagtgcaagtgcagaccaaatcagcgaatgcttccagatctttgataaagacaatgatggaaaggtctccattgaggatttgggcaatgcactcaggtctcttggaaagaaccctaccaacgccgagctcaagtccattagagatgaattaggaaccaaggactttgatttggctaccttgaaaggagtttaccgcaagcccatcaagaccccaactgagcaactcaaggagatggttgatgctttcaaagcgttggacaaggaaggaaatggaaccattcaagaggctgaacttagacaacttcttctcaatcttggtgactccctcacaactcctgaagttgaggagcttatgaaagaagttactgttgccaatgacggtggaattagttatgagagctttgttgatatgattgttaatggataccctttggcttcatcttaaattatttgataactcaatttaaataatttattctgttgttgtgcatataatagagagagat

SEQ ID NO: 12313 - DNA, 674 bp, Glycine max
  Clone ID: PAT_MRT3847_111126C.1
aaaaaaatgaacactgctttacttcaatgacccgtttctgcttcgcccgacccgtattgtggttcgggtaacccgatcgggtcggagctcaccatgtctgttacttatgttgttcaccatttgcagaggttgtcgtgtcgcagaaacacacaactaaagccacttcttcttcagtttcaccgacacaatgcctttcatctccaaaattcagcgccaatccgattacaccctctttggttccgccactcccatcgtcatcgacaatggcgcctcctatttccgcattggatgggcaggagagactcaaccccgtgttgttttccgcaacattgtccaaaggccacgccacaaaacaaccggagaaaccgtcactattgttggtgaccatgatccagcattactgaaatactttgactgtacacgctctggaccccgctcagcatttgacagcaatgttgtttaccagtttgaaataatggaatatattctggactttggatttgaccggttgggtgctacaggatcagagattgatcatcctgtcctgatcacagaatgtgtatgcaacccagttcagtctcgtagtaaaatgggagaacttctttttgagacttatggagttccatctatagcctttggtgttgatgcggcattcagcttataatataatcaac

SEQ ID NO: 12314 - DNA, 1034 bp, Glycine max
  Clone ID: PAT_MRT3847_111127C.1
cacgcgtccggaaaaatccaccgatttgttcttgactgcgaactcaagcaaccgtcaatcgctcagtgctctgatattgtgtcaaagcaagtgaacgagaactctgactccatggatgaacatagtttgtccaatggaacccatgaagtttctccggataagggtcacacacttcccatattgaagaaaatacttgatctcggtgctaaaattcaggatttgaagaagcagcatataaccttgtgtgatgaagtgaaactcacttctgagtcttttcctggcaatgatattttgaagtctgtacagcttctaggtgctgaatatgaagtgttgaaaagaaagtacgtagaggagtcctctgagcgtaggcggctttacaatgaagtgattgaactaaagggaaatatcagagttttctgtagatgcagaccactaaatgaaagtgaaattgcaaatggatcagcagtatctgttgtcaattttgagtcatcttctgatgagctccaagtcatttgctctgattcttcaaaaaagcacttcaaatttgattatgtattcagacctgaagataaccaagagactgttttcgaacaaacaatacctatcgtcacatctgtgttagatgggtataatgtttgcatttttgcatatggtcaaactggaactggcaagacctttactatggaaggaacacctcagcataggggagttaactatagaaccctggaggaattatttcgaatatctgaagagagaaatgatgtaataaaatatgaattgtttgttagcatgttagaggtttacaatgagaaagattagagatcttttggtggaaaattcagttgaacctacgctgccgttggagcccaagcgggccccggacgggtcccagctcgtccctgggctccttgaggcgtgtgggtatggctcagatctcgtgtccgaatcgctgcagtctggtccccctgcccgatcggtcggacccgccagtcccattgcgctttgcagtcgttctcattgttttgtgcgagtga

SEQ ID NO: 12315 - DNA, 367 bp, Glycine max
  unsure (1)..(367): unsure at all n locations
  Clone ID: PAT_MRT3847_111128C.1
aaattattggtctctgttatatactttactttccaccgcactcgnattgactgaagcgtatgctacaaccacttagggttataattactatggactacgaacaacattttattctcattatgatatcacattcacattttattaaaagagactcactctggcagaaaagaacgtttcttcggcgagctgccgaggacgaggaacaagttaacatgactctgatttccaatttcgacgattaaagccacgcctacattcaaatctccaacaccgtgcttcaaattagcaccgattcatggttttaaatggggttcgtgctgacaaacaacatcaaaaagccctatttgcttggatattcaaggaccat

SEQ ID NO: 12316 - DNA, 787 bp, Glycine max
  Clone ID: PAT_MRT3847_111129C.1
aagaaactcttctttggagatgaaacccctgccttgaatgcgttgcaaactttggctgatctgtctctaatgatgccaatatctactatggaatctgaatcatctatccagttgaagggcgaaagaatggttgctgataagaataataggtctgctttacccgaagcaacatcaacaagccataagagacataaacttaaatacagtgtggtacctaaaattgaggttttgacctccaaagagtctaagactggaaaggaaccgacaaaggatactaatgctctctctgaatcgaaagaaaaacttccatttgctgatacagcatggaaaagaaagcggaagtctatgggttcaaaggttgcaagtgcaaagcttgattcatatccaagtggtcccttgaaagatgaggccttagatgatggtaacaaaccggtggttaaaggaaaacacacggatcaggcttttaccctaccaaagcaattgaagacagttaagtcgtcagagagttccttgtgtagtgatcagaaagatttaacagtatcaacggcagaaattccacttttgaatgaagttagtttaccaactaaacaaagaaaacgaaagatgattttacagagaacttccttgcctaaggaaaagtcttctgattacatattgaaaagtcaatctaataagtactctacccttaaggcaaagctttctagttgcttggcatctatatggttcgcagatggtttattttgaaatggtattacagtgcaattgattatccatggtttgccaaaag

SEQ ID NO: 12317 - DNA, 525 bp, Glycine max
  Clone ID: PAT_MRT3847_11112C.1
ccagagtcctgtcactacaaataaaacgcctacgaggaccgcctagtattcaacgctacccactgcttaatactcgtcacagtaataagtgtctgtctgggctgcgacaccaataaaataaaacacacaaggtacggtgccacgggcgcacccgcaggacgctaaactactaacgccggctgccacgcaaggatgatagaataggccaactaaaacagccgcacaggaaaaagcacgagaaactcaaccgggcccacacccaagtttaacacggctgacaaggtaacttaataggaccgctaccacctagtagtcagcgcttgcccctgcttaatactagtcacagtcattagtgtctgtctgggctgcgacaccaataaaataaaacacacaaggtccggtgccacggccgcaaccgcaggacgctaaacaaataacgccggctgccaagcaaggatgatagaataggcgcactaaaacagccgcgcaggaaaaaacacgagcaactcaacaggcccgcaaccc

SEQ ID NO: 12318 - DNA, 905 bp, Glycine max
  Clone ID: PAT_MRT3847_111130C.1
tagaagaaaggtttagtaatacaaatacatctccggcgatggctgtttccacctttcaggcggcgccaccgaaacccacattgggttccagtcttcttagccgtcgtatgaaacacgttcccttctccttgtcatttttctccgctcctaagaccatctcttcttacagacccatcctacgcattcgcgccatcgacgcggcccagcccttcgactacgagtccagaatggcccaacagttccacgactcccagaagctgaagatcgccatcgtgggcttcggcaacttcgggcagttcctggcccaaaccctcgtccgccagggccacaccgtcctggcccactcccgctccgaccactccctcgcggcccaacaactcggcgtcaccttcttcccaaacccccacgatctctgcgaagaacaccccgaagtgattctcttatgctcctccatcatctccacccagcgcgtgctcctcactctccccctccagcgcctcaaacgcagcacactcttcgtcgacgtcctctccgtcaaggaattccccaaaaaccttctcctccacgcgctcccccccgatttcgacgttctctgcactcaccccatgttcggcccccagagcgccccacgcgcctggaccggcctccccttcgtctacgagaaggtccgaatcggcgcccacgacgaccgccgaatcgcgcgctgcgagaaattcctcggaattttcgccagagaaggttgcaggatggtggagatgagctgcgccgatcacgacaagttggcggccgggtcgcagttcataacgcacaccgttggtagggttttggagatgctgaccgtaaagtcaactccgattaacaccaaaggctacgagtcgttgttgaatttggtgggagacacttgc

SEQ ID NO: 12319 - DNA, 290 bp, Glycine max
  unsure (1)..(290): unsure at all n locations
  Clone ID: PAT_MRT3847_111131C.1
ttttntcnnttttttttttttttttttttttttttttttttttttaattanttctaatccattaatttccattgaattccaaaaacaaaaaccaaaaatacngaatgataaaatttcaaaaagcaaaaacaaagggaaatgtttntaaagtacaaaaaaacaagagggggggggcggttaactttgctttgaggattttgaacactaagaaccttggggccttggagggaataaagttccccccccgngctggggacaacggtgggagatccgataatacggataaaccc

SEQ ID NO: 12320 - DNA, 554 bp, Glycine max
  Clone ID: PAT_MRT3847_111132C.1
ggctcggccaaatcacacatacacacactcaaatacatacactagtagtgtggtgtgtgcccttcctttatccttttgctttttgtgtgcaattaacacacactcacacaaaaatgacggcatgccaagattggccagagccagtgattcgagtccaagccttggctgcaagtggcttagccacaatccccgaacgtttcataaagcctaagtcccaaagacccactaatagtaacaattatgctccaaagaccaattcctctcaaattggtcatcataagaacaataccaccaacagcaacatcccagtgattgacatgaagcacatctacggtggtgacgagggaaagagggctgagacgctccggctcgtgtcggaggcgtgccaagaatggggttttttccaggtggtgaaccatggagtgagccatgagttgatgaagggggcaagggaggtgtggagggagttctttcaccagccacttgatgtgaaagaggtgtatgctaatacacccctcacttatgaagggtatggaagcaggttgggagtgaaa

SEQ ID NO: 12321 - DNA, 312 bp, Glycine max
  unsure (1)..(312): unsure at all n locations
  Clone ID: PAT_MRT3847_111133C.1
annaattntaaaaaaannnnnttttggggaggccaaatgaaaccaaaattacttttttattgtttttttacaaaactgttagtaccaccacaaaatttccataaaaggataaatttccctaaatgctcccatattccagcttgccaagccagctaaaactgatttcccaaatcccctgaagtttaaatctgaaaatcctaacaggggcttataaaacggttatggaaaaagaggtttaagttgagcttgaaataaatcaccaagagctccccgaacatccatttgataaaacaaaggatttttgaccagctt

SEQ ID NO: 12322 - DNA, 336 bp, Glycine max
  Clone ID: PAT_MRT3847_111134C.1
cccttgattagtagacctctccattgcctaagttaatcctctatatgtactattctacctgacatagtccttaagccatatcggtgggaatgctagaagattgatatattttattctccacctgatgatcgaaaaaagatatatgtatttattatgcctaattttcatgagtgtgtttgcatactccacttctttctttttcagagcatgttatactaattcttgatcatattcaaagctttgtgtgacattcacttgtgctccttgatatacatgtactgctggattcatcatatactattaggtcatcttgaacccgagtatgatatacagatt

SEQ ID NO: 12323 - DNA, 799 bp, Glycine max
  Clone ID: PAT_MRT3847_111135C.1
ccacgcgtccgttgagactgagaagcgtgggatagcttttgatcaattacttacaattcctgaacaagatgaatgggtatacagtgatgggaaatcaacaacatgtgttgcctttattctttcaatgtataaagcggctggaatattcggccctatttctagctccattcaagtaactgaattcacaattcgtgatgcatacatgcttaggatttttgaggataaccaaacacgtctaccaagatggtgcaacaatgagaacgatcggcttccattctgccagattcttggtgaatataggatggaattgcctggctataacaccttggatccatatgccaatatgaacgagcactgtccttcccttcctccaacttatgataggccattgaaatgttagatacgtctcttctccggcattaccattttctgatttgtctgttatccgtgatctcatggcacctaatagtttgctgttgtggaattgtctacaaaccgagggagaaagtgcagtacggaacttcaccttagccttctcaagttgactaaggggcattgtatataagaaatttatattggtgggatagtgtgatgttttattgacttaaattatcaattataagaggataattacctatgcttcgtgatgatttatgttctactatctcaatgaaggaaacatgtcagtaaagatcattgtaattatggcttgaaatcttcgttctgaattggagttggagagaccttttgtattcactgtttggaaataaaatttgattatcgcgtatgatttggtaaa

SEQ ID NO: 12324 - DNA, 695 bp, Glycine max
  Clone ID: PAT_MRT3847_111136C.1
aattgagactgagaagcgtggtatagcttttgatcaattacttaccataattcggctcgaggaatgggtgtacagtgatgggaaatcaacaacatgtgttgcctttattctttcaatgtataaagcggctggaatattcggccctatttctagctccattcaagtaactgaattcacaattcgtgatgcatacatgcttaggatttttgaggataaccaaacacgtctaccaagatggtgcaacaatgagaacgatcggcatccattctgccagattcttggtgaatataggatggaattgcctggctataacaccttggatccttatgccaatatgaacgagcactgtccttcccttcctcccacttatgacaggcccttgaaatgttagtctcttctccggcatttccattttctgatttgcctgttatccatgatctcaaggtacctaatagtttgctattgtggaaagtgcaccacggaacttcgcctttgccttgtcaagttgactaagggacattgtatataacaaatttatattgctgggatggtgtgatgttttatagacttaaattatgtcaattgtaggaggataattacctatgtttcgtgatgaactacgttgttctactatctcaacgcaggaaacatgtcagtgaagataattctaattatggtttgaaaaattggttctg

SEQ ID NO: 12325 - DNA, 959 bp, Glycine max
  unsure (1)..(959): unsure at all n locations
  Clone ID: PAT_MRT3847_111137C.1
ccctcgcgttcgcccacgcgtccgcccacgcgttcggtgtttttgtggataaatattcagatttaagtggtgggtcagctactatggcttcctctctgttactggcggtggtgtctgtgcttgatctgggtgcttttgctctcgctgttgctgcagagcagagaaggaatactgcctcgttaaataaagacagggcaggtagaaactactggcaatatgactcagacattgcaaccggcctaggtgtggggtccttgattatcctagatgccagtcaggagatcattatggatgtaactgggtgcctgtgctgtgggagagctatgagacccagtggatcaagatcatggtcaatttgcttgttcatcactagctggtatgtgttaattgctaaatcctagtcttaaaaacagaaattatatgtttgctctaaattattcatttgttgatttcaattcacagaaacaattggtttatttagttttttaggaactcgtttttttctgtttctgttttctattttcactaaaaattataaaaatatcacctctacctcattttgtcttcaaagattttcactctctatcaccctataacagcattgtttttctatgatttcttgcacacaagattgaaacaaagtgaaaataacaatgcattatcaatttatcattattagtgaaaatatacaactaaaaagcacatattcttacggagacacatgacatancacatacacaacatatataatttttagaagagtgtcacgaacacactctctgtgagctaattgtttttagaaagatttattaaataagacgcaggactcatcatatttttgggattcttaataaatttcaaccaataaaatgagtgataaaaagagtatatttttaacatttttttattgctaatattttcctagcattttatttaagataacttctttaaaagttaaa

SEQ ID NO: 12326 - DNA, 551 bp, Glycine max
  Clone ID: PAT_MRT3847_111138C.1
cctcgagccgattcggctcgaggcaaaacctgggatcaacaatggcggaaatctccaattcgccaccgacttcaaatcccgtcgaagaaaacacccaaactccgaaaaccacgcgaaacacaaaacccggcgtcaaacgcctcatcatcagcgtcactgtgctcttctcattcatcctaggttttcctcttctgtggaaatccgttaaaatctaccgcgcgccgctcccgttcgatcgagtcgactccttctcctcccaaatcgaatccaaacccttgtccttcccatgccgctttctagccatattcatcggcttcgatttcatggtttcaaacggaaatgtaggagccgcgattgagagaaaaatgtcggacctaagtcacggcggcgattgcggcggatgtggtggtaactactctgtttccgtggcggtgggcgggggaggcattgatgcggtctattttggcgggaagttgcggggtaatgacgaggatgctgatgaattggtgaagagtgtggtgagtgagtatggaggagggaatatgtatagt

SEQ ID NO: 12327 - DNA, 505 bp, Glycine max
  Clone ID: PAT_MRT3847_111139C.1
aatattaggaggtgaaaataaagctggcaagttcatcactgctgaaaaaatattcagcagaatattcttcaactaattacttctattgtgggggtggttaatacaacaatggaatacaacctacctactagaaaaaaaaataatgatttttttcatcatggaggttgtggtcaaaaaataacaacctaactatttttttacttataaaacaacacctgcaggagcagcgtgtgctgaataacaacaaaagaataactgctgaatacaacaattattgtacgcctcggcctccattcataactaccaaaaaaattgtcagcactactttcaggaaaaaaaaaaaaatattgtgcggcggcctacaagcctccaactaatgatgatcgcagcaataacatcattgatgcttaaacacctcttgtagctgcttcgtaaaccacctgttcttcataaagaggagcttccataaataaaaatatatataaatatgggggggggggggggg

SEQ ID NO: 12328 - DNA, 240 bp, Glycine max
  Clone ID: PAT_MRT3847_11113C.1
tttacaaaaggtgttctaacatctgcatttcctcttcatatgcgtcgcatatttaagctggtggtggccaaaaaaataacgcgctttcaaaatgtataacataaagaagactttactattgctgttgctcatggttgcaactctcaattttattccaactgaattgcatgctttattctaatgtttacattcaacaccatttcaccaatatttctgagcttgataaaacgtccaaataga

SEQ ID NO: 12329 - DNA, 108 bp, Glycine max
  Clone ID: PAT_MRT3847_111140C.1
tccgagaccgaagccggaaacaaattcactggacataaagcagttttcatcgcgcaacattttcaaaagcagtatgatggctgaatattgagggatgttccaatataa

SEQ ID NO: 12330 - DNA, 250 bp, Glycine max
  Clone ID: PAT_MRT3847_111141C.1
atctgttggcctgtaactccccctttactttgtcatgttaactgtagaagtgtctttttttaagagccgtttcttgcaagttaataaggttaatcttatcaaattttaaatggaccctgagatgctctagctataattcagattcctgagcttttgtgttctgctcaaatatattaagtaatttgtctttcgtgaatctatattagtttcatcacctagtaggataagggttggtggttgttgttgtaga

SEQ ID NO: 12331 - DNA, 136 bp, Glycine max
  Clone ID: PAT_MRT3847_111142C.1
ggctcgaggtcaaagcgaccgctgtgttatgacaaacttatatggtgatggtagtcttgcgcgcccaagggactgggaaaacagggagttgacttaactaacaaaaaagcatattgtttctctcgttccttgatct

SEQ ID NO: 12332 - DNA, 262 bp, Glycine max
  Clone ID: PAT_MRT3847_111143C.1
cagagaaagactgtcaattggggtagttccagatggagatgtaaagattggtaaacgtcctcctcggacattgtcttctattgctaggtgtgccattggtgattttgcagatagcacgattgtttctctatgcgtgatacggctagtgttcactaatgaaaagggagaaattgtttttggaatctgctcataattcttgtgtgacctgaagccaaaaaatgaaggaacaataactgcacctgttggcaactagatgcttatg

SEQ ID NO: 12333 - DNA, 114 bp, Glycine max
  Clone ID: PAT_MRT3847_111144C.1
ggctcgagcgctggctctgtttgcaattgtttatatcgttctcgctacgtaacaaaagtgcggggaggaacggtgagacgcttggaatactaaccttactgggactgcgattcc

SEQ ID NO: 12334 - DNA, 1033 bp, Glycine max
  Clone ID: PAT_MRT3847_111145C.1
ccgggaattcggatcgagcttcgagccgataaagaaggatcatcgcactactttgcgaatagagagagaaagtaatcagagtttctgcttctgctttaggaggagagagagagagagagagagacagcgagcgaaccatgataacacgatcgaatctggttgaacagctgcgagagtatcagattcgatccaagcatgactgggcctctgtctcgttcttctcctccacttcttcaaacatcaccacttccagggtggatgtggtgctttttgtaatatgggaacttgttattttagctttcttggttttttctgtagtctctctgtacttcaagcacatccggcttgcttttattttagtctgcatcacaatcctattgcttttatgcatgaaaattacaaagcaagtaaggcttgcaaggaaaaagagacgaaggatgcttcttccattgtcaatgtaaaatggtatcaagtcttgacctttggcatatttcctattctcttaccacccatttactggctaggttctgggccatttgtaatcatttccatcggtcccgcttctcattcatcactggattgtgtatcatctgattccacctatagcaagtcgactgaactatataattgatgtttttacatcaagacaagcttatccaattggttgatcttgatcattgttggaggcaatgtggcttagtaatgctaggatcttgtcacaacctatgtatatttggcaattctttttgctgtttatttctgtatacacagtgcaactgctgcaagttactattgagtttttgaccccttgactttgaatgttcaaataccatcagatgagttattgtataatgacgacatatgtgtgagataggtttagcactgtgatattgtgcacaaggtgattaaatgataggtgcgaagtgttgttagctttgctggccttagaagataattcctgtggtgttggccttgtatggagaatgtaacccttgtttaacttcactttggacgatgatgtgaaaatatttcc

SEQ ID NO: 12335 - DNA, 361 bp, Glycine max
  unsure (1)..(361): unsure at all n locations
  Clone ID: PAT_MRT3847_111146C.1
gtccaaacaaattttgactaatttaattgacaaaaaacaaccggggctatatgattatttacctaacaccaaggggcatgaatgtgccactaaaaagaaaagggccatttttaaaattgggggaaacaaacaataagggcacctttggggaaaacaaaaaattggaacatgtttctgaactaatgggtttactgaaatgttatccttctctggtcctaaataaggggttctcctatgctgcccgctttttnttcccttaacaaaatttgcttttttttatttcctaccctaaacggtnttccttttctttccttccnnncctnnttcccctttcctttntttnttttttttggtttctttt

SEQ ID NO: 12336 - DNA, 331 bp, Glycine max
  Clone ID: PAT_MRT3847_111147C.1
atattatttttttcaccaaatatatttaatcttttaacatttacaggtgggttttacaatcattaatattatttttttccttttcaattaccaaaatttttccacaacacaaataacaaacaaaattttaaattctcttacaaaccacatcaaacctggacccagaagaccaatctgaaaaatagcagacaacatactcatcccaaaataagtacccacagtttccaccataaacacatccatattctccagcttgtccagcataactaagtagagaggcaatacactgacccatcggcggagaaagaaaagtatacttggacatttaaaa

SEQ ID NO: 12337 - DNA, 285 bp, Glycine max
  Clone ID: PAT_MRT3847_111148C.1
cccacgcgtccggataacatttcttattcatcattcgtggaatttgatcaaggggctggtggagatataaatagatgtaatgcttctttagctgtgtctgatgtatatataatgacagcggctgacattactcacaatgtcggagcacatatatattcatatttaaaggcaacaagttactaaagagcaactatatttaagatcaatgaaggcaaacatccatgagcctcatatattgattcattcgcaggtagaggtccaaacaaaagcactccaaatattata

SEQ ID NO: 12338 - DNA, 289 bp, Glycine max
  Clone ID: PAT_MRT3847_111149C.1
acatcgcaatctagataagcatcataaaatcatagccactccgaccttacttccttccttagctgtagagaatgccactctgagcaatcatcatacccacttttacgcataggatcatctaactctgcactctattttacactgtgaaaccaagacgaaggtagcatttgacgctgacttaactaatcgtactgctctaagctcctccttgttagaagcgtcaatggccaggtctgccttctgatgctaacagagcgccaaaaggcgttatagggctcctatgaaagac

SEQ ID NO: 12339 - DNA, 332 bp, Glycine max
  Clone ID: PAT_MRT3847_11114C.1
cactctagatgatcaccttcggggaattctaattctacaatttcaatgaattacggtggaaacattttcacatatgaaattggaataatttgctttctaataaggccaatcctaaagccaatggaaataagattgggaattcctcggggaatatcaattcaaaattttcattatgtaaggtggcatcattgttataatatgaaatggaattacttgttttcatagtacgccaatcctgaatccacatgacatgagatctgaattcatcggggaattccaattccacattttcaagaaataaggatgcacaaatgttcacatatgaattggga

SEQ ID NO: 12340 - DNA, 418 bp, Glycine max
  Clone ID: PAT_MRT3847_111150C.1
gcgatggggagcatgcatagtgaagtcattagttgcaaggatggctgctacaggaagcacatggatactaagtccttgagatgtacatgagccatactaggatgatagaaactagcttgctataacatagtcatgatgcatggtgatgacaaattgcgtcacatgactgtgaatgggtgaagtcctatgtaacgcacacatggagcatctagctgaagatctgaatgaggaaagcgaagtccaaatattagactatatgattggacaaggaacccaatgggtgaacttgaatcatgatgtaacttaccgacctggaaggccggacatgatgctaatatccggaggaagagacttctatgccgtttaatccaggggaggagggttctgtatatgtgggaaaagggcttatgcacatgca

SEQ ID NO: 12341 - DNA, 474 bp, Glycine max
  Clone ID: PAT_MRT3847_111151C.1
gcttattagggagacagaccataccaggttggggggcgggtgcaattattagagtaaatcctggtctaagcttccaacggaaggagaccgtgagcataccacgagaaatagcgggggggggtggaaaacgagcccacccctaggggggaggacaccatagaaatagtaaaaaccaccacccgccatgaactcaagacatggaaaagcggggccgcttgtatagccaacggggggggcttctgaaaacacaaaaccgccaaaggaggggggggcaaagccctccgtcggccgaaaccattctgcggaggggacaccggagaaaacaatgctgaacccccggcaccactccagaggaaaatcctcacaagtgtggcccgccaactggtgacatattccaactcggtgatacggaccagcccggggcaaggggaaagaaagcccgcgaataaaccggggggggggggtcccgggggg

SEQ ID NO: 12342 - DNA, 388 bp, Glycine max
  unsure (1)..(388): unsure at all n locations
  Clone ID: PAT_MRT3847_111152C.1
cnatacgatnncagactcnccanaanacntcaaaaanannnaanacanaaaaaaacaaaantantnanaaaancaacancngnaanaaaaannacananagcaanagnaagngtnnantaaantantcannnanannaacntnccaaactaanaaagttnncanantntaanganaatgacngananccgtgnaancacgtncatggncacagacactggctngtcatnngntagtgnnacgncttctatcnngngctcananntagngtngtgnnnttnnngnatcagangngtgntgcgtncnnttcngnggganngtngntgtnctcgtcnctctcnctntcangnacnnagtcgcgtnntgatgtcttctnacctcncgagntt

SEQ ID NO: 12343 - DNA, 1475 bp, Glycine max
  unsure (1)..(1475): unsure at all n locations
  Clone ID: PAT_MRT3847_111153C.1
cactgggctatgaagtaaaagggcaagaagaaaaagtcttgaagttgaagaaggcgttgtacggtctcaagcaagcactgagagcttggaatgttcgaatcgacaagtacctttaagacaagaacttcatcaagtgtccatatgagcatgcactctatatcaaagcgcaaagtggagatattttgattgtgtgtttgtatgtagatgacttgatctttacagggaacaatccaagcatgttcgaagagttcaagaaagatatgtcaaatgaatttgagatgacgaatatggggctcatggcatattatctcggcatcgaagtaaaacaagaagacaaaggaattttcatcacccaagaaggctatgccaaagaagtccttaagaagttcaagatggatgacgccaatccaattggcaccccgatggaatatggcaacaagttgagcaagcatgaaaaaggagagaatgtggatccaactctttacaaaagtttggttggaagtttacgttacttgacatgtacaaggccggatattctgtatgttgtaggagtagtaagtcgctacatggaaactccaaccacaactcacttcaaggtggcaaagagaatccttcaatacatcaaaggtacaacaaactttggcttgcactattactcttatgacaattataacattgttggctatagtgatagcgattggagtggagacttggatgatagaaagagcactactggttttgtgttctttatgggagatactgctttcacttggatgtcaaagaagcaaccaatagtcacactatcaacttgtgaagccgagtatgtcgctgccacatcatgcgtttgtcatgcaatttggctaaggaacttgttgaaagagttaaaaatgccacaagaagaacctatggaaatatgtgttgacaataaatcagcactcgctttggcaaagaatccagtctttcatgaaagaagtaagcacatcgacacccgttaccacttcataagagaatgcattgagaagaaggaggtaaagttgaagtatgtgatgtctcaagttcaagctgccgacattttcacaaagccactcaagttggaaactttcgtgaagctaaggagtatgcttggagtcacaaatcaagtttaaggggggatgttgaaatataaacttgatttgggcctaaattaattatttggttccttggacttagttattttgggcttaagtaattatgggtcatgtttctagagaattcttgtagtgtttggagtgtctagatatttcttatggttgtaatattctctagaatactctttggatctctagagttgagaactctctagaattagtgtgtctagagttctccttagagtagtataaatagagatgtaatcctacccatttgttcaagcaaaaatacaaagttttttcctcccttcaaaaacaagaaaaaaaaaaaaataancttcataacac

SEQ ID NO: 12344 - DNA, 220 bp, Glycine max
  unsure (1)..(220): unsure at all n locations
  Clone ID: PAT_MRT3847_111154C.1
cccacgcgtccgagtcttgctggctggtgtccagttcggtgcgaaagcnggtcttctgcttgttctggtactcttttcaaggttgtagttacagatgccgtcgatgttgttccaggctctcttgattccttcaagagtgttgcaaacgctgagagaaatgctgggccacaagaccccatcattatcgttgttgttgtggagcgtgagaccctattggtgc

SEQ ID NO: 12345 - DNA, 768 bp, Glycine max
  Clone ID: PAT_MRT3847_111155C.1
aaaaatcatgatatacatgttgggcatataccctacatcatagtagtcctgaaaagagggaaatcacacacgacgaaacaagccgggtccaactactggtccttgaactttttgccttcgccttgtcgctgcacaccgtatccgggctcgtagaccaacttccctccgatctgggcggagtaaaaaaaaatagggatggcgatagcgctagctgccatgttactacttgggagcaagtgttgagggtgtttgaacgatcggaacacgttccagcccacaatacccgcaacgacggtattcaaacttgcatgtttagaagtcatatagagcttcgtccccccttcgtccgccttgttccaagcgtccgagatgactttactcaaagatccgttctgtttgatttggtttctgatcatctggtattcttccccgaaacctgtgatgatagatggtaaggagaatgctaaacctgctataccggcataatgggctatagcggggaaagcggtgactggggggaagaatcgggagttggcgatcgctccagggatggcactgactgggatggctccgacgacgaggttggtagagaggaacgcgataggccagtggacagtggctgggtggataggatgacccgtagcgtgatcgggatcagtgaattgacccaataaaggctttgtagctttatccatagctacatcagcctttcccgctgcgtctgaagctgcattatgaagagccatgttgatgatatgagctcgagcc

SEQ ID NO: 12346 - DNA, 377 bp, Glycine max
  Clone ID: PAT_MRT3847_111156C.1
caaatttagtattttttgattcttatattgaccactgtggctatgccattgataggtgggttgactgactgataaccgccgatgccagggctacaacatctgctgaaggacgcttgctcgtgcatctggttatcaccgataaggaacactctctcttggggcatcgggtgtgatatcagccacatgacacatgctgataatgatctgtgagggctactgtggaaactggcattaccagggctttatggactagattcaaaccgccatgacctaaatgcaattggtttggcccgcacccctggtacaggcctatagggtggacgaattacatgctatgccgatggctatgaattatgaagaacgcgtttttcgtacag

SEQ ID NO: 12347 - DNA, 271 bp, Glycine max
  unsure (1)..(271): unsure at all n locations
  Clone ID: PAT_MRT3847_111157C.1
tggaattctgaggtcttaccgcccttaaccttatgttgacccgcctttttgggacctgtaggagtctcaattttctggtggaggaggtgtcctttggcatttgtgacctagtttgtaatatttttttaacttaaataaagcgcattactatgtgcaatgaggtggtgtttaaatttttaaaaaaaaaaaaaaaaaaaaaaaaataaataaaaaattataaaataaaattaaataaataaaaaattttnttattaaaatttatggggggggc

SEQ ID NO: 12348 - DNA, 300 bp, Glycine max
  Clone ID: PAT_MRT3847_111158C.1
acgcttccgactgctgctaaaagtctactaaatggtatcatgtttctcaaagaagttatgcttcaaggtagtttagcgactgcatataattaatttccaatttaattaactacaattacaactactaatatattttaaatatagtccgtaactaataagcttacttacaattttttgtctcacaatttgaatcagtcaattcaatatcaatacaagattaaattggaacaggaccagaatgattcatatattcttaatggaactctaattaaacaattctgatcatgttctatactatta

SEQ ID NO: 12349 - DNA, 221 bp, Glycine max
  Clone ID: PAT_MRT3847_111159C.1
gatggatatctgcagaattcggcttaagcagtggtaacaactcatattactctgcgaccaacaaccttaactagaaagcatcctaggaaagctatcgtttcccacaactttaatcactacagttctaaaatggcaaggaccgtaatgatggttttatgtgcggcgttcgcttgcattgtgaatgtttcaccctattcaaaagctatcactttgtgtcaaat

SEQ ID NO: 12350 - DNA, 312 bp, Glycine max
  Clone ID: PAT_MRT3847_11115C.1
aaaaaaactagtgcatatataattggctttgattaaacataagttaccatgaaactatgagtggctatggattatgctttaaagaaacattaatacgtacacagctgttcacaatttgatatatagtgaaacgcatcagcctcaccgcataacgcgcatgctgtaaagttctcacttccacccagccaagcagtgcgaccgggtagtctcaagtcgggtcgcagtgatgaggatccgacccgttcgcgctgcgcctgagcgcatatcggagaaggtggaggagagcataatgaacgcgcatgaggcgtgcgc

SEQ ID NO: 12351 - DNA, 232 bp, Glycine max
  Clone ID: PAT_MRT3847_111160C.1
aagcaaacggtattggtgcaattaaaatattttccaaataaaaatttgttgaaatgtgaaaacacaatgggagtgccccaaaataaaggaatcttcaaataaaaacgattctacacggccagagatatataggtaaacaaccgtttgcgggaaccccaaaccaagacaaattaccaaaccgcaacacctaatattacagaacacacggacgcgtggcccgacccaagggaaa

SEQ ID NO: 12352 - DNA, 400 bp, Glycine max
  Clone ID: PAT_MRT3847_111161C.1
tctggattagctgttcattaagggaatacatccccaatttttcacttctgaagagagttcagtttatcggtgctgtgcataagtctaagcgggacgctgtatattggatttaaccatcatgtttcagttggtcgctacccttaacggacgatactaataagaacactgggcacttcattaaactaattattgttcccatttctaaccccctaccttataggaattacctcctaccacctctacgtatttgaaatttgccttctgcctaattagtttgttcattttcctttccatcttttcttttttttataaggtggggccacccaagccgccttttttgggtttttttttcaccctctctaaaatttttgcccacactcgttgtctcttttttttttta

SEQ ID NO: 12353 - DNA, 354 bp, Glycine max
  Clone ID: PAT_MRT3847_111162C.1
gtctttttttttatactcagacaaacacactaagatgtcattggaggacccaatcaggtgggagacacatttaagtcgttgcttcacaaaatcagccctaggtgaaatgctccagggtattacgtacaaccagaaaccagttcgtccttaaaggagtggggacacataggactttgacatcacaaaaatgaagcttctgaatggaggagctagaaagaaaaaccttacttgaaggtctggattgcgtgcgctgcacacgaaaagcaaatggtaccttggcaaggggaatgtctaccgcttagatcaaacccagcggccactgtgatcgcagcgtcatgggccaaacaacgtggc

SEQ ID NO: 12354 - DNA, 160 bp, Glycine max
  unsure (1)..(160): unsure at all n locations
  Clone ID: PAT_MRT3847_111163C.1
cagtacacagcgtcttaacaatgccagcattgatgttaagaagatctcnngagtcantccangttnctnggcanncnagcnggcagtntatnnacatcggcancctnanagctttccangtcgtcatcacttggtacccactntctgcnatccaattagc

SEQ ID NO: 12355 - DNA, 303 bp, Glycine max
  Clone ID: PAT_MRT3847_111164C.1
caggcaacttagacagttcacggatctgtctatagcttttgcctatgcggcggttttactcgtgcaagaacacttggcttgagagctggtcttcggatgaatactgccatgctctattgacacggcggcgaagactactagagtgaccctttggacagcttcgatcaacttgggttgatgatgaggctagctgaggaccctctgagcaccctgcggactagagcgctcatatgcaacacacgctgactcgagccttagggatctctgcctctgaagaactctgccacctgggctagtgaaact

SEQ ID NO: 12356 - DNA, 481 bp, Glycine max
  Clone ID: PAT_MRT3847_111165C.1
tgttaatttgacaaccttaaacaatatgtgtgcatatgggctcaatcctggaatttcaggttctcgtctgttgggcaccattcctcagtgcatttcacagcatactgtttgtaatcaaatggcggcactgagaacaccattgaattttgattctaacaggcatagctttcgccaattttatattgaccttctcggaggaggaattttagtggacaaaactggagattggatcacacttatacaaaattctcctattagtaacttgctgagagttgctgcttgtaagagaggctgtttaatggtcaatatagagatgtctgggaatgcaccagacaaatagagtgattgggcctcattggtacaagtgtattgaacatacagcaacagtgcagaacattttgatgcatgttagtggacaaactcagaaccacatacgtaggaaatgttcgtcccaataaatgtctgtagtactaataatggt

SEQ ID NO: 12357 - DNA, 492 bp, Glycine max
  Clone ID: PAT_MRT3847_111166C.1
accagccaacatgagtggtttctttaaatgtttgcggtttgagttaccgcgaagaaagttttgtgcaatgtggcgcaggcaaaagaaatgggatgtgtcctagacccataagttacttgggttgttgtaggcacttataattgaggagtgtcggtatgaaataagacaaatgttaatttgcggagtaacatgtcttctcaaattctttagaaaaaccccccaagctgaagttgtctccccttctacaatggcataggcaatcggaaagatatggttagctctatcttgtgcggtagctatcaacagtgtgccagtatacttcccgtaaagccatgtaccatctacttgtactatgagtttgcaatatgcaaaaccattaatgcatggaccaaatgaccaaaagacacgtttaaacaatcttttgcccggtactatttctcccccctcatacaaggattctgtttgagcagcgaccacagtccagggaacata

SEQ ID NO: 12358 - DNA, 278 bp, Glycine max
  Clone ID: PAT_MRT3847_111167C.1
tattaaacccattaaagattcaaagtggtggccggttgactttgaccaattcactgatgtatccacacaaacatgaccctgtaactgtgcatcgccgccatgtgagatgccctcaagaaatcaatctatcaagcaacactcgggaactggtagccatgaggatggaaaagagaaaaggaaaccattttcattggatctaatgggactaacaaaatcggaataagaaatcaaatttttaaaaagggcaattctggatctgttgatttgattggggtccc

SEQ ID NO: 12359 - DNA, 312 bp, Glycine max
  Clone ID: PAT_MRT3847_111168C.1
cactgtcattattgatgaaaaacagacccggtttactccagggcaaatatcttactcaatcatcttcaacaatcccacactttcactccttctaatagaacaccccccctcaaatcaaccctcttactaccctccccattcattcatacaaaactctctcctctaccacactcctttaaaccacaaacagtccaataaaacccaaatcaccaaaccattcgacctatttacagcctccaccaattaaaagacccaatcccacatccttcatttccaactgactttacagagtaacccaaacgctcttatacc

SEQ ID NO: 12360 - DNA, 189 bp, Glycine max
  unsure (1)..(189): unsure at all n locations
  Clone ID: PAT_MRT3847_111169C.1
cacctccgagatttctacataagggcctttacaaaggggtggttttctctgtgtggggagcanatattactatcatttgccagcgctgctccatcaattgaaagcctgcaattgcaggattgccacataaatacccccacctggctcttcggggttttttttaactatggcgcacaatacaaggttctc

SEQ ID NO: 12361 - DNA, 536 bp, Glycine max
  Clone ID: PAT_MRT3847_11116C.1
cgcgtacggaagggaggctccagagcggccgccgtccttttttttttttttttttttttttctctggcaacaaactaagattaaaacgtttttttataaaattttttttctgtttggttaaattttaaggcattgtatttgttttaaacaaaaaaaaacaatggcccaactccgatcaaagggggaaaagaaaattaatttacagggaagagtgggtctcttacttaaaccaaaacggtgttaacagagtaggatcacccaattctttttttttagcaaagccaagaaggggttaaaaaataatttcttttggtggggggaggagaaaaagaatatttaggttttttttgccaaccacagattggcgggggaaattttgatccgtttctcgccaaggatgaaagacaatttggtcgcgcgtgtgcttattgggaacattaatacaatcgatgccaaggggggggggattatcctttttttgcggggacttaacggcagttaacgattgaataaggtgtgggggtctatttttagca

SEQ ID NO: 12362 - DNA, 278 bp, Glycine max
  unsure (1)..(278): unsure at all n locations
  Clone ID: PAT_MRT3847_111170C.1
ccatgncctccgtanacaaatttngggcttntgccctcgctcttcncctccttncctccnctctcctccaanttgctaggtgtcagtcagactccgaagatgtagtggaggcngctgangaatcaagtgatatcngcattgttggtgangangtccaagactttggtgatgggaccttcccntntgctccaggnattgagacaataagtgtttttccaaaanatagtgcgagattgataacagctggaagaagagacanagctgcttnttggtgntaa

SEQ ID NO: 12363 - DNA, 413 bp, Glycine max
  Clone ID: PAT_MRT3847_111171C.1
cttgggggggggggggggggggggggggggggggggacaatttaaaaggggtggaatggtcgactaagaatactatatcacagtgttattagtagtagtaagtaatttaaatgtctgccactaaaaaaaacaaacaaggataggaaacaaaaaattaacaaaaagcacttagttgaccatggatagggacaaataacaaataagtagcataataatgccaccaataaaccgcataattgtaatgcccgcttggggtaaatgtatgccatgtcaactagtaatccatcgcgttcatcatttgcaaccacaagtactacttttactttccatagggggtgttcctggccgtccgcttccacttgtgcttccgcaaataattccgcttcggctcttcaaaactggtaggccaacaa

SEQ ID NO: 12364 - DNA, 300 bp, Glycine max
  unsure (1)..(300): unsure at all n locations
  Clone ID: PAT_MRT3847_111172C.1
gaaattcttcacccattttcttcgnagccaaacactgtgaaatagtcagttatgtcgtggcaagagtatcanaatcatcacctactgtgtgaaatcgaaagtaaccacctcactcacacccctatcatctgccaagacggaagcctttgcgctcagaacaccaacttccctcaaatcaaacctgaagaaataactgccatcaataatgactttaatgagcctagatcacttgctccaactggattgtctatcggaggcaccaaatacatagtcatccaaggtgaacctattactgtcatt

SEQ ID NO: 12365 - DNA, 487 bp, Glycine max
  Clone ID: PAT_MRT3847_111173C.1
ctgacgcgtgggcggacgcgtgggcggacgcgtggggcaagaaacaattgcctctcttaaacagcaacttgcggatgcattggagttgagaaatttcagccctgtagtcaatcattcacaaaacttctctggaaccaaagactattgtggtgaacttcaccttgacagggggaatgtgacggtaaacaattccaatgaagggattcatttgcaagcacagtatcgtgttatgacttatgagtggcaagaagagcacatcataactgttggatctaccacagaataatcaagattagaaattactttaaatcacaactttatgttcttttaggctacgtgcatgatctcatggtcaagatatgtagacatacaaaacctcaggctgtctacaataccatgcttatagtttgaaaaggttggaatctactcatgattcaattcatccaattttgattcaggaaagaacctggattctttattatttctc

SEQ ID NO: 12366 - DNA, 537 bp, Glycine max
  Clone ID: PAT_MRT3847_111174C.1
actatgattgtttatggaaaaaactcttctctgcaacatcaagtgctggcattcgacattggtgtttgcttgacagagaaactctctgccactgccaccttcgctgctggcattcaagtttgcctcttctctttttccttacatgtatcctgatttggacacctgtttacatgatgagatggcggttacaacctttaaagtacctcctagtgagtgttgtgggaataagaaaatggaaagaaagccttctgggaggagacgtgtatttgttcagttagattgtgaggatcaggatttggatttcactacaaacatagaagagaaactgactgtaatgccaccatttcaagttggagcaagaaatggaaacattagaaacacactttctagactagaggaaagcatgatggaggacgaggctgagagtgaaggggagttacccgtaggtggtggtgaatacaatggtcctgtgttaaatggggtgcctaatgtttcaaactttctgtgtctcttgcaaacacgagaactagtgaaaaa

SEQ ID NO: 12367 - DNA, 664 bp, Glycine max
  unsure (1)..(664): unsure at all n locations
  Clone ID: PAT_MRT3847_111175C.1
aagaaaacgataaatcctgcggcgggacagtaccaactgacgcacatcattccctctctcttcggatcttaccgccgacgctcagggcggtgccaccgtcacttcgatctccctctcatactgagaaggtaaagtcgttaaccatggccgaaggctctggtataaagagttgtgaaactttggctctttctggaggttgaagaagcttgtgttatcaggtgacatctccgatgtagcagcagttccgttgagtgaaatctgtgttgtagagtaagctgttgtcatgtgagaacttttaagagttttttcgattttacagaatttaatatgattgtttatggaaaaaactcttctctgcgacatcaagcgccggcattcgacattggtgcttgcttgacagagaaactctctgccactgccaccttcgctgctggcattcaagtttgcctcttctctttttccttacatgtatcctgatttggacacctgtttacatgatgagatggcggttgcaacctttaaaggacctcctagtgagtgttgtgggaatgggaaaatggaaagaaagccttctgggaggagacgtgtgtttgttcagactgaaactgngtgtgttttgggaatggattagatagaagggacantgcccatactgtgaaaagga

SEQ ID NO: 12368 - DNA, 2842 bp, Glycine max
  Clone ID: PAT_MRT3847_111176C.1
tacgcaagggataatgctacagagggggaaaacctagaccggactatctcgttatcaagaaaacgataaatcctgcggcgggacagtaccaactgacgcacatcattccctctctcttcggatctcacagccgccgctcacggcggtgccgccgttgcactcgccgctgctctctcttcgatctccccctcgccgatactgagaaggtaaagtccttaacgatggtcgaagtctctggtagtaagacttgtggcactttggctctttctggaggttgatgaaggtgacatctccgatgtagcggtttcgttgagtgaaatctgtgttgaagagtaagctgttgtcatgtgagaactttttaagagtttttttgattttacagaatttactatgattgtttatggaaaaaactcttctctgcaacatcaagtgctggcattcgacattggtgtttgcttgacagagaaactctctgccactgccaccttcgctgctggcattcaagtttgcctcttctctttttccttacatgtatcctgatttggacacctgtttacatgatgagatggcggttacaacctttaaagtacctcctagtgagtgttgtgggaataagaaaatggaaagaaagccttctgggaggagacgtgtatttgttcagactgaaactgggtgtgttttgggaatggaattagatagaagggacaatgcccatactgtgaaaaggaaattgcaggttgccttcaatgtcccaagcaagctcacttataggggacatggtcttgaagaatgacctaagtgtggttagaaatgattctccacttctactcactaggacctttttacataggagttcatctaccccttgcctttcacctactggcagggatcttctgcagagggatcagagtggaccaattgaggttataggttgctcagatatgttttcaggaaccaaacagctggttgaggatattatgaaggcattaaaaggcattgaacctgcccccaattcagagattactttattttaggaacagcaatggtgaaaatgctgctattgtgaaaccaactgatgaggagccttatgcaccaaacaatcctaaaggttttgttggcaaagcccttggacaaccaggactgaaacgttcagtgagggttggggagacaggtttcagagaagttgcagcttaccttcttgaccatgatcattttgccaatgtaccctctactgcccttgtaaaggtcacacattctatttttaatattaatgacagggtcaatggtagtatgcatcataacaaaaagcaaataagcaagattgcatcactgcagcagtttattcctcatgattttgatgcaagtgatcatggaacttctagtttctctgttgctgctgttcataggattgggattttggatgtacgaattttaaacacagacagacatgcaggaaatcttctggtcagaaagcttgaagggtttggaaggtttgatcaagtggagctttttcccattgatcatggtctttgtctccctgaaactttggaagatccttattttgaatggatctattggcctcaggcatcaattcctttctcagatgatgagctcgactatatatatcacctagacccatttcgtgattcagaaatgcttagaatggagcttcccatgattcgagaagcatgcttgcgggttttggttctctgcactatcttcctcaaggaatccgcagcttttggtctttgcctagcagagattggtgacatgatgagtagggaatttcagggtctcgatgaagagccaagtgagcttgagcttatctgtattgaagcaaagaaactgttagatcaggaagaattattttcctttgaagctgaggtaggagacaaagatgtgactcagtttcagttagattgtgaggatcaggatttggatttcactacaaacatagaagagaaactgactgtaatgccaccatttcaagttggagcaagaaatggaaacattagaaacacactttctagactagaggaaagcatgatggaggacgaggctgagagtgaaggggagttacccgtaggtggtggtgaatacaatggtcctgtgttaaatggggtgcctaatgtttcaaagctttctgtgtctctgcaaaacacgagaactagtgaaaaaagtaggcagcagatgggtgtaaagcaaaagagtgactttttggctgggacatcatctggaaacacaactgtgaatgagttacctgcaagctcaagtttcgtgaagctaacagatatggatgaagagaggtggaatcagtttcttgagaatttccaaaggttgttgatcccagattttgttaattacaaacgaggaaatgtgagcaagaagcagaggcagaggcttggaacttcatgccagttttagggggaccataaatgaaatgtgaagtgaaccaataaatattagaggcttgtacaatgtgtcatacggcacacatggaactatatataaataaataaatacagaggctttatattcgcaacactgaggaggagggagtattcaggagtaaatagtaaatgaagattatcaggtagtaaggtcttgcatcagcaaatagagggagagcttattcaccagtagaagtgaagactatgtcctgatttactccttttaattttactcgctttatgttcactggttagtatgttgaataattcagagtagatgccaaaataaatttgtatatacctatgttttcctgaagatataaataatacttgtagtgtggtttgttagtcgcctttaaattcttctgtttttatcttttggtgaaaaaaaa

SEQ ID NO: 12369 - DNA, 1653 bp, Glycine max
  Clone ID: PAT_MRT3847_111177C.1
cccacgcgtccgcataggacaggcccaaaaccaaaaaaaagcctcgtctctcgtgccgattgtccaggacaattcccttcacccaacctaattgcaattagtgtagaagatgagtacgttggatgcaacaagggctgaacttggtcttcttgttttatatttgggcaaggctgaagcaagggacaaaatatgcagggcaatacaatatggttccaaatttttgagtaacggggaacctggtactgctcagaatgtcgacaaaacaaccagcttggcacgaaaagtcttccgtctttttaagtttgtcaatgacctacatgctttgatacggacactccatcctttcacctctctccctgacatagtatacttgcagtccctgacccaaaaaaagcttctttgtctctcgtgccgattctccaccactattcccttcaccccaatcacactttccggtagttgttgctattagtgtagaagatgagtacgctggatgcaacaagggctgaacttggtcttcttgttttatatttgggcaaggctgaagcaagggacaaaatatgcagggcaatacaatatggttccaaatttttgagtaatggggaacctggtactgctcagaatgtagacaaaacaaccagcttggcacgaaaagtcttccgtctctttaagtttgtcaatgacctacatgctttgataagtccaacaccacagggcaccccccttccccctaattctgttgggaaagtccgagaatgcagtactctccaatttcttgtttcttgatccatctgggttgctaggcaggaacaggcatctaccaggaataaatgagcacaccagaacaatattgtcccaaatattctctttaatggggaagccgggttcctcagtggttgtcgaaaaataagcttgagcgttggggagacttgtgaaggcctttcttcatcaatgaagaagttagagaaagatctcaagaacaagaataaatatgataatgagcaataccgtgccaaactaaacaagtcaaatgagagaactctatcacttatcaaagcaggaattgatacagtggtagcagttggactgcttcaattggcacccaagacagttactcctcgcgtgactggggcatttggatttgtttcgtctctaatatcttgttatcagttgcttcctgccccagccaagtccaaaactttgtgaagtgtggaagaataaaatggttcccatgaggtgtcattgttgtcaaataattatatgaattggtcaggaaatgtcggttgatgtgagcattgaccaattttcatcatagttacaattgttctctaaaactgttgtgtagggcatctttctattttggtctttcaaaatatatgcaactataatatgttgctccataatttacaaatacatgaatttgtaccctaaaagacatgcaatatcaaattggttcccccccttccccccattgttctctaaaactgttgtgtagggcatctttctattttggtctttcaaaatatatgcaactataatatgttgctccataatttacaaatacatgaatttgtaccctaaaagacatgcaatatcaaattggttcccccacttcccctaaatgtttgtttcattttgttatcaaaacggtcc

SEQ ID NO: 12370 - DNA, 514 bp, Glycine max
  Clone ID: PAT_MRT3847_111178C.1
tttttccctgacatggaccaccaccttctcgagaaagctctccaagattgcggcaacgacatcgactccgctatcagaagcttaaaccagctccgactaggagcaccaccgcctccttctcttgattctactcccatcgcatctgatactgctcctcctcaattgcaaggtgaatctgttaagcttcttaaactctaaatttttgcctaactcaactctaaaacatgcgctagcttgggaattccgatgctcattctttgaattccaagctacaacgacgattttgatagttttgttttgagctctcccaattggtatccagaagtccactaacttgtcaattcacctatatacactgttttgacttttcatcaatacgcgggatatatctaacaacatcctactagtgctgccactcagtatgtcaaatgtggaataaattactaatttagaccctcacttctaaataatctatccagtattaagtgtccatcagtttagtccttaaactgat

SEQ ID NO: 12371 - DNA, 470 bp, Glycine max
  unsure (1)..(470): unsure at all n locations
  Clone ID: PAT_MRT3847_111179C.1
ctttttcattttcatacaaaaacctgttaggtatggtatgacaattcatatccataaagacttccaccatgacatagaatataaatcgcaacatgatccttaaactcaactctctctcaaaaaaaaggcttacatgaatttaagtgcccacggactgagcactaaccgaagcccaatactgcttcttaccagaatcagctttatgcccaacattcttgtcttgaaaaacccctccatactcatacacctcgtatgggcaaaaatcccctgtgggcacacactctaccgcggcactgagcgtgtgcaaaacgtaccaacctggccctcccagctaagaccccaaacttaagctctctaaccctacatcnatacgaattgggatcaatggttacaccgccatcacatttaaaattctccgctccgcctctaagaacggatgaaggctcctccataatccctatgattggcgt

SEQ ID NO: 12372 - DNA, 900 bp, Glycine max
  Clone ID: PAT_MRT3847_11117C.1
gccatgaagcccaaagttatgatttatttctcgattaaaattcttaccatgaagatccaataatgattacttgcaacttgcaagtaacagctgcgatgtttatgcaacaaagaaaccaacatattagcaaatactactagtttttcattacaaaacaattgaataataaagaacagatcacgcaaaagtgcagtaatcgcggggcacggggcacctgtaaagatctacactttcacgcaatcgatatttgtttccttaatttgatttagcattcacaaaaaaaaaaaaaactagggcataattttggtttgattaaacataaggggctatggattatgctttaaagaaacattaacacatagcatgttcacaatttgatatatcatgaaacgcaatagtgttttagttgacaaacaaacatggggagatcatcatgcacgtaagaagcgctttctcagtcttcgaaagttttgcactcaatggtctccggattgcccttgcagtaggtctcgagcgggtcggagtccttttccttttgcttgtatttggcgtggctcgccgccgcgctcagctcctccacctcgtcccacgccgccacgcactcgccgctcgtcgggtcgccggcgcacgcctcctgcgcgttctttatgctctcctccaccttctccgaaatgcgctctggagctgcgcgaacgggtcggatcctcatcacccgacccaacctgacactaccaagtcgcatcccttggctgagtggaactgcgaactttacggcgtacgtgttttgcggtgagggtgatgcgttgaagaaaaccctggggcttgaaaggctcacaccagtcatagttgccattctttgattcttgttctctggagggggtttatgatgatgctcgagcc

SEQ ID NO: 12373 - DNA, 439 bp, Glycine max
  Clone ID: PAT_MRT3847_111180C.1
tctatggtatgtctaggtcacggactggatcgaccgaggctgactagctggctgcccggctgtcgtccttttttttttttttttgtcttaatttttttttggagaaaattcacaccggtttaaggtatatgcttggacctttccattaatcatttttaaacattacgttcaaccaaaattcctggcattcgggaacatttcgacatacctgactaatgggagtctaaaggctgtcaacctgataaaacaccgtacatgactgaggggcttaatatacgctctacgtacttcctgttgggtactatgggagcgtcaggaatttcactaccgggttgattccaaatccttggaggcctgtggaattcaaagtctttcaacagatcattggctcaaaaccatttttagatctaacccttctatccggttggaccatatattt

SEQ ID NO: 12374 - DNA, 161 bp, Glycine max
  Clone ID: PAT_MRT3847_111181C.1
tcgaatcgagcgattcggctcgaggctcgaaaaacctatgtctacatgaatccatctttgttctatctctaacgatttcgccatacaacagcgataattccgtctccatcatcgtcatcaaatctcccattttctaaacctcagtggcttccacacaacat

SEQ ID NO: 12375 - DNA, 513 bp, Glycine max
  Clone ID: PAT_MRT3847_111182C.1
ctaaaaactgtaggctttttattcagttaagaggtagacagatgaacatggaaggctgtcccattgaatttgcccaaagttcccattccacttcattcacccatcccacactgccagaaatctcaaaagaataaccacaaccaccaggctttgtcttcctacttcttagcaacacgtccacgaactgtttgcaaagaagttactacaaacttaaattttcactgtgccaaagattctcggccctctaagaagttgtcacatgtcaacagaacctgccactagtgacagggagcagagtgccgtgactatttctatgagagactacaagggaagcttcagttacatgtttgttaaatccctgtgcacgctggggaagaagctggtgaggccaacaaagcagtatatgccatcaaatggctctgcttggctgtttaaaaagaatccacattaagttatctcacagacgacattaaaacataatggaattgatgcctgatacaaaagtagagaaat

SEQ ID NO: 12376 - DNA, 322 bp, Glycine max
  Clone ID: PAT_MRT3847_111183C.1
tgatcctttttagtcattctgctatcatggttttaggtttttttcgcaattagcggctcatactcatgtcaattataataatcatatgaacccttcccatcaagagcaagtcacgggaaaagaatccctcctcgccttcggggaacatgtgataagctaattccggaaccatatcacatgctccctatctcaaaaaaatgaacccctgatgctgacttgcaaccaaccattctgaacggacacgcccatgtcgttgcatatcacacccgacttactgctcctggaacacctaaacgagggaccagcctcacacagatcccta

SEQ ID NO: 12377 - DNA, 119 bp, Glycine max
  Clone ID: PAT_MRT3847_111184C.1
acgtgtttggatagggttcgcccttatatacgggctcgtttcattctcgcatggtcgggctccaccttgccccccgggaacccaagggtttcgggaccgcgaaagggctcaggggggga

SEQ ID NO: 12378 - DNA, 238 bp, Glycine max
  unsure (1)..(238): unsure at all n locations
  Clone ID: PAT_MRT3847_111185C.1
gagatccactttaccaccagacaagaatcacattggcnaagctcaatgacaagagccactaccacatccagccgagacatcacggagaagaacaagcgccgacgcgagcccaaaggcaaacaggctccaaaaacagccgttcctgatcatgtcacgacccacacccccaaggaagaggaagaagatgcccggccagcagctgtataggcaactgatagagaggtccctgaagcttgaa

SEQ ID NO: 12379 - DNA, 152 bp, Glycine max
  Clone ID: PAT_MRT3847_111186C.1
cccaacccaatttcaccgttgctagctcttgttacttttttgtcggagaaaataatagtaaccagcatatatggccggttgaggagatccactcccagaagaggaatgtgtttgacgcaaaaccggggcctccctgggggacgggcctgagg

SEQ ID NO: 12380 - DNA, 415 bp, Glycine max
  Clone ID: PAT_MRT3847_111187C.1
gtacacccccaacgtttggattggtaacttgaaacttactgacaaaagaaattggaggcttaaatcttcctttcatttccccatacatgtaaccaaaagattttaccttaaatttttaaacaatataatatatatccttaattttggcagtttaacctcaatggattgaaaatcatttaaattaagggaaattatgggactaaattttggctggccaacctttcaatgggttgaaaataccttaaattggtacaaattttgggaggggaaattgggtcccagatgagggcaactgccttggacaggggggtctttttaatcttgcatttttggccctgatcactcatagattactcaggccttgcaaaagtgcacggagacccaaaagaacaagatagcttggaaacctaaattt

SEQ ID NO: 12381 - DNA, 301 bp, Glycine max
  unsure (1)..(301): unsure at all n locations
  Clone ID: PAT_MRT3847_111188C.1
aaaagatgcatttccttatatacaatcaataanagacacaaactgactgtgtgtagcaatgaaacatatatagtatgcatcatacgatgatgtcatttcaacaaaacattaagaactagatgtctgttggagcaggcattatcctaaacctttcttgagaagcctgattgcccccactaaatctttcttctgctaaaagcgaatgcaaatcactggcatttgccaaatattgaactcaactgctttaaaaggcataggcggataacggcggagggcaaatgtacattaaatctttcaaaag

SEQ ID NO: 12382 - DNA, 305 bp, Glycine max
  unsure (1)..(305): unsure at all n locations
  Clone ID: PAT_MRT3847_111189C.1
angtngnatgcacgngtacgtaagctcggaattnggntngagaacgaantttaacaacagttgatttgatattacaaaaaaaaaaaaaaaaanggggggnngnggattagtgagttggtggacnggggantnanttngggacgggtanttgaaggggtacangttttcnntanngtgngtggtnttngnntttggggnaatannggtaaangttgtttcntgtgtnaaatngttatngggtaaaattnaagacantatnanttttttgaaanaaanagnantaagngtnatgggngtagnggggn

SEQ ID NO: 12383 - DNA, 1603 bp, Glycine max
  Clone ID: PAT_MRT3847_11118C.1
aaaaaagaacagagagagaagaatgaaatctatctatcttcttatccgaagtctgggaggccaataggaagcacgccagctgctacgaatggtgaataaaagacaaaagaaacaaactgctacatagcatacagtctgtcttctcttctcttctccggttatggcgtccgccttgggcacttcttcaattgcggttctgccttcgcgctacttctcttcttcttcttccaagccttccattcacactctctctctaacttcagggcagaactatgggcggaagttttatggaggaattggaatccatggcataaagggaagggctcagctctcggttaccaatgttgccactgaagttaactctgtagaacaggctcagagtattgcttctaaagaaagcccagaggccagtatacccattttctgccatagttggacaagatgagatgaagctttgtcttctccttaatgtgattgatcctaagattggaggtgtaatgatcatgggggataggggcacagggaaatctacaacggtcaggtcattggttgatttacttcccgaaatcaaggttgttgctggtgacccttataactcagacccacaagatccagaattcatgggtgttgaagtcagagagcgtgtacttcaaggagaggaactttctgttgtcttgaccaaaattaacatggttgatttgccattgggagctacagaagatagagtgtgtggaacgattgacattgagaaagccctgactgagggtgtcaaggcatttgagcctggactactggctaaagctaataggggaatcttatatgttgatgaagttaatcttttggatgatcacttggtggatgtgttgttggattctgctgcatcaggatggaacacagtagagagagagggaatttctatctcgcatcctgcacggtttatcctaattggctcaggcaaccccgaagaaggggagctccggccgcagctgctagataggtttggaatgcatgctcaagttggaactgttagggatgctgagcttagagtgaagattgtggaggagagaggtcgatttgacaaaaatccaaaggaattccgagattcttacaaagccgagcaagagaagctccaacaacaaattacatcagcaaggagtgttctttcttctgttcagattgatcaagatctcaaggtgaaaatctccaaggtgtgtgctgagttgaatgtggatggattaagaggagacatagtaacaaatagagctgcaaaagctcttgctgctctgaaggaaagagacaaagtaagtgcagaggatattgctactgtcatccctaactgcttgagacaccgtcttagaaaggatcccttggagtctatagactcaggtttacttgtcactgagaaattttatgaggtatttagctgaggatcttagatataacacggtttgtatgctgtggtattccatgagtataatgctacttcattatttacattttaccttttctgtggggattttcattgtacttaaacattagtaagattcatgagttccttctacgcaggaaattccaagcattttacgggcaagattcttttttt

SEQ ID NO: 12384 - DNA, 277 bp, Glycine max
  Clone ID: PAT_MRT3847_111190C.1
gcagagctgcagaaccggagaggtcgtgagggaaacatgtacgtggatgcactattactggttcctcaccagggatggaactgagttccttacgacttacctcaaccttccatcctaaattgtccctggcactggtaaaaagcaggccagtcccaacaaaagaccagttcgtggcccaccgcgggatcagcccacgggcccacctggctaagccggagagaggagattcggcggggaccgagatcgataccgtggagggccacgcggacctggcgga

SEQ ID NO: 12385 - DNA, 356 bp, Glycine max
  Clone ID: PAT_MRT3847_111191C.1
gggctacccgctgagattaagcgtatcaataagcggcggaaatgagactaacaaggattaggttagtaacggcgagcgaaccgggaaaagcccaccatgaacatcggtcgacctaggcgtacgaattgtagtccggataagcgtgctcagtggaggaccgctcccaagtgccatggaagggggccccagagagggtgagagccccgtcatgcccggaccctgatgtaccacgaggcgctgacagcgagtcgaattgtttgcgaatgcaacccgcatcaggcggtaaattacgtgcaaggcttaatgctggtgatcgacgaggatgaagatgagggtatcgtccatattgatcagtg

SEQ ID NO: 12386 - DNA, 416 bp, Glycine max
  Clone ID: PAT_MRT3847_111192C.1
acctcggaatctggctagagagttcatgggctccgtgggaggatcttttcaaggactatacaagaaccctgattatttggggcagggtgctaccaacgcataccatgctcctccgagccaacacatggccacaagaccccattgcaaaactagcaacgcatcctcactgctgaggctctggcatagcctttgggaacactgaagacacccacatacgccttctcatatcaagacgtgccaactccaacaggggtctcccttaaatgccattcttaccataccagatggccaaccatagaacagatgtggatgccacacacaacataccttctcctgtgggactccactgggccaacctgctgggccaaacttaagaaccgccatgctcagatcaatgattcaaatgctccctcaat

SEQ ID NO: 12387 - DNA, 371 bp, Glycine max
  Clone ID: PAT_MRT3847_111193C.1
tattgcggggtggacgagcatatttttcggcggccgtccattgtcacttaggttccgacacaaaaaaagaaggtaaatctttttatttttgattgggtccaatatataatatattaaaggatgaatgcataaactatcatacaacagccaactaaaaaggccaatatagacacaagcaaaataaagaatccgtacataatcatgatcaatcactgtttgagaaacgaaacaatatggccgtcaaaaactgagcattctcacaatggggctagaacaaaagaaaaacatggtactgagaggttggctgacccattgggtatcactggagcactcattcttgtaacgcaactggtaatagtagaaacccctgt

SEQ ID NO: 12388 - DNA, 755 bp, Glycine max
  unsure (1)..(755): unsure at all n locations
  Clone ID: PAT_MRT3847_111194C.1
ggtacccccgagtttggccggggatgtaggtaacttaccaagttcattttccagtatttgatgccgaatgatactactctgtgagctgtgagcacaaatttcaatccttcaattttatattcataattgtggaaactatcacattcttaaactacattaatgtttgctatttaattttttttatccttttcacagcaatcaatgtctacaacaccaaatcatcatctagttgtcaaagttcctcttataccaacaaagcaatagtcatctcaacttatttgcaagacatataaatactctttgagtagtctttttttctgggggatgtctaaatgtggtccatgaaatgttactgtattttgtgcatataaattttaaaaaaagagttagtcaatgagattgactattttgcttgattgttagtatataattttcaactagcaataaggttgatagcaatgcaattaattcattactataaattcctcatacatacgataacaatttgaagcatatttcaaatcaagtagaaatgtattagtgatttggacaatagatggtataatctaactacgntttataaagtttattattagttaacttataataaatcaattgaaaatagattacaatatttnactcattttttaaaacaaattaacttcgaactgagaaaataaatccagtttaatattacactggctatagaagaataatcaatcaccttttaaaataanaaattaatataatataac

SEQ ID NO: 12389 - DNA, 363 bp, Glycine max
  Clone ID: PAT_MRT3847_111195C.1
cccggacgacccacgcgcccgcaagtgaacaccccccaacgacaaccggccaccaacgggggaaacaaaaacaaggcaggggagaaaacaccacggaacgacgagaagcagccccaagacacgcaaccaagcagaaaggacccagcaacagacccagacgcccccggagccggcaagaccgagaaaagaaaagcccacgagaaggccaagagcacagcagaagccacaccccaaaaaccagagccaacagaaaaaccccccacggacgacagccacgaccacgacccagacccgacaaaccaggcacaaaacccaaggaaagacgggaagaagcccaacgcaaacaacgccgaaacaaccaca

SEQ ID NO: 12390 - DNA, 213 bp, Glycine max
  Clone ID: PAT_MRT3847_111196C.1
aaacttcgaggtttggggaacactgctgccagtagtgatggaagtagtagtggtactttcttcagggctgttctattggttcgtagaggaaagtatgatgaagcacgcgagtatgtataaagagctagaaaatgtctggcaacagagcttgctgctctggttttggagagttatgaacgtgcttacagtaatatggttcgtgttcagcaacta

SEQ ID NO: 12391 - DNA, 516 bp, Glycine max
  Clone ID: PAT_MRT3847_111197C.1
tttagttgattccagacatgggtgtttttataccccaaaaccatgctctgatgaaacaatttaaaaattgggaagtgctttcttgatagatcctaatacttttttttaggatgtttagcagcacagttttcgtgttgaaaaatgatctgcatttgagccacatcagctgcaattttctataatatcaaaggatcgtggagaaaccacaatgacaaccacactttaaatccttgatatatatatatcaggagcaacttatgtaatatgaaagaagtttatcttgaccatttaatcttgcttgatcaaaaatcaaaattacttcatttcttctcttatgctcccactggatatgttccatctcaatctacattgtatatatagaaaccaatactcttctctttgtgctactctatgtctattgtttgtttgaaatgcataattattttgacgaaataatatttcacgatggtatgaacttgaatcagttgatatgtatgagaaagtgttcataaaaat

SEQ ID NO: 12392 - DNA, 1784 bp, Glycine max
  Clone ID: PAT_MRT3847_111198C.1
ctgtattatttccttcttcagcttagctcaaccacttccacttcaacaatcaacatggcttcatcactcgcaaccatactcgtcgccttgccccaaaccccgcaatgccgtagcaccttccgatccgatccacccaaactatccctaaccctaaaacccaaggccactgttacatgtaaggccaccctgtccactaccctggagactagcatccagcagcagcagcagcaagatgaccaaaaacaaaagcccgtggccgaggtgtggcgcaagatccacggggaggacaactgggccgggcttctggacccgatggacccggttatgcgaggcgagctgacccgctacggcgagatggcccaggcctgctacgacgcattcgacttcgacccgtactccaaatactgcggcagctgcaggttccccttgcccgaattcttcgactccctgggcatgaccaacgtgggctacaccatgacgcggtacctctacgccaccgccaacatcaacctcccgaacttcttccgcaagtcacgctggcctcacaagatgtggagcaagcacgccaactgggcgggcttcatcgccgtctccgacgatgaaaccagcaagcgcctcggccgcagagacatcgttatctcgtggcgaggcaccgtcacccacgtggagtgggtggcggatttgctgaatttcctgaaaccgatctcccctgacattccctgttcagacaggaaagtcaaggtagaggccggtttcttggatctgtacacggacagggagccagggtgcgggtactgtaagtactctgcgagggaacaggttttgggagaggtgaagcggttgatggagaagtatgcggacgaggaggttagtgttacgatagccggacatagccttgggagtgcgatggcgatattgagtgcctttgatattgttgaaactggggtgaatgtggggaaggatgggagaaaagcgcatgtttcggtgttttcgttttcggggccgagggtggggaatgttaggtttaaggagaggttggagggggagcttgggattaaggtgctgagggtgcataatgctcatgacatggtgccacagtcgccggggttgattttcaacgaggattcgccgcagtggttgctgaagctggtggaggggtggtttccgtggtgttacttgcacgttggagaggagttgcagttggaccataagaaatccccgtttctcaaccctgacggggatgcttcctgcgcccataacttggaggctcacttgcacttgctagatggataccatgggaagaatcgtggatttgagcgaacaagtgagagggaccttgctctggtgaacaaggactgtgacttcttgaaagatgagcattcggtgccaccacggtggaggcaagacttgaacaaaaacatggtcaggactgaagatggacgctgggtgctcgctgatcgtccactagctcaagatccacatgaagatattgatcatcatctcggagagctaggcctcgcttcttctcatactcacactcataattgaatggattcattgcatcttttggagactatcttggagtatttttgcacgagcaccacgcttataaaaacaaaatcaatttaaaagttggaatggtattcaaataactcaacttataaatattgttatggactttattgttaaaaaatataatatagttattaagataaatatgccaacagatgtaaacattagagttattggtttatctatataaagataagtttagcgacgttttt

SEQ ID NO: 12393 - DNA, 136 bp, Glycine max
  Clone ID: PAT_MRT3847_111199C.1
agtacgatgctggctctgaagctgggttccaaatgtgattgtgactgcagtatactgagtcttcaaaatgatgaccacagggaaagcttgatatgaagctatcaacatcagggttgggtcaaccgggacatgaatg

SEQ ID NO: 12394 - DNA, 398 bp, Glycine max
  Clone ID: PAT_MRT3847_11119C.1
ttttttttttttttttttttttttttttttttttttttttttttttttaacccaaaaagccgggtataacacaagatttattgtctacaagtaacatcacatgcccaataacataccagagtttattttatgggacttttgcaattttaaatatttatgtccactaaaggggataactggaaatcctataagcggtttagggtccccaaaaaacctggcaaaaggagaaatgaggaggttttaaattaaccttgacaaccttttttttaccccagatgaatgtttcccggaaaaatgaaccaaggggggttttccttaaaacacccaattcttattttttttgaaaaaaaaggtaaacttcttttttttttttaaaaaaataaaaaaaatttgccccg

SEQ ID NO: 12395 - DNA, 384 bp, Glycine max
  Clone ID: PAT_MRT3847_1111C.1
tgcacccctacgttcgcttggaattctgctacagattccccttatatttctctattttctgttcaagccccaaccctatcgcgctaccctaatacgatatttatcattcactgtggatggacgtaagattaatactgatgttataaaagtcgatgtcaaacttgctgtgaataagatgggtgcgtcactagacttaaaaccggatgggtggggagtgccacgacggatcctaacaatggaaatgaggcctgcagggactgggattggtatcatggaagaattccttatggtggtcaccattgaacatccactgaaccaaacagagtatggtgtgaatcgagcttttggaaccgaccatggtacgatgcgtgacgctgaactagc

SEQ ID NO: 12396 - DNA, 207 bp, Glycine max
  Clone ID: PAT_MRT3847_111200C.1
cggccgctcaagccggcgggccgggaattctatatcgaaacaggttaaatctcttgcctaatacttgttactgatggctatcttcctacaattttccacccatggattcctctcaccaactctcttcctcccaccggcaacggcctcatcgtgagcttcggcgagatgatcatcgattttgttcttattgtattctgtttgtttatt

SEQ ID NO: 12397 - DNA, 454 bp, Glycine max
  Clone ID: PAT_MRT3847_111201C.1
aaaaatagattgcatatgtgttaaggctgaaaaacaaataaagcctaggctaagtataagtttttctaggatgaatgctctcttataaccttaagtttgaaatcccagaaaaaccatgatttcttgtctagccaggtcccattacaagccaataaaagtccttagtgatccaccaaatgtaagtaagaataactttaattgagatgaagtgcaaaatttgggaatcttaattgcaggtcgtataaattttaaacactcaccccagacacttgtgcgtagagataaacactaaccttgtgaggaaagtgaggcaaaccaacttgattgatttccgatactaaccaatttcatcttgatgtaattcatgcttccattgtgggattatgacaaatgcggaaaggaccagttggaggaatctgagaaattgtagccattgaaagtgttgaagcattcg

SEQ ID NO: 12398 - DNA, 890 bp, Glycine max
  Clone ID: PAT_MRT3847_111202C.1
ttcgatgctcacttttctctatacctgcttcttcttcttattcttcttcttcttcttctatttaataataataacttgtacgtaactgatacataacggctcgagctcgctgattcacgttaatcggattcttccgccattatggtgtcgttttgagtttgtgatcattgatattgtcgattggatgcaattgtggttgtagaattctcgatccttgcatttttctctttgcttcaccgaaagtcatcgtaattttagcttcgatcttaggagcaaatcaagtgggacgcgaaacaccttttgcttgtgtttgtagttattgtagtcattgttgacgtgtgaatgatggactagctatgtatgcttgattagagagaagaggcctgtaattatgggaaattcggagtcaatgtatgaatctcaagataatttttaccaacatcccccttcttattataatagctatcatcaaccgtctccttatgctgagaattcagagaatactacatatcatgaaccatcttcatatgcttggaattcatcaaatactacctactatcaatcctctacttatgctgggagttcagaaaacactcgccatcaacatacgaggcaacccacatatatagctgataatttcagctcattggatcaggttgtttcttctctgagagaaagctgtctggaatcttcaaatttaatacttggtatcgacttcaccaaaagcaatgagtggacaggcaagcactcattccatcgaaaaagccttcatcatattggaaacactcctaatccgtatgagcaagcaatctccatcgttggccatactctgtcttcctttgatgaagacaatctgataccatgctttggatttggtgatgcttctacac

SEQ ID NO: 12399 - DNA, 549 bp, Glycine max
  Clone ID: PAT_MRT3847_111203C.1
tcggcggccgtcctttttttgtgttttttatttaaaaatttaacttttacagcatcccaaactcctcatgggtgctggtaaaacttgaatttgcagcccagaaacagctccacaggaatgcttttgtggatcaaccaaaaatgaaaattactacaatatatttgctatgaagggaaagagacccgggtagggcgggaacccctatcggaaattcattgggcttggatttaagactcccaaggaagccacatatggatcctacctcgacaagaagtgccccttcactggcaatgtttccatccgtggccgcatcttggctggaacatgtcacagtgctaagatgaacatgaatagccccgtgtagaggaattatccaccatcatttagccctcttccggacgcacactgacctatcttgcgacattgatgctgatatatgaactgcacctgcaaccccagctgattcccatattcttcaacaacaccgggacttatattctgttgatcactggtaccaccctgcaccggagcccctgcataaggcacacc

SEQ ID NO: 12400 - DNA, 537 bp, Glycine max
  Clone ID: PAT_MRT3847_111204C.1
agccccgaaaacgggtttttttcatattatagggcatatgttttcaaaaaacccccaaaggggaaattgaacatcccccgttcaaaacaggatctttttaattactgggcccccccatattataattcccaaagcagtaactagtaatttgacaatgctccaaaaaaaaaattttaggggtgaaaaagaaaatctcttttttagggggaggcccggaggggttcaaccccaaaaacatgggaagcagcctttttttttgatttggccccataattcacgggagcaaaaaggcgggtttccctttttccattttttgagggggacccggttccattttggggggcattaaacgaaaccccccggttaagaggagcattggctcccccgttagcacaaggaccccctgacttactggaactaactggcctaacagggctgggtcttgaaccaaaaaagggtttttgttcccggtttcgctgctcgagaagctttttttgaaccctcatcctccgtttttcctcttccccctcatgtctg

SEQ ID NO: 12401 - DNA, 414 bp, Glycine max
  Clone ID: PAT_MRT3847_111205C.1
agttgatagaaacaaaattttattcttttgtgtggttcaactttggcataagttaacattatacaacctatttttttttattttttttggtttttgcatgggaaatattctaaaaagattttaggggcttgctggtaccttctatcaatcgaacgtcaagaagcatgctggagaagtgtatgtgatttggagaagtcattttgtcaatatggattctttgactgccacagggtaaaagatgcactcagggtgtcctggtttatggcaagtaatatcacaaatttatgctcaccaaatgcaaacgatgacttctatcagtttggtatatacgctgatgccgtgacttccaaagttacatcctcggcattctttaataagtacttcttttgcctgtggtggggcctgaggaatttg

SEQ ID NO: 12402 - DNA, 411 bp, Glycine max
  unsure (1)..(411): unsure at all n locations
  Clone ID: PAT_MRT3847_111206C.1
gacaanaaaaggcatgattttgtttttngactttcanaaatttttagggaaanaaccaagcnaggaaanaagctcgagagcgaaaacggaaaacgnaacaaaatttttgatacaaagcaagaaaagaaaggacgggggggcggatggaggaaaaaggagccaaaaccccccccaagacagaagacagccacaccgagaagagcaaaccgacaaaaacaaaaggagagagaacnaacgggggagccacccacaagaaaccagagcaagccaagaagacaaccaagagagaaagcagagaggggagaagacgcaacgaagagaaaagaggccaaagccccacccgcaaaaccggacagcacaagccgacaaaaggacggacaacgaaaaaagaaaaaaaaaagggaagagacc

SEQ ID NO: 12403 - DNA, 117 bp, Glycine max
  Clone ID: PAT_MRT3847_111207C.1
agcataaactcacattatggttatctacatatctagatggcatcaaactgctgtcggctagtcactgatttactgcctgacataccataatgaagagtcctgaatattaacaacgga

SEQ ID NO: 12404 - DNA, 272 bp, Glycine max
  Clone ID: PAT_MRT3847_111208C.1
cacgcgtcgccaaacatcttactcatgatcatgtgacatctaacgctcattcacactggagcccagggtatccataatgtctaaaggaagctccaaagcacagtggaccgcacatgctccaaaccgcattcggaggactcactcggatcacgcaactcacagatcggtccaggccgtcaagggcgagagcgctgcaaaatctcagagcgtaaaaagaagaactatcgcgtcgtctgaggtcgagactgcgactcagctgctggccacaatca

SEQ ID NO: 12405 - DNA, 288 bp, Glycine max
  Clone ID: PAT_MRT3847_111209C.1
ccgaacaatctgcagatattgtattgcctgtcttgcccgaattctctagcggaattatatataccgcttatctctaccggcgaccccgaacccaattccgcctatcaagtcgcccatatacggacgctcattgcgcgcgctcactgaccgtcgtgactagaaaaaacccggtgggaacccccctgagtcaccctgcttaatctccctcctttcacctcctgctttactcagctggaggaccacaccgaacgcccttcccgatcgccgcttcaccccgaatgcgcaatg

SEQ ID NO: 12406 - DNA, 320 bp, Glycine max
  Clone ID: PAT_MRT3847_11120C.1
acgcgtgagtacagatgtcagtagaggagagaaaggggaaggcagaggcttggcgtaaaaccaagacacgacgtcgtgtggtttctaggaccgtgtacgttttgaaactctggagattgagattgcgagtgagaatcaacacgcaaaactgctgttgccataccatgatcgcgacgatcaattgcagaaacatgaaccactcgtcgcttagtatcgtcaattatatgcactggaacggtggttgaagattccgccaagtgaacgtaccattacgacaaatgttcttctggtttcgctcatgaagcatcttgaaaaggata

SEQ ID NO: 12407 - DNA, 212 bp, Glycine max
  Clone ID: PAT_MRT3847_111210C.1
ggagtttcggttgagacatatcaaaaaaaaaaaacaaacaaaaaaaaaaaaacgggcgccccaaaaggttcaagcctaacttccccttccatccaacttcaaacccctccaaaatggcccccaaattccattccatggcccttcgtttaacaccttcttaacgggaaaaccccggcgtttacccaccttatcccccttgacaaaacccccct

SEQ ID NO: 12408 - DNA, 202 bp, Glycine max
  Clone ID: PAT_MRT3847_111211C.1
cttcgctttctcttgggtactcacgttgattagtttggggaaattataaacctctactcaatgcgctgttggtgatcttaaactatctactgttggggacttgactgagggcaagcatattggcgcttctaatgttgtcccagggcataatcatgttgactaaattcctcttaaaggacatgaagaaaatctgccttattct

SEQ ID NO: 12409 - DNA, 320 bp, Glycine max
  Clone ID: PAT_MRT3847_111212C.1
agcaacttgacgaacacaacaaatattgcctctagttagacttgtcatttgccacgttgattactatatgattgctaacctgctattttggtggagggctataataccttatagggctaccccttaaaaaagggatctgccatgtatcacatgcaatgataagagtggcattgtattgatggtgacataatatggaaaccgacaactttttctattcaactggcttgcgtggaaggccaatcttaaataattggggctacgacgtcttcaaatctcgaagacagtggagcttattatttaatcacatcacactgctttct

SEQ ID NO: 12410 - DNA, 379 bp, Glycine max
  Clone ID: PAT_MRT3847_111213C.1
gggcgacagaaagagagccttctttggaggtgtttggaaccagatgtggttgtcatgtgtgcaactgttcaatattgatgaggctcctcagttgcttgaagaagctaggggaattcttgaacaggagggtggcccatgtcatcacgatactcttgaggtgtaccgcaaccttgcagctacatatgatgctatgggaagagtgcgagatgcgattgaaatcttagaatatgttctccacctgagggacgaacatcttgcgccagcaaatcctgattttgaagatgagaagcgtcgtctggcggatcttctgaaacaagcacgcatcacacggtacccaaaagtgcactctctggaaaaccttattgatcctgactcaaag

SEQ ID NO: 12411 - DNA, 356 bp, Glycine max
  Clone ID: PAT_MRT3847_111214C.1
ggggggggcatttttacttgaaactttattccacatgaaagaaaaaccaggttccttaaacgtgggcacgacggtgcccgcgttaacccccccacattgaacccatgcaatgggcacatggtaatttgcaacgtgattacatggctagggactaaattgcctatgtactcatatctgacttggaatacattttattgtcaaactttctaaaggtttttatcacaaccttagatattcattagcaacccctcttggagatggcacagtttttagttctaacttcaacttgggccagacagctaagattaggttttgccgattttacaagcctgggaggggttaatcatgaattttgt

SEQ ID NO: 12412 - DNA, 487 bp, Glycine max
  Clone ID: PAT_MRT3847_111215C.1
gatgaatggtgataaccatccagaaaagtgtttctacgaagatgagtctctgcagattatgaaagctaaagagtttggtgttacctatatactaggtcattcccttgaaaaggcaaagaactcatcttccatcctaaagaaatttgctatagatgttgtttttggatttctaagcaagaattgcagagagtctgatgctgttctggatgttcctcacacttctttgctagaggttggcatgacatactatgtctaattttttagaggcatctgctcagaagagaatagtcagagttaaatgttggtttaaaagagtgacactgacaatgacctccagaggccaatcaatggtcaagattaatcagaggtagatttgtaatcattgatctctaggtctccatatttctgtatcaaataatgtaattaaaaagaaaaactgtttcacacaagagaatagattacactgacaaatttgcttataaaaaaa

SEQ ID NO: 12413 - DNA, 562 bp, Glycine max
  Clone ID: PAT_MRT3847_111216C.1
cgtttgcaaatgcttgtggagctatgtgtacaacacagaagggagcaattcctgcacttccaaccgctgcagaggcagagaagtttatttccaactctaaggccaaatagactctccttccaaatttgatagtctatctggaaactacccattcattttcattctagagtttcgttttataagcctttgataaccaatgacttgaaattgttgtttctgtttttgaataataaccaacttcttttctcttttttgcacaatgggcacttatagtgtaacactcgttttttaaaaataaatcaaattttaaaaagataatgagatttttataattaaataaataaggagaaataattttattaattaaggtaaataaaatgaatatgtatttttagaaaataaaaatgttggtttatttatttattcaataggaagtaaaatataactatctttatgaaataatcaaataaaacaaatataataaatactcgactcataaccctatttataaataaggacatattacgtcatttattataatgatgatatgtccctagtacgt

SEQ ID NO: 12414 - DNA, 469 bp, Glycine max
  Clone ID: PAT_MRT3847_111217C.1
tttttttttttttttttttttttttttttttttttttttttttttttttttttttttttttttttaaaaaaacgggatcaggcaaaagccaaaaacttacccacaaaaaggggaaccctttcaggaaaaaaaaaattcctaagccgcaaaccccccgcaattcccggaaaaaaaaaaccccccaagttcattcggaaaacaaacaaaagtaaacaaaggggccaccaaaggaaaccaaccccccagggaatttcgggggcccaaaaggccccccctaaaaaaaatctcttttccggaaagggggataacggctcccccaaggggggtttctctcattggaaagggccctttcaaacaacccttttattggcttcaagaaaaggaagttttggaaaacaaacacaaaaggagccccaaatttccccctctgaacgggattgggccccccaaaaaaattctggcccaacgg

SEQ ID NO: 12415 - DNA, 358 bp, Glycine max
  Clone ID: PAT_MRT3847_111218C.1
tttaagcgtgggtgtatgcgagggaaaaacagatgtactgtggtgcataggtttgttgagttaacaaggagtggagaaagcattttcacataggaaagattttgaagatgacctggagtggacttacagactggaaatcttggatggacaattcactgtggaatattggttccgaattacattgagtggtatctattttgtaagtggatgtcctttataagatgtttgctcacaggttacatgtaggtattggccgtgtgtgagtaatctccacattttgtgggtgattttaggacgtgccaatacaatattcaggactaaacacgagaaaaatcttggtttgagagaaaaggaaaag

SEQ ID NO: 12416 - DNA, 224 bp, Glycine max
  Clone ID: PAT_MRT3847_111219C.1
caacgaatgcgagtatattgtctcgagacgctgtcgtctctcctaccagtctcatgtcgcatcttctagtatctcagactaaagttgaagtatcgatgcctgcagttgatgaaactatactgcgtagtgatctaacggccaatcccctggcactgggcgatcttcgagcgcgtgtcgctgtacgatcgcgctcaccgtgttctcggtatgcttatcgttgaggc

SEQ ID NO: 12417 - DNA, 2119 bp, Glycine max
  Clone ID: PAT_MRT3847_11121C.1
agatcaacactttcacgcaatcgatatctcatatatgttttggttaattaatttgatccaacctcatttagcatgttctttagcatccaattgaaaacataagaaagaaaaaaactagtgcatatataattggctttgattaaacataagttaccatgaaactatgagtggctatggattatgctttaaagaaacattaatacgtacacagctgttcacaatttgatatatagtgaaacgcaatagtctcacgtacgaacgaagcatgcatgctcagtcttcgaaagttttgcactcaatggtctccgggttgtccttgcagtaattctcgagcgggtcggagtccttttccttttgcttgtccctggcgtggctcgccgccgcgctcagctcctccacctcgtcccacgccgccacgcactcgccgctcgtcggatcgccggcgcacgcctcctgcgcgttctttatgctctcctccaccttctccgatatgcgctcaggcgcagcgcgaacgggtcggatcctcatcacgcgacccaacttgatactacccggtcgcactgcttggctgggtggaagtgagaactttacagcatgcgcgttttgcggtgaggctgatgcgttgaagaaaaccctggggcatgaaaggctcacaccagtcatagttgccattctcttctcttctccggttatggcgtccgccttgggcacttcttcaattgcggttctgccttcgcgctacttctcttcttcttcttccaagccttccattcacactctctctctaacttcagggcagaactatgggcggaagttttatggaggaattggaatccatggcataaagggaagggctcagctctcggttaccaatgttgccactgaagttaactctgtagaacaggctcagagtattgcttctaaagaaagccagaggccagtatacccattttctgccatagttggacaagatgagatgaagctttgtcttctccttaatgtgattgatcctaagattggaggtgtaatgatcatgggggataggggcacagggaaatctacaacggtcaggtcattggttgatttacttcccgaaatcaaggttgttgctggtgacccttataactcagacccacaagatccagaattcatgggtgttgaagtcagagagcgtgtacttcaaggagaggaactttctgttgtcttgaccaaaattaacatggttgatttgccattgggagctacagaagatagagtgtgtggaacgattgacattgagaaagccctgactgagggtgtcaaggcatttgagcctggactactggctaaagctaataggggaatcttatatgttgatgaagttaatcttttggatgatcacttggtggatgtgttgttggattctgctgcatcaggatggaacacagtagagagagagggaatttctatctcgcatcctgcacggtttatcctaattggctcaggcaaccccgaagaaggggagctccggccgcagctgctagataggtttggaatgcatgctcaagttggaactgttagggatgctgagctcagagtgaagattgtggaggagagaggtcgatttgacaaaaatccaaaggaatttcgagattcttacaaagctgagcaagagaagctccaacaacaaattacctcagcaaggagtgttctttcttctgttcaaattgatcaagatctcaaggtgaaaatctccaaggtgtgtgctgagttgaatgtggatggattaagaggagacatagtaacaaatagagctgcaaaagctctggctgctctgaagggaagagacaacgtaagtgccgaggatattgctactgtcatccctaactgcttgagacaccgtcttagaaaggatcccttggagtctatagactcaggtttacttgtcactgagaaattttatgaggtattcagctgaggatcatagatgtaacacggtttgtattctgtggtattccatgagtataatgctacttcattatttacattttaccttttctgtggagattttcattgtcgttaaacatcaataagattcatgagttccttctacacaggaaattccgagcatttaacgtgc

SEQ ID NO: 12418 - DNA, 417 bp, Glycine max
  Clone ID: PAT_MRT3847_111220C.1
gttgtaaagatggtgttcattaaaggcaataaatgatctcgcaagaacttgattagccacatgaaaacctaaattttcagtttttcacaacaacttctatgttgataacttgttttgagttactgctattgcacatggcttctgcaatgtcctaacttctttggtaatgatgtatgcaatagaagcttttctcttgataatctttttctttttcttattaattatcttggaaatcttttctagttgcagattgctttggaagagaatttgctaaagatgatgacatttcttcttgtgtgtatcatagtaattaaaaatagattaattctattatttttctttatttttaattgaaaatttgtactgaagtaatagtattgaaactaatagaaataaagaatagaaatattcaatggt

SEQ ID NO: 12419 - DNA, 413 bp, Glycine max
  unsure (1)..(413): unsure at all n locations
  Clone ID: PAT_MRT3847_111221C.1
agcgtagtaactcggaattggtcgagctcgagccggcaatgatcaactgtatttgatggtgcatattggtggcataggaacttaataatagggactaatacgtgattatgtcatcacttgatagtagagactaaaactcttaagagaaaaaaatatacaaacaaaagaccatgtaaaagtatttagagtataaacaaaaattgtaaaaaaaaggaaagaaatattaaactcaaataaattttaaggtcaggtgcttatgaatacatgcttgattatgaattatcctgaataataattagagttgaatcggttaaaaaaacttaatatcttaaatattaaggtttttttaacattaatcacttgataatagagactaaaattatttaaaacatanaatataagaaaaaaaaaca

SEQ ID NO: 12420 - DNA, 404 bp, Glycine max
  Clone ID: PAT_MRT3847_111222C.1
actctattacgtataagtagaggctaaagctggtaccgctgcgggaaccgggccggaaagcgcggccggacccacgcgtccgatcccatgaacccctctcggtctttcagatgactataccacgaaaacttacatgacttggacagaactgagaagcagatgaggacaagcgttctacagatagaccggggaggggtggaggtatcaagggtgtgaccttagctcaaatgcgatgtggactcaaacgcctaccgtggcattaaatactgaggcagaatcaacaatccggtctactatgctgggacactgcttgcagaatgaaacgatgcgagatgctgagctgccgaatctgcaaacgcctaggaccaaaaaccttgtctttagtggccagctaagatttgcat

SEQ ID NO: 12421 - DNA, 789 bp, Glycine max
  unsure (1)..(789): unsure at all n locations
  Clone ID: PAT_MRT3847_111223C.1
gcatgcctgcgttagaatcctgcctgacgatatatattcttagctgatggtattgtgtaatcctgggacattttacagatttctagtaaaatcttttattttactctcaaggggctggatctaacagttcccttggataagacccaactggataattctgaaaccaatatggacaataaaatcaagacttcctttgctggagcaaggcttcatattgaaaatcttttctttttagattcaccctcattgaaactgaaaatactgaacctcgagaaggatcctgcttgcttctgtctttgggaggatcaacctattgatgctagtcagaagaagtggactgctggagtatcccagcttactttatctctggaagcaagtactggcaagcttggtcatcagaattctcttggatggactgctggattgtggaggtgtgttaatctaagagatgctagcatagaagtagctatggtaactgctgatggaaatccattgttaaaggttcctcctccagggggtattgtgagggttggtattgcttgtgaacagtatctatccaacacttcagttgaacagttattttttgtcctggatctctatgcttattttgggagagttagtgagaaaatagaaatagctggaaaaaagaaacaattgaaggatgtcaggaacaaatcttttagtggaaagctgatggacaagataccaagtgacacatctgtaactttgacattaaaaaatctncaacttcaatttcttgagccatcttctgtgaatgctgagggaatg

SEQ ID NO: 12422 - DNA, 220 bp, Glycine max
  Clone ID: PAT_MRT3847_111224C.1
tagagagctgcatctatatgtttaacacatcataaacatctgacactcaaattgagtccctttataaccatcttgtgagaggggggtttgaactttaagaaaccccaccacaacatgagagccttattcctaaaaatgatgctctctaacacccctatcatgtttagaagccatgagggtgttttttgatacctaatcctctcatcactgcatttttccg

SEQ ID NO: 12423 - DNA, 374 bp, Glycine max
  Clone ID: PAT_MRT3847_111225C.1
gaaaacataaatgaccattcttataaaattctgtcggtaatataattcacattctccaaatccttgaagctgattggaacccacaataaaccattgtgaaaactagattctaagttatctatctaaaaggcaagtaaaagggaaaatgtgaggaaaaaaaattgaatttaacaaactcttctagcaacccctgtgtttgtacaacaaaatatatactccacagtccagatcaaataaccgaggcatggaagccacgttttcttgattcacatctctttaaacccatgacagctttgagacagaaatcatacctatccttcaacagcaatgctgggttcagaaatggactctcccgtgtgtgattcaactgggga

SEQ ID NO: 12424 - DNA, 348 bp, Glycine max
  Clone ID: PAT_MRT3847_111226C.1
atgtcccaacccagattcattgtcatgactttcccatgtttggcacttgttcttctgcttcacacccttctcccaatctgcaatggcctatcagttgtggacctcatcaatttgagtgaaactgaagtgatgaccaaaagggtttgcaccaaagcattggagagtgtttggcagagccagaaatggactcagagagcaataggagagttctggaagagggacatggttccatgtgatagagcaggagcttcttactacaattttcatgcaagaccagctaatccttataataggggctgtgaggtcattactggatgtgcaagaggtgttcaaggcatcaaaacttga

SEQ ID NO: 12425 - DNA, 755 bp, Glycine max
  Clone ID: PAT_MRT3847_111227C.1
ttaacaacaaactgaaaacaacacagaacaatgtcccaacccagattcattgtcatggctttcccacgtttggcacttgttcttctgcttcacacccttctcccaatctgcaatggcctattagttgtggacctcaatttgagtgaaactgctgtgatgaccaaaagggtttgcaccaaaagcattggagagtgtttggcagagccagaaatggactcagagagcaataggagagttctggaaggtgtgcagcacataaagtacattagctatgagacactcaagagggacatggttccatgtgatagagcaggagcttcttactacaattgtcatgcaagaccagcaaatccttataataggggctgtgaggtcattactggatgtgcaagaggtgttcaaggcatcaaaacttgatacagttatggtcaattgaatggatgaaggaagctaggaaagtgtcccaagtggctgtatcatgtatgttattattcttaatttccttttccatctaatcctgtttgtttcatttatgagctttcctgtgtagttattatggtcattgtttttatacttttcaaatgctttttatttagtactttccttgtaacatatggtatgactagcttgataatgaaaatatctagcttttgttcttgagaacaaaaaaaaaaaaaaaaaaaaaaaaaaaaaaaaaaaaaaaaaaaaaaaaaaaaaaaaaaaaaaaaaaaaaaaaaaaaaaaaaaaaaaaaaaa

SEQ ID NO: 12426 - DNA, 933 bp, Glycine max
  Clone ID: PAT_MRT3847_111228C.1
ccagcgccagcgcccgagagagaaagtgtgcttttaagatttctgaatcacaaattgaatatagcggtaaagacgaacccccccccccccccccccccatttgttgagttctagagagagaaactcagagatctgattcatacctttctcctccagatcctactagccaaagctctattttagggttcgattccgatcgatccctaaccggcgagcgcgagttccttcggttcgacgacgaagtttctctgtttaggatccattgatcgattcatccatggcggcgatcgatgacttgtcggagctcgccgattcgatgcgccaagccgcggcgctcctcgccgacgaagacgtcgatgaatcctccaattcccgaagaccttctacttttctcaacgtcgttgcactcggcaatgttggtgctggaaaatccgcagttctcaacagtttgattggacatcccgttttgcctactggtgagaacggagctactcgggctcctatatgcattgatctgcagcgtgacacttcgttgagcagcaaatccattatcttgcagattgacaacaagtcacaactagtctccgcaagtgctttgagacattcgttgcaggatagactgagtaagagttcctctggcaagggtcgggatcaaatttatttaaagctccgcacgagcacagcaccgcctcttaaattggttgatttacctgggttggatcagcgcatcatggatgaatcactggttagcgaatatgcagagcacaatgatgccattttgctagttattgtacctgcagctcaagcacctgaaattgcttcatctcgagccctaaaatatgcaaaggaatatgatggagaaggtaccagaaccattggcattattagtaaaatagatcaagctgcatcagaccaaaaagcactggctggagt

SEQ ID NO: 12427 - DNA, 655 bp, Glycine max
  Clone ID: PAT_MRT3847_111229C.1
aatcataccttgctccagatcctactattcaagctctgttttagggttcgattccgatcgatccctaaccggcgagcgcgagttccttcgattcgtttcgtttcgacgactaagcttcttctccgtttaggatccgttgatcgattcatcatccatggcggcgatcgaggacttgtcggagctcgccgattcgatgcgccaagccgcggcgctcctcgccgacgaagacgtcgacgaatcctccaccaattctcgaagaccttccactttcctcaacgtcgttgcactcggcaatgttggtgctggtaaatccgcagttctcaacagtttgattggacatcccgttttgcctactggtgagaacggagctactcgagctcctatatgcattgatctgctgcgagacacttcgttgagcagcaaatccattatcttgcagattgacaacaagtcacagcaagtctccgcaagtgctttgagacgttcgttgcaggatagactgagtaagagttccaccggcaagggtcgggatcaaatttatttgaagctacgcacgagcacagcaccgcctcttaaattggttgatttacctggggttggatcagcgcatcatggatgaatcactggttagcgaatatgcagagcataatgatgc

SEQ ID NO: 12428 - DNA, 709 bp, Glycine max
  Clone ID: PAT_MRT3847_11122C.1
tcttctttttttttttaacagaaataaaggcagcatcctcatttcagtcccacaagggaagaattacagcctaaaatttaactgtaggatatgttaaaccagcagaattacaagtaagcaagcactttaatgtttctacaacaatttttttttttgtgtgctttacaattttgcagtaatcctagtctgtggtctggtcaatgaagctacgtcctcccagatccagctgaacttatagctctaaaagattcaacatgcccggcacatattacagattcaccagctatgtccttttcttcaactctgtgcactgctagatgtgcaagagccgtcacaacgtcgtccatgtaaggtcgtgtgtcaggttcctcttggagacacattgctgctactgcaagggcttgaaacagacccttcacagggaactgacctttaagcaaaggatcagccattagagtgaacttcgttctgtccttaaacaaaggttgtgcccagaaaatcaagttttgcgattctgtgccatttgcatttccaagtaccctcgtaattgacatcaatgcttcaagaactaccccaaaactgtatagcactgacttttgtctatgctgaatcagtgaatgctctctggtgcacaataaccaaaagtccccatcaccctagttgccacatgctcctcaccttcttttggaccaatcttagcaagtccaaa

SEQ ID NO: 12429 - DNA, 276 bp, Glycine max
  Clone ID: PAT_MRT3847_111230C.1
atgtcgttttatgaaggggtattaaaactaggtgaaaataatcatcgtactgcttttgaatttcgctttgaagagttattttcaaatgaagaatggtgcgcattatcgctagcagaacgtcagaaacaagaaaaagcttttagatgtgaagtgaacaagcgagagtatatacgtatgccattttcaagtgaaaacgatgctaaaaataagttgtttaatattgtttatgcttacaatgccgtaaaaaaatttaaacaggctgaagactctagaaat

SEQ ID NO: 12430 - DNA, 354 bp, Glycine max
  Clone ID: PAT_MRT3847_111231C.1
ttctttggttcactccttcttcttcctcttcaaatatttaatactacagaggatgggtggtgaggaatcgcgctcgatggataacgaatgggcaggaaggaggctgggaagaacggtacgtaccacgtgcgggagtacctctaaatgcacacactgtgatagacgactggtaccccatgtctgactgtcacggccgatggccagtcatgcaggagccgaagggcgcttagaggcatgacaggggctacccttaattctgccacagcttgcgatcagggccttcatattcaatggcgtctgatcataaacactgccgagaaaaccctaggagtgacgatctgtattcatacagct

SEQ ID NO: 12431 - DNA, 335 bp, Glycine max
  Clone ID: PAT_MRT3847_111232C.1
cgttctttttttttttttacatttcgcatggatttatatgcgagcggggatgaaacagacaagacgcttgctacacaataagctcgcgcacgagggcgcatgagtaacaattatagcccaaagtagttggctaatatcaagtaatcatacaaacccgagtttcacgatttagtgtactgggagcaagcattctgttattactacattcgctagaacagatgagcctgtttcttcaagaaccaacggactcgcatgaatatacgaggcgacgagcaacttttttaattgccttacgctgtgctggcaatgttgtagaacgccattccgaaccctca

SEQ ID NO: 12432 - DNA, 261 bp, Glycine max
  Clone ID: PAT_MRT3847_111233C.1
cacgaacaaccccgacgccgacggctccggttccgtttttcgccgacgcctccaactcaggatgtacgggaacatgtaccgtatcatgttctacacggagttcgagggcgaggaggatcccatcttccagaggcttagggccttgaacggacagaggagacgatcggcacatagcttataatataactataacgatttgattacgatcttgagaccctgtttgaagggtaacttggacatttgtaaggaggtgaacgaaac

SEQ ID NO: 12433 - DNA, 255 bp, Glycine max
  unsure (1)..(255): unsure at all n locations
  Clone ID: PAT_MRT3847_111234C.1
tacggctgcgaagagacgacagaagggggacatcgaacttagttttaatgcccaacttggtcttgcatgggttgatactctatttacctgcattgatgcgctcacaagactcttgtactgattcgcaagcancatattatgctagccgtgattgctataggaatccaagaggagcttgttgttttggcaaatatcgaaagactgcgaatagatggaagcgcggcaagagtgtcaacgctatgatcgaatggaaat

SEQ ID NO: 12434 - DNA, 488 bp, Glycine max
  Clone ID: PAT_MRT3847_111235C.1
gtcgcacgcacgcgtacgtaagctcggaattcggctcgagcagcacaacacattgtaaggtgggctctgtggtgtctgttggctggctccgatccaagaaggctgttgactggcgactgtttcgaaacatttttatggcctggtttgtcaccgtccctatttctggggttatcagtgctgctatcatggcagtgttcaagcacatcattctgccggtgtgaagctgagctcagaattgtgtcagtgtctgggaccatcgcacacacccctgttcctaaagaatgctcagtgttgctgaagataggccagggttttaaagtgggggagctgtgggaaggaagtgtaatttatactataattgcttttgtgctaaatatgacttatctcaaaattagctgtgtaaaatagccaggtttccattgattcattctaaggtcccttttctcctgggctatgacttcctgtacatatttctctacttttgtatc

SEQ ID NO: 12435 - DNA, 138 bp, Glycine max
  Clone ID: PAT_MRT3847_111236C.1
gtgcgatttaggcctgcacctccaaattgtagactaatcattgttgaacaaatattgctgaaacttccttgactgttgatgctgtagtgtacgttattgactcctgcatatcccaaagcaaagccagtatcatccatc

SEQ ID NO: 12436 - DNA, 482 bp, Glycine max
  unsure (1)..(482): unsure at all n locations
  Clone ID: PAT_MRT3847_111237C.1
ctgtgattgatgttggttcctattctatttggtaagattatcaactttaactaatttgcagctgtttagattggttcctactacacacttttctccattttttttcttcattttccattgaattcaataaaactctttctatttcttggtttcctcatatatttacttttgtatttttagctttaatgttcagggttggcactcgatgctgcttcttggaataagtgctgccataaggtgaattcgaatgaccgaccataaagaaaagaataaattacactgatcatccttgaagttccatgtaattatataaacttttcctgctttttctatccctacactaaccctttaattgtttgaataacattaaaaccttattcccatgtacgagaggttgttgtaaatgttaaaaagcagggagtctttgtgtattttaacaaaaccgcaggatngatttgtgtaatttactctatataaaatag

SEQ ID NO: 12437 - DNA, 257 bp, Glycine max
  unsure (1)..(257): unsure at all n locations
  Clone ID: PAT_MRT3847_111238C.1
ctaagatacgtgtacacatagcaacagaacttggaagagttttgtcctaattaaactgcgtgaagaataatactagactagatagaatattgtacttctgatgcaaattatgtaatgaaattttgatcaactctctctctcaatggatttttttttagtgtaatttctaggcactctagtgtaacatgttttataatatcaattaataaaaaaccttgtaaacatgacttttattatacacgatttgtgttcgtgng

SEQ ID NO: 12438 - DNA, 1394 bp, Glycine max
  Clone ID: PAT_MRT3847_111239C.1
aattcatatatattgacataacattgcacccatatgactattttatatagagtaaattacacaaatcatcctgcggttttgttaaaatacacaaagactccctgctttttaacatttacaacaacctctcgtacatgggaataaggttttaatgttattcaaacaattaaagggttagtgtagggatagaaaaagcaggaaaagtttatataattacatggaacttcaaggatgatcagtgtaatttattcttttctttatggtcggtcattcgaattcaccttatggcagcacttattccaagaagcagcatcacttagttttacttctataaaacctcttaatatagagaaaattaatgaaatgagattacaaaaagaaccattcacacaactagtcccgttattaaacaataacacgtcacctttttattgtggagtaataataaggcagattaattcatgtttggtactccatccattcacaccatgtagcagcactgttttgaaaaacgatcaatgccggagccaaaataaaaacttgtttggttttagtttattttcttagttgtgaaaataaaaacaaatttgagagtggtaaataaatatattaaaaaatgaagcattgctccttctcatgtaacatttcccatgtcattcgagtggaggttgttgatgctccatattctcatgcgatgagctgtttgctccacctccttggaccagttggtcttccaaataatgactaagaggactaacatttgaagaatcctgccacacatggtgcctccccagagacccttgacccctaaatgttgattgaaaccaaggaaaattccaatggggagtccaacaatgtaataacatgcaaggtttatgtaaccaaccataacttgccatccactccccacggccacgcctgacatcacatgtgaagcactattgataaccattgatacgccaagaaggtatgctaaatcagcaacagctcgaatcatatccttactgttggtaaagatcttggcaaactcatctttactcaagaaaatgacagtcatgaaaacaatgccgaggaggagagactgaaacattgtcacgcagaaagagtatatggctgctcttggatgcgacatgccaagtgtattggagacacgaacggctcgagcggctcgagcggctcgagcggctcgagagtgccaaccctgaacattaaagctaaaaatacaaaagtaaatatatgaggaaaccaagaaatagaaagagttttattgaattcaatggaaaatgaagaaaaaaaatggagaaaagtgtgtagtaggaaccaatctaaacagctgcaaattagttaaagttgataatcttaccaaatagaataggaaccaacatcaatcacag

SEQ ID NO: 12439 - DNA, 221 bp, Glycine max
  Clone ID: PAT_MRT3847_11123C.1
ccacatctaactaataactaccaaatataatcttatggctgattgattaatctggacatgcgctattaacactgcataccgaacccatttctgcatgcttacttcattcactcacctaaaaatcttagttctcttgactacccattaaaccaccaattacttaacttgcactattatcaactctattcaacagcaattcatacaggtgcagccaccagttg

SEQ ID NO: 12440 - DNA, 274 bp, Glycine max
  Clone ID: PAT_MRT3847_111240C.1
tgaaaaaaattgttttttgagaaaaaaaaaaaataaacgggtggttttacgacgggagatgcgggattatggactaaacacaaaaaaaaatgggggttcgacagataatgaaatgatggacccggaaattaattagaggcatttctcttgaggttttccaaatttgcgtttatgaattcgaataacatgttggtgataaaatggtcaaagatcaaatttgtggtaaatgcaagttggattatacttacgctaataattctgcccgaattcttaa

SEQ ID NO: 12441 - DNA, 1087 bp, Glycine max
  Clone ID: PAT_MRT3847_111241C.1
ttcacgcgtccgctcttctcttctcttctgtctccattggacagatagcattttccccttcccagacagatccaagaaccacaggtactcactcttgagatcctgttttctctttttctcgttgcgtgtcttctgctgctcacacttaacgcgttttcttttttctccgaattaaacgcgaccttatcttcttcttgctctcttttatcagtgctcttttttgagccaacggtgctgattctttcccgcggaatcttgctcggcgttggggtgtaagtcatttgtcaattcccttggacaagatggctttggggaaatatgctagggtagatggtagaagatcgtcgagctggtgttcgacggtgactgttgtcgtgtttgtggctctatgcttggttggggtttggatgatgacatcatcttcagttgtccctgtgcgtaatggagatgaggcccaggagaataagaaccaagtgaaagaacaaacagagcctacagaggtgaaagaagcagtgagtgaggtcagcaatagcaatatgcggcagtttgaagataatccaggtgatttgcctgaggatgcaaccaaaggggacagcaatgtagcctctgaagacaactcaaacttgtcagataaacaagaagagaagtcggaggaaaatcctgtagagaggtcttctgacgatacaaagtcggaagacgtggaggataagaaaactgaggaggaaggttctaatacagaaaatgaatcaaactcagactctacagaaaatagcaaagacagtgatgagacttccactaaagaatctgattctgatgagaatgagaagaagtctgattcagatgaaagtgaaaagcaatctaatgacactgatgaaacaacagatactaagatagaggagaaggtggaagaaagtgataacaaggaatctgatgaaaactctagtgagaagaatataaatgatgataccaaacagaagagttcaaaggaggtatacccttctggggctcagtctgagcttcaagaagaaagtacagcagaaactgggtcttggtcaactcaggcagcacagtcgaagaatgaaaagga

SEQ ID NO: 12442 - DNA, 2962 bp, Glycine max
  Clone ID: PAT_MRT3847_111242C.1
ctacaatggacatatagcattttccccttcccactcagatccagtgatcgttttttgagccaacggcgctgattcgttcgcgcggaatcttgctcggcgtcggcgtgtaagtcatctgtgaattcccttgggcaagatggctttggggaaatatgctagagtagatggtagaagatcgtcgagttggtgttcaacggtgactgttgtcatgtttgtggctctgtgcttggttggggtttggatgatgacatcatcttcagttgttcctgtgcgtaacggagacgaagcccaggagaataagaaccaagtgaaagaacaagcagaggtgaaagaagcagtgagtgaggtcagcaatagcaatacgcggcagtttgaagataatccaggtgatttgcctgaggatgcaaccaagggggacagcaatgtaacctttgaagacaactcaaactcttcagataaacaagagaagttggaggaaaatcctgtagagaggtcttctgatgatacaaagacagaagacgtggatgataagaaaactgaggaggaaggttctaatacagaaaacgaatcaaactcagactctgtggaaaataacaaagacagtgatgagacttccactaaggaatctgattctgatgagagtgagaagaagcctgattctgatgataacaagaagtctgattcagatgaaagtgaaaagcaatctgatgactctgatgaaccaccaaatactaggatagaggagaaggtgtaagaaagcgataacaaggaatctgatgaaaactttattgagaagaatacaaatgatgataccaaacagaagacttcaaaggaggtatatccttctggggctcagtttgagcttcacgaagaaagtactacagaaactgggtcttggtcaactcaggcagcagagtctaagaatgaaaaggagtctcaagaatcctccaagcaggcaactggatacaagtggaagctttgcaatgtcactgctggtcctgattttatcccatgccttgacaactggaaagctattaggagtctccggagtactaaacactatgaacatcgagaaagacactgtcctgaagaacctcctacctgccttgttcctgttcctgaaggatataaacgcccaattgagtggcctaaaagcagagagaagatatggtattacaatgttccacacacaaagcttgctaaagttaagggccaccagaattgggtgaaagttatgggcgagtaccttacttttcctggtggtggaacccaattcaaacatggggcacttcattacattgactttatacaagagactgaacctgacattgcttggggcaaacgcacgcgcgttatactagatgttggatgtggtgttgccagctttggaggttttctctttgatagagatgtacttgcaatgtcattagcaccaaaggatgaacatgaagctcaggtacaatttgcacttgaaagggggattcctgctatatctgctgtgatgggcacaaagaggcttcccttccctgggaaagtatttgatgtagtccactgtgcacgatgtagagttccgtggcatatagaaggtggtaaacttcttttggagctaaatagagtattgagacctggaggtttttttgtatggtctgctactccaatttatcagaagcttcctgaagatgttgaaatatggaaggccatgaagacactaacaaaagccatgtgctgggaagttgtgtcgatcagcaaggatccagtaaatggagtaggtgtagctgtatacaggaagccaacttctaatgagtgttacgagcaacgctcaaagaatgagccaccgctgtgtccagactctgatgatcctaatgcagcatggaacattcaattgcaagcttgcttgcacaaagcgccagttagttcaaaggaacgaggctcaaaattgcctgagctgtggccagccagactgatcaaagtgccttattggttgtcgagttcccaagttggagtttatggaaagccagcccctcaagatttcactgctgattatgaacactggaaacgtgtagtatccaagtcttatctagacgggatgggaattaaatggtcaaatgtacgcaatgtcatggatatgagatctatctatggaggatttgctgcagctttgagagatttgaatgtttgggtcatgaatgtggttacaatagactccccagatactcttcctattatttatgaacgaggtctttttggtatatatcatgattggtgtgaatcatttagcacctatcctaggacctatgatctcctccatgctgatcatttgttttcaaagcttaagaaaaggtgcaatttggctgctgtagtggctgaggctgatcggattcttaggcctgaaggaaaacttattgttcgcgatactgttgagatcattgaagagcttgagagcatggctaggtctatgcagtggaaggttcgcatgacttactccaaggataaggagggtttgttatgtgtggagaagtccaagtggcgacctaaggagcaggaaaagctcgagtatgctattgcttaagcatggagatgagatgccaaaattcttgggttttttggctactcgaaattcctgtgtaactgtgcttccactatgagtcatatgtatcatgttagttaggaatatctacgtattcttcttttttcctgttgggtattaattttgatatcctttatttatatttattaaattggtgtcctctgttgtaacatggtgccatagcatgaaggaaatttgatcgcattcttgcaaatgtagaggccattgggttatataattataagcgttgtaatagttgacaattttgaatattcacttcaccggaaatggtaatattaatctatatattataaagctctgactttagactggctgattttaccggtgaatcggtcaggcaaattggtttggtct

SEQ ID NO: 12443 - DNA, 359 bp, Glycine max
  unsure (1)..(359): unsure at all n locations
  Clone ID: PAT_MRT3847_111243C.1
gctagaacgaggtttgggttatccaaacctggtgacaatttttttgacatttttttaaaaaaataggatgcgtcttcctcaccttcattttcattgatctcttttagtttaacctatatcttctttcacctattcgaccctcttcaacctctttgacgttattcttcatcttttctctcgtaaaccttcacctttcatctccgaactatgacatgatacaattgcacaatagaatatagaacacagagcggttctttattgtgctcaatacaatacaaaaaaagttgtaagatcataanggatcacaaaaagggaacatggagaacataaaaatgcagcaattaaagcacttaaggtca

SEQ ID NO: 12444 - DNA, 261 bp, Glycine max
  Clone ID: PAT_MRT3847_111244C.1
cagattcggatagccgagcttgtatagccgaagcgggagcgattccggttttggttcggttccttaatgcggagaatccgagcctgcaggttaacgccgtcacgacgattttgaacatgtcaatattggaagcgaataagactaagataatggagactgacggcgcgttaaacggcatcgcgaggttttgatatcgggtgccacgtgggaggccaaggcgaacgcggcagcacggtgtttagtttgtccggtgtggcggcg

SEQ ID NO: 12445 - DNA, 751 bp, Glycine max
  unsure (1)..(751): unsure at all n locations
  Clone ID: PAT_MRT3847_111245C.1
tttagggatgtacatagaataaaatgatgtagtttgctaatcaattccatgattttaattaatttgatcatgatcatgatctgtgggaacctcaaaagaaaggcttttctttaaacccctgtaactatctcctttgtcctcaagctgcatctctccaagttctgttcatggctccaagagtgtggagatggtgatgtcaacagaggccacaactgattaatcctttgcttcctcattctgccaacggtaatctttgaatgtttcctcaacactccgttgatggctttgacgtacctgctggagtcgtggtctcttacgattgtgccttctgaaccatatgctgctgcatcacttagtgcaccactagggtgtggctgattcaggaaggttctaagaacacttggagaatatccacctttagtattgtccagggcatagaaggcacttcctcgagggagtaaaggatgtggaggagatgtcttctcatcgggttggaggatgaatatnntacccagtggtgaatacaacagcttatttttcagcagacatggatgtgaccgaaatgagctgtttaagcgcttaaggactacagctacatggctcgggtanntgcannnnnnngccctgngnnnnnnatctctatgcatcatcacacagnnnatttggctctcatccaggcctacctcactgatnatttnttggcctccacngnnnacnnatngcgagccaaaagctactactgccccaacag

SEQ ID NO: 12446 - DNA, 612 bp, Glycine max
  unsure (1)..(612): unsure at all n locations
  Clone ID: PAT_MRT3847_111246C.1
gcgnncgttatctcggaattcggctcgagcgtttgatcgctaacggaaccgaagccgaagccggtttgattcccgtttttccctctctcactttccccaaccactactccatcgccactggcctctaccctgcttaccacggcatcattaataaccacttcaccgatccactctctggggaacccttttacatgggtaacagccatgaccccaagtggtggctcggggaacccttgtgggaaactgtggtaaaaaacggcttaaaggctgcaacttatttctggcctggttctgaggtaaataagggtccttggtcttgtcctttcaattattgcaggcactataattcttctgttgcgtttgaggatagggttgatgcggttttggggtactttgatttgcctagtgatcagattcctgatttcatgactctttactttgaggaccctgatcatcagggtcataaggttggtgctgatgatcctctgatcactgaggctgttgctaggattgatagaatggtggggaggttgattaggggtttggaggaaagaggggttttcgaggatgttagtattattatggttggagatcatggaatggttggtactt

SEQ ID NO: 12447 - DNA, 263 bp, Glycine max
  Clone ID: PAT_MRT3847_111247C.1
gaggaacggttcttggtctgataggtttcgcggaggtgccgtggatgttagggatggtgaggatgatgattatgagagtggtggattcagtgttagacaccaggatgaggaggatcagcaccagtaccagcagcagcagcatcagaatagtgttgatgatgcttccatgaaatcaaattcgaatttgaatgaatttgcgccgaggagtgaggatggtggtgatttgaatgataaggatggggataaggagagggtgaatgctg

SEQ ID NO: 12448 - DNA, 507 bp, Glycine max
  Clone ID: PAT_MRT3847_111248C.1
ctcgagccgcaattgtgtaccttcccttgctccttctcacttcacaacactcaccccatttttctactcctttccttcttccctccttttatttcatttttctaacaaaatggaggaaagggtggtaccaaagaggccaagagaagaagagaccctagagcacaaagatgcatcattagatagttatgaattactagagtcctcatcaaagaggcacatgccatacaaccacatactatccctccttgaatcagaggaagaagactccacacaagacctctctcctctcatcactgccctccaacaagaaatcaccaattgtgccaatgattcggatacccttttgagccaacacaacctcaccaacaccacaacaacaactaataataatttagagtcttgttcatcctcaacaactcaatattctagtaacatggtggaggaacatgatgacaaagaaggggtcatgagacaccttcttgaagctctgatgatgaacttgggatt

SEQ ID NO: 12449 - DNA, 142 bp, Glycine max
  Clone ID: PAT_MRT3847_111249C.1
ccccaaccttaaagggaagagcttagcaactcttatacaacagggcatggctggtggaaaaaataaacctaagcttcaagctttaaaagatgagtaactctcaaaggcacagttaaagactctctcagaagcaggtatagaa

SEQ ID NO: 12450 - DNA, 381 bp, Glycine max
  Clone ID: PAT_MRT3847_11124C.1
acgaaagaggaattgccaatctcaaatctaaagagttttgatgctgcagttgaagacctttcaccatgtgtgcagctaggcagggataataagtctgcctaatacatatttgcattatcttcaattggtgaatataagaaatctgaggaagctcatctgaaatcacttcaaattgatagaaattttcttgaagcatgggaacacctgactcaggtatctatcaaggttcaaccttattatactgatagttgcttgctctgttaattgttagctggaagcttgattctgaaaatcctgaatcatctgtatggatattattttctggtttgaaatgtgatcagttgtatacttgcatgctctctgggctctaatcatatcttt

SEQ ID NO: 12451 - DNA, 1092 bp, Glycine max
  unsure (1)..(1092): unsure at all n locations
  Clone ID: PAT_MRT3847_111250C.1
gtgtaatgttaagagttaacatataataaatcgcgtcatcctgcgtgtgtattgtttgagtcggaggaataaaacaatgagagcactgcttctgcttcagcttcaggctttgacaagtcgggtttcactttcctcctccacctttgttcgcggcaaaagcttgtggttcgatgcaaatagagataattcccaagtgagaaggatatggtcttccacccctgtttgtatgggccgccgttccagcaagattgctgggagaaagggtgcccaagatgcaaagaaagcaaaactatactcaaggataggaaaggaagtcgtgtctgctgtaaagcgaggtggtccaaatgtaacatccaactcagttttggctgctgtacttgagaaagccaaggagcttgatgtgcctaaagatattgttgagcgcaatatgaagagagcttctgagaaaggacaagaggcttatatcgagaaagtctatgaggtttatggttatggaggagttagtatggtagttgaggtatcaactgacaagatacatcgttctgtggcaaagattagagaagtgataaaggactatggaggaaagatggcagattctggatctgtgacatttaagtttaaacgtgttcgggtagtaaatattaaagccactaatgctgataaagatcagctgcttgccattgctttagatgctggagctgaggatgtaattgaacctccaacttatgaagatgacactgaagaggataggtattataaaattgtaggttcttcagagaacttttcatctatactatctaagctgcggagcatagattttgagctgataatagttctgagcttcttccaaataccctggttgtggtttgtttctaatttctattggctactgtatatgctatttcatttcttggattttcatttctcttttcttccttctccttttggattcatataatacaaatattgacaagcaaacaatccgaaatggtgtaagtttaaatctgtgatgtggcaatatgcaatttcttaaatgagnttggggagttgccttttcctgattcactgggtctggtcttctgcctgtattgc

SEQ ID NO: 12452 - DNA, 345 bp, Glycine max
  Clone ID: PAT_MRT3847_111251C.1
ggatacctaccagaaattgctaaattatccgccgtggctacattaattctaacctagacatcaaggaacatatcatgtccccaagataccaaggtgcaacttggacgcaacacccctgatgtcatattcaccccattcgctgacacctgagaaaggctgagcggtcctctatctgaggagttgcctttttgaagtgactcctgcttcatacccaacaaatgccgacattagtgaccttctcagctccgcgaatcgacccgactgcccaacccagatacttccgtgcagaccaggcaacagtacagtttcgtcggtcccattgatttgggcccgcgcgatgtcaaa

SEQ ID NO: 12453 - DNA, 514 bp, Glycine max
  Clone ID: PAT_MRT3847_111252C.1
acgagctcaatttcatttttctggtaatcagggtacctgtaaggtcttatgttggggatttcagctccattttttaactcaatgctatggtcttgtctccttgaaggagggagaccactagggtcttgaaagaacggcagtaccaggggtactgatgatgaaaatatacaaagcagctatgctgccagcctcccaaaaacacaactaaacccatcacaaggccccaccaaaagacaaaaacaacccagattaagcaaaggcctccataaggttggaagaccaatgattaaaagggatattaaaatctttatctctagctttagaccaggaccaagctaggaataaggcatcatccatcactttggaagatacaaaaggaatgccctgaaaaatcagtaagttcctatgcttccaaatagcaaaagttaaggcaatccaccacccacaccatctagaatggtttctccctacaacaaaaccatcgcaaaatagactgaaatgacttgctggagaa

SEQ ID NO: 12454 - DNA, 346 bp, Glycine max
  Clone ID: PAT_MRT3847_111253C.1
cccgggaaaaccaaaggaaggggctgcttttttcaaaaaattaaagggcaattggttttcaaaaaccttatggtttaccaaatccctaaacataagcccgggccgaacccttaaaaaaaacccaaaatgggtgggggttaaatttgcccccccccaaaaaaaaaatcagttttcctaaatacccggggccctttttttttaaaaaaaaccgggaaatcgaacctccctttccagtaaaacccttttttgcccccctaaaaaaccccgtgggggcccttttaaaacctttgacccccccttttttaaaggggggccccctttccccaaaaaaaccggggcccccttc

SEQ ID NO: 12455 - DNA, 133 bp, Glycine max
  Clone ID: PAT_MRT3847_111254C.1
gattcctgccaataataaggggaatcatagcattgggtggctcttctggctattaactaggatggtactgcaaatgcttggtactattcgtccaggaacaagtggttattgaatggtggacttattcttgtat

SEQ ID NO: 12456 - DNA, 1748 bp, Glycine max
  Clone ID: PAT_MRT3847_111255C.1
ctttctgagaaaccatcgattattatcattacaatggatcgttcagaatatcaaattgaggatgataacctgaagcttaaggttatcttccttccatttttatcaattagtcacataattcccatagtggacatggccagaatcttcgccatgcatgacgtggacgtcactatcatcaccaccacgtccaacgccgcgcttttccaaagctccatcagtcgcggtcaaaacatcaggacgcatgtcatgaaatttccggccgaacaagtcggtcttcctgtcggcgttgaaactttcagcgccgacacgccacctgacatgtcaccgaaaatctatgctggcctcgagattctgaggccagagatcgaaaacctcttcaaggagctacaagctgattgcatagtgagtgacatgttccacccttggaccgtggacaccgcagaaaaactaggtattcctagaatcattttctacgccgcgagtgttctgtcacgttgtgctgtgcactcgttggagcaacacgaggttcacaccaaagtggagtgtgacagtgagaagttcacgttggtaggtttgccgcacgagttggagatgacgaggttgcagttgccggattggatgaggaagccgaacatgtatgcaatgttgatgaaggtggttaatgattccgctaggaagagttttggggcagtgttcaatagttttcatgagttggagggtgattatgaggagcattacaagagggtgtgtggaaccaagtgttggagcttgggtccggtttcgatgtgggtgaaccatgatgatttggataaggttgaaagaggacaccatgttaaaacacaaggagaagaagaagggtggcttgaatggcttaataaaaagaaagagggttctgttttgtatgttagttttgggagcttgaataggtttcctagtgatcaacttgttgagatagctcatgcacttgaaagttctggttatgatttcatatgggtggtggctcgagacaatgatgagggtgagaatagttttatggaggagtttgaagagagagtgaagggaagcaaaaaggggtatttgatatggggttgggcgccacagttgttgatattggagaaccgtgcaattggggggatggtgagtcactgtggttggaacacggtggttgagagcatgaatgtagggttaccaatggtgacatggcctttgtttgcggagcatttcttcaatgagaagcttgtggttgatgtgttgaagattggggtgccagtggggaccaaagagtggaggaattggaatgagtttgggagtgaggtggtgacaagagaggagattgaaaaggctattggtgtggtcatggatggtggagaagaaggtgaaggaatgagacagagagccaaggctcttagtaatgcggcaaaaaaggctataaagcttggtgggtcttctcataacaatatgatggaactgattcgggagctcaaggaattgaaactcaggaggaagcctcaataaattaaacagtgcctagtcccaaatcatcacatgtttttctttaattaataaaagtttaggtttggaatcgattaacatgattaggagatcgagtctgaacattccatgaaacacttaaaaaagtatttataatccatcaataaaattctcacaaccaccgtaaaagttaaactcacgaatgtgagatgtgaaggttatctaccaactaaataaacttttttcctttcatcatt

SEQ ID NO: 12457 - DNA, 241 bp, Glycine max
  unsure (1)..(241): unsure at all n locations
  Clone ID: PAT_MRT3847_111256C.1
ccacanacccacttccaanacgatgtcgtctncggagttccaagaccccgccgnngnggatcatcggaggcccaagtcagcaaaaaggcggtaagaaggaggccgcgactggagaagcccgccgcgcnangnatcgccacgatcggngtcacggcagctcncgtcgagaggagaccttcggngaaatatgngcgtgcgtggtgagctgagctagacanggagngtggcagtgagcngtgag

SEQ ID NO: 12458 - DNA, 280 bp, Glycine max
  Clone ID: PAT_MRT3847_111257C.1
atctagctgggacaaaatggggccatcatttttttataatataatgaaaaacgtcaaggttcaagaccacttatcgttttaacatgaactttgttcttatttggtgctaaagggacagctctttccgtaacaattgaatttccagagagaattctgcaactgttagcaattaagcccccttcattataaccggggtaaatgacgactttcctcagcacaggtttagtccggtgcttaaaatttaggaaggcccaaatatgctgggttatgccaagaatgt

SEQ ID NO: 12459 - DNA, 1110 bp, Glycine max
  Clone ID: PAT_MRT3847_111258C.1
caaataaaaacagtcaaattctaatatataccgtgcatcacacaagggctcgaggaaaaaaaaaaaagaaagaaaaaactagtcctacatagagagaggtgcgttgcgtgttggtgccgccctaatcgtgagaagaaaggaaaggcaaaagggaaagatggtgtgcataaggaaggcgacggtgaaggaccttctggcgatgcaggcgtgcaacctgttctgcctccctgagaactaccagatgaagtactacctctatcacatcctctcctggccccagctcctctacgtcgccgaagactacaacggccgcatcgtcggctacgtcctcgccaagatggaggaagagaccactgactgccacggccacatcacctccctcgccgtcctccgcacccaccgcaagctaggcctcgccactaagctcatgaccgccgcccagaacgccatggaacaggcatgccattgcccactttctttccctttagatgccacttaattacctttttgtttggattctctcactgacgcaggtgtttggtgccgagtacgtgtccctgcacgtgcgcaagagcaaccgcgcggccttcaatttgtacacggagactctagggtacaagattcatgatgtggaggccaagtattatgcggacggggaggatgcttacgacatgaggaagcagctcaaggggaagcagcaccaccatcatcaccataatcaccatcaccatcaccaccaccgtcacgagcacggcggtggctgtgtgttccggggaggaccaaggggaatgttgcaaaagccacctgattgaaataaattatgagacttttagtttggaaaaagaatagtaagctctggttgagttctgttgtgcaaacttgttgtagatttattgggccattttgtctcattagatatgaatttttgctttgctgtcttggtgaaatatagacactccttcaatgataacatgattgtcctttttgttttgttgctgtgaattatcacaacttgttatgtttgttgacccggcttgttcaaaaaataacaaaaaaaatcctttttgttttaaaaaaaaaaaaaaaaaaaaaaaaaaaaaaaaaaaaaag

SEQ ID NO: 12460 - DNA, 322 bp, Glycine max
  Clone ID: PAT_MRT3847_111259C.1
ctaattctgggtagtgggagagatgataaagctactaagagctatattggcttgaactttttgtttatccatagctggtctttttcttcttttatccttatccccttccctccgggggccaggtaagggcctattgggggtcttttgtgtggggaatttgggcccttgggggggggggttccgccctcctcttaagtggagagacccctttagaaagccattggcctgtgcctggggataggagtctgtgtgggggcatagtatacaccagcacgggggggggagatgatgcgcccccgcggcctacggggagcgtgatgga

SEQ ID NO: 12461 - DNA, 265 bp, Glycine max
  Clone ID: PAT_MRT3847_11125C.1
caatctcagcatatgaatgcatgaataagagagaaagtgcaaatttaaggaaattccagctgcttgcttcagatgttgtgtctgtttttgatcttctccttcgttaccaatctccgatgatttctctctcagtaaaatccaaaggaaaaaccaaaaataacatcaaaactttttcatccatttcaatttccttctctgatttgcttactcttcagattgccattttgcttctgatttttgggtcgtaccttcatacccttttctc

SEQ ID NO: 12462 - DNA, 993 bp, Glycine max
  Clone ID: PAT_MRT3847_111260C.1
aaaatcagaaaaacatatttcattaacttggtacctgaagtacccaataaacaaagtacataattcaaattccaaatggaagcaacagggttaagatgtattaacatgcagtaagaacattcctacgcttcccaccacgacccaacaagaacaaaagattccaaaggccaaatgctttctccaaacccacaaatgctataaacatcccacccaactatcccttttctgaatttgtaatctgcctacacgtatgaggttatgaaaattaccaccatatgctgcacttcacccatacctttcgggttctgcttccctgtataaatctttcagcttaactccttataacctaatgagacatgctggactattactgctccattgaacaaaggaaaaattaaaattcggagtcaacgaacgtagccaagaccaaaccagaaatataacatcctgtacgagacagattttctgcagaatccatattgaaaacaatgttattcctctttttccaaattgtaaagataactgcactccatataacttctcaagtgtgactctcccctgtagaccttcctaaacccaaattcaaccgaaaatgtctttggattgaaccaggaagagcaatagcaaagtctaccgatagcattccatccacaatttatgaaccacctcacatgttatggaaatatgatttagtgtctcacattgttgatggcaaaaaggacataccgcttcggattcttcaacaatgattccatgcattctcaaattatctttggtaggcagtctattcctcattgctctccaaattaagaatgccactttcttgggaatctttagttttcacacctccaataaaatggtattgagttcctccagtccttcctcactaaaacgagatatgtatgcagaatttgtagaatagacacctgaaggtctatacaaccaaatcctagcatccaagttggctctttgtacctgtaccggacgcgtggg

SEQ ID NO: 12463 - DNA, 258 bp, Glycine max
  Clone ID: PAT_MRT3847_111261C.1
ggaaaagaaggggaagaaattaatggctgaaactgcagtggcctttctacttgaccatttggttaagttactgagtgaggaagcaacaatcttaggaaaggtgcacaaggaggttgaggagatcaagaatcagctagaacgaataaactcttacattagggatgcagaaaagaagcagttgtcagatgatcaatcaagtgtcaaaagttggttgaaatcattgaggaacgtggcgtttgagatggaggatgtgattga

SEQ ID NO: 12464 - DNA, 240 bp, Glycine max
  unsure (1)..(240): unsure at all n locations
  Clone ID: PAT_MRT3847_111262C.1
cttgaacttgaantatcgtgtctncntgggctttctctgttcangatcaacanggattntgtatcacgagctttgcaatttccgttggctatacttgngctcatatnantnacaccttgntcaggtgcttttgggaagantgnaactaatgtganaacagctattnnccgtncccnaagtttgaacttggancagggatcggtaggccagtanaatatgattatgangcgatttnccaga

SEQ ID NO: 12465 - DNA, 772 bp, Glycine max
  Clone ID: PAT_MRT3847_111263C.1
gttttcttctaccaagctagcctagcttcttcatctccttcaatttgtcttctcttcattaattccaattgtctttaaaccgctatctcatcagtaccagtaattgctatcatggagtcgatggagtcatgtgtcccaccagggtttcggttccacccaacagatgaagagcttgttggttattatctgaggaagaaagtttttttttagaaaattgaccttgatgttatcagagagatcgatctatatcgtattgaaccatgggatctccaagagagatgcaggatagggtatgaagagcagaatgagtggtatttcttcagccacaaagataaaaagtatccaacagggacaagaactaatagagctaccatggctgggttttggaaggcgacaggaagagacaaagcagtgtatgaaagagcaaaacttattgggatgaggaagacccttgttttctacaaaggaagagcccctaatggacagaaaagtgattggatcatgcacgagtataggcttgaatctgatgagaatggacctccacaggaggaaggttgggttgtgtgcagagccttcaagaagaaaaccactgggcaaacgaagactataaatattgaaggatgggagtcaagctacttctatgacgaagcaagtggggcaacaagcactctggtcgatccaattgaactcatttcaaggcaatctcagagctttctggctcataatttcatgtgcaagcaagagctagaagcagataacttgacttgcatgc

SEQ ID NO: 12466 - DNA, 503 bp, Glycine max
  unsure (1)..(503): unsure at all n locations
  Clone ID: PAT_MRT3847_111264C.1
ggctcgaggccattggcaatggcaatgcactttttcctcatgcgcgattaagtgctatgaagaagagcacgctttgctctaaaaggcctggctcttgcactaacacgagacctggaacgcctaattatcttgacgccactgatgctatgcataaaggttgaaggacggagcgtgctcctttgcacaccagtgctgcacgcaagccagatggtgcgattctgatgtctttaaacaacggccggactttgccgtccaaatgggaataggctgaaaggtggattcttatgtctgataacagagacagccgcaccaggagggactcgctgccggcgccgaataggaggcgcaagtcaaagagagggcctcttggcccacctggagctgccgctgacgcgtattattccatgaattcccatgcaatgccttaccttgaacgggcgaagtacaagagctttatagagcgatccncagtatatgctgctgttaaaatcccaactgctgct

SEQ ID NO: 12467 - DNA, 509 bp, Glycine max
  Clone ID: PAT_MRT3847_111265C.1
cagccattaattaagaagagggtggtacggctgcgagaatttaacagcctttggtttgtccatgtcaagattgttaatgttacttgataaattagtaactaacaccttggtgtcatgcatgggaaacattaatggtaaatcgattaagttttcaacttagatgaggccatctctattatttagcagctactatagcagagtcaattcccaacttaatcatctaagtgaaaatgctagtaggacatcaaaaccacaatcatcaacgagttttattgtaggcttgtaacactcaattaccaattagggatatcatatagtcaaaagttaataactacaggagacacacaggtaacaggttgatataaactatatgaagttttaccttttataatcaataatttaaattatgaaatggattagagcttgccttactcgaatttcgccgcgaaactggagaactattttgatttggattagccattgcctttactttctcactttcaacattg

SEQ ID NO: 12468 - DNA, 1136 bp, Glycine max
  Clone ID: PAT_MRT3847_111266C.1
aaagtcactggttgctgctctaatacctctacagaaggattctgaggttccttctcatgtgttgatgggtatcccagatggtacagctggttttcccctctcacctcttggagaagcttgtctacgaatggatctgactgccctgcatgaggtgatggagaaaattgggtataaagatgacgagggtgcagcaactgagctttcattccaaatgtggacgaaccagatgcaggaaacattgaactcaaggaagaaaggggacgctgcttttcggcacaaggattttaaaactgcaattgatagctatacgatgttcattgatgttggaaccatggtttctccaacgatttatgcacgtcgtagtctatgttatctgatgagcaatatgcccgatgaagcacttaatgatgcgatgcaagcacaagtaatatcccccgtttggtacattgcgttttatttacaagctgttgctcttttagccctgggcaaggagaatgatgcccaagtggcacttaaagagggttcttcactggaaactaaaaagaacacaaattagttgagttcgttgaccaaaccttgctttctttttcctgaagataacttacatagaacatgtgctggtttctcaatgttgcaaggggctccagttccttatcggacaaattgtattgcatggaatagagtggtttattatacttgtgcatgactggttcattggttgcctagaagcattcttttgcacagactagagtcaccaaagttatacaatatgtatttgcactagggttctctttttgttgtttagtcagctatgttagtataaaggtcatgggaaggatttgagaaacttttgagagagagttgtgtatgtaaaggttcacttgtcagtgtatgtcagcatttgttgggtaaacagcagatgttgttgttgtgcttgtaatttaatgtacagaacaattgcttatggttactgcgtcgacatgaaataggttgtttttgtatgttgtattgatattggttttgcatataataaattcttttaatcttttctgtgctataaaaaaaaaaaaaaaaaaaaaaaaaaaaaaaaaaaaaaaaaaaaaaaaaaaaaaaaaaaaaaaaaaaaaaaaaaaaaa

SEQ ID NO: 12469 - DNA, 151 bp, Glycine max
  unsure (1)..(151): unsure at all n locations
  Clone ID: PAT_MRT3847_111267C.1
tcaaananaacattatctttagcaaactgactgacacttagtaaatttttcganatgganggcantgtantagcttattaagtntgnnagtcatatgagagtcattnggcgacacaaatgatgaagaaccagtgttggaaatgctcaaaac

SEQ ID NO: 12470 - DNA, 1295 bp, Glycine max
  Clone ID: PAT_MRT3847_111268C.1
tacggctgcgagaagacgacagaaaggggcgtcgatttttactttctttcgccattcttttttccttctccaacccacattcttcttattccagaatatacacccaaattcctctttcctagggttttagtccaaagggttttggaggcatcaccatcaccatgagagccaaattgtttgtgttcccaatacgaggcaggaactggtgcttctccagaaccatcgatcactctctctccgcttcccatgcttcctctcaatccccctcaaccctcaaagacttgtggaccaacatcaacgttggtgataaacccctgaacaccaaaactgagctctttgtcgattacatcgccaacaagatgaataatgcttggattggcttggagaaggcgccggaggggtctttcaagaacaagattcatgggttggggttgcggctcttgtcgcgggttaagccctctgagatatttttgaagtctatatcgaaggaaatcactagtgttgaaatcatttatccatcaagtttgaatgctcaacttgttcgtcgaagactaagacacattgctgtgaggggagcagttatccatcggaattacttatacggtttagtttcgttgattccattgacttcagcacttagcattttacctttgcctaatgttccgttcttctgggttttatttcgcacttattctcattggagagccttgcagggaagtgagaggctgtttcaactagtctcagataacagcaagacttcaaacacttgtacatatgaaaagaaaactgagcacaaggaatctaaaagtcaaagacatagttcaaatgaaccttgttgggtgttgaggccatccaaagaacttgagaatcttgtccatctagaagatggtcaagagagtcttagtcaacatgccatcataaacatttgcaagatctatgacttgaacccagtagatgttataaaatacgagaagtccgtcttttaatcagttttgtaacaacttgcattagaattttctattcaatccacttacttcacaatgccataaatttttacccatattttttggttgatagtaactcgtttatcaatatatgttacttgtgaatattttttcacgttctccaagaagaaaatttagcactatggatagttctgcttttcttttttcaaccttgcatagcactaacatttaataatacattttcagtttgaatgctcaacttgttcgtctaaaactaagacacattgctttgaggggagcagttatccaccggaattccttatacggttt

SEQ ID NO: 12471 - DNA, 231 bp, Glycine max
  unsure (1)..(231): unsure at all n locations
  Clone ID: PAT_MRT3847_111269C.1
aagggggtaatattgatcaaagcgccattaatataataataccatttaggggtacatagatgatagatccaatggggtaataaaggggaacaaggatacaagatgaattatggatcatgggcgatggggggagaaggggaggaaataggtagctttggggcaaggagcaatggtggtggggtgatcataggcataggangagggcttggggcatgcgggcttgaagatctt

SEQ ID NO: 12472 - DNA, 350 bp, Glycine max
  Clone ID: PAT_MRT3847_11126C.1
gagttacataacatacttgagaagaagctgcatgtcaggacccggatattgaatctgaatccaatgaagatggtaagaaaagaagagaatggtacctactacctacctatcatttgagataaacctcggcttggaggcaaccgcattcttgacaatcaaaacaatgccgtgttcagacaactccaacacggcgtcctacgttaattaaggaatgaagaaaatagggaattactacctgctggcgcttccaccgaacggcccttgaacgttttccagctagcatataacgtctggggcttcttcctcctcctccatgccaccttcgcaaaaccccttctctatctttcaac

SEQ ID NO: 12473 - DNA, 720 bp, Glycine max
  Clone ID: PAT_MRT3847_111270C.1
acgccgttcgttctattgttaactcaacttctgctacccactctcttcttcaagtccaaccacgcattgtctctacagccatgggaaaggttctcactctaatctgcggattcgtcacaattgaacggatggttgccagagtcaatgctgaaaagagacaatggggagctcgatgtcgttgacgaccctttcattaccaccgattacatgacatacttgtgtaaatacaacagcgttcacggacactggataccatcacgacgtcaccgctaatgactataacacccttctcttctgtgactgggcagacactgtctttgagacaggaaccctgaagagatcccatgcgagtatactgcagctgatatcattgttgagtccaccggagttttcaccgataaggacaaggccgccgcacatttgaatgctggtgcgaagaaggttattatttctgcccccagtaaggatgcccccatgtttgatgttggagttaacgagcaccagtacaagccagagcttgatattatctccaatgctagctgcacaaccaactgccttgctccacttgctaaggctattaatgacaggtttgacattgatgaggggttgatgaccactgttcattccatcactgccacccacaagactgttgatgagccatcagccaaagactggagaggtggaagagctgcttcatttaacatcattcctagcatcact

SEQ ID NO: 12474 - DNA, 419 bp, Glycine max
  unsure (1)..(419): unsure at all n locations
  Clone ID: PAT_MRT3847_111271C.1
aattcggctcgagcgcacttctgctccgcaattatcatgggcaaggtcaagatcggaatcaacggatttggaagaattggccgtttggtagccagagtggctctggagagagacgatgttnaactcgttgccgttaacgaccctttcatcaccaccgattacatgacatacatgtttaaatacgacagtgttcatggacactggaagcatcacgatgtcactcttaaggacgagaagacccttctcttngtgacagccagtactatttttgacacnaaactctgaaagatccatggggtaactgactacatattgtagtcacgatttaccgtaggcaggcgcgacattaggtgcaagagttatttgccatagtccctttgtgtggacaccatcacaactgttttcatcttgcacactct

SEQ ID NO: 12475 - DNA, 1392 bp, Glycine max
  Clone ID: PAT_MRT3847_111272C.1
aagccgtaggaatcacgcagttcacttggcctatttacctatcactgcggtcttttactcttctactgccttcttaaaaccctatctctcaccaacttccgctacttcctactccaaccactttcttttttcccgcagtcatgggcaaggtcaagatcggaatcaacggatttggaagaattggccgtttggtggccagggtggctctgcagagagacgatgttgaactcgttgccgttaacgatcctttcattaccaccgattacatgacatacatgtttaaatacgacagtgttcacgggcactggaagcatcacgatgtcaccgttaaggatgagaagacccttctcttcggtgacaagccagtcactgtttttggacacaggaaccctgaagagatcccatggaagtcgactggagctgacatcattgttgagtccaccggagttttcaccgataaggataaggctgccgcacatttgaagggtggtgcaaagaaggttattatttctgcccccagtaaggatgcccccatgtttgttgttggtgttaacgagcacgagtacaagccagagcttgacattatttccaatgctagctgcacaaccaactgccttgccccgctcgccaaggttatcaatgacaggtttggcattgttgagggtttgatgaccactgttcattccatcactgctacccagaagactgttgatgggccatcagccaaagactggagaggtggaagagctgcttcatttaacatcattcctagcagcactggagctgccaaggctgttggaaaagtcctccctgctttgaatggaaaattgactggtatggcattccgtgttcccactgtggatgtctctgttgttgacctcacagtgaggctggagaaggaagcctcctacgatgaaattaaaaatgctatcaaggaggaatcagagggcaagttgaagggaattcttggttacactgaagatgatgtggtctccaccgactttgtgggcgatagcagatcaagtatttttgatgcaaaggctggaattgcattgaataagaactttgtgaagcttgtctcttggtatgacaacgagtggggatacagctcacgtgtcattgacctgcttgtaatcgttgccaaaaagtctttttaattaaggtggttctaacattatgtgctggtcaagctgcgatttagtgtcttgctcgtgcaaaaattgagaagtatgaataaatcggtttcgggaaccggtgttgttaccctgttaggagcattaagcttttttttgttgtctcttctgtgaagggaatggagtttttggattattatacacttgctgatgtactcggctctttattgattctgattgcagacatttttgccctccc

SEQ ID NO: 12476 - DNA, 1389 bp, Glycine max
  Clone ID: PAT_MRT3847_111273C.1
cccacgcgtccgatggctgcaagaagacgacagtagggtactgctgcgagaagactacagagggggacacaccatgcgtggtaggctcaacttctgctcttccaactcctacaacgcttttctctgcactcatgggcaaggtcaagatcggaatcaacggatttggaagaattggccgtttggttgccagagtcgctctgcaaagagacgatgttgaactcgttgccgttaacgaccctttcattaccaccgattacatgacatacatgtttaaatacgacagtgttcacggacactggaagcatcacgatgtcaccgttaaggacgagaagacccttctcttcggtgacaaggcagtcactgtttttggacacagaaaccctgaagagatcccatgggggtcaactggagctgacatcattgttgagtccaccggagttttcaccgataaggacaaggctgccgcacatttgaagggtggtgccaagaaggttattatttctgcccccagtaaggatgcccccatgtttgttgttggtgttaatgagcacgagtacaagccagagcttgatattatttccaacgctagctgcacaaccaactgccttgctccactgcgccaaggttatcaatgacaggtttggcattgttgagggtttgatgaccactgttcattccatcactgctacgccagaagactgttgatgggccatcagccaaggactggagaggtggaagagctgcttcatttaacatcattcctagcagcactggagctgccaaggctgttgggaaagtccttcctgctttgaatggaaaattgactggtatggcatttccgtgttcccaccgtggatgtctctgttgttgacctcacggtgaggctggagaaggaagcctcatatgatgaaattaaaaatgctatcaaggaggaatcagagggcaagttgaagggaattcttggttacactgaagatgatgtggtctcaccgactttgttggtgataacagatcaagtatttttgatgcaaaggctggaattgcattgaataagaattttgtgaagcttgtctcttggtatgacaacgagtggggatacagttcacgtgtcattgacctgcttgtaatcgttgccaagaagtctttttaattaaggtggttctaacattatgtgctggtcaagctgcgatttagtgtcttgctcgtgcaaaaattgagaattatgaataaatcggtttccggaaccagtgttgttaccctgttacgagcattaagctcttttttgttgcctcttctgtgtaggggatggagttttttggattcttatatacttgcagatgtactcgggctttattgattctgatagcagacattttccctccatttttc

SEQ ID NO: 12477 - DNA, 177 bp, Glycine max
  Clone ID: PAT_MRT3847_111274C.1
ggggatggcgagctggagcactactgcagcaaggagggctctcttgttccccttccagcagctcgctcgatgagcgcgggcgccgcgctgtcgtgtgagaatcagatgcgctacgaggctgatagcgaggaatttatactagctctgagagtctgtatctctgctgcatatagaggc

SEQ ID NO: 12478 - DNA, 332 bp, Glycine max
  Clone ID: PAT_MRT3847_111275C.1
atggcgacgtccatctctctgtctaaccctatgacactcttggcatctattccctcatgggctcttctctctgacttcgcaataaaaattacccactgctaatcagacaaaaagtagagtggttataaggccattagatccttcagtttgcacacagctttcaccagaagaaactaacaccttccgttactggctaacactgtgtgcttggcgaccctatgctgattatcactgccacaatcacaaccaattgaagaagaagtttctgggttatggctcacgggtgccgtataggtatataatctgagctgggccccattgcatacgcaact

SEQ ID NO: 12479 - DNA, 1638 bp, Glycine max
  Clone ID: PAT_MRT3847_111276C.1
tcggctgcgagaagacgacagaagggtacgggtgcgagaagacgacagaagggtacggctgcgagaagacgacagaagggtacggctgcgagaagacgacagaagggtacggctgcgagaagacgacagaagggtacggctgcgagaagccgacagaagggtacggctgcgagaagacgacagaaggggacacaccgtttgttctattcttaactcaacttctgctacccactctcttcttccaagtccaaccacgcttttctctacagtcatgggcaaggtcaagatcggaatcaacggatttggaagaattggccgtttggttgccagagtcgctctgcaaagagacgatgtggagctcgttgccgttaacgaccctttcattaccaccgattacatgacatacatgtttaaatacgacagtgttcacggacactggaagcatcacgatgtcaccgttaaggacgagaagacccttctcttcggtgacaagccagtcactgtttttggacacaggaaccctgaagagatcccatgggggtcaactggagctgatatcattgttgagtccaccggagttttcaccgataaggacaaggccgccgcacatttgaagggtggtgcgaagaaggttattatttctgcccccagtaaggatgcccccatgtttgttgttggtgttaacgagcacgagtacaagccagagcttgatattatttccaatgctagctgcacaaccaactgccttgctccacttgctaaggttattaatgacaggtttggcattgttgagggtttgatgaccactgttcattccatcactgccacccagaagactgttgatgggccatcagccaaagactggagaggtggaagagctgcttcatttaacatcattcctagcagcactggagctgccaaggctgttggaaaagtccttcctgctttgaacggaaaattgactggtatggcattccgtgttcccaccgtggatgtctctgttgttgacctcacagtgaggctggagaaggaagcctcctacgatgaaattaaaaatgctatcaaggaggaatcagagggcaagttgaagggaattcttggttacactgaagatgatgtggtctccaccgactttgtgggcgatagcagatcaagtatttttgatgcaaaggctggaattgcattgaataagaactttgtgaagcttgtctcttggtatgacaacgagtggggatacagctcacgtgtcattgacctgcttgtattcgttgccaagaagtctttttaaggttgtactgaaaaaaaagtagcttgtctagacattatgtgctggtgtctagctgcgatttagtgtcttcttgctcgggcagaaatgagaagtatgaataaatcggtttcgggaaccggtgttgttaccctgttaggagcattaagcttttttttgttgtctcttctgtgtaggggatggagtttttggattattatatacttgctgatgtactcggctctttgttgattctgattgcagacatttttgccctccatttttcgtccatggttctcgagtgtttgaacccccctcccttttctgctttgaattattgattcgtgtggtttatatatttttcggcacatttt

SEQ ID NO: 12480 - DNA, 1682 bp, Glycine max
  Clone ID: PAT_MRT3847_111277C.1
ggctcgaggggattgtggtgttaaggatatcatttcgaaacccttcccctttccttttcaatatcagtatcatgtggttggttggttggggttcatagagtgagtgaatggagtctgttatgagaagcataaaaaaaacatgaagagcaaagagtattattaggcgaattatagatgtcctaattttattgaaggtagcctcaacaacttctgctacttcctactccaaccgcacttctgctccgcaattatcatgggcaaggtcaagatcggaatcaacggatttggaagaattggccgtttggtagccagagtggctctgcagagagacgatgttgaactcgttgccgttaacgaccctttcatcaccaccgattacatgacatacatgtttaaatacgacagtgttcatggacactggaagcatcacgatgtcaccgttaaggacgagaagacccttctcttcggtgacaagccagtcactatttttggacacagaaaccctgaagagatcccatgggggtcaactggagctgacatcattgttgagtccaccggagttttcaccgataaggacaaggccgccgcacatttgaagggtggtgcaaagaaggttattatttctgcccccagtaaggatgcccccatgtttgttgttggtgtcaacgagcacgagtacaagccagagcttgatattatttccaatgctagctgcacaaccaactgccttgccccacttgccaaggttatcaatgacaggtttggcattgttgagggtttgatgaccactgttcattccatcaccgctacccagaagactgttgatggaccatcagccaaggactggagaggtggaagagctgcttcatttaacatcattcctagcagcactggagctgccaaggctgttgggaaagtcctccctgctttgaatggaaaattgactggtatggcattccgtgttcccaccgtggatgtctctgttgttgacctcacagtgaggctggagaaagaagcttcctacgatgaaattaaaaatgctatcaaggaggaatcagagggcaagttgaagggaattcttggttacactgaagatgatgtggtctccactgactttatcggcgatagcagatcaagtatttttgatgcaaaggctggaattgcattgaataagaactttgtgaagcttgtttcttggtacgacaacgagtggggatacagctcacgtgtcattgatcttcttgtattcgttgccaagaagtctctttaaggtgttacttcaaagtagcttgtcttcacattattaccgtatgtttatgtttagctgcgatttagtgtcttgctcgagcaaaaaatgagaggtctgaataaatcggtttctgaaaccagtggtgttacttgttggaggagcattagctcttttttggacttttgatgttttctcttgtggagggggatcgagtttttggatttttatatactcgctgatgtacttggcttgaatacttgctaatgtacttgttattgattgttatagtagatatttgtccgtcctttttttcatttgtggttctcgtatatttgatcctgtttgctttgaatcttggattcgtggtttaaacatttttctgtgcttattttagtccgtatttaaattaacatttttggcttttagttcatat

SEQ ID NO: 12481 - DNA, 310 bp, Glycine max
  Clone ID: PAT_MRT3847_111278C.1
cggaacgaccgacccgaccgacccgtccatacacacatacaaccacgactattaccttttctaaaagactacacaacttcggggtgagggggttccaattaacgactatcattctatatctaatataatactacaaaaatgtacacttaactaaaatcatgattaggcattaaaaaatattcgaattaacacttaatacccttagtaagcagcttctaccaattttacatgtcctacagcagaatctacttagacaaatcttctcatgttacaaaagatctacgtcacttcatgatctgcattacacatt

SEQ ID NO: 12482 - DNA, 795 bp, Glycine max
  Clone ID: PAT_MRT3847_111279C.1
acatgcttccaccgaattttcttgcaaccaaacccttttgtgtgttgaccctgcttccaccgtttctgttccttcacctcccctctctctctatattttcctttttaaaaaatcgaaataataaaaaaaatatgaatgaatatgtcaaaagttaaggttgtcattgagattattccagcttgtgctgagctagattcttgctgaagtggatttgttcttctcctgtcagtatctgtattaaagtttctttcaaaaccacaaaaaggggccacttcagatttctcttattctcccgggtttggttcatacttgttctgcaacttctgccggaaactataagagtaataaccaagaatcttcctacttcctaggcttcaattagcttcaaagacagaaattttagaaaggaaaaaaacatatcctttcatttctagatgccataatgactgattattggagaaatattggtttctttatatgtgttttatcaatcttcccccttgtgtgcttctgtgccacctttgttccagtagataattatcttatagactgtggagcaactgcaagtacttcagtaggtacacgcaatttcatagcagataacaacaaggatctcctttccacacaagaagatattcttgccactacctccttaaaatcagttacttcttcctccgatgatttgcctctctatcaaactgcaagagtcttcactggatcctcaaagtacacttttaaaattaagcagaaggggaggcactggatccgtctctatttctttcctcacttatgaaa

SEQ ID NO: 12483 - DNA, 409 bp, Glycine max
  Clone ID: PAT_MRT3847_11127C.1
gcacgcgcccgcaagctcgagctcgggctcggggtcgagttcaaatcttggaagctacatctacctaagttttatgcaagagggacgccgggtggttcgtccattcacatgatgtgttggggggtcacacactgaggaatttgctcggaggcgtagttaagttacaggaggtgcaacaaaaatcatgacgaagattcgtctcaaccaactcgacccaacttggctttcttaaactcagaatcggttcaactattttgagactccaactggcctgctcaatacatcttatgatggatgagaagtgcaacaaagtaaggtaccacattcagatgatccacatgtctatcggaatgattgttatgcaaattatgcacactggaactcatatcaaattgagcaactccaagac

SEQ ID NO: 12484 - DNA, 562 bp, Glycine max
  Clone ID: PAT_MRT3847_111280C.1
accgctccggagttccaccgtcgacccacgcgtccgcccacgcgtccggcctgatggatgtcctatccactcccattcatactctccttgttgctgtatggtcttgccatctacctcgctaaggaagctgattgctcatttgatttcacaatcgaacagtggtcttctccaaataaagtgtcattcccacctattatccttgtgagatccctagaggaaacttaaaataccacccaaggatcaggagggctacaatggctgctgaattcctagaagaaacaggagggctagcagtacagcatcaaggatcagactcatgggtttggaagcatgactcaaatggaatttattcgaccagatctgcatataagtttctgctgggggaagtaaggggggaatcagaggatgggagtttctcgcttctgtggaaacttaaataccacccaaggcaaaggtatttacatggaggctcatcaaagaccgtctaccaacgaagctgaatttaagaggaagacaagtggagatagctgatccactatgcccgttctataacaacttcgat

SEQ ID NO: 12485 - DNA, 635 bp, Glycine max
  Clone ID: PAT_MRT3847_111281C.1
acggagagagagagattcctatttcctagattcgaattcgattcccatttctcactctttctttcctccatggcgaagcctcgcaagcccaagaacaacgaagacccgaagcccgaaaactccggcgccgtagttcaccaccaaaagctatgcctctccatcgacatcgacaaacgccaagtccacgggtacactgaattggagattgcggtgcctgagattgggatcgtagggttgcacgcggagaatttagggattgagagtgtttgtgttgacggcgagccaacggagttcgagtattacccgcaccatcagcagcagggggaggatgagaagaggtttagctccgtgtgttctcctagctctgctgccgatgctgctgtctcagtgtacatgtccgctcttgagaaggaattggttcccaatttgctcattaattgttgcaaaccttccaaggctgaaagtgaacaacagcaggagcaacaacccacttctgagaacgggtttcactcttcggctgagcccaagcaggttgatgttgggtgcagaatgtgagaactgttcgtattgactattggatagagaaggcagagacaggaatacactttagaaatatcttcttcatactgataatc

SEQ ID NO: 12486 - DNA, 434 bp, Glycine max
  Clone ID: PAT_MRT3847_111282C.1
gggtaagctttttttttttttttttttttttttggtaaatttttttttttttttacgcacggggggacccaccaaaaaattacggaccgtttccggcagaccaaccatttttacataaagggagacaaaaaaaaggtttaaaaattccctgctaaagggggtgccggaaaaaaatagaaattcgcaaaaaaaaaaaaaaaacaaacgggggggagaaagaaaaaaaaaaccctggcctaccaaaggagcaacctaacttaaattagttggggcgcactgacggcccgctatacaggaaaaaaaccgggcgggccagttgaataaatgaaccacccaacgcccggagaaaggtggtttatcaatcgccaccaaggttgttttttcttccaacaagaaagacaaccaacaattgactgccactaaccgcccgccac

SEQ ID NO: 12487 - DNA, 199 bp, Glycine max
  Clone ID: PAT_MRT3847_111283C.1
acggctgcgagaagacgacagaaggggttcctattaacaaattaataaggttcgaaggaaattttggtatcaacactgttggactgcaaagaaatcataattgctagaattttaactaaatatagtgtctagctacagtatcgggcataatcagattctttatgcatgggttaaatggctttatgtatttcccttacat

SEQ ID NO: 12488 - DNA, 656 bp, Glycine max
  Clone ID: PAT_MRT3847_111284C.1
cagtaccaatcaccaggtttaaaaattgggcaataatacatttacacgtaatgcataaattgaagataataaaattttatggcccaaacatgataaccaaaactcaaccagtgggtttattccacagattatatatttggaaagtttttcccaatattccctgatccaatccaatcctccttcttaaacaagttttcatatatgcaaaagtcattttccctctaaaccttctgttcatcccagcttttgaatgagcaaaggtaataacaacatattgcaaaccacatacaaattcacaatactgctattcatactaaagatgggtgaagtagacggatgggatgcagaactgatttatccttcactgattcctcccgagtcagacaacatcatctccatgattcaagtctcccacatcaatttgagcatgtagattataaaaacaaagaaatccacttcataaaaagtaatctggtgctggtttcttagcaggtgttcctcttgattcctgtggagcagcttcaaacacccggaattgcttagtaagatttccatccaactccagaattgcagctacattgccacatctgtagcaataatttggagctgaccagacagtaactatctggtcagctccagtctttttataacataac

SEQ ID NO: 12489 - DNA, 141 bp, Glycine max
  Clone ID: PAT_MRT3847_111285C.1
gccacgcatgcgttccacgcttcaaggttggttataatgtgaggtccaagtacatatgatagggactcggactacaatgattctaatatactatcatcaccattcatatgaatctttgcataaaatcttagctaggtcgat

SEQ ID NO: 12490 - DNA, 259 bp, Glycine max
  Clone ID: PAT_MRT3847_111286C.1
acggctgcgagaagacgacagaagggattgccaattgtctcctacatgtttgttttatatattttttatcttatttataatttatccatcacataaagtgaaacttctgactgctgttaattgggttcaatttttctaagagatattatgcatggttgatgaggtatgtatatatatgttgagacccttcctttactttgctggtttttgggtccaaaattcaaactttggaagttatgttatttgttatatatatgct

SEQ ID NO: 12491 - DNA, 1442 bp, Glycine max
  Clone ID: PAT_MRT3847_111287C.1
ctcaggttcctcctatatatatatatatatacatacataatatccttctccctcaaaccaaaccatacctattctcaagtttctctctgtttcttcctacttcatgctatagcacttacaatactcaacaataacctaaccaaaccaaaccaaaccaaaacccttatctgcactcacttcacacaaaccaaagttaattaattaccaacacaaaatggatggaggctgtgtcacagacgaaaccaccacatccagcgactctctttccgttccgccgcccagccgcgtcggcagcgttgcaagcgccgtcgtcgaccccgacggttgttgcgtttccggcgaggccgaatcccggaaactcccttcgtcgaaatacaaaggcgtggtgccgcaaccgaacggtcgctggggagctcagatttacgagaagcaccagcgcgtgtggctcggcactttcaacgaggaagacgaagccgccagagcctacgacatcgccgcgctgcgcttccgcggccccgacgccgtcaccaacttcaagcctcccgccgcctccgacgacgccgagtccgagttcctcaactcgcattccaagttcgagatcgtcgacatgctccgcaagcacacctacgacgacgagctccagcagagcacgcgcggtggtaggcgccgcctcgacgctgacaccgcgtcgagcggtgtgttcgacgcgaaagcgcgtgagcagctgttcgagaaaacggttacgccgagcgacgtcgggaagctgaatcgattagtgataccgaagcagcacgcggagaagcactttccgttaagcggatccggcgacgaaagctcgccgtgcgtggcgggggcttcggcggcgaagggaatgttgttgaactttgaggacgttggagggaaagtgtggcggtttcgttactcttattggaacagtagccagagctacgtgcttaccaaaggatggagccggttcgttaaggagaagaatcttcgagccggtgacgcggttcagttcttcaagtcgaccggaccggaccggcagctatatatagactgcaaggcgaggagtggtgaggttaacaataatgctggcggtttgtttgttccgattggaccggtcgttgagccggttcagatggttcggcttttcggggtcaaccttttgaaactacccgtacccggttcggatggtgtagggaagagaaaagagatggaactgtttgcatttgaatgttgcaagaagttaaaagtaattggagctttgtaacattacatagtttttgagtttcttttgtgaattttgtaactgttgaattcatgaggtagagatggtgatggtgttgttgcaagttgccactcacaaaaggtgtatagtctcagacaaaaagaaaaaggaaaaattagggcaagaaaaattgttgaacagaaattttcttaac

SEQ ID NO: 12492 - DNA, 247 bp, Glycine max
  Clone ID: PAT_MRT3847_111288C.1
gatgactgctcatagaaaagatgggcactcgtctatctattatctcggtcgtagtgcgggccctgtgcatcatcgtcgccaagattgcagccattggtgtacgcctgtgtacctgatacatggaatgagctgctttatgcactgttgcttaaacatgaaactgctcacagagggaacttgtaacatgcatcagtatgatttactgagaaattcttctaattgtgttgtctggattcatcattcatgg

SEQ ID NO: 12493 - DNA, 985 bp, Glycine max
  Clone ID: PAT_MRT3847_111289C.1
gacgccgtcactaacttcaagcctctcgccggcgccgacgacgccgaagccgagttcctcagcacgcattccaagtccgagatcgtcgacatgctccgcaagcacacctacgacaacgagctccagcagagcacccgcggcggcaggcgccgccgggacgccgaaaccgcgtcgagcggcgcgttcgacgcgaaggcgcgtgagcagctgttcgagaaaaccgttacgccgagcgacgtcgggaagctgaaccgattagtgataccaaagcagcacgcggagaagcactttccgttaagcggatccggcggcggagccttgccgtgcatggcggcggctgcgggggcgaagggaatgttgctgaactttgaggacgttggagggaaagtgtggcggttccgttactcgtattggaacagtagccagagctacgtgcttaccaaaggatggagccggttcgttaaggagaagaatcttcgagctggtgacgcggttcagttcttcaagtcgaccggactggaccggcaactatatatagactgcaaggcgaggagtggtaaggttaacaataatgctgccggtttgtttattccggttggaccggttgttgagccggttcagatggtacggcttttcggggtcgaccttttgaaactacccgtacccggttcggatggtattggggttggctgtgacgggaagagaaaagagatggagctgtttgcatttgaatgtagcaagaagttaaaagtaattggagctttgtaacattacatagtttttgagtttcttttgttaattttgtaactgttgaattcgtgaggtagagatggtgatggcgttgttgttgcaagttgccactcacaaaacgtgtatattcttaatttgatgggaaaaaaaaagagaaattagggcaagaagaattgtataatgcaaaggtttttttcaaaagaaaggaacatggagtgcaactatttatttttgt

SEQ ID NO: 12494 - DNA, 497 bp, Glycine max
  Clone ID: PAT_MRT3847_11128C.1
atggggttatatttttatttttaaattttatattcctactatcttataaaaatatccttcaattatattaataattacaaatgaccaagctgtgggggaaacccccaaccccaacaacaaaaaaccgactttattaaaaaaccacaaaatatattacagagagggccgaaaaaaacacaccaccacagagcataccaagccgaaacaaacaaaggcactaacaaaaaaaacggaactcaaacaaaataaaccacaaactcttcctcaaaaaacaaaaaaaacgttggaggcgagacccgcgcacaaaaaaaaaaaaaccacaccccaacccaggaacaaagaaaattccaagaaacccatgcccgcaccgcaacctggaagccaagtcttcaacaaaaaacaaacccttacatattgcgcacgccacggcccccctatcggacacatcctcaccgaaaaaaaccccccaccgccacaaaagaaaaagaaaaactcct

SEQ ID NO: 12495 - DNA, 197 bp, Glycine max
  Clone ID: PAT_MRT3847_111290C.1
ttaatatgaacccagatcaagacacacagcgcgagggacaagacctgaaggaataagccattctttcaccaatgtgggagagacagggggcacagacaaagaacagcccgcgaatgatgatagcgaaacatgctaaagcaagaacccaagcccgcgttaaaatccgagcaaatgcagatggaacaatgctgaagcaa

SEQ ID NO: 12496 - DNA, 461 bp, Glycine max
  Clone ID: PAT_MRT3847_111291C.1
ttttcgttgtccgtgcacaaaagcgatgactatgccatttaatccatacccgtgtgctgctgcatggagcttggaatctctgaagcgttccggatcctattgggatatcattcgtggcactggatggactgacaccccaatgcatgatgtttaggttacaattgatcggcttataccctctcaggaatgtgtacccaggacctattgtgttgagaatccacaaaatccttatgtgttaaataggtggatgggaaaactgtctttcccacagggcactttccaacagtgaaaaagactgcctctttctatagggggaggagctggggcacagaatgttatagtcatgaatatgccaaatgctgttttttctatgcggacatatgctgttggagatgttggttacgaagtgttaaagatgactgcggcctacattaaaggtacagcctcttttttatgcccca

SEQ ID NO: 12497 - DNA, 1439 bp, Glycine max
  Clone ID: PAT_MRT3847_111292C.1
tctaattacatcatatgcacaaatctttggttctccttcgttctcttatcctaagttaattagtgcaaagatggcttccaaacctggcatactaaccaactggccatggaaacctctcgggtgtttcaagtgggtgattttgacaccatggattgcacacagcacttactctttcctagtgagtgatgcaaaggagagggaccttggttacttcctcatcttcccttatatgatggtgaggatgctgcatgaccaagtttggatcacactctctcgccatcgaactgccaaaggcaaaaacagaattgttgacaagggcattgagtttgaacaagttgatcgagaaagcaattgggatgaccagatcttgttcaatgggatcatattttatataggttatatgttagttccagagagttctcacatgcccttgtggagaacagatggtgtacttatcactgctcttttacatgctggaccagtggagtttctttattactggttacatagggcacttcatcaccacttcctctactcccgctatcattctcatcaccattcttccattgtcacagaacccattacttctgtgatccatccttttgctgagcacatagcctactttgtgttatttgccattccattatacacaactgtggttgccagaacagcttctatagcatcatatgctggttatctcgcatacattgacttcatgaacaatttgggtcactgcaatttcgagtgcatcccaaaggccattttcacagcatttcccttcctaaaatatctcatgtatacaccatcgttccattcactgcatcatacccagtttcggacaaattactcactcttcatgcctatttatgattacatttatggtaccatggacaagactacagacacaacatatgagatagcattaaagagagaagaaagttcacccgatgtcgtacatctaacacaccttacaaccccagagtccatctatcatctaaggttgggatttgcttccttagcctctagacctcaatcttctacatggtacctctacttgatgtggccttttacactttggtctattctcgtgacttggttttacggtcaaacatttgttatggagaggaatgctttcaaaatgctcaatttgcaatcatgggttataccaagattccatgtacaatatcttttcaaatggcaaagtgagacattgaacaaacttatagaagaagcaatacttcaggctgagttaagcaaagttaaggttttaagtctaggtctttcaaatcagggagatttgctcaataaatatggtgaactttacataaaaaaatatcccgagcttaagataaaaaatgtggatggcagtagcttaagtgtagctattgttcttaacagtattcctaaagaagcaagccaagttcttttttgtggaaaac

SEQ ID NO: 12498 - DNA, 131 bp, Glycine max
  Clone ID: PAT_MRT3847_111293C.1
ctcctttgtatgaagatcacatcagctgaatgtggactatgctccacgtgctctaatctcattattgctctcccaagtggggaagatgcgccttcaaatggttgttattgaggagggaatactcttgaaca

SEQ ID NO: 12499 - DNA, 196 bp, Glycine max
  Clone ID: PAT_MRT3847_111294C.1
ctcctgccacacaaagattaactctatactatctgcattatgtggtcaccttgcctcaccatggatgcatccttatggatgctgattgaaaccaagatgtctagaacattgcacactcgaaagtcaatgccagggcattgtacattacaatttgtacccggcctgtgctattgctcaagatcagtatggaaattat

SEQ ID NO: 12500 - DNA, 436 bp, Glycine max
  Clone ID: PAT_MRT3847_111295C.1
gaattcatataatagttttaattacaactgtatgcggttagggggagaatctaattctgttatgcatctagcgatatcagcttgccacgtgacactggatcaaataatctggaaatgtaatgcttacaaatatgatgaatgaaatgagaaaagcagagacttgaaaactcaaaattacctgtcttcttccttaattcttctggagtcactcctactcgaaaggaactttatctttgattgcatcaggaggtgaagcaagattaaagtgatggaattttcataaaccaaaggaagtatgcaaaataaatccttaagatgtttcacatagaagattgcaaaaagtattgatacagttaataaaaagaagaaatttggcaaagattgaaaagattgatgaaagtcaatataagggcttgattgattgcttgatgtatct

SEQ ID NO: 12501 - DNA, 252 bp, Glycine max
  unsure (1)..(252): unsure at all n locations
  Clone ID: PAT_MRT3847_111296C.1
acgcggccgtgttaacggacggttatacatgtncgacatgaaagcctcatggagcaaattcctgccgtggacaagttgaatgctactaaggttaataaggttgcagaaaatgtgaaccgtacacaaagtggcgtgggagatagtaaacttctaactgatgggaagtagcttgagggtaagaatacaccggtttataagtgagtgcaggggaaaatcatgtcgttcaactacccctaatggcacacgaggaaa

SEQ ID NO: 12502 - DNA, 325 bp, Glycine max
  Clone ID: PAT_MRT3847_111297C.1
tggggtagttccaccgattaccaacattgtccattcgacgtcattgacgatacgccgtaaacaagttccccatgtccctcggtctgcaggttgctgcgacggtgaaacgtcccgttgctaccggcgcgaaaaatcggaacatcattgcagctgaaagcgatacattggtcgacttaacggttgctgtctgctacattccgataactcttacagtggaagtataaatgggaacgctcaatctgtgtatgatggtattgctcaccactttcatttgctttctcatacctttgagccaaaatgaccgtgtagtcttcggtttcaaaca

SEQ ID NO: 12503 - DNA, 483 bp, Glycine max
  Clone ID: PAT_MRT3847_111298C.1
ctaaacataattaactggggcaggccaatacggctacgaagattactatggaataaatgccggtgttgttaacagcagctcacctatggaatgcttcggtcgcacgagagatctctattgagatcaaactaaaagaggacggcgcgacactcggctaagccctaagactgactgaagagggatagagattaatcacagtcgcgattaatcaagataatgtacacaccacactggcagggctgagcaatctctataaactaacaccggacactcgttagatgatgttaggtataagagtgttaaattaacaaagaccttacaaggatgggtgaatcaacaggacctcaatgagggttatgacactgttacagtcatcccgaagcaatccttgcttagacacaccaaagtagccagtctcctaaacgaatttcctttgagaccgcgcgtttggcttcctcatgtgggggaagatctagattgagg

SEQ ID NO: 12504 - DNA, 397 bp, Glycine max
  Clone ID: PAT_MRT3847_111299C.1
gtaattgttaggtatggacaatccactaatatggatgacttatctcaccctaggttttgatatttacaaaagtataaattgttgataaactaataacttgatgttaagtgaacatgaccaacttagtaaaagggcctattcgttatctacaaatctcgttcgtgcttgaagtgaaaatggttgtgctaagatataatcagtgttcaacgcattgtaaaaccaatagtgtccactcattaggaaaattggtgtttacacactaagtgttttcgtcacttgcgttcaattggtataagtcacttactatctccttctacttttttatgtgatgtccaatcaagtacgaaaagctaatattagtcgcaaagagcagtgcacaatctctttgttttgaaat

SEQ ID NO: 12505 - DNA, 603 bp, Glycine max
  Clone ID: PAT_MRT3847_11129C.1
ctaacattaattttctctctcaactcaaaaccagtggaaaaaaaaagtattatttgctccttccttctttcgaatctcatactcacccaactaccctcgtgccagttctatctctttctcctccaaaataattggagttatgtaaagttatcatcttttctctaaattggtttctgggtaatccttgttcatagcttttggattttcccatcaagcctccttttttgttgctagggcttcaaccacacattggtggcagtgctgatttatcactatttttattaagctatgaactctccaattcatgccccttcttcatcggcatcttcttcctcctatatgcttcgtccttcaccatgcctcactcatgcttctcgtaacctcaagtgtcctatgttgttaccacaggcaatttgtacctctcaaaagaagtaccattgctttggagctaatgtggaggcgtcttttacacaaatcccttgaaaaatacacatcagtcagatgttctccatggtggtctgaaacacaatccttggtttctaacaaaacactcaacaaacagttgttcacagtaggaatctttagcaacttcaacagctcaag

SEQ ID NO: 12506 - DNA, 464 bp, Glycine max
  Clone ID: PAT_MRT3847_1112C.1
gtgtcaccatgggctgaatccctctcctgctgccagctgctcattctctgcacaggctctggggtctcatatgaacagacacagtcgttcttagcgtcagtggctgcggaacagacacacaggatcacctgctcatgacacgtattggcatgatcttgtgctacatggttacaacagaagccggtccaggcccgatgcttactaatctataaagacagtgagcggtcctcagggatccctgagcgattctccggctccagctcatggaccacagtcaccttgaccatcagcggtgcccacgctgacgatgaggctgactattattgtttctgcgtggttgacgacaatctacggctgttcggcggagggaccaagctgaccgtcctgggtcagcccaaggctgccccctcggtcactctgttcccgccctcctctgaggagcttcaagccaacaaggccacact

SEQ ID NO: 12507 - DNA, 1311 bp, Glycine max
  Clone ID: PAT_MRT3847_111300C.1
attgaacaaaggagacgacaaacgtgtgtagctaaacaaagggcaagagacggcgagttgagttttgaaagcgtgtgcgtgggagggtccgaagttggagatagtgattctggttctgttctgttcttctttctactcacaacaacatcagaatcagaaacaacaatggccaacactaacttggaagatgttccctctctggatctcatgactgagctccttcgtcgtctcaagtgctcttccaaacctgacaagcgtcttattctcattggcccacctggatctgggaaaggcacccagtcaccaatcataaaagatgagtactgcttatgccacttagctactggtgatatgttaagagcagctgtagcagctaagacccctcttggtgtcaaggctaaagaagctatggataagggagaacttgtttctgatgacttggttgttggcattatagatgaagcaatgaaaaaaccttcatgtcagaaaggtttcattcttgatggttttccaagaactgtggtccaagcacagaagcttgatgagatgctgcaaaaccaaggagttaaagttgataaggtgctcaattttgcaattgatgatgcaatccttgaggagcgaattactggtcgctggatacacccatccagtggcagaacctaccatacaaaatttgctcctcctaaggttcttggtgttgatgatgttactggtgaaccacttatccagcgcaaggatgacactgcagctgttcttaagttaagactggaggcatttcacaagcaaaccgaaccggttattgattactattcaaagaagggccttgttgctaatcttcatgctgagaaaccacccaaagaggtgacagttgaagtggagaaagtgctgtcttaaaacatagttcatcttttgatctcgggcttgaactgcaattgttcttttttcgctataggaaaacttttcgttgccaatttgtattttaatatactctgaaatccgcttacctttcagctttactgcaaatgccggctgttctcaaacccacattcgaagaccaactttgatgaatcaaaaagtctatttattttgaattttggtctctttcttttttctgcatgaatttccactcgacattcgcaggtgtttacgcacccgtgaaacttttgatttcatgaactagttggcaaaatttgagctacttattgttgggaagcatttgtgctgcttttgaaggtgtgaaatgaaaaattgtaagaaataattgtttggtctgtgtttcattattttatttctatatattgtgatattaaa

SEQ ID NO: 12508 - DNA, 134 bp, Glycine max
  unsure (1)..(134): unsure at all n locations
  Clone ID: PAT_MRT3847_111301C.1
gcgcgaaggntgantttgggagaagnaagacctgcntcaacgttaaacaaccccataatantcggcttcnttaattnctccaggantnttgnagnngnaacccggggcccgnatttnttgccngaaagggaacc

SEQ ID NO: 12509 - DNA, 3164 bp, Glycine max
  Clone ID: PAT_MRT3847_111302C.1
gtttagttttcttcatttctggcaccagcaacaagagtctctacttgtgagattttcttttcattttccgtcgtagttcaatcccctttcgttcctcacttttagggtttccaatttctccgatggcgcccgatcctaatcgcgccggcactagcgccagcgccaacgccgccaaagacgacgccgtcgccaaaaagaaggtcgaaaacgaagatctgtccgatgaggatttggcgctgaagcagcaattggagttgtacgtggaaagggttcaggatcctgaccagggattgcagaaggttgcactcgagagcatgaggcaagaaattcgaacttccacgagctctatgacttcggttcctaagccgttgaagttccttcgccctcattatggcactcttaaaacgtattatgaaactatggcggagtctgatttgaagaagtacctggcggatatattgtcggttttggcactcacaatgtctgccgaaggcgaacgagaaagcctcaagtatagactattgggttctgagggtgacattggttcctggggccacgagtatgttaggaatctagctggagaaattgctcaagaatatgcaaaacgacagagtgaagaggcccccatagatgatctcatggaacttgtgcaacaaattgttgcttttagacatgaagcataatgcagaacctgaagctgttgatcttttgatggaggttgaagatctggatatgttgaggtggacatgttgacaaaacaaattttaaaaggacttgcctatatctcaccagttcggccagatacctcccgggaccagatgatatgctagttttggacattgcatattcaatttataaacaatttgaaaaatatccaaatgcactccaaattgcattgttcatggataacatgcagcacgtgagggaaagtgttcacctcgttgtaatgatgagctgcgggaagaagccgttctgtttctagttattactacagggataccagccttctattctgtgtgcggattgcccaaggtcttgtacatttgggaaagggcttattaacacttaatccatatcattctgatcgcttcttactgtcaccgacagcacttgctggattaattaccatgttgcacgcatgcctagacatgaaagctattgtgttgggaaaatatcactatgttctctacttcctcgttttggcaatgcagccaaggatgttgttgactgtggatgagaacttgaagcctctatcagtgcctgttcgtgttggacaagccgtagatgttgttggacaagcaggtcgtccgaaaacaatcactggctttcagacccactccacccctgttctcctggctgctggggacagggcggagctcgcaacggaaaaatacattcccctatcaccaattcttgaaggttttgtaatattgaaggagaatccagattacagggaagagtgagaggaaccacagtggtgatgcttttttcttttgttccaagtgtctgaacagtagttagttaaaatgtatttgaaattgtgccaaaatgtagaagaaattattttaaatcatttcttcgtttggatagaaagatgaagtttcgggagaaattgacaggtgtactgaacgattctaaagcttcacttgaggtgcttgcatttgctgctatttctttgggcttgatctatgtgggttcttgcaatgaagaaattgctcaagcaattatatatacactaatggaccggagcgagtcagagttgggagagccccttacacgacttttacctctcggtctgggtcttctatatcttggaaagcaggacagtgttgaggcaactgccgaagtttcaaagactttcaatgaaaaaattagaaagtactgtgacatgacactcttatcatgtgcctatgctggaactggaaatgttctcaaggttcaaaatctgttgggtcattgttcacaacatcttgataaaggtgaaactcaccaaggtcctgctgtgcttggaattgctatggtagctatggctgaagaattgggacttgagatggcaattcgatcattagaacatcttctacaatatggagagcagaatattcgccgagcagttcctttggcccttggtctactctgtatatcaaatccaaaggtcaatgttatggatacgttaagcagacttagccatgatactgattcggaagtagctatggcggcagttatatccttgggtctaataggtgctggaacgaacaatgctcgaattgctggcatgcttcgcaatctttcaagttattactacaaggataccagccttctattctgcgtgcggattgcccaaggtcttgtacatttgggaaagggcttattaacccttaatccatatcattccgatcgcttcctactatcaccgacagcacttgctggattaattaccatgttgcatgcttgcctagacatgaaagctattgtgctgggaaaatatcactatgttctctacttcctcgttttggcaatgcagccaaggatgttgttgactgtggatgagaacttgaagcctctgtcagtgcctgttcgtgttggacaagccgtagatgttgttggacaagcaggtcgtccgaaaacaatcactggctttcagacccactccacccctgttctcctggctgctggggacagggctgagctggcaacggaaaaatacattcccctatcaccaattcttgaaggtttcgtaattttgaaggagaatccagattacagggaagagtgagaaccacggtagtgatgcttttttcttttgttccaagtgtctgaacagtagttagttaaaatgtatttgaaattgtgtcaaaatgtagaagaaattatttttaaaatcatttcttcgtttggatagaaagatgatcagagaatcctttagctcgacagtttttaatttctattgattgtgagcatattcttgcacgagaactctggtcatgtataaccatgatataccgattgattcgaaagataaaagtctttacggtgttgaaaaaaaaaaaaaaaaaacgcctagagtgggtgggggggggtggtggggggggggggggggggggggtggcggccgccctagaaggcagtccaaggcttacggtacggcgtggcatgcgacgttcagt

SEQ ID NO: 12510 - DNA, 698 bp, Glycine max
  Clone ID: PAT_MRT3847_111303C.1
tctaatcttcttcattacatggcttcttcagatcccatctcttctcgccactacacttacaacagaaaacaaaaatctctaggccttctctgcactaatttcttgagcttgtacaaccgagacaccgttcacttgattggcctagacgatgctgccacccgattaggtgttgagagacggcggatctatgacattgtgaatgtcctggagagtatcggggtactctcaaggaaagcaaaaaatcaatacacatggagagggtttgccgcaatccctctcactctacaggatctcaaggaagaggggttgaaggagaattctaattccctacgtgggcctggaaaccatgataaagtttccgacgacgaagatgacgaggaaacacagtccaatcccgccgctactggaagtcaaagtgacaagttgaaccctaattctactcttgctaaacctctgaaaaatgtttgttaaaaggttgctggcagcaactggggtttatctttgttgctggcagcggcaccaactgttgcgttttgaaaatcgaagagaaaaatctctggctctgcttacccagaattttgtcaagctctctggctgctctaatgcggaattgatctcccttgacaggctgcaaattgctacttggggatgcccataatacgtctgtaatgagaactaaaggtagacgcctatatgac

SEQ ID NO: 12511 - DNA, 1193 bp, Glycine max
  Clone ID: PAT_MRT3847_111304C.1
cttgcggataagccttgggcttgagccatgtttcctagttttttaaacaatcaaaactattttcttttcattttcatcatttattcttcttttccccccaacccgcttcacagaatatcagaccaacaaactaactacatgctttgtcccctaaacttaacaaaccaccaagaatgattctattccttttttcttggcaatcaacccattagagaaaaccattttcatcatcaccttgttgtgtcttgttattgaaagatctaaattttaagcttgttgagcaaaagggtatgtctgttataggcgcgtattctcattttctctacggagaggtttaccagagagatcaacagtgcccacagtacttggtcagtgggaggggctattttttctctcacaagagtggttgtgggaacatatgggttggaagcagaaagagtgaagggaagattattaaaaggaggaattttcgtgtggaagctatgtggccagatttgtcaagaccgagtgaattggagatggaagaaattaatgattctgagcagcttgatcaaattcttgttcatgcccagcagaactcacagcctatcctcattgattggatggctacttggtgccggaaatgcatctatttgaagcccaagttggaaaaattagcccctgaatatcaagacaaagtcaaattttatttcgtggatgtgaataaagtacctcagactctagtcaagcgtggcaacatatctaaaatgccaacaattcagctgtggaaagatggagagatgaaagaagaagtcattggaggccataaggcctggctagttattgaggaagtcaaagaaatgatccaaaagtatttatgattcttctattttatttttcttgctccctcaaccccccaccccacctcacaaaaaaaaaaaaaagaagaaagaaagaagttacaattgaagaaactaatcttccaatgtttttacttttttttctttaacatttttcatgttggcaaccgcatgtagctgtgtatcatatatatatattaatggaactgtgtaccatagctgaaagaaatttaagtggaaaaggaagatgctcactgtttctccctccctctcaaccattagagatttagaggggaaaaaaaagtgggggtttttataccaaaaaaaaaaaaaaaaaaaaaaaaaaaaaaaaaa

SEQ ID NO: 12512 - DNA, 1881 bp, Glycine max
  Clone ID: PAT_MRT3847_111305C.1
cggaattccctttgggagatcaaatcatatctatctatcggcggcaaggcaattcaagttgtgaaatggagaccctctgctctgcattggtgttcccatctttcagaatcacaacttcagctttctccaaatgtggcatcagggcttccattgccgttgagcaacaaacttcccagactaaggttgctctcctcaaaattggtaccagaggaagtccactagctctggctcaggcatatgagaccagagacaagctcatggcatcacatgcagagctagcggaagaaggggctattcagattgtgataataaaaacaactggtgacaaaatactatcacagccacttgcagacatcggcgggaagggcctgttcacaaaagaaatagacgaggcactcataaacggtgacattgacatcgccgtccactcaatgaaagatgttcccacttacttacctgataaaacaattctaccatgcaaccttccacgtgaggacgtaagagatgcatttatatccttgagtgcagcttcactggctgatctaccctctggaagtattgttggtactgcttcactcagacgaaagtcacagatactgcacagatacccatctctaaatgtggaggaaaatttccgtggcaatgtccaaacaaggctgagaaaactcagtgagggcattgtccaagctaccctattggcattagctggactcaaacgtttaaatatgacggaaaagtgacttcgatcctatcaattgatgacatgcttccagctgttgcccaaggtgcaattggaatagcctgtagaagtaatgatgataaaatggcggaataccttgcttcactgaatcatgaagaaacaagactagcagtttcctgtgaaagagccttccttgaaaagttggaagggtcttgccgcactcctattgcaggctatgctagcagaaatgaggatggcaattgcttgtttagaggattagttgcatcccctgatggaatccgtgtgcttgaaacttccagaattggcccatatgctttcgaagatatgataaagatgggtaaggatgctggagaggagcttctttctcgagccggacctggctttttcagtcgttaacaatccaccccattaaatggccaacacaatacttgatcagggaggttgcacggtcagctctttcagttgactgcatcccaagtatgtctattcttcaaccatgttgtaaagactaaaatattcagctgagttggaaaaataagccactcatcatggtccaattgttgtatcttaaggtgattagaaagccaaatttttgtagtgttgtgtgtattattcatagtgtaacgtgggcgtttggttgaatgaaaaaaaaaaaaaaaaaaaaaaaaaaaaaaaaaaaaaaaaaaaaaaaaaaaaaaaaaaaaaaaaaaaaaaaaaaaaaaaaaaaaaaaaaaaaaaaaaaaaaaaaaaaaaaaaaaaaaaaaaaaaaaaataaaaaaaaaaaggggggggccttttttaaaaaccaacttttctacccccgggtttgtaaaaaaataatttttttttagggcccccaacaaatttttaccggcggccgtttttaaaaaaccgggggggaaaaaaacctggggccccccacaaaattcccttgttaaaaaaacccctttttttgcgggggggtaaaaaaaaaagggccccccaaaaggtcttttttaaaaaatttgcacccttaatggcaaagggaggcccctttttttggggggttatatttgggcgggggggggtgggtctccccccaatggaagcccttctttatgtggcgcggccttatataccccttctcttttttttttttttttttccccctcctttttttt

SEQ ID NO: 12513 - DNA, 631 bp, Glycine max
  unsure (1)..(631): unsure at all n locations
  Clone ID: PAT_MRT3847_111306C.1
ccnnnnnnnnnnntttttttntctcagaacaaagaatgtagatcaaagtccacattgtttctcttaatctttctaacctaaattcaatatcggtggtatcaacaacattgaaacatgatgacatatgttcaatatgatcaaactatgcaaaagcttgcaaaggttaatacactacctgacatggaggatgacattcgtcgttggctgcagcacctaaactcaaaagggaccacacccctcaaaactaattgtttataagtttcctataagcaccaccagaaaaacatatgtttcatactacataacttacactgactaaatataaatagaaatggtagagcttccaagttcacaactccagtttttaacttcaataacttaatcttatagtaacatctcgcacctatgcacatgtgatgcagctagagttatttccgaaaataagacactcatacaaacttgggaggttgacggcggttgaaaacaaccataacagaggaaaacttgtcacagttcgatgacatggcaacgcgacgaggatgacacgtacgacggccggtgactgacggagaccgtgaccacagtgagggcacaaccaagatgcaaacaaaaagctgcggcggacgcgtgg

SEQ ID NO: 12514 - DNA, 195 bp, Glycine max
  Clone ID: PAT_MRT3847_111307C.1
attaaaggttggttagtagttgaactgctttcttttgtaggtctgcccaaaggaccggccggttggtgcaacattgggtgacaccacactgttttcattgcttgaggttactacaaaagaaacatttttatcttataaatgtgtatttatttttttttaattttatcttttgactgattttatttttatttttat

SEQ ID NO: 12515 - DNA, 355 bp, Glycine max
  unsure (1)..(355): unsure at all n locations
  Clone ID: PAT_MRT3847_111308C.1
acgcgaactccatcacaacgacatatttatattcggcatagataacaccgtactctctaatatcccatactatgaaaaacatggatatggggtggaggaatntaatgaaaccttatatgatgaatgggttaacatgggcgacacaccggcattgccagagactcttaattattacaacaagctgttgccttccgacttcaagactggattcttgtcaggatgatttctggacaaaatggccgtaactgatgcaaacctaaagatggctggcttgcacacatgggagcagttatgtccttaggatccatatctgatcacttcaaatgcactttcgtacgagttatcagtgagagag

SEQ ID NO: 12516 - DNA, 297 bp, Glycine max
  Clone ID: PAT_MRT3847_111309C.1
gtcggtcattagtttaagcccaaactaaagtatgacactcgcaatccgagtgctcgttagttgtatgatgtgtttagtatattttttaagctttgatggatgataaagaattaaactgatatggtatagtatggttaaaaagtgaaaaaaaaaaaaaaaaaaaaataaaaaaaaaaaaaaaaaaaaaaaaaataaaaaaaaaaaaaaagaaaacaaaataaataggaattgaaaaagatgcgacttttagaaaactggcggtattagtaaataaggccgaggcttgaaagactttcc

SEQ ID NO: 12517 - DNA, 512 bp, Glycine max
  unsure (1)..(512): unsure at all n locations
  Clone ID: PAT_MRT3847_11130C.1
agctnggatcctctagagttgccgcccttggttttgtcttttactggaagtgatccacaataataccattacacacaacttctgataacatgtcatcgttggaagttggacctgctgtgaattgaacaaacgcaatttgaaatgctgaacaggactacgacaattattgtcacaactcatatgacacggtcccatcaaaagactaatacaaagatatggccattttttggatagcgaaaactaactgaacagcgagtccactttgaaatcagcaaatgtgcccacagaagcataaaaagagcgacctagtagagttcttcctccttgtgggtgtgaatgacgcaatccgccttagggtacgaaatgcatgtcagaacgtatccctcgcccatctggttctcgncgaggaaggatccttccgactgatcaacttctcccgatgacatcttacccgcacatgtggagcatgatccaccacggaatgagaatggcagctccaccccggcagtttc

SEQ ID NO: 12518 - DNA, 368 bp, Glycine max
  Clone ID: PAT_MRT3847_111310C.1
ggggattttgggggatctttatgaggagataatggaaaataatcacccggccctggaggatcatagggggcctctggcgaccctttttgaagggtgcaaaccttgtggaaagttgggggatcaccctgtgaagaggtgcttaaaccaaatggataggccctataactttggggaaaaccaaatttcgcaaatgtgggggctcacttaaaagcccctttttaccccccgggggaagagggggaggaattatcctacccacccttttgaagaaaaagaacaccttggattgctccaccccttttttaaaaaaataaaaaacctcccttttttgttttaaaaaaaaacagaagggggttttttttattttc

SEQ ID NO: 12519 - DNA, 322 bp, Glycine max
  Clone ID: PAT_MRT3847_111311C.1
cgcgtcagtaaggcactagacgacagcaggggggagcacgctagacatttggaaattcctcctctgcgtaacatcatggtggtgcacaccgtatgtttgttgcttcatttccttcaagcgatcagtgttgcactcatcgcacgtacctccttcacgtctgatctcatcatcatcttattatgatgatgtactctcttagctatgccatgatgtcttcacatgcacacgcccactccctcctctttgctcctgtgataatattacgccgagcttcaagctaatcacatcgtcccagctgtcagtgctcacgctcatgtccagg

SEQ ID NO: 12520 - DNA, 363 bp, Glycine max
  Clone ID: PAT_MRT3847_111312C.1
ggctcgaggattgttggtactgtttgtgtttctgcaagcaactgctattttgatgagatccataaggttgatccagagtgcacttcgaccactagcttactcggaacgtatggcatgctttggggtggaaacatgtggggctgaagaggaccaccctcccttcatgcagactttatcgacttgtgtcagaagggtggagacgcttccaaaaaagcatgattttcccttgccacctctgacatcgatgtctctggcgcgagcgctgaaagcgctccaaagaggctaaccttcgaagaaatgcataggaggacctacttgggagtgaacgggaccggctcaacaaacctttgttcaacgatcggt

SEQ ID NO: 12521 - DNA, 502 bp, Glycine max
  Clone ID: PAT_MRT3847_111313C.1
ctgcctctacctgaaattctataattgtaatatggtatcaaagtgatatcatcctcaatatataacctatcttgtgatattttgctgctaagttcactaaaatttggaactactttgttatcgtctaaccattcgagtcaccaccattaaggatggataattgagctccacacgcctaaccattaagtgaagacaacctgactcaaaagcctcagaacatcatccctattctggctgctattgcctctaatcatattaccttgccttctttcagggataatcttgccacctatgttcactttgacatggctgtgtggctcctgtaggatgcagaaatctggcatgttctctccatcagctaggtttctgagatcttagggattgctaaggagagaaaaaatgtagggaaggaaaaatacttggatattatttcaaaaataacacagatacatatataggcagggctgcctaattacatagtgaatgtagaatggaaaataaa

SEQ ID NO: 12522 - DNA, 324 bp, Glycine max
  Clone ID: PAT_MRT3847_111314C.1
ctcacaattcatttgttacaacttatatttatatatttactggtaaatattaatggacacgttacaaatttggtcattgagcctgtaaactgatcactatctacaatcttatgtcaacctatttacaaatttaattgaatcgactactgttctatcctttgaatctagacagaagcagtttaaatcttatctatgcaatcttgattacaaatatgctgaaatatcatcatgttaaggcctgatgactacacagatttattatttataactttaagtttctgaacaactatttcttcagctaacaattttaaaccatcgaacata

SEQ ID NO: 12523 - DNA, 292 bp, Glycine max
  Clone ID: PAT_MRT3847_111315C.1
tgttctctttttcaaccccgttagctacacatatgtgccatgcaacccacccccctatactgctataatctcacctgttccaaagccaacttacccaaaacaggcaaatagccccaaagacactattaagataagtgtgtgtgctgatgtgtaaggatctgacaactgtcgactttggaagcctccaaaatacccatgctgcaacctcattgagggtctcgctcatctttaagctgccttgtgcctatacactgctcttaacaatacagtgtttgcgcttctaatgaaaatt

SEQ ID NO: 12524 - DNA, 184 bp, Glycine max
  Clone ID: PAT_MRT3847_111316C.1
agttgtgacgttcgccaatttcacttgtaaccaaacactgcttgaagctgtggaagggttagatcgcattgacataatatattctgttattgggcttggtggacagcggtcttctttcatgcaagagttagctctcaagaatggcagtgcacctgaactcaagatcactggatttgtgttaccc

SEQ ID NO: 12525 - DNA, 229 bp, Glycine max
  Clone ID: PAT_MRT3847_111317C.1
gtcgtaacattatcatggctggtgcggtttgaacaaaatgggcaaacttgataagctagtggggagtaacacacactacttgttatggggagatttggccaatgatttatggtttccgggttgtgccaatcggcaatgccatgttactggatcaccttgattaactgctcggcgaaatattagcaatgggagaggactgattggctgactttgcagtggtgatgaaaaa

SEQ ID NO: 12526 - DNA, 368 bp, Glycine max
  Clone ID: PAT_MRT3847_111318C.1
gtaagactaagagaaggaattcaacttcatgcagcgtactattgttatgttacgcactattattatattactattgttttgtttgatgttggttttatgttttttagtgtcataactcatagtaatgtctttgtgtgatatgtaatgtagtgacattttgacttgtggataagataatgtttgtgtgtactagccagtggctagctcttgaggtctcagaaacaccatctgtttgggcagctgagacccttgcaaataaagtgtcttgtagaactttgatgttaccatagtgtttaagtcatgatacaaattgtaaacatttattttctttgattttgttgtcacttgttaattgattaatttttatg

SEQ ID NO: 12527 - DNA, 223 bp, Glycine max
  Clone ID: PAT_MRT3847_111319C.1
acgaggaccaattaaccatttgggaagtttaggcaagggcatgttggcaaagtactcagagtaatattcttcggaaatgtggattttccgtgggcaatgaccagttagatggtggtggataagttaaaggaatctgcaactacaactataaatgcagcttgtggatacatgtagttgaacaagttccatagaaactgccaaggattaaaattatccctttatg

SEQ ID NO: 12528 - DNA, 504 bp, Glycine max
  Clone ID: PAT_MRT3847_11131C.1
atgaacctatatacttccttaaaggaaaagaatattgcatgggttttcatgtaccacattgaatcagttttgagggaaaagccacctgattcaacctaattggttttcttacaatatcactcaatgatttggtttcaaaatgtaaatcccatccaatattcatttgaattgaattggtttttcagttttcttttaaaaaatttaatatagaaattcttcaaaatatagaaatataatttcataaaaatacatcatgtacaaggctaagattatttatgaaaataaactaaatacaggttcaaacttatctttgtatatcaaaatacaatctaaattctaaatataatttcaaaattaatcttcaatcgtataatatattttcaaatttgaaacccacaacccattctattggttatttttttggtttttcagattattcacaatttttggagtcattttttttttcagttttaattggattgattggtttgaatacctctagta

SEQ ID NO: 12529 - DNA, 241 bp, Glycine max
  Clone ID: PAT_MRT3847_111320C.1
cggaattcgggtagagcggcttcggtgtcctttccagcagagcccaggactttctggttgccctggaatttccaatactaattcacagtacccgaagttgaatggtaaggatctgacacttgtttgagataggctgaggtctgctatttagacagccccaatatctcttgcgtcttcatcgggtggttatccttttggccacggggcataatgaaattgttttcggccaaattgaccgagt

SEQ ID NO: 12530 - DNA, 145 bp, Glycine max
  Clone ID: PAT_MRT3847_111321C.1
gcacggaattcggtttgaggtgggcatataccactctgccaatttgtctatacatacagggaccccaacaggtcttacccctttatctacttcgcctcgtgacccctttctctgtctcttctctctctgctcctgaatttaacac

SEQ ID NO: 12531 - DNA, 148 bp, Glycine max
  Clone ID: PAT_MRT3847_111322C.1
gaataaaatggctgttttacgaatttcatttataaaatcttaatacaagatcgagatgggtacttcacaaatcacaattttaaccttgtattgacagtattgtcgaatatttagagaatgattggtttgctctgttaatctgttttag

SEQ ID NO: 12532 - DNA, 145 bp, Glycine max
  Clone ID: PAT_MRT3847_111323C.1
cccacgcgtgcgcacaggtgcgagcgtccacagagggggactcacgagttaacataattacttgccttgaggaacgttccaaaccacatacacaggtatatctagtgatcttcgatcttctgtggcgatcttgttatgtcatctt

SEQ ID NO: 12533 - DNA, 248 bp, Glycine max
  Clone ID: PAT_MRT3847_111324C.1
gccataaaagatgaggggaaagcatggaattatagaccttggtacaaacctcctttagattattaccttcggaaggatttatacacacattggcagtcaaagttatttaacatgaaggggggcatgaaacaacctgttgattctgaagccgtgctctacactgtgtgatgaggcaatacaccggtttttctatgatggttcaatggctaaacactagacaacacaacccatgctggtgagtcttacaa

SEQ ID NO: 12534 - DNA, 242 bp, Glycine max
  Clone ID: PAT_MRT3847_111325C.1
agaagacaacacaacggaacttgttttttcaataaaaaaacactcttcattcgtcgggtttatactatcggctttctctcaattcttaaaatatccactagcaaaaactgtttgtacatacacaccactaattctacatgaaaatggaattatctgttactgatgccatgatcatcaccttatcaaaaacttacatctttctcctagactcttattggccaaccttcctatctaaacttgct

SEQ ID NO: 12535 - DNA, 151 bp, Glycine max
  Clone ID: PAT_MRT3847_111326C.1
ggctcgagctcaaacgctacctcaaacggaatctgcgatactcaacaaggaccagcccaaaagacagggcagggcataatctagagccaccgcacagcagacacagccacgacccagccaaaaacaggccaccaaccacgaggaaaacgca

SEQ ID NO: 12536 - DNA, 273 bp, Glycine max
  Clone ID: PAT_MRT3847_111327C.1
attcattccttgtgcttgtgcttgctataatcatcagactaattcaagatatatctagtcaagtttactgagaagaagagagggtaaaaccgattatcgtgccaggattcggttgattaatcaggagaagaacaaatataaccctccgaaataccgatttgttgttcgctttagcaacaaggacattgttgcacaaataatatctgctagcattgctggcgatattgttcttgctgcagcatatgcacatgagctgccacgatatggtcttga

SEQ ID NO: 12537 - DNA, 1045 bp, Glycine max
  Clone ID: PAT_MRT3847_111328C.1
gttagaacccccttcgcccttcggattccgccaccgtttcggttgaacggacacgtcaaagtcattttcgaggtgcttccaaacgacgacgtttgcccctcattcgaaacaagggtttttaggaccccttcacccttcggattccgccaccgccataacgccgtagctgctggcgaacgatttctgggtttgttattttcacctcaaagttccaatctttaccctcgacatggcgaagggagcaacttcaaaacttaacatcgcaataattcacccagatcttggcataggtggagctgagagattgattgtagatgctgccgttgagcttgcgtcccaaggccataaagttcatgtttttactgcacatcatgataaaaacagatgctttgaggaaactgttgctggcacctttccagttactgtgcatggttcctttcttccccggcatatattctaccgtcttcatgcattgtgtgcataccttcggtgcctatttgttgctttctgtgtacttttcatgtggcattcatttgatgttatcctggcagatcaagtctctgtggttattcccatcttgaaactcaaaagatcaacaaaggttgtattctactgccattttccagacttgttgctggctcaacattcaactttcattaggagaatgtatcgaaaaccaatagaccttgcagaagaaataacaactggaatggctgatttgatacttgttaacagcaagttcactgcatctacttttgcaaatacttttaagtatctagatgctaaaggaattcgaccagctgttttatatccagcggttaatgtggatcagttcaatgaacccagttcctttaagctgaattttctttccatcaatcgctttgaaaggaagaagaatatacaattagctatttcagcttttgctatgcttaactcacccgaaggagttcttaagcataaagatattactaatgcttctttgactattgcacgtggctttgataaacggttgaaggagaatgtggaatactcagaagagcttaaa

SEQ ID NO: 12538 - DNA, 387 bp, Glycine max
  Clone ID: PAT_MRT3847_111329C.1
gataggggagatgattagtttactggctaatcctaatcgagtgcttgcaaagagactttaggctgtctacacagatctgaggagctttatcatgagtgctgggacactatcttaccttatgccgacactattgtggtttaaattattgatgatctttctacgtttggaaacacctgtgctcatttaaagcattctaagatgatgcaatccgcgagtcatgattgtggaaccatcctcaacttttcttaatggcatgatgagcgaaattaaactactgcatttacactgatgcgatcaagattctcattatatactctgattcccatcacatgttctacctattgacccaaatgttattcaaccatactgatggactctatacactga

SEQ ID NO: 12539 - DNA, 1144 bp, Glycine max
  Clone ID: PAT_MRT3847_11132C.1
gtaatgcagagacggctttgaaaagagataacagtctcttctcttctcttcgctcctccacttgatgctacggctgcgagaagacgacagaaggggacgtttgttacaaaatcctttcacataccataccataatacaattctttgtcccttttcacttttctcttctctctctgactctccttcctatttcttagcaatcgaacaacacagcacaatcggttcctgtaaactctctactctctcttctctccgctcctgcacctgttgtcttcattgcccttcatggcatctcaggcaagccttctccttcagaagcagctcaaagatctttgcaagaaccccgtcgacggcttttccgccggtttggtcgaggaaaccaacatttttaatgtagagtgacaataatattgggcctcccgatactctttacgaggggggatttttcaatgctattatgagtttcccatccaattacccaaatagtccaccttcagtgaaatttacctcagagatatggcaccccaatttttatcctgatgggcgggtttgcaaattaatttttcctcctcctggtgagtttccatatcgttttgagttcatacgtgactggtgaagacccattaatggtgatgaggctagcatattaacgatgatcgcatggttatacagcagagattatgatattacgtatcatattgatgcttcctagtactagaggaagaatctggagcaaatctgttgaagctgcagaggaagtggaagagataggagagatgaattcaagaagaaggttagccgatgtgtgcggaagtcacaagaaatgttgtgatttacagcttggattctcatcttccttttgtgaacagaaggatatacaacttaatgtgtggattggttcacctgttactgttgaaccgagtatagtgccatttgtcttggaaaaaccaactgtattctaagtgcttggtcagtgtttggtgactagttaaattggaaatttagttgttcatttgcatgaccttattgttaaaatttttaaaaattaggtgccaagttttgccttttgcttaatattgtgattgtggatgttgaaaattgatatctgaattttgtcacatccttgtgttataggcacttctttc

SEQ ID NO: 12540 - DNA, 1161 bp, Glycine max
  Clone ID: PAT_MRT3847_111330C.1
agattgtttgtttcacggaaattaaaccatatgaattgggatgctccaattgctatggctgatcagggagatcttcaggagagggatggaattgttttggataggagcaaaatggataaaagcagagtttcaaagtcagaaatgaaacgggtactgctaactaaaagttctgaggataaaatgcaaaagtatggtgggtccaaagctggatctcgtgtggttccatatcaagaagatgagagtcaagactcagttcctgtcagtatcgtctctaaagatctccaaaggaatgacaaagagagtgaagatttatcgctgatccgtgatcagttacatcagattgagaagcagcagtcaagtctacttgatcttctacagaaattcatgggaagctcacaaaatggaatgcgttcgaggtgtgcatggccttgagttggcattggatgagatctcttatgatttggctatatcaagtggaaggatgactaaacctgatcctcatggtaacacatgttgcatgctacctggagcagaatttttgagctccaaattctggaggaaaacacatggccgggattcaatcacccgattctctagatcaggtggcaccccatcacttgctgccatgaactaccaagccaacagggatgctgaaaccaagttggcaaaccacagattcaggcctgatggaggcttcatcactaatccgctggcagagattcatacaaactcgaggaattttgcaacatcggagatagcttaaaagaagcagatgtgctgcacaatctagaatgcaaatttgatcatttgattctcatatcagctttgatggaaggacccccattgatgggttttgcgattcaatcagaattccatttagtcatgttccaagtgaagaaggcatgaagcggggctagacaatacattatacgttgcagcgcagaacatcatttgcacattcatgataaatcttggacaagaacagcacattggagtgagttcgcgactacataccacactattttaaaataagggtgaatttgtatatgtacagaggagtgagaggctgcttatttttttatttttaagtattgcgttgtataatgtattcgagttatgttaaaggttctctacactggcatgcactatcggcatttcatc

SEQ ID NO: 12541 - DNA, 753 bp, Glycine max
  Clone ID: PAT_MRT3847_111331C.1
cgcacaacacaaccacatggccgcgaagaagaagaatggcggcggaaacggcaacaacaaggagaacgaagacagcaccatcaccgtcgtcttgaaggtcgaaatgcactgcgacggttgcgcttccaaaatcatcaaacacctccgctgtttccaaggtgtggaaacggtgaaggctgatagcgacgccgggaaggtgaccgtgaccggaaaagtggaccccacgaaagtgagggataacctggcggagaagaagaagaacaagggtggtggtggaggagacaagaatgagaatattgaagatggaatagagaaaatagagtataacagaatggagtatttggcaccacctgcttttggctttggttatggaccttatggtggtggttatggacatggacatgggcatgggcatggcaacattggtgggtatagctatgtgccagtgtacccggagcagatgcactttcacttgcatgcaccaccaccacaaattttcagtgatgaaaacccgaatgcttgttctgtcatgtgagtgagggtgtttctttccatttaactgggtgatggatggtgataatgatggtgtgcttagagaactagatactagagtctagaggggttctttccattcttttttttttttctttccatttttgggtctcttttttttttcttatttgttcttactttgtttttagggaaaggggggactttgaatttgtttttgtgtttagggaagaaaaggggggg

SEQ ID NO: 12542 - DNA, 180 bp, Glycine max
  Clone ID: PAT_MRT3847_111332C.1
ctcccaactaccaaaacgcgcaacacgttgtaattagaacgacacctgaactaatgggcgtatcagcgtaaacccgactccggacccggttgtgatccgccaggtttgggcttcaagtctcgagtccgaattgcggctcaaccgcgaagtcatcgaccactatccttttatgacgatgga

SEQ ID NO: 12543 - DNA, 259 bp, Glycine max
  Clone ID: PAT_MRT3847_111333C.1
cggctcgaggtatcactaaaaaaagtatcaggaatccaggcagcatctccagagcctgaaaatattaatgcagctcttcaagaaacagaagtgccttatatatctattgcatgtgatttaattaaagaaacaaactttctgctgaaccagctccgaatttctctgattattcagaaatggcaaaagttgaacagccagtgcctgatcattctgagctagttgaagattcctcacctgattctgagcgagatgacttatt

SEQ ID NO: 12544 - DNA, 582 bp, Glycine max
  Clone ID: PAT_MRT3847_111334C.1
ttttccgtttggtgggactttttatttatttattttctaattgtgttctgctgacctccgttaattttttttataatttatttgtctcttattgttaattatgcttaatttaaattatcaggtggtgactacagttgttctgaaagtggcactgcattgccagggttgcctagacaggattggcaaaactgtgttgaaaaccagaggttagttaattaattattattattattatttagtttgtctcttggtttggctaattgggcatgaacttggacatgatgatgcaggagtgcaagaaatggccattgacaaggaaaaggaaatggtgactgtgaaagggacaatggatgttaaggctctggcagagaatctcatggagaagctgaagaggagggttgaggtggttccttcaaagataagaaagacaaggaatgtggtggtggtgatgatgagaaggaagtatcagggaagaagaagaacaagggtggtggtggaggagacaagaatgagaatattgaagatggaatagagaaaatagagtataacagaatggagtatttggcaccacctgcttttggc

SEQ ID NO: 12545 - DNA, 2776 bp, Glycine max
  Clone ID: PAT_MRT3847_111335C.1
gtttcggatgaagtttcgccacctcctaaatcgcaatcttcttccaaagagaatgcaagtgatgggcgctatccccaagtctctcacaattcatgtagtcctcgttcaatgatggctcgagatttgcggaggaaatctactccttttagcagattcagtccagcagatagttcttctgctagcaatgctaagaattcgagtgcttcaagtagtaacaagagaatgagttcatctgtttcccgaaaattgaaccataagaattgggatgctcaaattgccgtggctgatcagggagatcttcaggagagggatggaattgttttggaaaggagcaaaatggataaaagcggagtttcaaagccagaaacgaaaagggcactgctaaataaaagttctgaggataaaatacataagtatggtgggtccaaagctggatctcgtgtggttccatatcaagaagatgagagtcaagactcagttcctgtcagtatcgtaactaaagatctacataggaatgacaaagagagtgaggaattatcgctgaattcgaaaggaattatctttgattcgtgctcaattagttcaaattgagaagcagcagtctagtctgcttgatcttgtacagaaattcatgggaagctctatggcaatgggctcagaggtgtgcatggccttgagttggcattggatgagatctcttatgatttggctatatcaagtggaaggatgactaaacctgatgctcatggtaatacatgttgcatgctacctggagcagaatttttgagctccaaattctggaggaaaacacatggccgggattcaatcacccgattctctagatcaggtggcaccccatcacttgctgccatgaactaccaagccaacagggatgctgcccgccgccctgtgacgacataaccaatcccgacccgctactaccaatactcctcgcacaacacaaccacaatggccgcgaagaagaagaatggcggcggaaacggcaacaacaaggagaacgaagacagcaccatcaccgtcgtcttgaaggtcgaaatgcactgcgacggttgcgcttccaaaatcatcaaacacctccgctgtttccaaggtgtggaaacggtgaaggctgatagcgacgccgggaaggtgaccgtgaccggaaaagtggaccccacgaaagtgagggataacctggcggagaagataaggaagaaggtggaactggtgtctccgcagcccaagaaggagcaggagaacgagaaagagaacaaggatgctaaggcaaacaacaaatccgagaataacaaaacccaggacaaaaaaaccaaggacaaagaggtggtaaccaccgctgttctgaagctggcattgcattgccagggttgcctagacaggattggcaaaactgtgttgaaaaccaaaggagtgcaagaaatggccattgacaaggaaaaggaaatggtgactgtgaaagggacaatggatgttaaggctctggcagagaatctcatggagaagctgaagaggagggttgaggtggttcctccaaagaaagacaaggaaggtggtggtggtgatgatgagaaggaagtatcagggaagaagaagaacaagggtggtggtggaggagacaagaatgagaatattgaagatggaatagagaaaatagagtataacagaatggagtatttggcaccacctgcttttggctttggttatggaccttatggtggtggttatggacatggacatgggcatgggcatggcaacattggtgggtatagctatgtgccagtgtacccggagcagatgcactttcacttgcatgcaccaccaccacaaattttcagtgatgaaaacccgaatgcttgttctgtcatgtgagtgaggttgtttctttccatttaactgggtgatggatggtgataatgatggtgtgcttagagaactagatactagagtctagagtgtttctttccattcttttttttttttctttcaatttttggttcttagaattccacgggaacttttgagatgtttttgtgtttagggaagaaaaggggggttttgaattttgatgtgattagataaccaataccgctgatatattattattaaatgggaatgccaatttcagaatttgttattactagttgatgcataatgtaaatgatggagtaatatggagttggaaatggaatagatctcaattctgacaaaccaagttggcaaaccacagattcaggcctgatggaggcttcatcactaatccgctggcagagattcatacaaactcgaggaattttgcaacatcggagatagcttaaaagaagcagatgtgctgcacaatctagaatgcaaatttgatcatttgattctcatatcagctttgatggaaggacccccattgatgggttttgcgattcaatcagaattccatttagtcatgttccaagtgaagaaggcatgaagcggggctagacaatacattatacgttgcagcgcagaacatcatttgcacattcatgataaatcttggacaagaacagcacattggagtgagttcgcgactacataccacactattttaaaataagggtgaatttgtatatgtacagaggagtgagaggctgcttatttttttatttttaagtattgcgttgtataatgtattcgagttatgttaaaggttctctacactggcatgcactatcggcatttcatcatttgatagcaatgcttttagtctattattcttcatgtgccgtct

SEQ ID NO: 12546 - DNA, 1022 bp, Glycine max
  Clone ID: PAT_MRT3847_111336C.1
aacaatattcacaaatggatagaaattgttttagccttaccaagaagagttcagcactatgtttaactcactggaaccccatcaaacgtaagccagaacatccttgtgtggttgcaatgctcagaacaccctcagacaacatcacaggagaaacaagaaaaactaatgcctacaaagataacttgtttgatcgtttagcaatacaccatctttcaaaaagcgttcaagaagccacgggactcggtaacaataagagtgggtatgagagcttggttgaggcagctactgtggctaaaatgaaatttgatcctattcagcagcaagaggttatcattcaagctcttcacagagccttcccaaagccaatactttcattgataaagacactgctaccaccatctaaactctcaagggaatattttgccgttttcaccactttgttctttgcttggttagtcgggccttccgaggtgagagaatcagaggtcaacgggagaagggaaaaaaatgtagtctacgtcacaaaatgcaggtttttagaggagacaaattgtgtagggatgtgtattaatctctgcaaaatgccatctcaatcgtttataaaggacactctggggatgccagtcaacatggtgcccaattttgacgacatgagttgtgagatgatatttggacaggagcctccagcatcaaccgatgatccagcactgaagcaaccatgctataaactatgcaaggcatataaaaagcatggaacagactgcctcagtagttaatgcagagggctttcaggtgagcatggatgggaaaagagtgtctcccacattgtgtatgctgccaaaactcagactcatcagccatagtttctctcattatgaaaacaaaccaagtgctccaacgcactttgaaccaatcatttgcaagtggatttccatcattttattactttgaaacttctttcttttacgttttcaaagtatataaaagcagacgtacgtggccagcaggcccaaggttaattt

SEQ ID NO: 12547 - DNA, 929 bp, Glycine max
  Clone ID: PAT_MRT3847_111337C.1
gctgtgatacaagtgattctgagagtgtctctctagagcttcatgatatacctggaggagaagacgcttttgaactctgtgccaagttttgttacggaattgcaatcaacataagtgcccataactttgtatccgctctctgtgctgccaagttccttagaatgaatgattccattgagaagggaaactttgtaggcaaacttgagtctttcttcaactcatgcattcttgaaggttggaaggattccattgccgcgcttcaaactactgctacgttgccagagtggtctgagaatcttggtattgttagaaagtgcattgattcaattattgagaaaattctcacgcccccaccacaggtcaaatggtcctacacctacaccaggccaggttacacaaggctcgagcaccactctgtgccaaaggattggtggacggaggatgtttctgatcttgacatagatcttttcaggtgcataatcatggctattagatcaacctatgtgctccctccgcagcttattggagaagctttgcatgtctatgcctgccggtggctaccgggcctcacgaagataaaaagttctggcagttcagcatctcaaacagaagaatctaaggagaaaaaccggaaaattcttgaaacaattgtgagcatgattcctgccgatagagggtctgtttcggttggcttcttgtttaggcttctcagcatttcaattcaccttggtgtctcatcggtcacaaaaacagaactaataagaagagccagcctacagtttgaagaggcaacagtgagtgacctactttacccttcaacatgctcttctgaccagaattattatgatacagagttggttctagcagtgttggaaactttcttgaagctttggaaaagaatgtcgcctggggctgtggataacagctac

SEQ ID NO: 12548 - DNA, 409 bp, Glycine max
  Clone ID: PAT_MRT3847_111338C.1
acattttaattaatagagagacacaagcacaacagggacaaacaaaggcggagagacccacacgcgagaagccgccaggccccgcggggctagaggggcaggagagaactatcgcaggggaagagagcgcaggggcatgggggaaagacaccaccccagagaaggaggcgcataaaccggcaccaacagcctcagcagcacaagcagagaacgcgcgtgtctagcaaaatcgatgagcaccagggaagaaaactgggcaaaaccccagctgaccacgtgcccggatgaactgcaacacagacaaaatggcgggaggcaacccccaaggaggaagcccagcctcaagcgctgacacctgcataagcggccggagagctacaagggaggacccaacacgcagccttgaaag

SEQ ID NO: 12549 - DNA, 260 bp, Glycine max
  Clone ID: PAT_MRT3847_111339C.1
ctccccaaccattaactgaacaaaaaaaccaaaaaaccaaagatactacaaatttttttcagattctccgccgccgaacaaacaacagctccttcgtacggaacaccggtggtcacacgatccctactactactctactctatttacacggaccccacaaaaaactatccccctcccccaaaaaaaaccccaaagcggctcggttagggtatagttctgtaccatttcgtgtaatctaatttttcatccgaaaaaatcta

SEQ ID NO: 12550 - DNA, 513 bp, Glycine max
  Clone ID: PAT_MRT3847_11133C.1
caaaagggatttttattttatttcatccaaacaacattatttaataaaactacttgaccaaatattacaatcataagttgagccaaatttcattatgaccaggatttacaagactcaaactctaacagtcacaagtcacaaatttgtgattttattcgcgttccaacattgaaatccctgggaaaccggcacataaatgtgattgttgaagtgtgcaaatccctttcagcacgaccacttcctccaaagatggcacatctttcttgaaaccaccgtcgttgatatactcctaattcattcccgggttagtgtataacaacccaacatcacctgtgatgaacttaaccggtacatcgtccactccatgcagctgcagttggttcctatgccatgacatgatcatacaattagattaatgatacacaaacattcttttttcacttccaccattctgtgcactatgctctccgtcgatcctttatcttatccctctgtttagtgtttaccttctgc

SEQ ID NO: 12551 - DNA, 476 bp, Glycine max
  Clone ID: PAT_MRT3847_111340C.1
aattacaatttacaattaaatgacgaaaatcacttatcatttaaataagcacataagtagatgactagatcagcatccaaaacacaaaatgagttattcaaaagttgcttctgacattaccacttttccaagaagctcttctcttattttaattagtactttctaaaatgctcatccaaacaggcttttacttcatctagaacttgcccttaatccaccaaacttatttatcttgaggagctacaaacacataaatccagtctagaatactttgtaaaatgctcatccgaacagtgttttgctggatgtagaacttgcccttaattcaccagactggtttgtggtgagagctacaaacacatgggtgcaggctaggatacgatccagcgaccggaaatactggagtctgcatgctctatagaggaacaaaggaccccgaaggccccgtgaggccgcggcgggggcgtgctggcgtg

SEQ ID NO: 12552 - DNA, 601 bp, Glycine max
  unsure (1)..(601): unsure at all n locations
  Clone ID: PAT_MRT3847_111341C.1
acgtaagctcggttttcggctcgagatgaattgtaggaatttgttggttttggagttgcgggagagtgaggtggacgacatctgtgggcattggctgagccattttcctgattcgtacacatcactggtttcccttaacatttcttgcttaggcaatgaggtgaatttgtctgccctagagcgcctggttagtaggtgtcccaatctccagacgctccgcctcaaccgtgctgtgccactagacaggcttgccactcttcttcgcggtgctcctcagttggttgagttgggcaccggagcttacacgacagagatgcgaccggaggtcttcacaaaccttgcggaggcattttctgggtgcaagcaattgaagggcttatctggattttgggacgtgctcccttcctaccttccagctgtctatcctatttgctccaacctgacttcactgaacttgagttatgcaactattcaaagccctgatcttatcaagcttgttggtcaatgtgagagtttgcagcggctatgggtgctggattacatagaagatgctggnctngaagtgattgctgcatcctgtanggatctaagggagctgagg

SEQ ID NO: 12553 - DNA, 263 bp, Glycine max
  Clone ID: PAT_MRT3847_111342C.1
cgctcgagcgggacagatcgagctagacagccccaagcttctgagtctagatacagaagcccatgtcttctgctgttctgcacttctgggagatacaagggtctactgttcccaaggaagctcgttccagattgtctcgtctactaagatgtccacttctaaagcctggcttcttatgcttaatatgatgttaattagcactctgcgaatctgaatcttgctctcgctctctgccgtcaaatgactcaagtctagtctactgg

SEQ ID NO: 12554 - DNA, 668 bp, Glycine max
  Clone ID: PAT_MRT3847_111343C.1
aatagtaagaatatcccaagtaaacaaaatagacaaaaaagtaaacttaaaaatataataacaagggcatgcctttgctgttatgaccttgcattgatgtctgcttctgtttgaagctaacaaatggtcacttaattagtagttgctactggtaactctaccattgcagatcaagctttcttctgtgcaactggcaaacatgtatatgaaacgtgttgcatctgaacttgaaatattatctggacccaagaaggaaccgaccagagagtttttgattctgcaaggagtgcattttgcttttcgtgttcatcagtttgcaggaggctttgatacggagagcatgaaagtttttgaagaactaaggagccgcatccatgctcctccaccaggtgaagataataataaccagaaacgtagttgatcaacaaaagatttttttttccaattttttttcacactagtagttgcttctctaatatgtgttaccctgttagctgtatatgtcattcttctggctcaattttcattgaatatactgaatgctatacaatgatataaaaaaaatcataccgtagttgtagctttgtaaggtgaaaatgaaaataatgatcactgtatttgtacggttacaccaatgtaatgaacgacactcattagcattttctttc

SEQ ID NO: 12555 - DNA, 481 bp, Glycine max
  Clone ID: PAT_MRT3847_111344C.1
atcgtctagctatctcgatcgaactgtccaaggtcctgtcacttgacaggtacttatacggccaaaaaaaaaaaaacggcggtcacagcctatcgatgaagtaaatgctgtcgaacgttataccaccaaacctattgacaactagtgctaattaacatgtatcgaacgtgctattaatgatgccccgcgcaacaacttatagcggagtcgttccgattggctgtggcgcacaggacaaagattcaacacgattccgtgggcagtccaactgttttggtacacctccggtccaaagctgtacatggaacatgcagtctcgggttcacttactgcctgctaggctacaactgctgcactgattgcgccatgtggcacagatgaaggccgcttaggtactgactccgaatgaggactttaacaagttctgctacaacaggtccgcactcctgcacgccccaccgcgcgcacacacacacagccc

SEQ ID NO: 12556 - DNA, 314 bp, Glycine max
  Clone ID: PAT_MRT3847_111345C.1
tcgcatgcacccgtacggtaactcggaattcggttcgagggtttcttttgtggattggtagtgtgactgtgggaactgttttctccaaagttgcaattttaagaaggaaacgcactaactggtatcaggttccaaaattatcatatataggaaaagacgaaccattttacttttccctgagtaatccccttaggtatatataatcgttctatttctgcttagaactgattgagttcgttgtttttagagtttgcatcacagtaacagtgttttaggaaacttaatgtaatgaatttttgaagggaactaaaatt

SEQ ID NO: 12557 - DNA, 262 bp, Glycine max
  unsure (1)..(262): unsure at all n locations
  Clone ID: PAT_MRT3847_111346C.1
cncaagtntcaatcttttctcacccagctgggtttgccggtnactctgttaagacgagagatatatgggtctaggctcgatgataggttcggattggccaaggctgagtccgaaactagaatgagagacgctatgttttttcaagtggggtgtgatggttggnagggggaggatggtgtggtgaagtttatngtgaatcttcccaatggtactagcgtgttcaacaaggtggtgtttggnggtggtggaggagtactgtctt

SEQ ID NO: 12558 - DNA, 447 bp, Glycine max
  Clone ID: PAT_MRT3847_111347C.1
tgctttcggttttttggatctaccttgtgacaaaatttctagcgtcttgactacaactgctgagagattggttggcacagaacatgagggatttgatccttttctcggtggaattcaaaaatatgccactcccatgatgcccttagatgaagaaattctttctaaggttgtacaagatttggttgaggaatggtttgattgtgttgatgaggaggattcctttgtggaagtttctttaagtgcagcactcattggtgttgagggtttggactatatggtaagaattcctcttgctacattctgaggcgttttacctctatgtgcttttcacgcaaaaatggagaatattggcataaaggagtatctgtttttgtggatggtgaatagatgacattgatttcggtaaccagtgttgaagaagcttacaacaagcttattagttgatct

SEQ ID NO: 12559 - DNA, 449 bp, Glycine max
  unsure (1)..(449): unsure at all n locations
  Clone ID: PAT_MRT3847_111348C.1
ctcactctccctttctctagctcaatccctccactcttaaaccgcacttatcgttccctttcacacctcaaacaattcccaaaatcccacccttgtcccctctggtcctcttccttctccttctgcctccacacactccgcaagtccacttcccctcttcgcgcttcttcctccctttctactccctccatggctgcgtcttcattagacgaaggcaatcctcttctgcagaatttcgtgttcccacccttcgatgtcgttgagcccaaacacgtgcgacccggcattcgcgccctcctcggcaagctggaacatgaattggaggaactcgaacgcagcgtggaaccgtcgtggccaaagttggtggaaccgttggagaagatcattgaccagttatctgtagtttggggcatggntaatcatctcaagggctgtaaggatagttcgga

SEQ ID NO: 12560 - DNA, 350 bp, Glycine max
  Clone ID: PAT_MRT3847_111349C.1
acgacacaacggagagaatattaactattgtgagataatcactatttatggaagactatattatacacgataatatgggggctcaattctacactgtcatgtccatacatcttaattaaattcttcaattattcaaaggacaccctaaacactgcaaaaacttttgatttctcctttattttattatattgtttacatcatttatatctataaagtggcttacgcatcatttttatcaaagaaaaactttattgaaatacactaccattttattatgcattgtcatgtaattaaaatatttgaataatttaattaaaatattaccttattagtttatgtgttaaaacatc

SEQ ID NO: 12561 - DNA, 112 bp, Glycine max
  Clone ID: PAT_MRT3847_11134C.1
actattacaataaaaacactctaaagaggtgcgaataatgatgacaaccatagtgtcactagttgatgggttaggtcaggctcgctcaatccggatagtcgctaatggtaag

SEQ ID NO: 12562 - DNA, 665 bp, Glycine max
  unsure (1)..(665): unsure at all n locations
  Clone ID: PAT_MRT3847_111350C.1
atgcggcggaggaagaccacgccgaacgcgactacgattcggaggatcagacgcaccacaaccaccctaattcgcaaccgcacgtggaggccgaggttctctctgaccacggcgttcagatttcgcagttccccgcggtgattaagcgctccgtgaaccgccctcactcctccgtcaccgcaattgttgctctggagcgagccctcgagtccggagacaacaaggcacaaagcgccctcgatgctccgattctcgagaacgtgtctcacggccagcttcaagcgctatcgtctgttccctctgataacttcgctctcgactgtgattcctcttttgtcatcactccccctcccattttggaaggtcgtggcgttgttaagcgctttggaactaaggttcttgtagttccaatgcattcagattggttttcgcctgccacggtgcacaggttggagaggcaagtggtgccacatttctttttagggaaatcgccggatcatactccgggagaagtacatggaatgtaggaactgcattgttgctttgccatggaggaccctgggatgaggattacggtttctgatgtcagggtttgttggctggggttatggttgaaagatttgactcggattggtaggttccttgatcattggggnaattattaa

SEQ ID NO: 12563 - DNA, 439 bp, Glycine max
  Clone ID: PAT_MRT3847_111351C.1
agaaacaacaaatttgtggaagaaaatgtattttgtacgagaggggatacacaaagtttggatgcacaacaggcaaaagcttgacattaagatgctcattataatttatcctggggagtgcaagctcttaagaaaactgctgagtgtgtgattcgagctacttaaccttttctgggttatgagattcatttacattgataaatggaggcatactgtcgtttttgacacaccatgtactcatatgggtttaaattcaactagtcgtggttattttggtggcagtcattgagttgaatgctatgcacagtgggatgtgttactaaacaatttatggcagagaacaaacctttgctctaaatctatgagacatctagagtgcaactagctgactcattcttctattcaatgccagtgatcatgaatgataaccaccagtttt

SEQ ID NO: 12564 - DNA, 337 bp, Glycine max
  Clone ID: PAT_MRT3847_111352C.1
cggaagaacccgggacgacccacgcgcccgaaatagtaaaccggcacagcacaagagcaaccaaggggaaaaaaaagaacaaagaggggggccacaaaacgctagcaacagacgcgcaggcgacacagcaagggcgaccggccgaacaagagacggcaaacaaagaggcaccgcgccaaaaggcaagaaccggggccgaaaaggcccacagcgccaaggacagcacaagcccagacgaagacagagacagaaccacagccaaaggagaggaggcaaccgccccgcgagacgccacgacgaagaaaaaaaccgaagacgccaccaaacaaaagacgga

SEQ ID NO: 12565 - DNA, 225 bp, Glycine max
  Clone ID: PAT_MRT3847_111353C.1
gctggggtatcttagtgtaacttctggggctagtcctgtgtctcgtaagatagggatagatagcactgtgcagggtctggttgacgagtttgaggacgaatgccatgcctgtgaaaggtggatgtgatgtctaagctgcggcagcgattgctgctgtgaatcatgagttgactaggcaaatgattccgcgaacaattgatatagttggacctggtggtgtgttgt

SEQ ID NO: 12566 - DNA, 328 bp, Glycine max
  unsure (1)..(328): unsure at all n locations
  Clone ID: PAT_MRT3847_111354C.1
ctattattattggatactagcccagttcatgcttcggacctaaatgccaccgattactaataaattacaaatttcacaacaaatggatagttggatactacaccattttatatacaacaagaaattagaaaatccgctttcttttctttttcttttattttcaaatcaggaatgacaggaaaataatttaatagaaatgacatacaaattttccggagaaaaagtttagggagtacaaatagatgaataacatttaactagcgaataatgaccagnnnngngaaattgaattcaatgagagggnnnnnntagtttaataggtagagtg

SEQ ID NO: 12567 - DNA, 485 bp, Glycine max
  Clone ID: PAT_MRT3847_111355C.1
tgcgctaatatcacaccaggttctaatgcatctcatagcatagactacattctacctaaacattggctacttagtgctagaatgatcatccatatcaatatgacaacagcaaagactcactaacttactgcattaccatacttgtgcaaaaaccacatctattatatgacgcccaaacttatggatggatggaacaaccagctcattgaacgtatgtccatattcctaagaacgcattgccatatgggaaaggtgtgtacaaccaaaagccatacccttatacttcacctagcttatcaacaaacccactttgcggctgagatggacctcactatccattggtcatatgaagacagatcgtatgaaccttatgagatcgatctaacccctctgacaatgcattaacatgttgcacactcattgacatgaccgttgcctctgttgcaaacataatctaatgccaaatgctcagctagacctgcatt

SEQ ID NO: 12568 - DNA, 304 bp, Glycine max
  Clone ID: PAT_MRT3847_111356C.1
ggtgatgctgaaggtgcctctgttgatgataatccttgcggctgttacagttgctcgcatggaactgagcttcttcaaaagtgatcactcatcaagttatgatgatgatgagtctgcgataccatgctgggatctatgcatgtgcacacgctcattgcctcctccatgcaggtgagaagatattaggctgtgttcatgccactcagatggtcagagctgtatgtgcacacgctcacagccgggacagtgtcggtgtcttgacaccaactgactacgctacaaaccttgcaagtccagagatgac

SEQ ID NO: 12569 - DNA, 373 bp, Glycine max
  unsure (1)..(373): unsure at all n locations
  Clone ID: PAT_MRT3847_111357C.1
ncngaggagngtggntcgccggtttatccttccttatcnaggtagctacatcttgtctngtgctcagaanatananaaacatttgtcaacttnnnttnctctntctttnaactnccnactcctnttggggggaataccccgattctnccaaacccagtgtnncanccccaaancctntncatcatgggtctctnnatntgngccaanaancncaaagtttntcagggctcgnatngggtaagngnacttaggaaagtttnctggttgnncaggaatnctctttcaataaggtcagntntngggttcctnaatggcctaggtttctnctttgccttattanttantttcaagggccggccantgggggccaagc

SEQ ID NO: 12570 - DNA, 197 bp, Glycine max
  Clone ID: PAT_MRT3847_111358C.1
ggccgcccttccttttgtagattattttggttcaaagccatatgtatctaaagcgggtccacatctataggggccccatattacacaccgaccttggtaccatgctccactgtctctttcaatttggaccatcccaaattaaaaaccgaaccgcgtgatcactttatccgacaacttcttgatcttgaccaaaatca

SEQ ID NO: 12571 - DNA, 493 bp, Glycine max
  Clone ID: PAT_MRT3847_111359C.1
ttttgttttttttttttgttttttcttgaaaaagagtcgaatgactatctggcgaaagaaaactcatacactgattgaataattaaattcctttttgcctccaatccactgggtatacacacgccagaaagccgtttttgacgcataaaaagggaacatatatctttatggccaacgtaataaactgaaaacactcttgcatcggggacagttaaaaaccaactactcgcatgaaaataaagccttttttttttgtctcccacggagccaaaaaataaaggctattttaatactaccgaggatttggttatgtaaccttcaccaattgctctatgctttgaagttagctgctgtgcattaagaacatgttccttttttttggccgaaaacatagctgttgtttcttaaatacccttgaggatggggacaaagaagttatatatttcaatcggagcttatgccttttgcttctcgaggtcttcgtccaactttt

SEQ ID NO: 12572 - DNA, 505 bp, Glycine max
  Clone ID: PAT_MRT3847_11135C.1
ccccattcctgattccattccgcttcctcctactcgcgcaaaaacggtaatttagaaaacactttccctcccaaaaccgccacaacactacacaccaacttcacggttcccgccaaaatcgatgctagggttcactctcccgctccagcttcgctgctgccacctcccgcaacaaccgccacttcccaacccgatttcgcccaaacccttctacccgcccctcgttccctcccttccccggctccgaaccggccccagcctgcgcgcgagttttccagccgggtccggtccggtttttttccgaggatgagctggacgtggagctggggcggctgttggcgctgctgccggaggagatgcggcggcgcgtgagcgaccaccccgagctgccgcagctgatagaggttgtcatggatttgggacggaaacctctcgcagggttccgaccggggatttcgtgatatcggagtatcctatcacggttcaggatatcgagcacgccact

SEQ ID NO: 12573 - DNA, 314 bp, Glycine max
  Clone ID: PAT_MRT3847_111360C.1
cagtatgaaacacttgcaagttgcaactagaaatgtatgtacaaaggccatttattgaagccacacaccagttttttttatcgatcggcaagccacaacctagttacaagagacaacggtgcagccatataatggcaaagacaatatcacagttttaacatgactaccagaaacaaatgatatcttgagcgaataactatggcttaaataaatataaaacacttgcaactagaaatatatgtacaaaagttatttgatgcagtcaccatgactcagttacacgagaacatagtgctgcgatatgcatgagcaga

SEQ ID NO: 12574 - DNA, 1310 bp, Glycine max
  unsure (1)..(1310): unsure at all n locations
  Clone ID: PAT_MRT3847_111361C.1
caacccaatccatctttttatatccacaccaccaaatccntnttccaatgcttcttcttccttcttcttatttcaatttcaatcactactacttcacgcttttgcttctcgatttttaaaccctaaatctatctatctgtctaatagataagatagggcaaaaacaaaacaaaacaaaataaaaccctagccaaagaaagaccttgttgagcagcagcagcagagagagagaggcttatggaaggagtaccgcacccaatacccagaactgtcgaagaggttttcaccgattttaagggcagacgcgctggtttgattaaggccctcactactgacgttgaaaagttttaccagcagtgcgatcccgagaaggagaatttgtgtctatatgggtttccaaatgaaacatgggaagtgaatttgcctgttgaggaagtgcctcctgaacttcctgagccagcattaggtataaactttgccagggacggcatgcaagagaaggactggctatcactggttgcagttcacagtgactcatggctgcttgctgttgctttctattttggtgcccgctttggatttggtaagaatgaaaggaaaaggctttttcagatgataaatgatctgccaacaatcttcgaacttgtgacaggaagtgctaagcaatcaaaggatcaaccagctgctcacaacaatggtagcaaatgcaaatcaagtggaaagtcccgtcagtctgagtctcaggccaaggggatgaagatgtctgcaccacccaaagaagaggatgagagtggagaagaagaagaagaagatgatgaacaaggtgcaacatgtggtgcttgcggtgataattatggcactgatgaattctggatctgttgtgatatgtgtgaaagatggttccatggtaaatgtgttaaaattactcctgctaaggctgagcacatcaagcaatacaagtgccctagctgcagtaacaagagggttagagtttgaaagctctaaacctttggatcaatcaccaattaaacagacaagatttagaatgtttgataacatttttacaagtgaaaattgcttcctgttctagtgaatggttcactttaatgactatgcagatggaatttcaagttttgctactgttcattactactgtctaatcttcttgggaattgtgttaagtagtcattgacaacaaatatattatataaatatattctgcagtttctggttttgatttgaataaatatttcatttatttctaaaaaaaaaaaaaaaaaaaaaaaaaaaaaaaaaaaaaaaaaaaaatt

SEQ ID NO: 12575 - DNA, 373 bp, Glycine max
  Clone ID: PAT_MRT3847_111362C.1
acactaacacctagcaggtctcaaaaaaaaggttcttgaaaccacaaaacctttggaaacctaagctccatggaataaagttttttataacactacaggctttaaaaccctttaaacaaggaagttattaatagcctttcctccctgaaaaagggggggcatcacacctacggattaatcttctttacaaaaggaagagaaggaaataaagttgggtcaataaggaacaggtttacaaacaggggggggacctgatttcatgtcctcaacaattagatttaaaaaagcctgcgttatagggccttttttgccatcaccaataacctggttatcccattggactacagggcaaacaaaaactccgctgccaaaa

SEQ ID NO: 12576 - DNA, 205 bp, Glycine max
  Clone ID: PAT_MRT3847_111363C.1
aatagaacatgagatcattctagtaatatcgcacatacaatagagactaagggtgggaactatctctttgtttaatataaagattaatgtactccacgtcagctgagccacagacacaggacagatccgaaattttcgacagcattaaagaaacaaagcgcagctatccaacatctgaaacatcgaggtgagagctatggggcaa

SEQ ID NO: 12577 - DNA, 116 bp, Glycine max
  Clone ID: PAT_MRT3847_111364C.1
ttaaaggacatccattttattaaaagggtattgtatttgaaggttaaatggggcaacttcccaaaccaaccaggggagaaattaaaaaaccttccggttccatggattcttccaaa

SEQ ID NO: 12578 - DNA, 436 bp, Glycine max
  Clone ID: PAT_MRT3847_111365C.1
gctcgcccttttttttttttcttgtttacaatttttctaaactttaatgggacaacacagatcaacgggctccaaggggtattttaataggccctttcactcccattacccattacatttctttttaaaatgtttgggaaactccaacatctatcatttcacaaaaatttttctccagcttaaaagcccccccgaatgactgctacaccaagtgcagagttgactccttctggatggtgtagtcaacgagggtcctttcctcctctacctgtttgcccgcataaataagcctctgctggctcggagggaaaccttccttgttctggatcttcaccttcacattgtcactggtgtcggcactctccacctctagggtgaataccttacccgtaagggtcttgactaaaatctgcataccaccaccaatacgccacac

SEQ ID NO: 12579 - DNA, 224 bp, Glycine max
  Clone ID: PAT_MRT3847_111366C.1
gccgctcgagccggccggccgggattctacgtactgtatgattaaaatgctaaatcaccgttctcatctcctatttttttgatttaaaaacgctcccgatacattacgctattatacttgatcacacctatgaaagcatgacatggttcaggcatgacctgataatattgatatcgacgcgcataggcacccaacccagacaagaataaaagaagcttccgaag

SEQ ID NO: 12580 - DNA, 261 bp, Glycine max
  Clone ID: PAT_MRT3847_111367C.1
gggcctcaggcggggtttgttgtgtgagacaccgagggacgctaggggccctttaccttgggctgcctgcgttactgcgagaacccacttcctctaacgcgctttttcttcaatgttcaaattaccatccatttgcgaaatcgcttctcagatcatcagcaaaagaatttccaaacaaccgtaattactttcctaaaacacgacgccgattctgatgaaaggccatcataggccactgctcgttgctaaggacgacaggga

SEQ ID NO: 12581 - DNA, 246 bp, Glycine max
  Clone ID: PAT_MRT3847_111368C.1
cctactcgttttttcaggagtacgcccccgtcacctcagaggagtgacgtcgttttttcctgcggtggggtgttccacaatactaaagtgtgcatgccagaacatgatgagaaaatagacgaggttcgagaccaggagaggcctccactccggtcaatcactaaggcactctacgaatacaaggaagagaacattggggaggacactgtataggttgcgatgatgatcacagcacaagccatcccc

SEQ ID NO: 12582 - DNA, 187 bp, Glycine max
  unsure (1)..(187): unsure at all n locations
  Clone ID: PAT_MRT3847_111369C.1
ggngaaatccttttctctcctctgctctgnctttcncaangttcttgctgtctacaaggaagtnattgctgacctnaagngnngntggngcttcatggattcaatttgaagagcctanccntggcntggaacctngnatcacaacangttgcnagcnttcaccgacggatangccncaattggtanc

SEQ ID NO: 12583 - DNA, 463 bp, Glycine max
  Clone ID: PAT_MRT3847_11136C.1
ggctcgagcgtgtacacctttgtcaatttaaattttaggattattagttgtaataattcacaaggtctaaatttcaataaatataacctataaaacaataaaatcttaactctctttttaaaacaatacacacaactttagcgcttcgcaaaaaaaatatgccatatctttctcataaatatatcattgcatgaagagatcaatatttcaaaatccaaaagatactctcaaactatagacgtacccacgttgatgaccgatgtcacaatggccccaaaacagatgctcacttctatggccaaactcatacccataatgacaaataacacggctttttcaaaacccacatcacagtttcctgtccccccagcacaaattacccacacccaaaagaccgacccttatccttatgaaaccactacaacacgcctaggagctcatgcctagaatattggagagctca

SEQ ID NO: 12584 - DNA, 381 bp, Glycine max
  Clone ID: PAT_MRT3847_111370C.1
gttctttcagagcatattcatgttctcatcatattattcatatgtaaaatagtgtttggtaggcctccaagctgtgataatgatcatgttcttttataaacagtttcaggataacattgaactcttttgtcagacaaggcgcaatattaataccgttcttaatgaaatgagaacgatgcctggcataatgagccaaatgcccccttttcctgttttcatgaatgaggaacttgcaagtagtatattacccaataaatctgaggcagcaaattattgaccccatttaagattgccaactcagtgcacaagtctggagttgttgacatttttgaatggaaatcttagctgaatttttttgggtgctacatgcatttgttgagc

SEQ ID NO: 12585 - DNA, 1171 bp, Glycine max
  Clone ID: PAT_MRT3847_111371C.1
accagcgtccgcgctttaaattcaaacctcaccctctcattgaaaacccagtgcccaaaccagaacaccgaaattgaaaaagctgcagatacaaatcccaaagtgccagattgagctttgctttcgtcttcttgtatcagtgctgcgattcgtttcgatttgaggagcatggaccttcagaacactgtcaaagaagccctaaatgcactgtaccatcaccccgatgatgcggtgcgcatgcaagccgatcgctatctccaggatttccagcgaactttggacgcgtggcaggtgggtgataatttacttcatgatcccagtagcaatctagaaactttgatattttgttctcagaccttgagaagcaaggtacaaagggactttgaggagctcccttccacagcttttcggccgttgcgtgactcattgaataccttactgaaaaagttccacaagggtcctccaaaagtcagaacacagattagcattgcagtggctgccttggctgtgcacgtgcctgcagaagactggggggatggtggtatagttaaatggcttagggatgagatggattcccatccggaatatataccgggattcttggagttacttacagttctaccggaggaagtattaaattataagattgcagctcgcccagaaaggcgacgtcaatttgaaaaagagcttacatctcaaatggaaattgctcttaatatcttgacagcatgtttgagtatttctgaacttaaggagcaggttcttgaggcatttgcttcatggctttgtttgttccatgggattcctggatcagttcttagttctcatccgctagttctcactgcgttgtcaagcttgaattctgagttactttcagaggcatctgtaaatgtgatttccgagttaatacactacacaacagcaggaaacattgatggtgtttctgcaaatatgcccttaattcaagtcattgtacctcaagttatgaatcttaaagtccagcttggtgattctacgaaggacgaggaagatgtgaaggcaattgctaggttatttgcagacatgggtgattcatatgtggaactgattgcaactggttcaaatgaatcaatgttaatagtgcatgcattgttggaagttgcttcacatcctgaatatgatattgcttcta

SEQ ID NO: 12586 - DNA, 262 bp, Glycine max
  Clone ID: PAT_MRT3847_111372C.1
atttgtcctttcaaatgtttgtgtagtgtgcaaaagtttcaaagcctcttaagaaagatcggcgccacgaaatttggaatgcgttgcttagactttggttggcttcatagatgcataatagggcttgatataaagttattgcaagatgctatgggtcaaacacttcttactctacctctaaatcaacaatacatgctcttcatggaatggttcaggcacttcttaagccattgaactgaatgttcaaatctaaacaaggcat

SEQ ID NO: 12587 - DNA, 587 bp, Glycine max
  Clone ID: PAT_MRT3847_111373C.1
gttcaagctccgcaagactttcaaagtaactctaagatgagaccaaagatatttcttttcggcgattcaatcactcaggattcatttgctgaaggtggatggggtgcttctctcgccaaccatttctcccgcacggtagatgtggtgttaagaggttacagtggctacaacacaaggtgggtgttgaaggtgttggagaaggttttcgctgcaacacaacatggtgatggtggaatcaatggagcaccagttgctatcactattttctttggggccaacgatgcttgccttccagatagatacggtgcttttcaacacgtgcctctccttgagtataagcagaaccttcactctattgtgtccttcttcgtgaagcaatggccaacaacacatattctccttataacaactcctccaattgatgaagaagcacgtcttagatatccatatgcatacaatccacagggtcttccagagaggacaaatgaagctgctggtgagtatgctacagcatgcattgctgtggctgaagatgtggagtacctgtgattgatctctggaccaaatgccagcagtgccctgactgg

SEQ ID NO: 12588 - DNA, 623 bp, Glycine max
  Clone ID: PAT_MRT3847_111374C.1
attttaattagtttttacgtctctcctctttcagattttgagtctaagaacctgattattgaggtgataaataaatctgttaaattgcataagattacccgtcatctagtgaagcattgttctttattttcatggttttcgtctctcatctccgttgccagacagaggcttaatggaaatgaaaataaacttttcttgaagcatgtgttggtagcattgaaggtaagcaatgatgttatttcatcaggaggcatctccaagtggttgcaaaatcatggccttgagcagcttatggagctttcatccaatctatttaatttcttattccaggatgcaacattgacaaatgaaactgtagtactagttaatccttttctacgaatgatagcatcagtgttgaaattatctcaaaaaaggaaaatatatcagccacattttaccctatcaattgagggcttgtatcagatgtaccaggctggcagtgtgtgtaatcaagccataaaaagcattaaaccagagcttgcgcttgaggcatacttatgaatgcacctcctgtttccatttcatgatgaatcaggaaaggctacaaagctttcttatccgggcaactacaactgctttac

SEQ ID NO: 12589 - DNA, 306 bp, Glycine max
  Clone ID: PAT_MRT3847_111375C.1
gggaggaaagggcatccagatttagttgggtccagaagctttcattggttgaatcaagagaaccgcgctacaagaaaaatgacctttttttattgacagaaagccgtcgctttatattaaaaatccggaggtaaatgtatgatagacttcgccttacggatatttcttccggccactttgggggacatataataacggatgattgggtgccactataagctttacctgctgtgtatagaggggagggaaaaggcattaaactgtgctgacctcttctaactgaaggtaaaagtctttaatatgtgg

SEQ ID NO: 12590 - DNA, 345 bp, Glycine max
  Clone ID: PAT_MRT3847_111376C.1
gtgacccctactcctgctcatgcggctgttctctcttatgtgagccagaatcaaaggaaacacacgctgaggaaaaactggttctgcgcacgctgtcttgatctattgaataaactcatactttttgttgtccaaagaataaaaaaatggttggaccatcttgagcaaggcacttttgactatgcctctgtcctgaataccattctctagtaagagtgagaaacgttagaggaactctctgactccctcggatgcaagtgggatgccttacaccccaacccgatcgtgattaagcctattcctttaccattgtttgtgcacgaacttaaccgatgctggggagac

SEQ ID NO: 12591 - DNA, 144 bp, Glycine max
  Clone ID: PAT_MRT3847_111377C.1
ggccgcccttttttttttgttttaaattggtaaatatggaacaagggcaaaagatttattaaacccggtaagggccaacaacgtaggtacgtggagtgccttgggggacttacccacttaacataaagtgcctttaccaaacat

SEQ ID NO: 12592 - DNA, 102 bp, Glycine max
  Clone ID: PAT_MRT3847_111378C.1
aaagtacccaccagggttttcaactaagtctattcgtttggtcgaattcccaccaagtcagccagggttgtcagtagctatagtataggatcgttctgcgac

SEQ ID NO: 12593 - DNA, 220 bp, Glycine max
  Clone ID: PAT_MRT3847_111379C.1
taagaaaaatgaggttttcttggatgtggtggatagtgtttatatactggccactagcaatggtcaaataattcgatctgacttcgtaccggcgcttaaaataagcccgtatatggaccgtatgcctgaatacaaactcctcttcaacgttttatgatggatggatgctcaatgtggatcatccactggaatggctattgacttttaaaaaataatattt

SEQ ID NO: 12594 - DNA, 453 bp, Glycine max
  Clone ID: PAT_MRT3847_11137C.1
gctacccgaccttacaccaaatccagttttagagaaggatttgaagtttcatttttgacttgggattgtttaacttgagttatgatcatgacttgaggtttgaatctgcatttagcatgtcttgttggctagagttaagatgtggagaggtatgcttaatccttgctacctagtatattttaaaagatatcaggttatttaccccactgaaaatattagcattgatctctaataaactatcctctaactccccaaataaggtaatcttaagataaagttatcagatatttcttcaatcttcagcgtttttattgttatcttgagctgaaatcgaaggatccagatgtggcagtacctcctcttgatgacacactcaagaaagttacagagcctgatgctgacctgcttttgccaatcaaatctgtaatagactcatttcgtaggtctttggag

SEQ ID NO: 12595 - DNA, 379 bp, Glycine max
  Clone ID: PAT_MRT3847_111380C.1
ggggtacaacccaaggggccctttgcatatataccatatatgctccgaataccaagggcaagtacctggaacaatatgggagagcagtgcttatacaatggtacagataggaaagtaaattaatacagtcaaatagaaaccggaccaattacaatttagggttgacaaaagtatgcccggaggcagaagcaaaaaacccttcgggacaggccattattttacagattggttttacaagggatgttaaaagaaaaattgttttaaaagatactggagaggggagactgggccttttatgaaacgggtgtgttacaaattaaaccatggcgttaaatttcaagggtcagtttaatgcgacaccaagttatttttttacctt

SEQ ID NO: 12596 - DNA, 410 bp, Glycine max
  Clone ID: PAT_MRT3847_111381C.1
cgggaattaaattttgatctaaatttttacctgccaatgaaatcaaatggggataggcgaacgaaaaaagaatgtttgttttagccgcctactaaaaaactacaaccctgtcttgttcaaaaaacaaaccattgaccccagggggtaatttttggcatgactttcctttgtggaaaccaccccgatgaaaacactcgggataccgttggggccgtatttccatttggggctcgaacccctctaattcccctacccttgggaccaatttgctaactgaagagggggcaggaaatcttgatcaagctagggggccccaatcacagattcttggggtttacaacatccttggcaagcaagaaacgaacccccctaactaaatattttttttttatgaacaaaacggggggggc

SEQ ID NO: 12597 - DNA, 541 bp, Glycine max
  Clone ID: PAT_MRT3847_111382C.1
cgtgaatcatcgttgttgtcaaagtttaatctctcattccgtgttttccccagattttgggttggctcggcattttaatggttctgtttctcgggtggctgaggaaagagaatttcttattttgatttcatggatgggtgtatatatattagttcgtcagatgatgacttggaggagatagatgatcaagggaggacacttccgcaatgggctactactactgtaaagagtttggataatggtggatggtctaggcgggatagtttttcaagaggggcaaatagttcgaacccaagctcttctaatgtttataatcattcacaagtcaagcctcaaaccccacccgtgtccagcaccaatacactgaaccacagaattgcacgaagagatgaaccttcctaccatgcccagaatggaaacacaagtcagcatcagacagttaattcccgaatttcaaataatcatggtgcagattatgagaaaatgtcatctcagcaagctttcaagaggacccttcagtcatctcttcaaccttcagcaa

SEQ ID NO: 12598 - DNA, 1036 bp, Glycine max
  Clone ID: PAT_MRT3847_111383C.1
attgaaaccacaaaaaaagttagaggtagaagtgtcagaagatctggatttgaacaaagtaaagaatgcagaggagtggaaaccagagaaagcagcagagttgaaagtgtcaaaagttctggatttgaacaaagtaaagaatgcagaggagctgaaaccagagaaagcagcagagttgaaagtgtcaaaagttctggatttgaacaaagtaaagaatgcagaggagctgaaaccagagaaagcagcagagctgaaagtgtcaaaagttctggatttgaacaaagtaaagaatatagaggagcagaaaccagagaaagcagcagacttgaatatgtcaaaagttctggatttgaacccagtagatgatgtaaaggaactgaagccagaaacagaaacagtgttaaaaatgtcaaaagatctggagttgaaaatagtaaagagtgttgaggaactgaagccagaaaaagaaacagagttaaaaatctcaaaagatatggagttggaaactgtaaagaatgttgaggaactgaagccagaaaatgaaacagagttaaaaatgtcaaaagattgggagtggagaacagtaaagaatgttgaggaactgaagccagaaaaagaagctgagttgatagtttcaaaaagtatagaggaggtgaaattattaaaagctattgaagagatgaaattaaagctagatggacttgagtcaaaactaaatgagtctggagtaacaatatctaagttaacagaggagaggatgctcagcaaccaagagacaaaaatcttgcaagaaaaactagcagatcttattaataaaggtccaagaaaagttcaagtcggcttcccacttctatatgtctgtatggtggcacttatctgtgtcttcttgggataccgtttacactcttgatacctggccaatcaatcatctgcaggaagctactgacattttgaatttcctcgaatttgttaatagcaaaagtttaggcataaatccactttatatctatgaatgtaatagtaggggatctgtaca

SEQ ID NO: 12599 - DNA, 359 bp, Glycine max
  Clone ID: PAT_MRT3847_111384C.1
aagaccaaatgtctggatattctaatcaataatccaggtatggcaaaacatcaattcaatgatatgttcaatatgggggagagaaaaacccaaatgtcatgacatggtatccttcccctccacccataatatacgtcaggtctttcttgtaagtacaggaattgcctcctctatagcctgagcaaaagttgcaatctttgatgtgaaaaaacctactagcattggtatcaattctcagtgcatcgatccaaattacggaaccagaatcgcattccagctggtctagaccctgaccaaaacgacccgaaccagtaatcttggctgtccaattgctgccttaacaaattcctttagaccat

SEQ ID NO: 12600 - DNA, 256 bp, Glycine max
  Clone ID: PAT_MRT3847_111385C.1
cccacgcgtacgcccgaattttactttataaaaaacgattcattgatcggtggaacgtaacggcattttctctctcacattcatcaagctctcattcgacagccgttgaggacagattccctgaacatagccatcaagtacttcctcaaatcactccgacggctttcccattctatcaccttcgacagtacctaaattactatcatcaattgttgtttccaaattaaatataccagctgtgatgtctttattcttc

SEQ ID NO: 12601 - DNA, 1814 bp, Glycine max
  Clone ID: PAT_MRT3847_111386C.1
gcacgaggcaaccgcaagtgtttgttatgttcgccccgtcgccgctttggcgcaagcgcacaccacaattaaagaatcattccttttccctcttctttcaagcaaactaaggccggtggcagcagtagcaagcgcacaccacaatcaaagaacaatctccactccaagcaaagcgaatcagagatccaaactcagttctccaactctctgatctcaacttccacttcagcttcttgagccatggccaacgacgattgctgcgccacgcaactcatcgacggcgacggcgagttcaacgtcgccggcctcgacaactttatcagaaccgtcaatctcgcctcctgcggcctctcctatgccgtcgtcgcaatcatgggacctcagagtagcgggaagagcacgttaatgaatcatcttttccacacaagtttcagggagatggatgctttcaggggaagatcgcaaacgaccaagggcatttggatagccaagtgtgttgggattgagccaagcacaattgctatggatttagagggcactgatggaagggagaggggcgaggatgacactgcttttgagaaacagagtgctctttttgctttggcaatatcagatattgttctgataaactgtggtgtcatgatattggtcgagaacaagcagcaaataaacctcttttaaaaacagtttttcaggtcatgatgcgtctattcagtccccggaaaacgacattgctttttgttatacgtgataaaacaaagaccccacttgaaaatttggagcctattctaagagaagatattcagaagatttgggatggcattcgaaaaccccaagcccatctacatactcctctttgtgaattttttaatgtggaggttactgctttgtcaagctatgaggacaaggaggacaagttcaaagaggaggttgctcaattacggcagcgtttcttccattctatagcgcctggaggtctggctggtgatcggcgtggtgttgtgcctgcttctgccttttctattagtgcacaacaaatatggaaagtcatacgggaaaacaaggatctcgatcttccagctcataaggtaatggttgcaacagtgcgttgtgaagagattgctaatgaaaaacttaaccgactacgctctgacaagggttggttggaattggaggaagctattgaattgggtcctgtacgaggttttggggaaaagcttagctccattattgatgcctgcctttcacaatatgatgaggaggcaatcttctttgatgaagctgtgagaaatgcaaaacgaaagcaattggaatcaaaggctttggatcttgtgtaccctgcttatacaacattgttagggcatatacgctctaaagctctagatgattttaagactaagctggaacaatcactaaacaatggagaagggtttgcttcatctgttcgcacttggactcagtctattatgcttcagtttgacaaagcatctgctgatgctgctgtaagacaagctaattggggtgcttcaaaagtgcgagacaaacttcaccgtgatattgattcacatacttcatccatgcgcagtacaaaactgtcggagataacagctaattttgagaaaaaattggccaaggcgttgacagagcctgtggagtctctctttgaagcaggtggaaaggacacctggctttcaataagagagctacttaaacgtgagactgaaattgctgtatcagaattatctgcttctgttgctggttgtgagctggatgaagatacagttgaaagaatgcagcaaagcttaatggactat

SEQ ID NO: 12602 - DNA, 396 bp, Glycine max
  Clone ID: PAT_MRT3847_111387C.1
ttcttatggggatttttttggcccagaacaaaaagaggcactcggggccggttctcacgggcactgtccctcacccagatgaaaaagaccagagcctaaactctacttttgcttccagatatgtgcgtgaacctctttcacatttcatcatgccatagaactcaattccaaccgattcatcctttcacataataaacgatgacttgatgttggatggtgcaccaaagctcaactccgcttcgatcgtgaccacttggattgatcctgcgtatcacaagctcataatgtcttcacttaacaaaaactatggaaatatagataagtatcctgtcaccactgttctccagaacctttaccttaatatatttatctaacctattccatgctcctattagt

SEQ ID NO: 12603 - DNA, 420 bp, Glycine max
  Clone ID: PAT_MRT3847_111388C.1
ggcaagccttatggaaccccttttattgatataaaatttgactattgggcataaatcaaattaacaaaatttcccttgttttagggaaaaacaatacaaatcctgctccaagaaaaaaaactaaaaaaaaaatcaaaaggggaaaaaaaccggggggaaaaaaaaaaaaaagaagggaaaaattttttttgtttaggggggtttttcatttttactgggcagctaaaaatcattttatagctttcacattttaaacccgattttttacttttcaaagaattcttgaacaagccaatcatggcaaaatatcatgctcaaaaacttgggcaccttttcatttttccccaggaataaaaggcacaggccccccttttgaaacagggcccgggcaaaagaaaaaacccttttcatatttttttg

SEQ ID NO: 12604 - DNA, 467 bp, Glycine max
  Clone ID: PAT_MRT3847_111389C.1
aaaaggacttgtcactattatttacatggggacacgttaactgtaaaccaaacaaaccctccaaaataaaaataaaaaacacaaaccttcagtttcatcgttttcctagctttgcaactgaatctccacatcgttcagttacttttgcctatgagactattataacaaatataggcaccatagtatctttcattttcagttcaacttactatacacagaattttgaaaccaaatttaatgacccccccaaattgaacgcaaaaaaaagaatgataatgttttcataaatttcattttaccaccaacatttgtaatggatatccaaataagcactatgcaataaaaggtaaagaaaaagaaaattttaaacctagttttttgagctcataaatttggtggtcggaaaattattattaaaaaaaaattgtcaaaagtgaaaaaggaatgccttgcccatggggttggaa

SEQ ID NO: 12605 - DNA, 985 bp, Glycine max
  Clone ID: PAT_MRT3847_11138C.1
aacagatgctggtttatgaatttatgtctaatggcacattgagggatcacctttctgttacagctaaagatcctgtgacttttgccatcgtgatattttcaattatcgatggacgaatgggctcttatccatctgagcatgtggagaaatttttgactttggccatgaagtgttgcgaagatgagccagaggctcggactagaatggcagaagtggtcaagagagcttgaaaacatatggtctacaatgccagaatcagataccaagagagctgaatttatgtccagtgattctggcaaagcagacagtcacagtacaccatcttcatcttctgcctctgcttctattatgaagacaccttttgtatcaggagatgtgtcaggtagtgaccttgttagtggagtgataccaagcatcaagccaagatagaactatagaagttgaaaatgattaccttcataagttatggtagatccaatgtgagtttgccattaccctgtgcattaaataatgtgaccatatggtactacttttcattctcttctttgtacaatatgatccactgatagagctctggctggttaataacatcgattttgtcaacatttaagctgacgggttgtttatatatatattgctagtgtttttttttccaagagagctgaatttatatccagtgattctggcaaagcagacagtcacagtacaccatcttcatcttctgcctctgcttctgttatgaagactccttttgtatcaggagatgtgtcaggtagtgaccttgttagtggagtgataccaagcatcaagccaagatagaactatagaagttgaaaatgattaccttcatcagttatggtagatccaatgtgattttgtcattgccctgtgcattaaataatgtgaccatatatggtactacttttcattctcttctttgtacaatatgattgactgatagagctctggctggtaaataacatcg

SEQ ID NO: 12606 - DNA, 213 bp, Glycine max
  Clone ID: PAT_MRT3847_111390C.1
gtgaataatttcttggtctggatttttaatgaaacttcaagttttttccttttgtctggaactctatttaacatactagttgctttatcctttaaaggtcaaaaactggaatgaaactcccagtttttttgaaataaaataaacacaagctttggcattaagaaacttacgaattccattcaaaagttgaaactcagggccttggccaacaaa

SEQ ID NO: 12607 - DNA, 346 bp, Glycine max
  Clone ID: PAT_MRT3847_111391C.1
ggctgcggttgcagccgaggagcctgtcctgcagtcgggggctctggaactggcagcgtaagtcatattgctacaaagaccagggttagacctagagcacgtgctagcacggtacagcacgttgatcgtatcggcgtagagacatccatgcttgagccaatggctcatcagcatggtggcatcagtgctgcatctggtgccactgctcatagaaaagttgagcgtgatcagcatggtatgacaggaatgctctagaagaagggtgtttttctggtgaatattttgtccagagtgagcaatcctgttagagaaaaagacactttttagggatggagcttttgtagtc

SEQ ID NO: 12608 - DNA, 198 bp, Glycine max
  Clone ID: PAT_MRT3847_111392C.1
gtttttccttttttttttaaaacagcacccacttcacacattattacgacactcaaaagaggtgtggaaattttcaaaagggcagagcatacttaacaagagggttatgcctaacctcctttattgaatcaaacaaaccaaccatcgaaagaaaacaccaattccaggatcatgcatcaggatacccgcattttccga

SEQ ID NO: 12609 - DNA, 292 bp, Glycine max
  Clone ID: PAT_MRT3847_111393C.1
tttatttttctttttttttttttttttttcttctacccccttttcaagttggattggtcctagacggttacatcggatgttctgacagtccaacgtcccttggggacaagccaacaccaggctggcacccgcgctttagtggcagtggtaagggacatagaaaagagccggcggaggctgaggaagaacagcaaccccttctcttaaagctcgaacagggccttgctctcgaaggggtcagtcacttctctagtgctgacctcaaggatcctgttgccggggaagaggttga

SEQ ID NO: 12610 - DNA, 110 bp, Glycine max
  Clone ID: PAT_MRT3847_111394C.1
ctctgtttgaactgacgccattggatatattaataggggagagctgtagaaggttgtggaaacacacaataataacttatctgcactaatggaaacataaccaccaaccc

SEQ ID NO: 12611 - DNA, 2561 bp, Glycine max
  Clone ID: PAT_MRT3847_111395C.1
ctgagaagtaagacaagagcaaatatcaaggttactgccacgcgtccgcaaggatgcagctgacccgacacacacatgtgctatggagtttgataattttgtcttgatcactggtgaatcagaagcagttaaaagagcactatttgcagtttcctctattatgtacaagttcggtcccagggaggacatctctcttgacacagctgtaccagaagcccctccccgtattattattccctccctgatgttccagtttatcctcccggcggactgtatccagcttcagatcctattgtcacacctagagcagttcctcaaattataggcgcaacaaatgtaccagatctgcaaggttatgctgatgcagaaaattcatggcctctgtactcatctgcccttcccgtcgtttctggtgttggtgcttcccggtctgaggagttaattattagaatgttgtgtccctctgacaagattgggcgtgtcattgggaagggtggtagtacaattaaaagtatgaggcaggctagtggtgcccatattgaggttgatgattccaaggctaattttgatgagtgtttaatcattataactacaacagagtcgccaagtgatctgaagtccatggcagttgaagctgttctgctgatgcaagggaagataaatgatgaagacgataccactgtttcaatccggcttctagttccatccaaggtgataggttgtattattggtaaaagtggttcaatcataaatgaaattcggaagagaactaaggctgatgttcgaatctctaaaggtgataagccaaaatgtgcagatgcgcgtccggaacttgttgaggtgggtggctcagttgattgtgtgagagatgcactaatccagattatcttaagactcagagatgatgtactgagagaaagggatactggccataatccttcaataggtgctgaatccttgtacccaggtagcgctggtctttcattgccatctatgatgcattcagttcctcctgttgctgctccgatggtttatgatcatagggctgaaagtggagctggccttggcatgctttcttcaagcagtctttatggtggatatggatctttgtcgatgggggataatggctatggatctatgtcctcatatgccaccaagctgtatggcggtttgcctcccccatcaactctggatatgttgattcctgctaatgctgttggtaaagtgttgggtaaaggaggggcaaatatagccaatatcaggaagatttcaggagcatcaattgagatatctgacaacaaatctgctcgtggtgatcgtattgctcttatatcaggcacacctgaacaaaagcgtgctgctgaaaacttgatccaggcttttataatggcaacctgaattattgaaattctttcccggggtattgaaggtgaaaagtttaattcttgaagtatgttcttgttcctccttattctgttaggttggtcctggagagacaatgttctctagtgtttttcagcttgacacctgcttcttccacaacagtggctaacaagaccgtgcctgaggatccattgctggttttttatgtagaaattatagttcctttccttttgtttcctcttaatctactctcatctgggttttatcttagaaatctaggatctctctgtcctttcatgatgtttgtctttgactagtgtgtagtcatcactatctccataaattattctgtggaaccataaatcggaatttattatgtttctgatgactcactcttattctcctttcttgctgaaaatatcttccctattgatgcaaaatgagattctgggcctttagcaatctgtgctttctcatatccttggttatccaagtaatttattcaaaagtggggaagttgcctcatgaattcaaacgatttcagatcattttcttcgccctaattctacttccatgtcttggaattctgtcatgcatgaggacatttacagctagataacatataaccatcttgttgtcacaccaaacatgatgtacaaaaatgctagaagccatattttttgtggttaaaatattaagacagaagataaatacaaagtaggaagatacagcttcttcttcttggcatataatgaaaacataagacattaagaacaaagaaaaggatcgtgagttgactcttggatggttgaatggtttcctattactgttttgatccaacagaatgtgagaattctaacaaattttttggttgtgtagctcatgcatattatctgaaaagcctctgggttttatttcggaacttgtacatgctttccatttcttatgtcttgtgatggatgtcactcacagaaaatatttgctaaatatctccagtggaatttgaacctctgcactggaggtaaagtttgttcacatggtgctcagtttgtcagctgagccacaccttatgtgtgctagctgtcacattttaatgtagcaagccttctcttccaatatgattcagaattgggtgattcgatctcctaaattctatgaaaggggctgttgaaattata

SEQ ID NO: 12612 - DNA, 699 bp, Glycine max
  unsure (1)..(699): unsure at all n locations
  Clone ID: PAT_MRT3847_111396C.1
attgaattccatggcggccgtaagagaaaataattgaggtcaatagaaataaaatcttgtcgccatctcttctctcttttcgccggggaattgcttacaagctttttgttggagctagcttcttgacactaggattgtccttctacaccacagagaatgcattatcagaggcattctccaattacgggcaagttattgaagccaaaattgtaacagatagggtgtcagacagatctaagggatttgggtttgtcacctttgcttctcaagacgaggctgagaatgccatagaagatatgaaaggaaagacattaaatggacgtgttatctttgttgattatgcaaagcccaatatcaacactcgtggtgaaattccaattgccagaggacctcctgagccaacatcaacaccagatacttgattttccctcagactatatgatatatataatgtttaatatgtacttgagcaagagatatgtagaactgagtttttttgaggatggaagatgcattatgcacccaacagttaaatgcattgctcagcacaagtgtcaactgaagggtcgatgatctggcatctggagaactatttggatcttttaatgaatgatatcatcgggctgttacgcacggccgaattatgactgaactcaaaggcnaattggacatgccacatctttagctatggaatggatg

SEQ ID NO: 12613 - DNA, 405 bp, Glycine max
  unsure (1)..(405): unsure at all n locations
  Clone ID: PAT_MRT3847_111397C.1
aagtacctgagcggcagatggctcccaggtatcatctttttggctgtgttatgcttctcagcactgtcactgagtcgttgtcttgcggaccctcatgatcatgcgatcccacaacaagaacagattgccctacactctctctgttaatcattttgatgattggacttggcaggaaatcaaacacacagactacgcgctgcccaaaattgntctgccactcccaacggcaaccacaagctcactgatgctgtgcgtcctccgccgaaagactggaggaaagaaggaatagagagaggggggaaagatcaaggcagcctgcgggtcatgctgcgacatcccgcacaactggccgctttacaaccagcctatgcacaaacatttgggaagactatctctctttctgag

SEQ ID NO: 12614 - DNA, 362 bp, Glycine max
  unsure (1)..(362): unsure at all n locations
  Clone ID: PAT_MRT3847_111398C.1
gaaccggattcccaagtttttgggatactttgagagggtgctcaaggggaatgagaagggcgagggtaagttccttgtaggggataagttgagttatgcggatacgacgctgtggaacgtgttgagtgggttgctgtttgcgtttcctaaggagatggaggcgaggaagggtgattacgagctgctgttcgggacgttctatgagagtgtaaaggaagcaagcgggatcaaagagtatctggcaagcgagaggcgaaagccgttcagcatgggcgtattcaggcattaccctgagctggatcgtcagtagagcaaatgcgcggcaccaggacattgcagtgaccatcacangtaaagaaatc

SEQ ID NO: 12615 - DNA, 318 bp, Glycine max
  unsure (1)..(318): unsure at all n locations
  Clone ID: PAT_MRT3847_111399C.1
tttttataaaaattcaccttaatgtatcactactgtttttcagctttattttattgtgggggaggaaacaaattctttttgccaataaactttggacagaagggtgggggaaacacaagctgaagggataccaagttccaatgggtcttccaaaaaaaaaaaaaagaaattngggggggtggcgttataaaccccctttacaggttcattaccgtgtttttgcccttttccagagtgaaaaattttgaaaagaatccgttttttaggaaataaaaggggggcttcgccgacggtttctttttgatttccgaccaacaa

SEQ ID NO: 12616 - DNA, 262 bp, Glycine max
  Clone ID: PAT_MRT3847_11139C.1
tactaatcgatcttggatgttgctacatggctgcgagtttcggtatggatggtgatagtaggacttggatactagatctatgaccaaactcacaggtcactggcgcatgcaatctatgacgcactagcatatgctgatgaaaatcatggatcttaagcaagatatattgcctactcttaacacagagcatgccaaagaaaccacacttctagtgaatatccatagggcacaaaatggctacacacaacaatacacgattcac

SEQ ID NO: 12617 - DNA, 450 bp, Glycine max
  Clone ID: PAT_MRT3847_1113C.1
acgaccacgcgtccgattaactgtttccattcacctgaaaaagaacaccgtaaccctcttcaccggtgtggctttttatacacgcctgatctctctttcttcttcaatccatcgtttctcttcaatcgatcccactcaagcttttgcaagagtctccagcgtgtcgttctcaaagctggaacagctgtggttactcctactgatagcatactatcattgggaaaacttagaactctctcctatcaccttaaatagctaaataacacctattatgatgttatattagagacttcaggagcatatcctcttggccggcaaagactaagatatcgaacattggtcaataccaccttttcagatcttcaaaatccacaaagagatctttatcggaaagcatttgcagctctaccacaaagtactctcatcgctctctatgatatcatgtttagt

SEQ ID NO: 12618 - DNA, 763 bp, Glycine max
  Clone ID: PAT_MRT3847_111400C.1
ccacgcgtccgtgcttatactaactaactcttcttgagaaactctttctcacacgccaagagtaacatgggatttccagtggggtacacagagttgatgctgccgaaggtgtttctgcaggtgctatccgtattgggcttgataagaaaactcatcaccgtcctcttgtgctacatgggcttccacgatttcttcgaatccgacattgcgtggccggagagggcgccggaattccagtcggtgtgggcggtgctcataagggaaatcctaccggtggtgaagttctcggagatggagatggagatggcggaggcgccggagagctgcgcggtgtgtctgtacgagttcgagggagaggacgagatcagacggctgacgaactgccgccacatattccacagagggtgtctggaccgttggatgggatacgatcaaagaacgtgtcccctgtgtcggacacccttcataccccaccatatgcaagctgccttcaatgatagactttgggctgcttcagggattcctgatttctattacaatcatgaatgactctagggaaaaaaaatcctagatttggggacgggagtgttctgtttaggttgttgagtatgtgttcagtgttcaatgttcgtgtaaatattatacaaaatggaaagcggagaattgttgttaaaaaaaaaaaaaaaaaaaaaaaaagatgatgagaacaaaaaaagaaagggctaagaataaaataatttaaaaacataaagacatttatttg

SEQ ID NO: 12619 - DNA, 309 bp, Glycine max
  unsure (1)..(309): unsure at all n locations
  Clone ID: PAT_MRT3847_111401C.1
tgtatgcagtgtgagttccacattttgtctgttggaagcaaatgctttgcccggcttgataaggctgttacatggggaggttcatgcaactgcttatgaagctatacagactctttccacattggttttggaagactttccccaaaggggagctcgtgtgttgcatgagtcaaatgcaatgagacccttattggaaattttgaattggggaactgattctctcaaatcagaagctataggactcttggagaaggtgtttgtgtcanaggaaatgttcgaatactatggaacaagggctaggttaagtct

SEQ ID NO: 12620 - DNA, 524 bp, Glycine max
  Clone ID: PAT_MRT3847_111402C.1
cccgcgtccggagatccgctggcgctcaactcttggccgaaagtggtcgtccaagcctaactactatacggatgatggaccgagactagaaggcacttcatactgaactcttaccattgcggaagaggaacagaaactcagtcgaagctttaccaaacaagtatcttggggaaaacactttgaattttaaacacttgagcaggggaaccaacattccttttaatgcattctatgcgctacgagcctgcaaacatgaaaccttgccctcatttaaactacctgcggcggataaatggaaattagagacagcctgtctcagatactgattcgactatacattgacacgacttattgaggaagtggtactattgagattgctaaagatctgaatgagggagagacttataaggagaccagtgatatccattggaaagactgagggatcaaattgaggtgagtgcacttgcatccaggagcccatgacttactatgatgagggggagacatatgaggatgaactaact

SEQ ID NO: 12621 - DNA, 462 bp, Glycine max
  Clone ID: PAT_MRT3847_111403C.1
ggtttttcttttttttttttttttttttttttttttttttttttttttttttttttttttttttttttttaaaaaagggaaaaaacggcccccacggaatttggaggggccggctggaacataatccccggggcgaaaaaacaaaattttttttgcccggggggccccccccccttacagggcccccaaaaaaggggggccaaaggaaggggggggcccgggcccaaaaaaaaaccccaccccagccttggggggggggcccccctatgccccccccctcaaaaagcatacccaattcacaggggggggtggggggaaaaaaaccaacacccctcccctttacgggagggaaggcctttaaaaggggcataaactgggccctgggccgggcaaaaccagcccgggtaagggttccccaccccgggggggctttattcccctctcaaatttttacgggggagg

SEQ ID NO: 12622 - DNA, 547 bp, Glycine max
  Clone ID: PAT_MRT3847_111404C.1
gaggacatgttctgggccctatctgaagctgcttttgttccccttttcctactcccttctctctctcatatttgtatttccactttttacctatttgcactaacttatatatatatatatatatatatatatatatatatatatgattttggttttgtttcttttagattaaaaaatattaaaatatgtatgtaatgttatatgccgtcatcgatcatcatttcgatcatagtagctaggcattatgatttggtaaatggcataaataattaagaccttatcaaattattttattgtttttgtctaattcaaggaagccgaatggattagccggttaccttgtagttggtgctttggtgcttatagtccaagtatgtctgattggatttagtgcactaattaacttggttatcgataatcatcggtgctttgtgagctaatgaaattttggtaattataaattgtttttagcatgaaaaaaaaaaaaaaaaaaactcgagactagttctctctctctctctccgatgacgtgtccgccggcgccgag

SEQ ID NO: 12623 - DNA, 271 bp, Glycine max
  Clone ID: PAT_MRT3847_111405C.1
gctgtcgtcgaccgagcaaatggtcttgtgcttctttcatcccctcctccctcactccctccgtacggcagctccttcccctcccttccttccgtctctccctcccttctttgtttcctggatgcatctcatgaatggtggagatcctcaccttcgcggttgcgtcggtgctctgtctctccgcaccttgttcactgggctcctacattctgcacttgtccattgcctcccgccccggagatttccacccatccacgcttatgagctgccg

SEQ ID NO: 12624 - DNA, 482 bp, Glycine max
  Clone ID: PAT_MRT3847_111406C.1
tgcgagaagacgacagaagggggggtccttgttgaattgttgggggcattctactcagagctgtgaagtgcgaagatggctacatggtgtatgcgagccccactgtttcctttgctaaaaaaagctccctttattacagggaagagaaggagaagggcatggttccattgttgctcttctccgcaggcatggcaaccttctcgtaagaaaaaagtcgctatgcttgtcgcctatgttggcaccaattaccgaggtctccaaatgcagcacgatgaacattcactctcaactattgaaaaagaactagaaactgccatattcaaggctggtgggattcgtgaaagtaattttggggatctgcagaagattggatgggctagaagcagccggactgacaaaggagttcactctcttgctacaattatatcctttaaaatggaaatccggaaaatgcgtgtgacggagacccttatggctttggc

SEQ ID NO: 12625 - DNA, 416 bp, Glycine max
  Clone ID: PAT_MRT3847_111407C.1
tttttttttttttttttttttttttttttttttttttggggcagcccaaaaaggttattatttaactttaaaggaaaccttatggtccttaacccttccaccgtttaaaaacaaagggaccaggtccacccctgaaaggggatttcgtcgaaaaccccggggagggaaacccttccccagaaaaggttcccagaaaattcaattattccaaaattttttttttaatttcaatttccccccttttattattaagggggggaaacctgttcgggggtggggttaataaaaacaccctggaaaacaaggccggggtttccaccaccgttgagaggcccggcccattaaatccaggggtgggtcaaggtccagttcacaacagcgggccaaattgtcacaggggggttaatggccgttcc

SEQ ID NO: 12626 - DNA, 266 bp, Glycine max
  Clone ID: PAT_MRT3847_111408C.1
ccaataaatttttgtacttttctccaaaccaggctccagggcgagcgctgaaactgcttgggatactacaacttaggtaaacaatgatcatggagagaatggcggatatggacatagtcaaacgtgcattcaagactttcctgaacaaatttaatcttccaaaaacttttggtgaaaacaaaacttttgtaaaaggaaaggttccttcaaaggtgacagatccaaggtatccaacatttataaccttgataaaggaagatggacag

SEQ ID NO: 12627 - DNA, 348 bp, Glycine max
  Clone ID: PAT_MRT3847_111409C.1
tttttaacatcaatggacaacgcataccacttatcattgttcccctattggggctggggaccatatacacaagtaactaacctgtaactcatatcatcaacaatgatatgactctattcaactgtacatttattggatctaccagaaattgacatcaagtgatcatgtaaaatgatcatttttcaactccacattcatatttaactccacaaaccccaatttcattcatttgatctgtctgcacaaactttcaaatctacatactaaaagctttgcaaggcttattacaaccaaggctgtaccgactaacttgtctactggtattgtggtcatatctatcactcactt

SEQ ID NO: 12628 - DNA, 341 bp, Glycine max
  Clone ID: PAT_MRT3847_11140C.1
aaccggggcggaccgacgcgtccgcccacgcgtccgcccacgctttctagaaattttctgtttgtttctttgtaaatgatggcgtgcgtggttttgcacgcgagtgggatgacatgcaatttcgatataacttgtccagcattaactgtctttgaggcaaaagaaatcaaaacagaagggtttttattcccagtaactttaaattgggcaaatgatgcggcatgagctttaagagcctgactacgttgttgatccacagagaaaagatgcatgtttccttttaccaattgcggcctcttaggagaaccattatctataccaatcaagactcaccatttttc

SEQ ID NO: 12629 - DNA, 304 bp, Glycine max
  Clone ID: PAT_MRT3847_111410C.1
cacgataacacgtagacttacacatcctgtatccacgaaaacttctttgtccctgatcgaaccctcacgatggggctctttaaccccagaggcgcccctattcaccaatacaccaccctgatatcaatccttctttgaatgctcaaaacagtccaggtccccaaggcatgacttgcacctgtcaaacgaattgtgccatcatgatgtattaggactcataaaaccattgctctagtttcggccatggatactgaaaccttacccactatgttatcctaccacctatttacccatactaccattt

SEQ ID NO: 12630 - DNA, 374 bp, Glycine max
  Clone ID: PAT_MRT3847_111411C.1
ctttgttgttttccatcctccaagtaactctctctctctctcttcctccaagtaaatctgattttggacaagtagaatctgcttcatatctctggcattgaagtctagatcttttctataactgtgttgggatttgtgtttctatgtttggactttgatccttttgtagtacttccattggttctctcattattctctgctttcttttccatggtttataattagtagccatctaaaaaggatatccaacccagaaatgttttagtacttttcttttttttttttcttctgggtctttgattttgagttcggcagaaccatcatcatgatgggttatccttcaagactctatctcgttctgcttttgtacattt

SEQ ID NO: 12631 - DNA, 545 bp, Glycine max
  Clone ID: PAT_MRT3847_111412C.1
tttggtttggttttctgttttttttttttttatcttttttttcttttcctttttgttcttttgggtttgttgttgattttctttctcaaaaaaaaggaaatccaacccccccgttttttgatcctttcatcccccaaaaaaagctttacccacagcctggacccccctcccgtaagggaatcgaggggggtgtggcaatcccccttgtcattattaaccccccccccacccaaggggccccaatgggggaagtgcacaaaattctcccccaaaaaaccatgctttgcaagtaaaaaacccaaaacacaccccgcccctgaaaagcctttcttcaagcacaaaaaaaaaagaaaaagcgcccgacccttttttttttttttatagcttaaaagagggagctttagaggcccgagaattttttgcccccaaaagacaacgagcgcaatttttgggtaagatttgttgccacctacccccaaagcacccctgtgggtgccgggccccaaatgattaccacgaaagatggcccccctggccaaattccc

SEQ ID NO: 12632 - DNA, 467 bp, Glycine max
  Clone ID: PAT_MRT3847_111413C.1
atccaactcaaaccaaaaccccacaaacctataccaccacccaagttgaggaaccacactatgaaccatcaaacgagagcagttacacagataaaatctcctccgcaaccacagcaatagctgacaaagccatcactgccaaaaatgttgtagcttcaaagctcggatacggtgatgacaccaccgaaaaaactcaaacaaatcataaagaagagaacacaagcaatgaaaaaccgtcaacaatcacatcagcaacctcagccaaaaacactgtctcttcggatcaccaagagaacacaggcagtgcaaagccatcaacaatctcttcagcaacctctgcaatagctgataaagccatatcagccaaaaacacagtctcttccaagctcggatacgctgacaacaacaccgaaacaactcaagcaagccatcaagagaacacacaaccatcaacaatctctttagca

SEQ ID NO: 12633 - DNA, 382 bp, Glycine max
  Clone ID: PAT_MRT3847_111414C.1
gccgtttgaaccttttcatgaattcaaggtttcagcttttgagtaccactaccaaaggtgatcatgatcaaggaaaagatctcgcactggtcaaagttaatgtcccatgtgctgttgatggcttgacataaagctacactccaactgcattgttggaatacgacttgcaaaaagacagatggttaattgtggaatatttagtaaggatgttttagcgtgctcataacgttaatcaaccccaagagaaagatttgtaggagggaaattcttcctttgatattaaatatcgctctagagtggaaaaagtctgctctacaaaagcacaatttgttagtggaaaaactgtcaaatatgatataattggggctggctcacattcttt

SEQ ID NO: 12634 - DNA, 229 bp, Glycine max
  Clone ID: PAT_MRT3847_111415C.1
tcttagcgtgcataagactatagagtcaactatcgcctccgcttgtggtactcttctccattcatctactgatcctgatgagtacgatcgggtccaaggtcagacccttcgctatcctctcgtgcgatgtactactacctcaagttcagctctcaccatcacagatgctatctatgctgaagagctcgtccggaccgccattccagcggactcaccggggctaggtatt

SEQ ID NO: 12635 - DNA, 356 bp, Glycine max
  Clone ID: PAT_MRT3847_111416C.1
aactcatggttgcttgatttggcctgagtaaatgtactatgattctttatctatcaactatattatataatatcctcattatcttatgactgacctggttccactcttcattccgatgaacatatttaaacttacctcatacatcaaaatcattgtcaacatattgacactgaggcctacactctactagatccttgaacttattctgtgtctgatctgattaaaaagcaacttgattacatcccatatattcaatactcttactaactacgcgagctcgtaaaacgacatactctaggaaattatacatttaaagcattacatagaatcacgcctccaaaatcgacacaaaaatg

SEQ ID NO: 12636 - DNA, 588 bp, Glycine max
  unsure (1)..(588): unsure at all n locations
  Clone ID: PAT_MRT3847_111417C.1
gaaagaaacatgcagatatacaaattaattaaactatgacaatatgtttccaacttccaaaagaaatgacccatcaaaactgttacaactcaaaataaacaaaagaatgctatgcgatttacctgagtcgtgcatgactcaggatcacgcctcgtccccatcatccacagacaggatcgagccactgttcatttgagaattccttctgactataacacagtatgcacatttcacaccaaaactgtttcctatccaaccaactcgacactgctctgcctctgcaacaaagccttactcaagtcctgacaaagcagcttctgaaaaggtaactatgacatcccatgacaatagacacgcatcttctgaaggtgacgatccaaaactactaggatgataggatggactgaagtgcaagctgctgctgaggctgcaaggatgaccaggttgaagcaagtgtagaaggtggtaaagtctgttgaagctgcctcaataaattaatcatccgactaacagtcntgttcgtttgccagattatttcccgcacataaaatctcggcaaaaactgcaacaattttggaaagaatttga

SEQ ID NO: 12637 - DNA, 333 bp, Glycine max
  unsure (1)..(333): unsure at all n locations
  Clone ID: PAT_MRT3847_111418C.1
atnnanaattttttttttttttcagccgcacccacaaaacaaaacggggggggggtaaccaaaggggaaaggtttaccccaaaatcaacgaacccgccgtcatgcaataacctgaattaacagaaaacccactaattgccagctccgcggctgtcgagaaagagcataaccatgatgttccctcgaggaaaaaaaaaacatctcaccacaaacggggtctacattttgcatgtggaggcacctcgaacgaggggcatttaagaaaaacctcatcttaaacccgaggggtatgttgaaaatgcatagacccagaacgaccacggcgcaggacgt

SEQ ID NO: 12638 - DNA, 2483 bp, Glycine max
  Clone ID: PAT_MRT3847_111419C.1
atttactgctattctggtgaatgcaaacgataagtctaatcgtatgcttcgagccaaagcaatggagtgcattagtttggtaggaatggctgttggaaaggagaagttcagggatgactgccaaacaggtcatggatgtcttgatgtcactgcaacaatctcaactggatgctgatgatccaactgcaagttacatgctacaagcatgggcgcggctttgcaagtgccttgggcaggattttctcccatacatgggttttgtcatgcctcctttgctccagtctgcgcaacttaagcccgatgtgaccattacatcagcggattctgatactgaatttgatgaagaagatgacagcattgaaacaatcacacttggggataaaaggattggcattaagactagtgtcttggaggagaaggctaccgcttgtaacatgctatgttgctatgctgatgagttgaaggaaggatttttcccttggattgaccaggttgctttcacattggttcctcttcttaaattttacttccacgaagaagttaggaaggctgcagtttcagccatgccagaactgttgtcctcggcaaaatcggctgtagagaagggacaatcacaaggtcgtgataagacttatgtgaaacagctttctgattatataataccaaatttggtggaggctttacacaaggagccagaagtagaaatttgtgcaagcatgttggatgcattgaatgaatgcatacaggtctctggatcacatctagatgaaaagcaagttcggagcattgttgatgagattaaacaagtccttacggccagttcatcaagaaaacatgaaagagcagagagggccaaagaagaggactttgatgctgaagaaagagaactactcaatgaagaaaatgagcaagaagaggagctttttgatcaagttggtgattgcttgggaactttgataaaaacattcaggacatctttcttgcctttctttgatgatctgtcctcatacctaactcctatgtttggtaaagacaaaacctcagaggaaaggagaattgccatttgtatatttgatgatgttgctgagcacggtcgtgaagccgctcttaaatattatgattcttttcttccattcttactcgaagcttgcaatgatgaatatcccgatgttcgacaggctgctgtttatggtgttggtgtttgtgctgagtttggtggatctgttttcagcccccttgttggagaggcactttcaaggttagatgctgtgataaggcatccaaatgcactacatgctgataacataatggcatatgacaatgccgtctcagctcttggaaaaatatgccaattccatcgtgatagcataaatgcagcacaggttgttcctgcctggctaagttgcttgcctataaaaggtgatttaattgaagccaaggttgtgcatgaccaactttgttcaatggttgaaagatcggatagagaacttataggtcccaacaatcaatatctttccaaaattgttgcagtttttgccgagattttatgtgcgggaaataatctggctaacgaacagactgttagtcggatgattaatttattgaggcagcttcaacagactttaccaccttctacccttgcttcaacctggtcatccttgcagcctcagcagcagcttgcacttcagtccatcctatcatcctagtagttttggtcagaagatgcgtgtctattgtcatgggatgtcatagttaccttttcagaagctgctttgtcaggtcaaattcattccttagcatcattggagtgtctttttttgagaagcagctgcgtctggttcgtgtttcatgattgctgattccatacttggttatgcaagccaggacttgaggtatggctttgtcacagaggcagagcattgttgagttggtttggatgggaaacagttttggtgtgaaatgtgtatactgtgttatagtcagaaggaattctcaaatgaacagtgactcgatcctgtctgtggatgatggggacgaggcgtgaccctgagtcatgcatgactcaggcaaatcgcatagcattcttttgtttatttttgagttgtaacagttttgatgggtcatttcttttggaagttggaagcaaattgtcatagtttaattaatttgtataatgattgttgaatccatacttggttttgcaagccaggacttgagtaaggctttgttgcagaggcagagcagtgtcgagttggttggataggaaacagttttggtgtgaaatgtgcatactgtgttatagtcagaaggaattctcaaatgaacagtggctcgatcctgccgctggtggatgggggcagcgttgagcttaagtagcgcggaggaggtgagaggcatagctgcgtgtggaggtgtgagggtgaggcgtgtggcgagtggtggtgcggagagtggtgaggtggtgagcgcggctggatgtgcgg

SEQ ID NO: 12639 - DNA, 442 bp, Glycine max
  Clone ID: PAT_MRT3847_11141C.1
tgcatacatatcaatcaatgaagatccaatgtacacatcaagatcaaatccttgcagcaccaaataaaggtgtacctcctttcctaaggcaagggcacccagatgagcacatgctgaaatgacggtggtcatagtcacttcatcaggaatcattcctttgtcaatcacgtcatgaaaaagtgctatcacttctttataccttttgttccgagaatagcaattcatcatggttgtccaagaaataatatcccttgcaggcatttggttaaacaaaaactcagcagactcagcattccctaattttccatacccatcaatcatggcattccatgtagctacattcttttcaggcatctcatcaaacaatctgcctgcagaagccatatccccatcccgaacatgagccgaaatcatcgtcgtccaagcaaaaacatctctttca

SEQ ID NO: 12640 - DNA, 534 bp, Glycine max
  Clone ID: PAT_MRT3847_111420C.1
catggtcttccattataagtagtttcagaccgtcaataattcaaccttgaaaacttccacacctacgggcatgtaacccttaaatggcagagagaaacagagcattttttggttttcaaccttgaaatttgccattggttaacgatgtaggtgtaaattctgtgaacatagagggggaaagcaaagatcgagtggtggtgattggagaggatgtggatgctgccaatttgacgagctgcatgaggaaaaaagtggggcacactgaacttgttactgttgtagagctaaagggtaaatagatatgaagaccatgccagggatatagtttttaataattattttcctacttagattagattagattagtggagtgaagtttaatttaatttagattctatatgcagagtgagcgtgtaagtaatacaaaaacatattataccaaatatatttttagtttgatctattttaataaagatttgagtttaaattttgtggataaaaaaattatgattgaaaagagaaattatcctattt

SEQ ID NO: 12641 - DNA, 247 bp, Glycine max
  Clone ID: PAT_MRT3847_111421C.1
cattttcaaagacaaacgcatgggccactggagaagagggatacagcaagctaaccgtggaacttgagaaaagggtaaatacaagggatggcattgaatgtcccaaggaggagaaacaaactcaacgcaaaaaatttgacaaaccgaagaaccgcaagtgcacaattatccctatggagatcaatcctgtggagcgtcagaagtgaaaaaatcttgcgaggtatataatgaagaaaagggacaagca

SEQ ID NO: 12642 - DNA, 529 bp, Glycine max
  Clone ID: PAT_MRT3847_111422C.1
tattttccaagaatcagcagcaattgggcggcaaagtccgactgatcgtcaccggctctgccccaattgcgccggaagtgctgcaggacttgcgcattgcattcggcaccacaatcatcgaaggctatggccaaacggaatgcactgcaatggtcaccgtcacttggccaggcgacgtcgacggcggccattgcggagcgccggccgcgtgttcactggtcaaattggccgatgtgcctgaactgaattatttcacgagtgatcggaagggcgaagtgctggtgaagggaccgtcggtgaccaaaggctattaccgcgacgcggaaaagaccgtcgaattgttcgatgagaacggctttttgcacaccggagacattggccaattgttgccggatggacggttgaaaatcatcgaccggaagaagcacattttcaaattggcacagggcgaatatgtggcaccggagaaaatcaaatgtgttatgtgcaatgcccacttgtccaagcagttttgtgacggcgacagttt

SEQ ID NO: 12643 - DNA, 397 bp, Glycine max
  Clone ID: PAT_MRT3847_111423C.1
aattcaggttaagcttatgtggaaaatttgttatacagcaacaaactacatatatgattgtataaacaccaacaatggaggggcccacacaacaaggggctacgaaccaccaaaccagcgagaaacgaaaggagaagcatgcaccaccaaatatggcatttgccggaagcaacaaaggggccccacgacttggaatgccggggtaggcccctcaagccagaaacgccttaggccctaggggaaacggactcgcgccaaaaatgaggccactggaaacccaagaggggactctactgggaaattggcataaacgggacccgccaggatcagacccccctaacaggcccatgctggccgggaaacgggcaaggctacacctaccgcacaaggggtagac

SEQ ID NO: 12644 - DNA, 319 bp, Glycine max
  Clone ID: PAT_MRT3847_111424C.1
ccgggtgcggacccacgcgttccgggcgcgcgtggggtgataacctagcacgtctgcgactgtatcgccgtgaaggttaacgatgccgttacacaagactaatgccctcacatgttctgactcatggcctcaccggacgcgtctggaatgtcgccaacacgtgctgatggcagttcaattcaacaagccggctggcggcagacttatgcggaagaggattcatgcacggttagagcatggtatgcccttaaaggagcactgaggagttccgcctcaggaagtattatgatagagcagctaacggccgcaccccaggtca

SEQ ID NO: 12645 - DNA, 284 bp, Glycine max
  Clone ID: PAT_MRT3847_111425C.1
aagagagtgactgatgttctctcttttccgtatggtattactttctctgatgagctagcatctataattctgtttgaaccagatactcctgaggaaaagggtactttattctcatattggtagtagaggacgttatgatcctgtatggatattgcattttcaattcatagtctctcaaaggcttatgtagcgcctgtggaagttgctggttcagggtggcttgcgattgcatttgttagcttgactacccagaccataggataagaagattagcgtatggcact

SEQ ID NO: 12646 - DNA, 298 bp, Glycine max
  Clone ID: PAT_MRT3847_111426C.1
gatcagactgtgaccaatgaacacgttgttgctgaccttcaacatcatgttaacaggcctgtcgatcgatcgaagttcctgtaatggaataacatcttccaacgtaagccttctggccgttttggcactggtggcccgcatgatgaaactggactcactggaagagcgatcatcattgacacctatggtgggttgggtgcccatggtggaagtgccctttcaaggaaggaccctacgaaggttgacagatctgatggctaaaacgtgaggcacggcgcaaagaatgttgtgacattgg

SEQ ID NO: 12647 - DNA, 283 bp, Glycine max
  unsure (1)..(283): unsure at all n locations
  Clone ID: PAT_MRT3847_111427C.1
tccaaagtcaccctacaacaacaaccacacacactcctcacacactaatggancnaagggcaaagaaaaacaacaacactacttctatggctccccacattgtggttcttcttttacncncccctagtggccnggaanagtggccaaggttcaagcgtgatcngtcnttggggngacnccgcngtgagacggggnaanaaanttttnanccncaacttncgggggagnatttttccncaattgggcgtgacttgaaagnggaaaancnatgggnaggtttttc

SEQ ID NO: 12648 - DNA, 403 bp, Glycine max
  Clone ID: PAT_MRT3847_111428C.1
ggtgctccacctttatcttgctgagactctgatcagttagagttgcattcatcaatgactatcacttatttacctccggagctgcatgaaatcatgcaccgaatccgactcggattccgactgggacgattcggaagaagatcccgatttccacttgctcgtagaaactcatatcaagttctcaaagctctcacttaagcacaaggctaacgccggtgggacggttagagaacttgatagtggatgattgcaagttgtatccgacgaacattggtctgaggctaactggtacacaagatccacctatcccaagcatgcataagcatttagagtacttaatagttttgccatagcaaattgtacgatttctctgattcaccttgggattcacgattttagctgg

SEQ ID NO: 12649 - DNA, 295 bp, Glycine max
  unsure (1)..(295): unsure at all n locations
  Clone ID: PAT_MRT3847_111429C.1
aggagcacaaactgcgnccagaggctnnggagcaggaagcacagcnnagagaagaacccaaggaggcanngaaggaagatctgcagcgccttagggcacaaagtactcgtttgggtgctatgggtggtaacccccctcctgggggggggttaaccagccggcaacccaannagccaggcaacagccccccnaaggggggggccccagcagcacacacaacaccagccacagggnggcaggccncccccccccncgggacagaaccacccnaacnncanggaccncaancagcaga

SEQ ID NO: 12650 - DNA, 795 bp, Glycine max
  unsure (1)..(795): unsure at all n locations
  Clone ID: PAT_MRT3847_11142C.1
gcatgcctgcagatcacaccgtcattgtagtggcacactaattttaggatggctcatgagtgcttcccttatacaccactccatgccaccattatcattgcctaatgaatgatataattgctttagtacaacattcccccaatggtcatgtgaatgatcttttgaagtgttgcctacagctaaatcaaatggtttcttcactgcctgcaatcatgagaaaatttcaaatacagctttgcagaaagagccaagaaagagtatttagtgtgcttgaagtcatgtatgggccaagaccagaatcatcacattacagccaaattttctctcttcccacacatcaaatacaaatactactataatagttactagtaagcaaagtaatgagtggacaaaattgaaccccaccggctggactaattacatgcagtaaaagattattataatgtaagatagcaatagggaaaaaaattatccatcattcttcccacacccccaccacccgaaaaaaatagtcaattctactcaatataaattacaatttctgctaaaaataagcaatcagtatttttctcaacccattcctcaaattaaatatcttatatcttaaaacatacaatcagtatcattttctccttaaccttgaatgttgtattaccattattaatataaacatacaatacagcacaaaggttgcaactcagcttcatttatgtacataattaatcttcattcaacaatgtacatgcagngagattttgatcttagcataatagcaatgccaaacattaactttgc

SEQ ID NO: 12651 - DNA, 487 bp, Glycine max
  Clone ID: PAT_MRT3847_111430C.1
tttctcgccaagataggacctaattcgggatcttggtttatggagttgaagtttcctccaaataatttacaagagttgttattagatgatcttgtgcttcagcccgtccctggattataatctttttttttccttcctttgaaaaaaaaaaagtcttatagaaagtttacaacattttaagtttaaaaatgcacctgccaatcaaaagaatttcaatcaagtgaagttatataagcgtttctcttcttttttaataaattgtttcaaatatagggaaaataagttcaacattattattcagtactttttgtcactcatatcgaaattgattaattgaaagaaagctttttcttttaatcttatcttgttcatttattgctactataataaaaaaaattctctacaaataaaaataaattatatatatatatatatatatatatatatatatatatatatatatatatatatatatatatatatatat

SEQ ID NO: 12652 - DNA, 694 bp, Glycine max
  Clone ID: PAT_MRT3847_111431C.1
gggaagtcggaacaaagtcaaaggaagttaaactctcaataaaagcacattaatacagtagcacagatgttgaaagcagtcatatacagcaatctttgttgtgacacactaaaatacaccagataacaagtcccatcgttatttcaagtccataaaatagtatttgatttacgcagctacttcttctgcacataatagagcgaaatgttctaggcagttgctgtgctagtttcggatgctgctgtttcaccttcccagaaggtagtcttcttcccagttttggaaacggtcgcaagaactgtgtctggctggacatttcccttcactaccaccttctgttccttcaaatcaatgtcatatgattccacaccatccaattttcctaaaactctcttcactgctccaacacatccttcacatgacataccaactttgaggacaacagtctgagacatggttacgggatggacgagaaaaaagaaatgaaatgatatatgattgggttttggggaagttagttttatatatatatagccaacgcaaaagcaaaggttttgagagagaaaggtcgaaagacaactttgggtggcgtgagatgagacccccttctgtcgtcttctcgcagccgtacccttctgtcgtcttctcgcagccgtacccttctgtgtcttctcgcagccgtcggacgcgtggg

SEQ ID NO: 12653 - DNA, 663 bp, Glycine max
  Clone ID: PAT_MRT3847_111432C.1
attagaacagttaaatatttattgaatcagatgtaattattgcagttctgatgagttcaagatgaacaaaatgctttgaagtccttattgatgcttgtgaattagataaatagattaatgaaacaattgtgttagtaaaacaataaacaaatctcgcattgactcaatcatcatcagcttctagattgatatgatttccaaatttagcgtataacttggcacggagatctgacataatttccttaatgtctccgcatttctgatctatttctgccatttctgactctgctcgagattttgcttcttcaagggagctctgagtgtcttcaaagttttgagttataaaggattcccccataaagaagggtactttttcaacatcaccttccagtagggcaagttcatcacacgcatcttggaggtttgttagatactcctttttagttttgatttcttctttcagttcatccaacttagcattgtgtcgtgcaaatttgttaatcatttgctggtcttcataggtgatgtgaacgtcagactccggttgaaatgaagtcttcgaatttgtggctaacgctgccatgatttatttttttaaaattagagtggttactttaaagtcgagttgaaaagttaacttgtgatctgggcgaggaaaaatga

SEQ ID NO: 12654 - DNA, 440 bp, Glycine max
  Clone ID: PAT_MRT3847_111433C.1
gacacatacatatgctttattttgcttgtttttttatttattcatagttgatgctttagtctttgtttcttagtcgggaacaacctcgttattatgagcggtgacagcaacattgtaggggtgcttattcagaaaaaagccctcaaatttgaagacaaaagaccctttcttgcctgattccccttttttttcttcggaggctgagcatccacaatgtttgattctatttggaaatataatagcttctcacccccttgtgcagacccacggaatgcaagctggggcactcgactaggtatccggcttatcactattggcttgcgaacctgcaaggaagcccctctgcgtgttctcggtattaataccggtagcaaagaaattcagattcgctgtattgttgaccacaactggataacctgctgggattacggggatgtctt

SEQ ID NO: 12655 - DNA, 355 bp, Glycine max
  unsure (1)..(355): unsure at all n locations
  Clone ID: PAT_MRT3847_111434C.1
natctcanacaacncntacgtnancncggaattcccnctcgacnnccttanctcatcgncccacancaatccactaccaacaccnctcntcnacacaccannacannnntcccnatccncacnanccaacanccancctcctaatncanagccanaacccnnttccnaaancaaantnnaanccactcanaacaccacacancatacnacttcaacnancnccancaccacnnaaaancacgnnccncactancncacagcacccacncnaacagccacananaccnccnanccntctncacnnnagcaacaaanncancagactnctcgcananacnntcctnaanancnnaat

SEQ ID NO: 12656 - DNA, 280 bp, Glycine max
  Clone ID: PAT_MRT3847_111435C.1
cttttatatatgtgtcaaatgttgcaaaatatgatctatctgatccggaacacaataattatgtgaaggacctaacatatgttccgtctgagctgccatgcacaattgtaaccatttcaccgctggtcgtggcacatctcactgaactaccgtttgaaaaacgacatgatttttggcaatcttttgtagtcagggacagggaggttggcaacctaatatggggcacatatgaccttgttggtctgatatcatactttacttatggtgagcacgagacaaa

SEQ ID NO: 12657 - DNA, 255 bp, Glycine max
  Clone ID: PAT_MRT3847_111436C.1
agcggtggtaaaacagggaagttaaacggtatgaaacatggctcttctgagcgtggaaacatgatttttgattcacagggcatatatcttttcaaagaaagaatcgcattcatgcatatttgatttatttgcagaataggaccagtgagaaggattgctttaactttgttttttgatgcacatctgggagtcactggtaaaaatgctaaattgttgttaaaaaacaaatatgcacatgttggtagagggccacct

SEQ ID NO: 12658 - DNA, 213 bp, Glycine max
  Clone ID: PAT_MRT3847_111437C.1
gcctgatggcgaaagttacgggtcacctactggctttgacaaaacgtacagtgatcgtggtcgcagtatggttcgtgggatattctgatgaaccccacgctgtcgtgagccggcacgatggggattgcaaggaaacgtggtacgactctagaatagacttatcaaaacttcgaccatatgtgactctggcataattgcgggaacttgtcgagg

SEQ ID NO: 12659 - DNA, 480 bp, Glycine max
  Clone ID: PAT_MRT3847_111438C.1
ataatacaaaattagaaacttaaaatgggtgtttataaaaaaacgcagaggcacatcgtaaggggattttatccacaaactttcattcattgaaagtcaaaaggattacacaatctatattcagccagtcattacaattggcaaatggatttaccacttcattaacaaaaaaaagacactaaatccactgctacattttactcattgcataaacttcaaaaccaatccacgagatcagcaacattattagcagcaaattttgtttcttttcttctccattttcaacctcagcttttcaattttctttaaccacatttccatcgtgagatttgaacacccacaggcctgtcaggtcacaactgccaacaacaccatttcgagattccaaagccagactcatgctatctgtacttgtgcattgaatgatatggctgtaattctcatttgttgtgtgtccgcatccgacgtccaatatcttat

SEQ ID NO: 12660 - DNA, 418 bp, Glycine max
  unsure (1)..(418): unsure at all n locations
  Clone ID: PAT_MRT3847_111439C.1
cttggatcttctggagcggccgccctttttttttcttttttttcttggcntnttgncttttgcctcnnnngcntttttgtnttggnganccnncttgcnctttgacntgtctctgcntntctttatnnggcttcngnttgngatggggtcntgttgnncctcnnctcctgcctgnnnnnttttttnnnncnccnttgttttttgatgtgttttttccgttggaacttaggtgttagctcccttttcccccnnnntttttggaggtctctggttcttttcgctttcctacnnttgtcatcctcttcctctttgtgncnccnctgcgcgntgttgnngggtgtgttngcnngacttggccattcttttcnngcntgttttgncccccgttagccattctgttttgcgtttgtgccgtcgc

SEQ ID NO: 12661 - DNA, 436 bp, Glycine max
  Clone ID: PAT_MRT3847_11143C.1
acgagaaatacatgatcaggtttcctggacttcacttattactggattctcaataaatagacaaggaagagatgccttcttgttgttcaaagagatgttaggcacccaagttacacccaattgttttacttttgctagtgtcattagtgcctgtgtggggcaaaatggtgcccttgaacattgttcaactcttcatgctcatgtcatcaagcggggatatgatactaacaattttgtagtcagctcattaattgattgttatgcaaattggggacaaattgatgacgctgtattattattttatgaaactagtgagaaggatactgttgtatacaattctatgatctctgggtattctcaaaatttgtacagtgaagatgcattgaaactgtttgtagaaatgaggaaaaaaaatttgagtcctactgatcatact

SEQ ID NO: 12662 - DNA, 451 bp, Glycine max
  Clone ID: PAT_MRT3847_111440C.1
ctaaacaccaagcttccctcacgagtttgatggcttagcaccactctcttttccttaattgctttcgtcgcagtggatgttgtcgacacccacagcaacaaaaatcatcatcaccttgtgttcttgtctcttagccatggaccctttaacaccaaaagcttgatctttcttcccgttactcaaggtgagaaggatcataggaaggccacagtggtagggcagatggttgttaattaaacacaacaaccgagggttgtgtgctattatatgttttgcttgtgttatgttttgttttgtatagtgtatttgtgggagctaatggcctaggcctatttcctaatccccttgttgtaaatatttgtgacttgttatagtgggtattctcatcccttctttttttgaaaaacttatgtctcccaaatttgtatagttgatgttcttagtacccaca

SEQ ID NO: 12663 - DNA, 738 bp, Glycine max
  Clone ID: PAT_MRT3847_111441C.1
cttatagcacgtgatattccccttttgtaaatcagcaaccagtacaccccacacaacacttatcacttacgatcctaaacaccaagcttccctcacgagtttgatggcttagcaccactctcttttccttaatttctttcgtcgcagtggatgttgtcgacacccacagcaacaaaaatcatcatcaccgggtgcccttgtcgacccacgcgtccgcctttaacaccaaaagcttgatctttcttcccgttactcaagtgttttatgtcgattaagggttagagagaaagttctatacgcagaggacatcgtcttatcgtactcttggaagtccctggaaaatctcagcattgaacaggtgagaaggatcataggaaggccacagtggtagggcagatggttgttaattaaacacaacaaccgagggttgtgtgctattatatgttttgcttgtgttatgttttgttttgtatagtgtatttgtgggagctaatggcctaggcctatttcctaatccccttgttgtaaatatttgtgacttgttatagtgggtattctcatcccttctttttttgaaaaacttatgtctcccaaatttgtatagttgatgttcttagtacccacgaatagtgaaatgttatgtacttgaactttgtcctaccatattctttcttataatggatatatcctactctatatggtcttcaaaaaaaaaaaaaaaaaaaacaaaaaacaaag

SEQ ID NO: 12664 - DNA, 342 bp, Glycine max
  Clone ID: PAT_MRT3847_111442C.1
cgcctacgcgttcgtcctcttaccagccttacctttcattccattttttcaccagatgcctgtacagctgcacgggtctacaccctgatcggcctgggctcaccaactctaatcacgatgattgcatgaatgaccctcatcttgcaccagaacaatccgcattccatacagagcttaaccgatgcatagaatgctctcaagctccaccacattacatactgctctctcgatgtgctctactatcgagtcagctatactaaaaagactgtgccgctgcttaatgagactcaagtgggactggactatcctattgaaaactacacagcatatggatatctgact

SEQ ID NO: 12665 - DNA, 236 bp, Glycine max
  Clone ID: PAT_MRT3847_111443C.1
aaacacccttgtcgaccacaccaaaattaataacatacaaaagcataaaagcacatatagacatagaaaagggaaaatcaaacattgtgaagtcatatttgcacactagattaacggctgccgcacattgtgacagatgcgatgtgagctaataccatccatgtgcgtaaaaacaactcccgaactattcacactgcaggcccgttgacaacgcgaatgtgattgaagacaacctt

SEQ ID NO: 12666 - DNA, 1630 bp, Glycine max
  Clone ID: PAT_MRT3847_111444C.1
tacggctgcgagaagacgacagaaggggacatgcataagaacaagcacaaggtctgattcgtgtttccttacatcaacttgtggtctaaaaatgggaaggatgccatgctgtgagaaggtagggttgaacaaaggaccatggaaaaccgaagaagatgagaagctcgtggcttatgttgaaaggcatggccctggaaactggcgttcagtgcctgccaaagcgggtcttcaaagatgtggcaagagttgtagactgaggtggatcaactacctaaaccctaatatcaaacgaggaagcttcagcttggaggaacatcgcaccattgttcaactccactctcttctcggaaacaaatggtcaatcatagccgcgcacctgcccaagagaactgacaacgacatcaagaactactggaacaccaacatcaagaaaggactcatcggaaagggcttagatccccttacctacaaaccaataaaatccaacacttttcaagcctatggtggtaatttccttgacccttccattgacaccaccaatatgaaccatgtggctcaatcggagagtgctcaaatcgaagccgaagcaagagaatctatgttgcaatttggatctctcccttcacatctccctgggctaatcttaagcaaaatcccaactcaaccttttccttcatcagcttctctattaacccaacgcattaatacaacatatgacatgtatgccctcgtgcttgcgacgaatcatcttgaccttcatccaccaccattcactgaccctgaaagcttccctagtaggaagcttcttccttcagtctctaccagtgttggacaatccactgatcctgaaagctcactctcttatgatggtattggttataatatgatagacaatagtagtagtcaaatgcaaatgacgatggaatgttatgcgacaaactttgaagatgatgatgttatgatagctctagaagcatttggaatagcaaggtttgagggcattcaagaattgtttgacgggcacactaccatagaggttctaatcaatgaatcttttgaaagagatgtgtagaagagtatggaaatggaaagtgcaatttccatgctttcctttgttggttccaataaaagtaatgtgtggttttgtaacttttcttttgagggattttctatttcatgttgagttgggtgcctcattacatgtgtttcaggttcagggtgtcttgtgtcctggactacatgataggtgttgagggttgttctgttatcggaatacacaacacttgtactgtagttttctcatgttttggtgctatagtctcgagcatttcttgcgtttattttcctttatttttaatgagttatttgccttactaaaaaaattacagtgaagccaaagtcgtgaggttgcaagtgttgtcatggttctaaattgtgtttgggattgtggttgtgatctcattgcaattatgatcagttgtaatgagttaaaaaaaacttttatgttacagtcacagttatgaatatgaactgcaatgggtgtcacctgttctgctattgcacctcttgttcacggtctttattccaatataatccataattagcaacttccatggaaagccatgttatg

SEQ ID NO: 12667 - DNA, 1064 bp, Glycine max
  Clone ID: PAT_MRT3847_111445C.1
cttcggttcctggttgcattttggaagattttgtgagatggtactctcctcctgattggagtgaaagtgagggatcgagtgaggacagagattctttttatggtggggagtcaatgtctagcagaggtcaactaagtttgcgaatgcaaaaagaaggtaatttgtggcgtgaattgtgggaaacatctaaatcagttccagctgttaaacagacacctctctatgatgaggatttggcagtggaggacattctagatgcatttgaggacatccagccttcagagctttttggacagctttttgtttctcttctcagttttggatttgcaattgctgaaactatgctgtctggcgacattgatctctcaaagttgttcaatgattgcaaggagtacatagttaccacgtgtcagagtgacagattccatgagaaaatcgatgaacttgttcagatgtatgaaacagtggagaaaatgttgctgaatccagatgaggcattgaagatgaagcacatggaagaatcaactatgactactgatgaatcaaagcgccggttttctactggtgagccaaagcaccggtttaagagacttagccatatctttggtggcaaggataaactgttgacaaggccggtctgtaaaaacgaggtaaacgatgaagaaacgcagattcgacattctttctcgagtttctttgacagcaagtcatctttattttcaaagaagccacctaagcctggaaacctataccctgctgagcaacctctctctctggaaagtgacaggacagttatttagacaagttcagtttcaccccatttaggataagcaacatacttttttttttctcccccttttctgcatccagataactgtaaattgattcctttattcttttatcaagtcttaatttgtgaatagaaaattttaatgtattatgaaataccccaattattcctacaatccattttcttgtttagctttgcttgttggggagggcttgtacaaggatgatcaatcaaaataataatatatagtgttcttcattgctgcttttgcatc

SEQ ID NO: 12668 - DNA, 254 bp, Glycine max
  Clone ID: PAT_MRT3847_111446C.1
ttttttttttttttttttttgaaaaccataaaagttttttatttatagtaatctgtagtacaaaagcaccattttctctcttataattgaggtttacattcacaaagaaatgactacgatgctcatgaagacttggccaccttattaatgcttccaaggattgaagggctttttaaagtcaaaaacatgccttgctaccaagttgtaaatccccatgcttaaaaacacaaagccgtttcttttatttattaagg

SEQ ID NO: 12669 - DNA, 465 bp, Glycine max
  Clone ID: PAT_MRT3847_111447C.1
gttaggaacaaaaggggaagggaaatctgaaaaaaaaaccctggcccctgggccccccccaaaaaaaaaaaaaaccccagaccccaaaaattaccccgaaggtaaaaggaaccaaaaaccccctgaaaaatgacccggaaaaaaaacccccccgcctaaccaccccaaaaatcaggggggctgggggttggccctatacgaggaatacccaggccccaattccccaaggggggcatttggacccctttggccccccccccaaacttccaatggaacaaggccctgggaaaaaaagggccttttccccaaccctttgaaaaaatacaaatgggggccggtttccccacgaaaagcccccccccccagggggggatttccaaaaaagagaacccccttttatgccccctcccaaagacctttcaaaaatttttctccggggggggctggggaatccccaaacttttt

SEQ ID NO: 12670 - DNA, 266 bp, Glycine max
  Clone ID: PAT_MRT3847_111448C.1
ggatgttggagaaggatttgccagcttcaatatttgtgcgagttttttagtgaaaggttgatccttgaaagggggggattattggagcagaagggacttcctatcattatggccttttcttttttgatggtttctttccaagggcctatcccaatgtaccggcgaaaggccactaccactctggaggtgttcggctcaacccaaatctggatgcttgtggcaaagtatgccttaatctacttaacacctggtccggcagcaaaaat

SEQ ID NO: 12671 - DNA, 186 bp, Glycine max
  unsure (1)..(186): unsure at all n locations
  Clone ID: PAT_MRT3847_111449C.1
ctgctttaggatgacacaatgaataacacctagtcatagaaatcagtctctctggtttgttttgtattatgttgtacatcattaaagatctaaatacaaaggatatacagtcttgaatctanaataatttgctaactaactattttgatccttcagagagaactactaataaaaatctanaaggta

SEQ ID NO: 12672 - DNA, 835 bp, Glycine max
  Clone ID: PAT_MRT3847_11144C.1
ccacgcgtccgattgatttcttggaattctggccttctgaaattgctgcagcggtggcagcttctgttttaaaggaatcacaagtgatagaaattgataaagcccataaccgatctcttagtagtagagaaggggagagttctaaagtgtgttgaattgataagagatttgtccttgatcaatgttgctgctagtttaggcagcaaggtgccatatgtgccccaaagtccaattggggtgctggatgctgggtgcttaagttataagagtgatgaattaactgttggatcatcatgtccaaactcgtcacataatacttcaaacccaaaccctactaagaggagcaaaccagatgaaccttctaatggaacctccaattcatgaaatgtgaattttcttccttcaccaaagttcatctagtttggttgaatggggagtttggtgtggtcttggaattccttggaaacattctcaatgagagtttgcttcggatgaataagatgggaatttaagtgctttcatgctagaagcatatggacaggatcaggaaggaggtgtcgatagttaagtttttggtttatagtcagattatagaaacagctacaaatacttggacgtgcggttggtgtagaaaactttgatgaaacaatgttgtggaagcacaaacacagcatgtcaaagtatgaatgtaatatttggagagtagagccataattgttgtccatgtgaatgtcctaagtgctcattttagaagaaaatcaatatataaagcattttttttcataaaaaaaaaaaaaaaaaacaaaacgaaaaaagttcagacatctgacaaaaa

SEQ ID NO: 12673 - DNA, 402 bp, Glycine max
  Clone ID: PAT_MRT3847_111450C.1
aatacgctgaccatagtcgcctcttttggatggacatgctaaagttgcccagcacatccacagtttttaacgaagatcacgaacgcccaaaacctcggtcacactgtgatgagcatcctacaccttcgcggtttgcaaacagtacataatggaaggtcaaagactaaagagcggtctatgagatggttaatggcgcgcccacccacctgtgggcgcggcatctctaatggcatgggcaccatcctcctgcctgtgggcaggtccagagggtgaggctatcaccgagcagttgcctgaccacagcgcaacccagggatgactcctctcacaaaggatccaatccagcaatgccctcaacaaaagcctgttttgccaggctgcaagcccgatcaggggaggcaa

SEQ ID NO: 12674 - DNA, 511 bp, Glycine max
  Clone ID: PAT_MRT3847_111451C.1
ggctcgagtcttataattgttggaaagggtcgatttccgtcgaatatggtggctggattggcagaaagacaagcagagcacgccgagttaggccccattggagatgttttaacatcatcggaaaatgtggtgtcatcagttatggttattcaacaacatgatgtagcgtcggtagatgatgctcctgtatataaggtgcatggaaagcacgacaaggtcaacgatagtgattcatcccataaggttgggatttcaatatcaaacgacaacgtagtgtaattatttttttatatcccttttgtaagcaaagaaggggaacaaatcttaagcaccagcaaatagttctttttaagtaaaattatatttaaaataaataaagataaatcacccctaaatttttaggtagttaattaaaaccacactgtattttaaattaaatggggaagtgatcacactttatttatttacttgaaaaacaatgtagtatatgggaatcagtggtcggtgtttt

SEQ ID NO: 12675 - DNA, 481 bp, Glycine max
  Clone ID: PAT_MRT3847_111452C.1
ggctcgagcttccccaggaagtggaactatcttgtgttgttcatgtttagatacctgatgaacctgtgtttggtttttggttttgtgactgacaccaatccgataataatactgattctttctgaatatccttctttggtgacacgtgtcagatcatgtgacagctgaggtgagggttgagaaactgcccaaggcttgaactgagcactacatggctaccactgggtatgatgaaaacggagataacagaggcggtatgtgggttttggaacagaagattgaccatccaatggatgaacaagctgaaaggctcaaaaattcgctcagataagaaagactttttacattgctgcttctgcggcttgcatatcctagacttggtgtactataaggagattcgtgaacttaccatttattcgcattatataatacattccctcaacaaatggacagtctgaggatgtgactggagcttgttttt

SEQ ID NO: 12676 - DNA, 425 bp, Glycine max
  unsure (1)..(425): unsure at all n locations
  Clone ID: PAT_MRT3847_111453C.1
atagaagagnnangacgnngcatgcggtccgtaagttgggaattaggttcgaggtcggaggttgttatggggtctgggaacagtgggaggatgtgtaagaagaacttgatggggagagtgagggatatgggtggggccaagattgctaatagatgtacccagacttgagctacattcttgactaggaaggatcaacaatgtgtataggagtggcaccagtttatgctcaagtctagagggctgaaatactttctttcttattttattccaaaaaattgaagaatagttactttgacaaaaagggttggacttgctagagtggtgtagaagaacttaagctttcatcaacaatggtcctgagaaataatgataaaaactatatgtagtttcaaaacttcaaaattatgtagtatgtattatgttgc

SEQ ID NO: 12677 - DNA, 379 bp, Glycine max
  Clone ID: PAT_MRT3847_111454C.1
ccctcgcgtgcgttttcagctggaagtgctcagctttaccttgacttccctcctgtggacgttgattgacaaaatggcttctctcacagaggcgaatagagatctaacttctatgttgcacatactacctgagcgtagtgggaggagacttccagggaatgctacccggacctaccttgtgccataagccctaggttgttgactacaactaataagagattggagagcgcagatcatgagggatataatgcgtttgttggtgcaattgcaaactattgctcttacatcatgcccgtaggtgatcaacatttgtctaaagaagcgcatgacatggaataggcatggctagatcgcgtagacccggcactttctttatatg

SEQ ID NO: 12678 - DNA, 322 bp, Glycine max
  Clone ID: PAT_MRT3847_111455C.1
acccataaccttgagacttccactgctatagtgataatccggactacaaaccttgtgtacatgactaccatgcgatttggaacatgcttttagactttctacagactctcttggatgacgaaccctgtcgcatattgaaactgtgttcttgtcgtctcaatgcttgtaagcgcactgctctcccaaattgattttgccagtgacatattgcacatgttgaacttcgaggaccctagttccgaactcctctctcgggactagacgaaaagcttactactctcatctgattgggctcggactctgataccgaaacttgcatagg

SEQ ID NO: 12679 - DNA, 221 bp, Glycine max
  Clone ID: PAT_MRT3847_111456C.1
ttttaccaggtataaatttccaaactgtgtatgattcatagtttcttacaacttattgccaaattggagagacttattccaaagacaacctaattttaaatagaatatgaccatataactataagcaacctctctgcccatttaagactacattctgtatccaatattctctccttcctataagactttttgtttcttcttttctgtattctacttcttga

SEQ ID NO: 12680 - DNA, 1220 bp, Glycine max
  Clone ID: PAT_MRT3847_111457C.1
aattcccgggtacgacccacgcgtccgtaatcattaaattccatttttataaacattgttggatcctttaattattgatgctttattattattattattatttcccgttcacgttctgttacctggcatcgcatcaatggcgaatcactcgagcagcttcggcggtcgcagtggagttcgagtggtggtcgccggcgaccgcgcaaccggaaaatcaagcctgatagccgccatagcgacggagtcattcgccgaggcggttccgccggtccttccgcctactctcctgccccccgatttgtaccccgacgccgttcctctcaccgtcgttgacacaccttccagcttggagaagcagagaaagcgtaatgaggaattgaaaggagctgatgttgtggtgttaacctatgcttgcaatgacaccgcgtcattttcgcggttgagttcttactggttcccggagctgcagaagttggaggtgaaggtgcctgtaattgtggttggttgcaagctggatcttagggatgaaagccagcaagtgagcttggagtgtgtcatgacacagctcctgcaacagttcaaggaaattgtcacctgcattgaatgctctgctgctacgcaataccaggtccctgaagttttttattttgctcaaaaagcggtacttcatccggtggatcctttgtatgatcatgaaagtcaagctttaaaggatcgatgtgttagggcattgagaagaatatttgttctttgtgatcgtgacatggatgaagccctcaatgacacagaactaaatgagtttcaggttagatgcttcaatgcaccgttgcaatcctctgaaatagcaggagtcaaaacggttgtacagcagaaagtacctgaaggattcaactcacatggtcttacttttccaggatttatttatgtccacaatatgttcctcaaaaaagggcgtccagagacattatgggctgttctaagagactttggatatgataataatttgaaactcatggatgatttccttcctattccatctaagcgtgctttggatcaggtcatagatagcttctttgttctatgttgccctcctgtctggtttaaatagaagagattagagtagtgatactactaattaactgtacattattcagtcttggtattaacaataacagaaaatgtatgagatgattaaattgggaagactacaatgttacgta

SEQ ID NO: 12681 - DNA, 271 bp, Glycine max
  unsure (1)..(271): unsure at all n locations
  Clone ID: PAT_MRT3847_111458C.1
taccttagcctctccttctccctctttcagttgcttgttacanttacaatgctattactattcccacctctgtctcagttagcttcacaaactcgcttgcctttgccttttcccgtgaaagccaaagtcaaactgaaggttgtgtccgaagctgatgccttcccttcatttcttcccaaagaagttcacagaatcaaagacccttttgctcgaaacttgccatgcggattcacagacttcnagtttctgttaggttctctgaaaatcctat

SEQ ID NO: 12682 - DNA, 380 bp, Glycine max
  Clone ID: PAT_MRT3847_111459C.1
aatttgcccagcattattactcagatttgtttttagtgtttgaattggccagactcaacagtttcatggaaagctggttctctgtgtgaagtcgttcttgctcgtctaattgaacacgtcatggtccgtaatccatcagactgtctatttttactagaaaatatttgtaaagctttaggatattttggtgaatacgatcagaatcgtggaatatgcttgcagttgatttcgactatttatgaaagcttaatactcccaatgcaattcgactctgttaaacaccacctaattcaattatcggatggaaacatgaataaatggattccattcgcacaaaattggattcgtaagccaccaaaaaaataaaaatgtccaaaaag

SEQ ID NO: 12683 - DNA, 220 bp, Glycine max
  Clone ID: PAT_MRT3847_11145C.1
tgctagttcacctaattaggccagataaattctatagaatgagagagtttaccagagggtaaggatgaagatcacggagttgttggtgcttaaatgcacgggcgatggatccattcctgtgattctggataacccttccagtgtacatcactttcaatacttcggagcccccggaagggttcgtggcgccttcctcctttgacgacgggcctctggagac

SEQ ID NO: 12684 - DNA, 189 bp, Glycine max
  Clone ID: PAT_MRT3847_111460C.1
ctcgagccgcagtcttggaagaatctgaagagttacaaggcattgattttggggactcagaagaagttagcttttagctgtttttagttttttttattatattgggaaaggggcagaggagaatgaacatattttgtcttgaacaatttaacttttgagataatattatgttaatgttttgtccagctt

SEQ ID NO: 12685 - DNA, 989 bp, Glycine max
  unsure (1)..(989): unsure at all n locations
  Clone ID: PAT_MRT3847_111461C.1
gttagagagaaaacaggtgttctttttgcttatggtcttttattgatgaagcaacaggatctacaggaagcaaggaatcgtttggcaaggggattgcagctgacacatacgtatttggggaaccttcaatttgtttcacaatatttgacgatccttggtagtttggcccttgcattacatgacactgtacaagccagagagatattgagatcttctttgaccttagcaaagaaactttatgatattcctactcagatttgggtgctatctgttttgacagccttatataaagaattaggtgaaagggggaatgaaatggagaatgctgagtatcaaaacaaaaaattagaagatttgcagaggagacttgctaatgcacatgcatccatttatcatattgaaataattgacaaagtaagacttgaagttcaccaattaaacgatttggacatcaagcgtgcaatggccgacccaactatgggagtcaatcttgatatccctgaatctattggtctgtcagcacccttatctgctccatcatcatcaaggctagttgatatagacaccagaagacgtggaaaacggagaatttagtgttttccttgtgcaggcaaatacattattgtgaattaattgctagctattgctccaaggtccaagtgggttgaagagtttagcagatagggtttccacttaccagcaaggttcgtttatcacgtgcatcacggttaaaagattctgtacagttaattaggatgttatccataagttatagatggaatagatattagaactcaccagttaacattagaatagggttcttttttgtatcaaaaagaggaaaaaaagtagataggtttttaaggaagtttcttagaatttattttcctgtgctccagctgtttatagcatttttcaattcacgaaagtcagtatgctttcttataaagatgtcatactgtaaattaattgcaaaaatttgtcatnng

SEQ ID NO: 12686 - DNA, 123 bp, Glycine max
  Clone ID: PAT_MRT3847_111462C.1
acggttttaaatttgtagccgcccgtcaagaagaaaccaaactaacggcgggattctacgacataaaaactctattaataggccaccaaaaaataaaatactgggccgtgaattaccacctga

SEQ ID NO: 12687 - DNA, 362 bp, Glycine max
  Clone ID: PAT_MRT3847_111463C.1
ctcgagccgatgaaatgagtgaccatactcagaatccctaaggttaccagatacgatgccactatagggtattatgaatgagtgccaaaagggccatactcacatggctattgttgttaaacactgtgacaagacaggttattaatattttcattaataatgcttatgactcattgagagatgcgaatgtggttattgatggtgagatgcctccccgtgagaataatctgaaaaccaagatgtcatgccataaacgtaaaatgtctcgtaaactcatacaacttaatctagggtagtctcctatagcagataattgtgaaagaatttgtactatatatatttttgtgaaaaagcatggaata

SEQ ID NO: 12688 - DNA, 735 bp, Glycine max
  Clone ID: PAT_MRT3847_111464C.1
gcgaggcgctgtgaggggccgggacggcgtcggcttgggccctaccgggcctggtcgggttttatccgcgagcggagtcgccgggcgttggtgtgtggtcctccgctgtgagaggcgctttctggggccgctggtgtcccggcgtgtggggcgggttgccttccgcgaccgaggactcctccgggttgtgctgggtcctcggctctgtggcggccgttcaggttcctgtgccgttccgctggccggttccacctgcctggcgtctccggggttgctgccaggaccagctggttcatggggactattgcttctgttcaggttcttgatcctattcgctggcctaattcaccttggaggcttcttcaggtacacactatttcaattcatgcttgtctttgccaatattctaaagtttgaattttcatcgcaacaggttagttgccttgggcccgtcttgctccagcagcccctgcgggtgtccccctggttgcgcgcctgcgggcctaccgggcccctcgccctcccggctgccttctctccaccaaggaagaagcttaggttcccccttgacgttcagtttccgataccatcgttttcaggcaacccctttgggtcttctagctctagcagccccttttgttgtctctctgataacgctcctgcaggcatacagggagccaggcattctcaaattggaatatctttatcagatctccaccttaacaataagctgca

SEQ ID NO: 12689 - DNA, 277 bp, Glycine max
  Clone ID: PAT_MRT3847_111465C.1
gaacatacgagacattaatggggggggatctatcacattgtacatacttgaacgtcgctggagagaataaaaactgcggataatagcacactcctttgtgtcgagtgctgggaattgcatcttattcaaaaagccgtgctgcgttaacccctacaacaagaaagctctttaagttattgtatgagaaaagcctgcggaagattttatcatgctcgcccaagccaagggtttgctacacagcctttgatacaccttgggctgagcacttcagctttat

SEQ ID NO: 12690 - DNA, 529 bp, Glycine max
  Clone ID: PAT_MRT3847_111466C.1
tcctctagagtctgccgccctttgttttggctttttttttttttttttttttttggcaacaaaattctcactgattgattatacataacagggaagcagggcacttacagcaaaggagtaaatagacacagcgaaggacaactggagcctcactagcgatatatgaactatattcatcgggggggcgcaatacacaggaagaaaaggtagggttcgtcccaaaaaaaaaaggaaaaagaaaaaagaatttctggcaactagttactactcaaacagttaaagcacaatatgggggcaaagcttcagcacaccatccatcacggaccaaaaggatttgaccaccgggctcttcgatcttttttaggcaattatctgttcgccgagttcttgcccacctgttgcaatcctgtcttggatcgactcggaaatgctggtgttcaactaaatttcttgttgatttggtgtcgcccaccctgattcctgaatgttacctgggctcaaatcagggttcttcagatgacttgaatca

SEQ ID NO: 12691 - DNA, 305 bp, Glycine max
  unsure (1)..(305): unsure at all n locations
  Clone ID: PAT_MRT3847_111467C.1
tacacgcccttgttaagaagaccacagccacaaaggngtagggaggttggacccnggaggcccaaaagcggaggaaaggaaacnagacacccgcagacgcccgggaagacncagcnaggaacgcagcaaccaaacagacaaacggagacaanaccaaaaaggacgcgccnggggcaacagncacaaaaacagagaacaacaaaggacccaggacagcacaaaaaggagacaccgccacgaggaaagccnccggccccgacgaggacagaacngcaggagnaaacacnnggcaggacacaaacaag

SEQ ID NO: 12692 - DNA, 545 bp, Glycine max
  Clone ID: PAT_MRT3847_111468C.1
ggttatagtcttgcacttttctcaactaggtgagattatgttgtacaactataaaggaaaaagaaatatctttcaacagtttcctagtagagtttttgaaaaaaaatatatattcatttaaaaaaaacactagctaagacaaatatccaccaataataggtatcacataggtattcgagcctacatgtttacacattgataaaaaaaattaaatattcacttctactttgttctttccacaatgaacgtgacgtttcttgaagagtgaagtccaaattatatcacacattaaagaccctatcgcccatgacatatatattctccatttcttctaaaaaatggcttcaaattatctaaaccatcccaagcatcatgcatgtttctgaaattttggctgacatatatcacatcttctactttcaaatatctaattaatctcttggaatcacctggtttgatgtcttttccttgagctcttcctcaagcacttttatggaatctgaaatttcagctctatacacatagaactttgtcacaaccatgaa

SEQ ID NO: 12693 - DNA, 1059 bp, Glycine max
  Clone ID: PAT_MRT3847_111469C.1
tagaggtattggcagcttcaatatccccccagcaagtttagccacatttgtgactctatccatgcttgtatgtgtggtgctctatgaccgtttctttgtcaagatcatgcaaaggtttaccaagaaccctagggggataacccttctccaaaggattggaattggcctcataatccacatagtgattatggtagttgcatctcttactgaaaggtatagacttagagtggccaaagaacatgggttagtagaaaatggagggcaagttcctttgagcattttcatcttgcttcctcaatatgttcttatgggagcagctgatgcatttgtcgaggttgccaaaatcgagtttttttatgaccaagccccagaaagcatgaagagccttggcacttcctattcaatgacaaccttaggcattgggaatttcctaagcacttttcttctcacaactatttcacatgtcaccaagaaacatggccaccgaggatgggttttgaacaacttgaatgcttctcatcttgactactactatgcccttttggccatactaaactttttgaacttcatatttttcatggttgtgacaaagttctatgtgtatagagctgaaatttcagattccataaaagtgcttgaggaagagctcaaggaaaagacctcaaaccaagtgattccaagagattagttagatgaatggatattggaaagtagaagatgatttatatcagccaaaatttcagaacatgcatgatgtttgggatagtttagataattgcaagccaatttagaagaattcccgaaaaaaaaaaatcaatttagaagaaatttaaatggagcatatgtcatgggcgatatggtctttaatgtctgatataatttggacttcactcttcaagaaacgtcacgttcattgtggaaattaagaacaaagtagaagtgaatatttgattattttttaatcaatgtgtaaacctgtaggcttaaatacctatgtaatacctattggtggatatttgttttagtgtcttttaagaaatgaataattttttttttggc

SEQ ID NO: 12694 - DNA, 527 bp, Glycine max
  Clone ID: PAT_MRT3847_11146C.1
aaaaaaattaaaaatttaaaaaaaaaaaaaaaaacaaaaaatataaaaaaaaaaaaaataaaatacacaaaaaaaaaaaaaaaatagactcttcttataaagtcacactaaattaaattaaaaaaacaaaaaaaaaaggggggccttttttggggatcccattttttttccccggttttggcgccttttaatttttttttttttgccccttttttttatttcctggccgggctttttacaacctccttttggaaaaacccgggggtttcccaatttaattgccttggcaaaattcccctttttcccagttggggttataagaaaaaggccccacccgatccccttttccaaaaattgcccccccttattgggaattgggaccccccctttttcggccctttaaaccgggggggttggggggttaccccccaggggcccctttcttttggcgggccccttaggccccctcttttcctttttttcccttttttttttgcccggtttcggggtttttcccggaaagcttt

SEQ ID NO: 12695 - DNA, 1238 bp, Glycine max
  Clone ID: PAT_MRT3847_111470C.1
tattatgccattctggaggatctggaatccagctggaagtggagggcgtggggtcataggtgtgttggaagccaattttgttgaacctgctcatgataagcagggctttgagcgtacattagttttatcaagactggagtctaaattgatacaaatgcagaaaaaatactggagcactaactgctataaaattggttatgcttccaatcgaagtaaaatacaaatcagagattctgctgataaagaggcatctcctgattattttcctgaatcatcacaatcaaaaaggaaatattctaccacggatggcaaggctccaccgttgacatcagacaaattgcattcatattcgaatcagaaacggatacaaaaacaaacagaaaaatatagggtatatattaatggtcaatcttcagtctctcctaaacggaaagtgcaaagttcatctgagcaatcatcatccgatgacgaagtcagtgaagtcttgcctaagaaaaaaactcaaaagctatctacagccgaaaaatcatttgaaaatgagaatggatgttttcaacataccacatcaaggggaaaaacctcacagtacacaccaggatccaagctagagggaaaaggtgttaatgatggtgagcaaccactatctgacaacgatttactaactctcgagcaattgaaaaaagagaatcgtgagttgaaggagagattccaaaggaaagaggaggatattttagggcaagtgttgcaggatctgcagcatgagaaagacaggtgtaaatctcttgaaactcagctcattgatgcagaaaaaaagcttgaagagttgaccaatgagcaggaaactctcattgatgtattcgctgaagaaagggatagacgtgatgctgaagagaaaaaattgagaaataagctcgaggaggcatcaaatactatccgagagctgcttgataagacacgcaagcttgaaaggaagtcttcaagcggcaaaccagatcgatgagacgtggtgcctgtaggaacctcctaggacctaggatgtaggattttttgtatagtttcacgtctggctttttgttgtatgacttggtcactaattgaacaatgttctttactcccattggtatttcaagcaattttatgtgtctaccgagttttttgattggaggtcggagtcttgggtgaatttttccactttttttgagacaatttgattagcgggcagaggaagttgattatta

SEQ ID NO: 12696 - DNA, 439 bp, Glycine max
  Clone ID: PAT_MRT3847_111471C.1
attacgcatgaatgagtagtaatcaatatgttgcttttttcttcttgttttgttatatttaaatgagtattttcctttggtcatgtccttgttctttttaaaataaaatacagcatcattattgaacatctggtacaatcttaaaaaaaatagtacacataaaattatgcataattatgttttgtcattcacttgtttttttatcttatatatatatatattaaagaaaaatcttctagcaacaaagaaaattagaaaaacaatcctctactttaattattcaaaaacattttccaataaaataaaatggaaagacttgatggatgaaaattttggtgataaagcttgaaaggataagtattgttaaaaaccttgttcttttaccctttccttggatacgtgtacataacagggttgtaaacctatctaatgaacgaaa

SEQ ID NO: 12697 - DNA, 478 bp, Glycine max
  unsure (1)..(478): unsure at all n locations
  Clone ID: PAT_MRT3847_111472C.1
gaaaacattcgtttcttgaaagaatttaatgggggggcgtactaaattcccacctgttgttttggatgtgcatgggaataccagtttttcaatgcatttcttttattgctttctattattttcttttctttaatcttttcatttgtggttatggaccaaccgccgattttacacaaaacagacaggatgtgttgtgttcaacctaccaatgaaggttgaaactatcagcctgcataagcgggggtgcaaattaagcacctaacgttattgccgaaactgtcaaggatggcaggctaataaactccttctataaatctttntgaaactcttgacagccatcaaggattgctgcaaaagggacaactcttgtgcgactcttaacttattcaaaatcctccccatatattatggccagacccctgtctccattccctacaccagatagatgatgagcaatcaagccatttgaagctgcgac

SEQ ID NO: 12698 - DNA, 342 bp, Glycine max
  Clone ID: PAT_MRT3847_111473C.1
tttacgcgtccgaccacgcgtacgaccacgcgtacgatccttttgtgttgggtggtcggattggaagactgacttttccctacgggactttccgaagtgataaaagatatgtctgtgtctataaggggaggtgcagtggccgacaatgctcatctcatgaattggcaaaacgctggcctttcaaagtggaaatattttgctggacatctcctttttgacggttgtaagatgactgattagtaccttaaatgtaccccttcttaatagatagccttactgaatggggctggggacaccctctagtatgaggccttaacccacatgctggtgcagattacccac

SEQ ID NO: 12699 - DNA, 1439 bp, Glycine max
  Clone ID: PAT_MRT3847_111474C.1
ggcccaacccacgcatttttgcatcaacaattcaagttatctcttttggggagcacctagagagaaatacagatggaactctaactgcagtgcagacccttgcatcaaccgcactatgtggcattatccattcagtcttaggagggcagcccctcctcatactaggcgtagccgagccaacagttctgatgtatacattcctgtatgacttcgcaaaaggtagaaaggatttggggcacaaactattcctgccttggactggatgggtgtgtgtttggaccgccgtgttgctcttcttgctggccattcttggtgcatgctccataatcaacagattcacacgccttgcaggtgaactatttggtctgctaatagcaatgctctttatgcagcaggctataaggggactagtggaagagtttggtgtgccccagtcccagagagaaggtaccaatcagattgcactccaatcctcttggctgtttggcaatggaatgtttgctttggttttgtcatttggccttctgtttactgcacttagaagccgtaaggctagatcttggcgatatggggcaggatggttgcggggatttgtggctgattatggagtcccactaatgattcttgtgtggactgctgtgtcctatataccaaccaataaggttccaaggggaatcccaaggcgacttttcagtccaaatccatggtctcctggtgcatactcaaattggactgtaattaaggaaatgttgaatgtgcctctcatctatattattggagcatttataccggcaactatgattgccgtgctttactactttgatcatagtgttgcatcacaacttgcccagcagaaggagttcaatctaagaaaaccctcatcttatcattatgaccttcttctcttgggcttcttgaccatactgtgtggacttattggaatccctccatccaacggcgtgattcctcaatctccaatgcatactaaaagcttagctactctaaaacatcagctcttgcgcaataagcttgtatctgctgcacgaaaaagcatgcagaaaaatatgaacctgtgtcaattataccgaaatatgcaagaagcatatgaccaaatgcagactccattagcccgccaaataccacctgccctggggctaaaggagctgaaggaatccaccatccaactggcttcaagtcatggatacattgattcccctgttgacgaggctgttttcgatgtatataaggatgttgatgaccttttgccagttgaagttaaagaacagtgcctaagcaatctgctgcatgcattgatggatgcagcttgtgttgctgctatgcctctcttgaagaagataccaacctcagtgctttggggctactttgctttcatggcaaatgaaagcttgcccggaaaccagttttgggagagaatacta

SEQ ID NO: 12700 - DNA, 441 bp, Glycine max
  Clone ID: PAT_MRT3847_111475C.1
gcctctgccaaagcagctgatgccatcaccacaccaagcacccagaggaacggatcactctagggaagcacaaaagcttctctacttagagggaggaaactgaaggcgaacagtggaacagcaccagcgggagcacgatccagcactacagagcgagcagaggctgagccggacaggcctctgaggatcccaggcagcacccctccgccggggctagaaggcagaatgccaggagatgggggctgtgaacccccaggactaggaaccgaccccgagagcccgagagggaacgtccaagcacagctggcgcactgcagaagggccaacgagggagccgcaggcagttacaccccagaatcccgcacaaagaccgcgaccctggacaccccaccatggaacacaggaggagagagggagtacttcacagacaactaccacaca

SEQ ID NO: 12701 - DNA, 1475 bp, Glycine max
  unsure (1)..(1475): unsure at all n locations
  Clone ID: PAT_MRT3847_111476C.1
tacgtctgcgagaagacgacagcagggtatcactggttttatgctgttttatcatcatttatggttgggtaaaaaataaaaaacatcagggtacaataaaaaagttctacagcagtattttaattatttaatttaatgtgatatagtaatgggctgatactaacccaatagtttcactgggccgggttgggttgcaatgcaccaattgtttaccttctccaaactaaaaccctcattctaccctatgtaccactttcttttgtgtgagtcggggtctgcaacaaaaccttcgctcgcgtttttcagggtgagtctctccgtcgcatgcattgcaatagcttgttaatttctcaagatttggttgaggatcaaaactacatgtggagcgatatatttactttatttcgggtttgagttataaatggttgcagtgtcggaaaagcaagtgcaggtgtattccatgcagatacgctaggcaagaaatggcgtgacgagccgaagtaatttgttgcgctgctagggagaaatgggaccctggaagatctacttgaagtgatcacctggggtacgataggaaaccacggaaaaacccccgaaattgttgacgtggtttgttactacaacccagggcgatctttcacgcccttgaatgtacaacatggtaaattatcaccctgtgactctactaggcattccttgatataaacggtggggtagttgaacttgaatcgttagtaatactcgctgctggcattcctggacacagctgtgtacgaatgataaatgactcaagatgtttaaaaaagtagtgtctcagaactccctactccagatcctatatggaaacatgggcgaaaaattcagaaacatctaaacccttcacaatttatattttgagtacataaacaacaatttcttccataaactaaattaaaatctacccgccttttgttattaaaataactaatcgtgtaagtttaatgaatgctacataatatgacattttgaagatgattttgtaggtttataaatgacaaaataaaatggaagaagcaaaaccaacaatgaaaccaagagaaaatatttggataacccaagaactaccaatgttcattgcctatcaaaatcaaccatttaaggcatcgtaacatgcagtgtctagattagattagattgaaagattatagtacctattggtttggtgttgcaatgttaaattatgattgaaaaaagtggtgtgcagtgatttgttgtgaagaaagtgagataaatgattcaataatgaagttgaacaatttcttttctacacaagggatgcttgcttaagggtgatttcgattcaatctcacaggataattaaggctgttgacagttctaaaagctgagttgagaaaatatttttcattttcatgcataattaagaaaaggccagtttacttggatggaaaaaaaacaaaagaaaaaaaaaacnnaaa

SEQ ID NO: 12702 - DNA, 417 bp, Glycine max
  Clone ID: PAT_MRT3847_111477C.1
cttgggggggggggggggcgaatactgaatcattaacgtagatgtaataacgatgaaagcaattaagtggggggaataattaaaatgcgcgtaaggcaagaagacgtattcaaaagggtggtacataaaaaagattaaaacaggccgtcctggaaagactgagtacggggaatggagcctgacacaagatataatgaattaataatcgcgataatattaagcccagcatgcgaataataggtgatgctaacaatgtgtgaccagtacgaatagaattccgtaagctacagctactactgcgagagcccaaacttaagacaggcaatgggttggcgcgttaaggtcctttcccaacggttgcggtcgacgggcaatatagattggaccggtaggtagctcgctcgaacgagtgggtcc

SEQ ID NO: 12703 - DNA, 1647 bp, Glycine max
  Clone ID: PAT_MRT3847_111478C.1
acgactactcttctgtgcctttctcttctttttttcttctccttctgtccatttttccttttcttttttttacttctctcagcattctccatctcttccaaaaatgaagttccaagattatgagcctccctctagcccaaaacacatgatcccaaaagtgaccttactagcaatcttggtcattctaatatttgccatcacccctttgtggtaccctttgttgagctactctacttcacacttgaagatcaataagaataatattccatcatcttcatcacatgatcaagggcaagaagagaacttgccctcaacatatgtggagaagtgtgacattttcagtggggagtgggtgccaaatccaaaggcaccatactacacaaacaagacatgttgggcaattcatgagcaccaaaattgcatcaagtatgggaggcctgactctgagttcatgaagtggaggtggaagccaagtgagtgtgagcttcccatattcaacccttttcaattccttgaaatagttaagggaaaatccatggcttttgttggtgactcagttggaagaaatcagatgcaatccatgatttgcctcctttcaagggtggaatggccaatagatgtatcatacactaccgatgaatattttaagcgatggaagtacccaagttataactttaccatggccaccttttggacaccccatttggtaagatccaaaatggctgattcacatggtccaagcaacactggcctttttaacctttatcttgatgagtttgatgagaaatggtcaacccaaatggttgtattggcctatatcgttcttgatggagggcattggttctaccgaccaatggtgttctatgagaagcaaaaaattgttggatgtcactattgcctcttagaaaatgtcccagatttaaccatgttctatggctatagaaaggcttttaggactgcattcaaagctatcgatagtttagaaaatttcaagggaatagtattccttagaacatttgcaccatctcattttgagaatggaaaatggaatcaaggtgggaattgtgtcagaactaagccgtttaggagcaatgagacaagattagagagcactaatttggagctatatatgatccaattggaggaattcaagaaagctgaaaaggaaggtagaaagaagggtttgaaattgaagttacttgacaccacacaagcaatgttattgagaccagatggtcatccaagtagatatggacattggccacaagagaacgtaacattatataatgattgtgtgcattggtgcctgccaggacccatagacacatggagtgatttcttgctagaaatgttgaagatggagggcatgagatctgcaataagctaaatttataagtattattaactaatttttcttgtaaactatcattggtaatatttttttgtaattttataaagataaaatttgttatgcgtgccataataaaattatttcttttataaaaatataaaaaagaatgaagatatacatgttcaagagtttatctcaacgtgtattttatagcattctatgagatgattacaattatctcaaccattttgtacttaaattttatgaataaaaaaatgatgatatattgtacattt

SEQ ID NO: 12704 - DNA, 446 bp, Glycine max
  Clone ID: PAT_MRT3847_111479C.1
gtttcatttcttatttttatgaataattataaacttgtcatgttgtttttatttttttaaaagtttgtttagaaaacaacaaaaataaggtaacattttttttgtaataaaaaaaactattttctaaaattaaacaaattaaattattttttccaattttgttgtcgtcaaaatataaattcatttgttaaattcaatatacattataattatttaaaattggtttttatagtttaacaatttgtgttagagtccatacatggaacttgaattttaatttgaactctagttctaaaaaattgaaattggtctaaaattttaatttaagtaatatgtagaagttcaaaaacctctaacacaatgcaaatattgcaacaacaaaaaattgaaaccaaaaacatttattgtttattcacatttttttctgaaaaggtatatccattctc

SEQ ID NO: 12705 - DNA, 697 bp, Glycine max
  Clone ID: PAT_MRT3847_11147C.1
ctcgagccgaatcggctcgagcttctcttctcttccccaccaaactaaaccttttctcagtgtagaattttcagaatttgaggtatggggaggctgtttgtgacccatctggaggggcagatctatacctgcaaacactgccgcacccacctcgctctctatgaagacatcgtttccaaggctttccacagcagacatgggagagcttatctcttcagtaaggtgtaagttatccttgattttagattttggaaccctatcattatgtgattactataaacaaaaactaagataaatgttctcttttggtatttttatgattgtatctggactatcagtgataatacataggaatatagttgcttgccccttatattgtctaaagctgagacagaaaaataaaaataaaggagaaattaatgacattttatttgtccaagaacttgtttgaggatatatattgtagtccttgttttatgcatgtccatcatgaatccattcgtgcttgtatttatgacttggcaatagaaatcatatggagtgtgcctcaaagctacataacaagaacattgcataattgccgccactctcatcatctgacatttaggtgattgtgtaacttgtaaccaaagaagtatcatgcagaagagttttggtttgttattcatggcttcatgtctctgaatgtctaatgctc

SEQ ID NO: 12706 - DNA, 272 bp, Glycine max
  Clone ID: PAT_MRT3847_111480C.1
tcggctcgagcggctcgagctgctcgagaattcgagcggccactttctttctctattttaggtcttcatgttcttcagacttatctcctattatccctcaaaaaaccaaaaaaaaaatctcacaaatgaacttaatttagcaaaaagaaaaagaaactaatatcatgcaaataaaagtgaaggatctaaatctaacatcatatgataaggtggttcttttgatcaaagatacaataaaaaaaatgatcaaagaaaaaaaaaggggggcgggg

SEQ ID NO: 12707 - DNA, 699 bp, Glycine max
  Clone ID: PAT_MRT3847_111481C.1
cggcactgatgctgcagatgctttagaagtaattgcactgctgccagaactaaacagggggtcaactacacttaccctccatggtcagctctggctgaaatgccatcaagtttagaacttcttgtctgctgcctggctgaggggcattcccttgtgcaagagaaagcaattaaaattctatcaagactttgtggggatcagccagttgttcttggtgatttgttatctgctagttccaaatccattggttcattggctaatagaataatgaactcctccagtctagaagtaaaaattggaggttcttccttactaatttgtgctgcaaaggagaagaaaaagctttcaatggattcacttgatgcttctgggtatctaaaaccattaatatattctttagttgaaatgataaagcagaattgtagctattcttcattagaaattgaagttgtcacttctaaaggttttatggagagaaattcttttcaagaagttgatgaatttgatattcctgatccagccacttccttgggaagcactattgccatgtggttgctttcagttattgcttctttccatataaagagcaagctcacaattatggaagctggtggacttgaagctctctttgacaaacttgcaagacatacttcaaatccacaggtacattacatttaagcttattattaaagctgcctt

SEQ ID NO: 12708 - DNA, 547 bp, Glycine max
  Clone ID: PAT_MRT3847_111482C.1
ctggggagttatgacgttccacgcattacatgttgagtagagagatgccgcgcgggttctatcatctgtttcgggttgcgtggagaagtgtagctttgtaaaatatttttgccataaatgtacaaattagtttgtttttgaaaaaaaaaaaaaaaaaaaaaaaaaaaaaaaaaaaaaaaaaaaaaaaaaaaaaaaaaaaaaaaaaaaaaaaaaaaaaaaaaaaaaaaaaaaaaaaaaaaaaaaaaaaaaaaggggggggccgttttaagggacccaattttacttccccgggcttgcaacgcattagcttttttttggggccccctaatttaattccctgggccgtgtttttacaccgttgggacgggaaaacccttgggtttccccaacttattcgcttgggagcaaatccccttttccccagttggctttttaccaaaaaggccccccccattcgcctttccaaacatttgcccaccctgatgggcaaatggacccccccttgtaccggccctttaaccggggggggtgggggggttacccccag

SEQ ID NO: 12709 - DNA, 629 bp, Glycine max
  Clone ID: PAT_MRT3847_111483C.1
gcagcactttcactgtaatttacaatttatattctcaacctctgagaatggcattctcttccactctacttcttctgctcgtggcgatgttcgtcttctctgccgtcgcacaatctccggcgtcgtctcctgagttcgctgctgctccaccgaaaaccgccactccctcgccttcttcgtccatgtctccacccgccgctgctccttcaccttcatcctccgtcgtgagctctccgccgtctcctcctacttcagttccggcgtcttctccgtcgccttccatctctccgtcgtcgatctcttcccctccgtccgatgcccccgcaccgtccgagaatgccgccgtctcgaatggattcgccgctgtcggatctgtcgtagtcggtctcgtcgccgccgcatcgatcatgtgaaccgctacataggcgtatatagaaaatttattatctcctatatattctccttattttttttttacttttttatagttattattttttcatttagagttttatatctggagaatttcgagtttgtataagacaagcgatttaccttgttagtttttcattaatttcgtaatagtattcgctatttgcctgtttgttcagtgaaaataatttcgtgtt

SEQ ID NO: 12710 - DNA, 368 bp, Glycine max
  Clone ID: PAT_MRT3847_111484C.1
cccccccgattttttttttttcaaaacattttaaattcaacttttgaaacattttcccccaaattcaacctttcaaggggaacaacaaagtcctttcgacaataaacataattggcataaaactttatttccccccaggggcaaagttaaaaagccctcctcacaggggatcctttaaaaacaccccccctttttaaacacaccacactcctgaaatggtttaaaaaaactcaatccctaatgccccctggtggagaaactttgaaggcaaaaaagccctccactaaacagggttttaacaggaatctttggctttcatgtcttaacattaaaacataccttttttgacgttctccttgagggcaggc

SEQ ID NO: 12711 - DNA, 201 bp, Glycine max
  Clone ID: PAT_MRT3847_111485C.1
accacacgtccggatagtatccatacctagtagtaactgagcacgacctcgtcgaacaggagtctaagatgtattcgccgcgcagaatgctccaagaaagacatctagatgagtcaaccttgataaaagttctaaagttgggactccaaatatagtggcctaagagacacatcatgagaattctcctgacaatcgaagcac

SEQ ID NO: 12712 - DNA, 463 bp, Glycine max
  Clone ID: PAT_MRT3847_111486C.1
ggctgcgagaagacgacagaagggttcattcaaacacatactcaaagttacttcaactcaaaattatttttgaatctataatcaattctaaatttttctctaacataaaaccaaacatatattaattgtgaattcagaatcaatttttcaacggaaaaccaaatacgaacttaagatcttcaactctgtactaatttgaggaatcccataacttacccaatttttttatttacaaaaaagatgataaaatatggtccatcacatattgagctcttggaaagtattctcagaagtcttgatgggccatatttgggccaagcccatgcaataatgcccaaagccagagcccagaatcatacgtccaaacatgtctgtacaactttatagagatcaatggtcttccttttcttttttagtttgaaaaaaataacaaaatgattaggaaaaaaaatgcatataactc

SEQ ID NO: 12713 - DNA, 348 bp, Glycine max
  unsure (1)..(348): unsure at all n locations
  Clone ID: PAT_MRT3847_111487C.1
cgcacatatatctaccgatacataaacttttagcatattttctaacancctaccttaccgcacactacatactatccataatctcttctaaaacaatccatcaaccctttttacatcttctatgtttctatctttcctactcttgaacacttggaacaacattcttcatgttcttccacaaacttacgctctaacattctttctttttggacattcactacttgacaataccaacaataactacctattcaccactaatcgtgcctactcatatccttattgaattcactataccactcacagggccactgtccttttctttaatgacctcaatatccccaacattat

SEQ ID NO: 12714 - DNA, 616 bp, Glycine max
  Clone ID: PAT_MRT3847_111488C.1
ccacgcgtccgcggaatatgaattgggatcttctccacagaaattgcattgaaacatcttgcatttgcaggaaacgtattgcttggcccaagctttgatttaaatcattttaggggacacagtcagaaatattttgtgaggatgaatagaaaatttggaggtggaaagcagccaacagggactccttcactggcttggtcctgcgtggttgttgtcttctctcttcttgctggtgcctctgttgttcacaatatctttaagcctaaccttacattacctccagtcgatggagttgatagcaacaagcagaaacatgatgaaaaagaatgatcatctcccctggtgaattcctttttattatcgtgaaggtgaccaaatttggttaaagaactatcagtgcaagtaagtctgataaactaaaaaggattaattttgtatgagaatagtaattttgtttttcatttttttagaattttgtttttacggtgatgttttaaatttttggaggatgtatggttgcaaattttttggaagactaatagtgatgttttaaattttttagagactaatggtgaccaaaatatagccatttagggatgttttatagtgatgatgt

SEQ ID NO: 12715 - DNA, 184 bp, Glycine max
  Clone ID: PAT_MRT3847_111489C.1
ttcttcgcgcgaacagaaccgaaaggaggggcgaaggttgctacactcacactgaattatgctcagccacgcatgcgcgtggaacaccgaggaagagatggtgagtgggttttgaaacaaccggaggagggaacgcagcaaggggaccgttccgcggtcctccgggtacagaagcggcttatgc

SEQ ID NO: 12716 - DNA, 334 bp, Glycine max
  Clone ID: PAT_MRT3847_11148C.1
cccccccgggtttttttttataaaaaaaacacccccggttccccaaaatccttccttgggccctccttttccaaaaaacccggttttttttggcccccggggattttttccagcccccttcggggcttttgaggaccccaaatcgatttttaatttggctggtttaccccggggcttgccccaaaaagggttaatttttgtttgttttttccggaaattttttttttttctggcgggcccaaaattttcattccccattggggggtttttgagcgagggttttttttttaggggcctcttgggaaaaaaaattgtggggggccctaaaaaggat

SEQ ID NO: 12717 - DNA, 597 bp, Glycine max
  Clone ID: PAT_MRT3847_111490C.1
caaatggcaaaataaaaacgaaaaaaaatctttattatttattttgacagaaatagaaataaaatacacaaacattgcatctcctcctcactatataaataaacaaatctttataaattcaatttatcttatcctcaattttgtatgtcatataaacactaaacaacaactaaaatgcccacaatccatataaaacatctctcacatcatcgtcttcggcacggtatttgaccaataggcaagttttggtccccaaaaccataatcacaatcatagccaaatcttaatgaccaacaccagggcttggaatatcaccatgttttctatagaagtcataatcataatcatcatgaggtggagaaacataagcttgaccatattcatccatttctagaggatcatgtgatccagtgaccttgacattgcattcaattccagtagatgtacaaccctctttgcttcttaatcttcccgttgctacaatctcttggcacatcaaagacagaagaagaggtagcacaataatgagcacaaacctgggcttagatcccctcgtagccattttttatcatctaaggaaagagtagaagatatcag

SEQ ID NO: 12718 - DNA, 193 bp, Glycine max
  Clone ID: PAT_MRT3847_111491C.1
ggatcctcctacctcatgcggagccggtcctgttgctgaacacatgtttcactggcaagaaagaattatgggtcctccagacagttcttatgctggaggtgttttcctagtgactattcatttcgctccagattatccctttaagccacccaaggttgcattcaagattaaggtatttgacccagatattaat

SEQ ID NO: 12719 - DNA, 316 bp, Glycine max
  Clone ID: PAT_MRT3847_111492C.1
ggtgtgaggcgagggtaaggtctcgttgggtggggtcgtgctccgcgctgttcctctgtttctcgttattgtgttcagaccaaacccttgcttcgtatctgatccatgtcgaccaaacaaggtggaaaagcttagcctttgaagaaacccaagtctgataagaaagattacgacgagattgatgtggctaacattcgggagagataggaagaggataaggcgctggaggagttgatagcccaggcgcttcataaggcaagccttgaaagttctgtgctcaagaaaagtggaaagaacaaagggctttttatcatga

SEQ ID NO: 12720 - DNA, 654 bp, Glycine max
  Clone ID: PAT_MRT3847_111493C.1
aatgtttcagaaactggaggtatttctgaatcttttgtttattactttggtaatctattttcttatgattttttttgaggaaatatattttcttatgatattttttaattattgggaaaaatattatctttaatattattttcgtaatatcacctagctttggagaagattcaaagactggacaaatttcttaaagagaaagaaaatttgaaagacaacaacaatgctaatgaatagaagagactaggatagtagaatagcatcttatatatcttttgaacttgttaactttatccattttttaatgctatttgtcattttcaaggaagaggccttgtgtgctatgctgtcatccatagtaggataattgtatgccaatgtttttagtatttagaactttttcttacttcccacttcccattatagctttgtttgccatagcccatatgtaaagaatgattgcattttttgtatagtactaaataatttctatgctcaaagttagaggtttcccttatagatgatgacacgcttgctgaagatcaagccttgctcaaaggatccaagtcagcatcactattgtcgttgattttctcgatcttcaccatcttctcgcaggagctcttgcatgacagtttgtctttgtttcctact

SEQ ID NO: 12721 - DNA, 502 bp, Glycine max
  Clone ID: PAT_MRT3847_111494C.1
tcgggataaagctccaactttgtaacaacaagcgtgtgaaactcagaaccagacactggctggtgtcaagagggtggcctcaaatgtggtcacggatgtagagagaagaagatagagaattctccatacaaaaaggggacattctttttatcctatagtatatatatatacaaaaaagaagaaagaaaaagacaagcaaaaaaataaaatagtagtattaaggtccggaagagtggagagtgtttggtgggtcatgtcatgtcatatggtgtgagtgaaagaaaattgctcttagtggccgttgttagtttttgctccttccatgatgttgatgttgatgttatgctcaattaatgggaagctcttctaagtcgttcactgcagcaccacccaacagatagcttttggtagaacaagttttgcagttgttggaactgtggtttgccacactttcatattgtttttcatgatttgccagtgttttccattgaatggttctttg

SEQ ID NO: 12722 - DNA, 704 bp, Glycine max
  Clone ID: PAT_MRT3847_111495C.1
tccgggattctcctccttcgaaaataaaacctcatatttttgaaattcgaaaccctaaattcccgactcctcccaacccattcggttcactccgtgcgacatcgaagagtaaagaatgggtgacaagaagaagaaggctcagatgtttgtaaagctagtgtctgctgctgggactggattcttttatgttaagcggaagccaaggcagtttacagagaagcttgagttccgaaaatatgatcctagggttaatcgtcatgttctgtttacagaggctaaaatgaagtgataggacctttaatggcttcctttgcattgtaactgaatcattcttgtatttctctgagacaattatctcatttggtattagattatgaaccatgcactcatgccaatccttttactgtctctgcctcttagctattcaggttcggtatcagttcatagcattccattcctggctgtgaattgttctgaaggctttgcttgaacaaatgattgaagaccttgagtatgctaacttctgttctagcagagttaggctccaattagattcggataatttgttatggaacatgattgtgttagggtcccatcccatgatgttccaaaagatgataatagagtcaggtatttctgtaagtcacattacctataattgcgcaatacatgctcaaaaacaaaatggcatgttcattagttaa

SEQ ID NO: 12723 - DNA, 232 bp, Glycine max
  Clone ID: PAT_MRT3847_111496C.1
gggccccaaaaaaaatgggccccctttttttttaacaagaaacccccttccttccccctgggtcattttacaaaaaactggagttttaatgaccccccgttttaatttaaaaaaacagactccttctaggggcccggtttgggaatttttttttttaaacttggagcaaaacaatcaggattgtcctttcccttgcttttaaggcataaggttttattttatcgggggcccc

SEQ ID NO: 12724 - DNA, 224 bp, Glycine max
  Clone ID: PAT_MRT3847_111497C.1
catgaatttaaggtttcagcttttgagtaccactaccaatggtgattttgttcaaggaaaacatctcgcaatggataaagttaatgtaacatgcgctgctgttggcttgacatcaagtcacactccaactccattgttggaatctggttcgcataacgacagacggctcacagggctacatcttttgacacgatgtataacagatcctctactaacattcaccc

SEQ ID NO: 12725 - DNA, 454 bp, Glycine max
  unsure (1)..(454): unsure at all n locations
  Clone ID: PAT_MRT3847_111498C.1
gtttagaacaggcctgtcttctcttaaacgaggttgtgttgtttggttttgaatttgaagtgatttgatgatggagatgaatatattggcttcttcgttctctggttatgcaaaaccctttgtaagagtaaacccttctcttcttacgctcagggcatcttctctgcgccatgactaccctcttgcaagcaaaattgttgtcaaaagtaatattcttttctctccttcttacccttcaattttattcaatgtaaacacgtatttaatgcatgcccttctcctgtcaattgttcttgtgttgtttgagccctgaggacacaaactcggtttaaagtaggcactttttttttaatccctttttccttgcaaagtagcaatttttatgccaactctgtgtaattntccagtttccactcaatttttggtgatataggtaatgtgtaagttaaaatat

SEQ ID NO: 12726 - DNA, 277 bp, Glycine max
  Clone ID: PAT_MRT3847_111499C.1
ggaaggcataactttgattattttatttagtcttgcaatacaaccaaagcattttacactagtctctgacatcatgatagttgaaggccgatgcttcatgcatcccatgtgttaattttcttaaagacaacatgtaatggatcgtccacagtgagtaccaaaaccctttttccgttctcatcaacatgaaccccaatactttcacacccgtcagtgtcacgtgcacagaacacaagcttgtaatgctgaccaacaagtttcctaatttcaaaccaac

SEQ ID NO: 12727 - DNA, 154 bp, Glycine max
  Clone ID: PAT_MRT3847_11149C.1
gtctgggtattgcggctcgaggtcactactgtcaatcacctgatggtctttttggacgttaattcacaacagctagggatatgtggtcctttgggtgcatagcggcagaattgcataccggattaccattattacctggggcttcagaatttga

SEQ ID NO: 12728 - DNA, 294 bp, Glycine max
  unsure (1)..(294): unsure at all n locations
  Clone ID: PAT_MRT3847_1114C.1
ctcgntcncgcgtacgtnagctctcaattcggctcgagccgtttncntgttcgnnggactggtagtaacttcaattnccgtnancctcanangcctntcntgagcaaggtcnanaancccncgntatccctctctagatngattctttacaccaaggganagtncgataagatatctgttgtagtcnnggccntnanngatgacattagggtgtatgaagtcccngctctgaaggtnactgcccgnaggttcactgnaactgccanagctagaatttnganagggtggtggcgn

SEQ ID NO: 12729 - DNA, 497 bp, Glycine max
  Clone ID: PAT_MRT3847_111500C.1
ctgatggattcccaattacacaaagaacatttcaaatatcaccaagcatgcctactatggacacaggagtcatttggtggtcaaaagtctatgatcgagaaacagagaagaaagtatttaattatgtagtacactgtactcaaaattcaaatctggctgagtggttcatctgcaacaccacatatgaacttgaacctaaagcattatcttttgttccaaagctcctaccagttggtccattattgagaagctatgacaatacaaataccaatgcaagttcattggggcagttctgggaagaagatcactcttgcttaaattggctgaatcaacaacctcatggttctgagttgtatgttgcctttggtagtttcactcattttgaccaaaaccaattcaatgaactagctcttggactagacctcaccagtagaccatttctttgggttgtacgtgaagacaataagttggaataccctaatgaattcttggggaat

SEQ ID NO: 12730 - DNA, 324 bp, Glycine max
  Clone ID: PAT_MRT3847_111501C.1
ccagcaacaaaagggtggtttaaattaaggtttttatttaaaaaaaatttattgccccggttgggcccttaacccatttttttaacattttcctggcccggttacctggttttttattaggccccggttggaaccatttaaaaaccaggccttttaaggtgggaaaggaaccaaaaaccctttcaaatttattttttgttacccctaagcagcagattaaagggctttgttttcctaaacatcatcatggctcccagggaatttgggggacccgtcgggcaactttgtgggaactaaaaaaagggcccgttctttgcccgggaa

SEQ ID NO: 12731 - DNA, 133 bp, Glycine max
  unsure (1)..(133): unsure at all n locations
  Clone ID: PAT_MRT3847_111502C.1
gtacgtacgtctgtattcgtttcgagcgtatattgcgattcagacatagagaatgtttatngntcgaagattcgnttcgttatgtnttaggatcgtgtccaacaggaacatgtgccttcaacatctgttggat

SEQ ID NO: 12732 - DNA, 348 bp, Glycine max
  Clone ID: PAT_MRT3847_111503C.1
aaaaaaaagaactgcccttttttttttttttacaggtccggttggctttttttgggggtttgggatcaggggttgcaggcccaattttttccatggtaaaaccgggaccccttttccaaaaggatttggaaggtttaaaaaattttagaccccctcctcagggggattggcccccctaaagggggccccccattttagcaattgctaaaaaacctttaggggttaaacgtacaaaaacgccctttttgggggtggggggggctttttttaaaatccccagggtggggggaaactttttttgtccagtaatttgggaattggggatttcttttttcaggccagggtttt

SEQ ID NO: 12733 - DNA, 327 bp, Glycine max
  Clone ID: PAT_MRT3847_111504C.1
ggggggggggaacttcaaaaatcatcaaaggcggttctggccaaataaaattaaccttaaagcgggtcaccaatccctccattttggtcaacggggggggtccaatttcaacatttacttttttacaagacaaataatgccccgatgaacatttacaatgggggggacttagcagctgtacaaacttttttttcaatgccaatgtccaaaaggggaaaggaatgaagggcgacctttaccccttcaatttatcattaaactttgaatacaaatcagcaagggccccataaataatggcagcggcgggtggcctatgcaacgagccaa

SEQ ID NO: 12734 - DNA, 2188 bp, Glycine max
  Clone ID: PAT_MRT3847_111505C.1
ttttaaacataaacacttaataatctcatattataaacaacttatttacccatacacagcagaataaagaaaagaggctttctttgttacaaagtaacaaaaacaaaataaaaaggggtcgaaaaaagatgcctactcatctgatgattccacatagccaactttaagaagcaagcagcttcaactatatgaaacatgatcaaagaactgtaagaactcgttatcttttacaaatgaggcatacatcaatcataaactacttgaaaaaatggttgcaaccctatcaccaggcactacttcatcaatgggattgtagcttgtgagtcaatgataaaaaggtttcatggttttaaggttcctatgagctgtatagtcatgattgtgcaggtggacaacagagacctagactgttagcaaaggtagcattgctggtgtggttactctattcatccaaaaacccatgtacaaagctcaagaatgaattcaacttcttgcatgctcaggaatgagacgcctacgcaactcatcgggtgcatccgccagttcttgagcagtgaagttgaacaatggaggcaatggtcgcccatttggcaagcatgcatttggttctcgcagatcatcaaagaaagggtgtgcacatgcttccaaagcagtgcatcgtagattcggtgaatactgaagcatccttgacactagatccactgcttctgaaggcatcttcttgtgaaaaaccttatgccatgggtgtgcttttatctgaggaaacttaaattcggtcccttctgtcgtctctcgcagcattacttctctggtcggtgttcccaagatcttaatgatctctaccaattgatcaaccccactctctccgggaaacattggatgtcctacaagaagctcagccaacacacaaccagcagaccaaatatcaatagcagttgtgtattctgttgcaccaaatataagttctggagctctataataccgcgagcatatatacgatatgttgggttcgccaggcaccaacatctttgcactcccaaaatcacatacttttaactgatgagtctggggattaaccaatagattctggggtttgatgtcccgatggcagactccaatcacatgatgcaaataatttaaaccccgacatatctggtatgtatacagttgcacattaatgataggcatatgttggtgcattctgacatagtgctttgaaactctgtagacagtttcaggtacatactccaaaactaggttaaggtacaaatcatctttctcagcagttgaatagaaacagtgttttagtctgagaacattagtatggtcaagcattcgcataacctgcagttccctatcttgcatgctcaggtatgagacgcctacgcaactcatcgggtgcatccgccagttcttgagcagtgaagttgaacaatggagaaaatggtcgcccatttggcaagcatgcatctgtgtctcgcagtgtccgcattggttgtccgtctcgacctccaatagcagttgtactgatttcaccggtttctgttccattaccattcaaaatagttccttccatatccttctcattgttgttttagcctttgtcatctccaatcttcatttcatttaattcttttggaagctgatcaaaacctgacttctcagttctagtcactgaaggaacattagaattagaactttcttttaatgcatctacatactgctcctgatcttttccgcatctctcattaggatatgtttcctcattgacctttccttcggtttcttgatcaaactttactctttttgtggtacaatcccctccaggatctgatgaaacggaagtcctcccagaagcaatgcttttcaaccttcgcatcatattcatggtgatagattcttccaaccccaacaatgtacccaactcaatccacaacctaaataccctcaaatcccaccaatttttgttttttttttctttcagaaaaacaaagagaaagagagagaaagaacctaatccttctccctcttctcttacaccagcttcctgaaaatacaaaaccaacaagcaaatggaagggaaaatggagccagacaacacagatcttatgaacccactttctcaaaattgggagcaagcttgagttttcgttttttttaacaaataattaatgagtttctcaatttt

SEQ ID NO: 12735 - DNA, 331 bp, Glycine max
  unsure (1)..(331): unsure at all n locations
  Clone ID: PAT_MRT3847_111506C.1
cccgcgtccgggataantaaaatctatggtgtggacacctcctcctcgcttcgtaacactgatgttgatcttggcacctagaccacacactattaccacaatcatgtatcgctatgctattagctgcacaaaacaattgttgaagctaacgcattagaatagggcatagtgtggcaccaaggcatgactacttcttctctgctaatgcttgaggtgaagcttgaaggaagccctcttcaagactgaccaccgaggttgctcataatgctgctgctgcattgaacgggtcagatcatatgcgggcagcaaatgggcaggccagactggatgc

SEQ ID NO: 12736 - DNA, 346 bp, Glycine max
  Clone ID: PAT_MRT3847_111507C.1
gctacggtgaacttttgggtggcgtcgttcttgcatgagttcgaatgggtaccgtctgatgagaagggtgttgatctgacggaggtgctgaagctctctagtgaaatggctaaccctctcaccgtcaaagtgcgccccaggcgtggataagagagagttgaagcttttattaaaaagggaacaagaaaaaaagaaaatgaaatatatagaaataaaacagacaagaaagtaaagtaaagattatgcatgttgctgcatgtaggttggtggttggtggcaggtgtgcagccacacaatggtgatatggtggaagggatgggttaggctctctttttttcgtttaggg

SEQ ID NO: 12737 - DNA, 685 bp, Glycine max
  Clone ID: PAT_MRT3847_111508C.1
ttgtcccacgcgtccgtacggctgcgagaagacgacagaagggaaagcagtcatcaaagaaactctgagattacatcccgcaactcccgtattgattccaagggaatcaatgcaagacaccaaagtgatgggttatgacattgcagctggcacacaagtactagttaacgcgtgggcgatttcggtggatccttcatattgggatcagcctctggagtttcaaccagagagacacttgaacagttcaattgatatcaaaggacatgattttcaatttatcccttttggagctggaaggagggggtgtcctggaatagcatttgccatgcttctgaatgagttggtccttgcaaacattgtgcaccaatttgattgggcagttcctggtggacttttgggggaaaaggcattggatttgtctgaaactactggattgtctgttcacaaaaaattaccacttatggcacttgcttcacctcatcatctgtcacaaaattaactagtggatcagttatgtgttctgatcataatctttctgttatctatcaattatgccaaacttaatttgccagtgtttctgttagagatttttaactagttttctactcataaaagatctggagtattcgtaaaaaaaaaaaggatagaaactccgactaataagctcccctcccaggaatctgat

SEQ ID NO: 12738 - DNA, 288 bp, Glycine max
  Clone ID: PAT_MRT3847_111509C.1
gcttctctaggctttttaagttaattcaattgacatttcaaagtaggttatgcgctaaacagtgctttattattgcaatatgtctctgtaaactgggtttgacttttgaggttctcagtttatttatacaggtttgctctcctttttagtttgcttacgcttttttcttattgggtctttgcataaattttattaaatttatagtcaagtcccaacctaccaccataaattcttatatctccatgtaaacaacatcttgcctcctggacaaaatgtattgtatgcata

SEQ ID NO: 12739 - DNA, 126 bp, Glycine max
  Clone ID: PAT_MRT3847_11150C.1
tttttctgcgcacaatttagcgcgcaccacaaacgggatcggaagaaccaggccttatgagagagacagcagcaaggaggggacagacgaacgcgaaaaccatcaccggagcccgcggacaggctc

SEQ ID NO: 12740 - DNA, 274 bp, Glycine max
  Clone ID: PAT_MRT3847_111510C.1
tgaccttgaccattcctctctttctcgcttctctgcaagttcttcctcctcggcattcttgggtttgtgtgtgtctatgtaattaattgattgcattatataccttttttttccaattactttataaggaaagataatcaccatacacaaaaatgtaagattgttgttcatcggagatttgcagcttaactgtcatgcagaattgtgttttcaccgccattgactacagctctgccactcttggatccactacgagcaatttgtctccagcaat

SEQ ID NO: 12741 - DNA, 294 bp, Glycine max
  Clone ID: PAT_MRT3847_111511C.1
tacggctgcgaaagacgacagaaggggtatttgggatgatgggtagtggtctttttaccgtacttttcgggttagggtattggttggatgttcatgtgttggggttttttgttggtgttcagattgtttgtggagtttttcagtcaattgggtgcccttgtgtgttcacagttgtggggtttgcctagggaccaccaagaaggtcataaatggtggtatggaactcacatacctcggtggggggaattatcattggtcaattggtggctcaagggcctttggaatttggcctgg

SEQ ID NO: 12742 - DNA, 198 bp, Glycine max
  Clone ID: PAT_MRT3847_111512C.1
ggctcgaggcgaggagatcccttccgtcatcattttctacaggaactttcagaaggagaagaagcggggggacttcgactgcactgaccccggcttctaatgcacgctctactgccgctataagggtaagaacctcttattccttgtcgatatgctctgcgacttatgcctaccttacgggtgctttgaatagtcttg

SEQ ID NO: 12743 - DNA, 381 bp, Glycine max
  Clone ID: PAT_MRT3847_111513C.1
cccaaaggacaaaaatttcccctaaaaaaaaaaacccggggaaccacccggggggacccccacccccaagggggaactttgggggaaagggggcccttgccataaaaaaaccccgaaaaacgggggggggccaatgggggccttttaaaaaacaaggggtttttttccctggggccccaacttgggggggaaaccttttaacacccaacctccaaaaaaaaaatctcttgtggcccgggccggctcgggggaaataaaatccccccccaaacccaaaaggggttataaaacgggaaaagcccacctttgggaaccccaaacataggggctcccggggggccgaaaaccggggaaagggccttttaaaccccagggggggca

SEQ ID NO: 12744 - DNA, 329 bp, Glycine max
  Clone ID: PAT_MRT3847_111514C.1
tttttttttttttttttttttttttttttttcttcttagagaccaaggaaatttttttttttttcttaccccctccataaaaataatatcctgatcttttgggtcagaaaaacaattttatcggcaaacccgccttttttaaagaaactattccatatgtacaacaaggcagcaatacaacaacaccaccccatataagaaactaaccaccaaaaaattaaacaacccaagcgaaaaagtttttttgatacactgtaaaaacaaccccaaaaggtgctaaactaaacaaatttttttcaaaaaaaccccacccaattttattctattag

SEQ ID NO: 12745 - DNA, 444 bp, Glycine max
  Clone ID: PAT_MRT3847_111515C.1
cttcattgccaccccaatttcaataggacacatatctttgatctttcacagtttcactcacctttcaaccaataataaacaacaatattactagtaacatgaccatgggagatcataataactggggaacttctgaacttagtcttaataatcaatatcaaaatcataatcaagttggacttgatgttcctaaattcaagtctgttcaacctccctcactactcttctctccctcatcaatctccccttcttcttacttcaacttttcatctgctttcagcccttctgagttcttgaactcacctttgttttttccttctccaaatatttttgcttctcctactactgaggctttggttggccagagcttcaactggaggaacggttcgggcgaagaacaacagcgtggcaaggaggatgagaaaaactactccgacttctctt

SEQ ID NO: 12746 - DNA, 821 bp, Glycine max
  Clone ID: PAT_MRT3847_111516C.1
gttacggctgcgagaagaccacagaaggggagggccattttgcaattaaaaagtcctctctacccagcgagaaccgcttgagagcagcagtgaggtagaaaggaaatggtgagagtaagcaaagaggttctgcaaaaagcagccaaaaccctatccgacatcctcgtatgccctctctctaagcaacctttgaggtattgtcaggaatcaaattccctaatcagtgatgctattggcgttgccttccctataaaaaatgggataccatgcttggttccaagagatgggaaggtactcgaggaggaagatgcttcaaaacctgatcatgatatcaatttatctgcagtgaatgaagagaatcgaggaagaagtgcgtaatatgtagtgtaagatgtttggacttcaatttttatgatcaactgtctgtgtaccttggtggtggtggaatgttgtgtgagtaagaagttaccctgtttacactttggtgaagaaacctttctttttctttcttttccttcaatggaaaaattttccccttccctctcattgttttaatagttgatttgtatctatgagatttctctctctaactacatgatttagggtttattatcactcctgtgaaatttagtagtgatacacccaagagtcgcttgtcgaaagctttcttttcttccttcttagttccaactcttctggaggtaaagaaaaaaaaactataactcttgttcaataagaagtgttgaggatactaacctctattgaagagatataaggatttcctattggatatagagatgtataatattaattgctttccc

SEQ ID NO: 12747 - DNA, 248 bp, Glycine max
  unsure (1)..(248): unsure at all n locations
  Clone ID: PAT_MRT3847_111517C.1
ctctctcgctcttccttccactcccttcttcgaagatggaacaagagtcttcgctctcaatcactatctccctcgctctaggggttccatgagcgactccgcttgatctcatgcttccgttcaccaggcttcgttcgccgattactaggcctccacttcatttctcttccctggccatggagctcaagctgtttgaatggggaaagatgctctaaatgtgccagcttggacgntntgttcaacaggca

SEQ ID NO: 12748 - DNA, 263 bp, Glycine max
  Clone ID: PAT_MRT3847_111518C.1
atgagaccacacgacgggacgatatgatataagacctacattctacaaggtgcttagaatcatccatgacatacttccattatcattcgttcacataagacatacacaatactttgtcctaataatgacgattatcactttccatagtatctaactcacaattattgcaaccttagtgatgcccatagtatatttacattaatcttcttaaattgattcatgttcatcatattacgctgttaaggtcgtacatacatctgatg

SEQ ID NO: 12749 - DNA, 382 bp, Glycine max
  Clone ID: PAT_MRT3847_111519C.1
tatctaattctggcgccaacaaatttgcgatctttctgtgcctccgaatcatggaaaaaggaagagaacgaaccccacgttcaaaaaagtggggggcggaacgcgaatacgctgaacccataaacctggtatttatttcaagtccccgactgttacggcctacataatttctcctaggaggggagtgcattttcttactgggctgatgaatgggatgtcaacaaccgggcatgagaagggatattataagtctctcgcaagggataagaacgcgtcataaaacttgaagatccagcgcaggcaaaaccatattcaatctgctttaaatagattggactattttttccttatttttttaatgctaacctgaaatccctattac

SEQ ID NO: 12750 - DNA, 445 bp, Glycine max
  unsure (1)..(445): unsure at all n locations
  Clone ID: PAT_MRT3847_11151C.1
ataagctctgataccatcttaaaataagagaaaaaatagaggaaagttgagtgaaaatcgtgtattagtgtacccagcggatgcatgtttatataggataattacattaattgtacataaataaaagatattttgtttcctctaaatcaaagataatgtctctatgaactacaattattacatgataaccaacaatttcaaagctcatagttaatcattttgtttttttataattttcaaatctaaggatttgcttggtagagatgaaactaaattgaagagttgaaaatgtggacaaaaattattataagcttgtgtggttagagggattgctaggaataactttcattgatgaaaccgaagtatttgtattttagggttgacaataacaaatgctttntatattgaatttgagttgaaaatgaattaaaatgaaatatcaatt

SEQ ID NO: 12751 - DNA, 177 bp, Glycine max
  Clone ID: PAT_MRT3847_111520C.1
aattcggctcgagctcgagccgaatcggctcgagacggcttctaaagactacttatttttatcctcaccacctacttgccctgcggggtccccttctggtacttggggatgcccttcttctattaaattcctaaccctttcctgttataaaacttatttcctttctttcaatattta

SEQ ID NO: 12752 - DNA, 1057 bp, Glycine max
  unsure (1)..(1057): unsure at all n locations
  Clone ID: PAT_MRT3847_111521C.1
ggagtctgcgactgagaagtgcgacgctgctgcaaagtgcaagcggatttggtcttatttgttaataaactaaactttgtcattaaagacaaattttcaatttaaaataagaattcatcaatgaatgaaatgaatttttagttgtgaaatttcaaacagtgataatcaaaagtaacctaaatacaactggatcccaattcttgagtccttaatccttaactggcaccaaggtggtatgtgcctaacaagaagaattcaatttaaggggttaagggggcattgcatagtacatttggaaagaatggaggctgattaagctgatgacatttcacccagaaccttcagtggttgtttttctctataccatgagtggtgccaaaagacagcatacgatctatattatcaatccgcccttgtatggattttagaagtgaattcagtgatgaaactcttttcctaacactagaaatcttggcagcatgctgcattatgaatggcaaaggtgcatcttcaagtaactgatcaagttctccggtgagacgatcgatgacggaagagaggtggttctggctttggagagtttgctgagctctgaaatcgaaatcgttaataaccgaagagagcatcgaagacaagcctttcgccagcacgtcggagctctgtcggaggtgatcgtcgccgtcggaaccgtgggaactggaaggctccgtcgtttcgagtacgacgctgtcgttttccgctgcttccattgtcgtttggttcagttcggtgcgcagaagtgcgaggatacgtgtgttatgtatctaaagaggagaagatgtcagctgggcctggacttgaagcgctagtagatgagagaggttgagtcattgcaaatgatggacgaaatatagtgggagtcgtgaaaggttttgaccagggagcaaatagtagtcggtgggcagtcccatgaacgggtttattcgacaaaggaaggtgtgcaacaacttgttcttgggttgtagatgatcangggtgacaatatgagtgttgttggtgaactggagtaagaactaga

SEQ ID NO: 12753 - DNA, 257 bp, Glycine max
  Clone ID: PAT_MRT3847_111522C.1
agacagaacaaacgaagaaaatggaagaaggagaagaagcggtgaatcgtagaacgaaacaacacgcggaacgcggaatcggaggtgctccaccggcgatcgctcatcgacgccggcgaacttcagatcgctgcacttgcttcaccgaagattgtgccatgcggatattcacataggcatctgcagttggaatcttgtagtacgggtttataaggatcactggtcgaaaattgtcatagatgggctgaggtctgctt

SEQ ID NO: 12754 - DNA, 406 bp, Glycine max
  Clone ID: PAT_MRT3847_111523C.1
agcggagagagaaactcatgacatgtttgagtatggactcctacacagtgaaacaatggccaaagagggacttaattacgccatttgaacggactctaactcatgaaggccagccaaaaggatgggccgagatatgttaatcatggtgaactaacgcgctggattgccagtcgacaccacagtttttcgtgttacggaaataagctgtcatgccttttttatgtgcgtacttattgctgctagaatcagatttgtcgactaagtgtgattatgtaatagctgcaacctgtacgaaattgctatccttttacagtatacacagcataagaattgtgaagtataaagggttaagtttgtggagcttacagagggtgcataattcccattagttgggttgctcaaactc

SEQ ID NO: 12755 - DNA, 704 bp, Glycine max
  Clone ID: PAT_MRT3847_111524C.1
attaattgtattttatttattttcaaattagtcaagaagagaggacggagctaccaaatttagtatataattattgtaaagtttatagcgaaaatgaaactcaatataaactgagatccatagcctatacctatgtacattcaccactacaatcattactggtagacattaaaaacgcagtagccatggcaataaaaagggttttcttttttctctagtagacacccttctgatactcggtctcacaaaaagttcctccaagatcatcacaagcctctcctctaaataccgttttaggatcatcgtattcaagatactctctctcaacgttctctgtaacaactcgtggtgtcttagcttctggctgtagcttcacttcagggtacatttctgccatgcaggcttcccctccaacagtttcgcatgcttccgctggaaacactgagaacgcagagttgtagtccacagttgaagtgtcaggctccacgattgcaaccctgatcggagagtaacgaggtgaagagcgtggggctttcaaattggtagggaagatggcaacatgggagaaactctttgtttgtgccaaaggcacaacgttgggggcagcaaaggttaaggatgtttgcattttgaaaggtgttggtttggtgaactcttttgaggttatgaggagcagtgattccaatttatagaatagagtgaag

SEQ ID NO: 12756 - DNA, 435 bp, Glycine max
  Clone ID: PAT_MRT3847_111525C.1
tgcggccggccttcattgccttcgtcgtagtggtaatccattctctcttgctggaaaagtcctacaacaataagcgcattggctgttgaactaaggcccgcactgctactgcttgaaacttttcccttggcttgccggaaacttaataaaagcatgccgcctatgacaaacctcattcttttttcacactttctcttggcttgacggatttccaacgtgagcctgaagatattttcccaaagcaagctattttgggcggtgggaaagttaatggttcttttttttgggcaaacactcgtccctgtggccatggccttcagggtcttacatgggcttcccttcaaaagttttttgcccttcttggggaacaaagtttccccgatttttttcaggaaattggataagaatcctgttttgccctactgggaacttaaa

SEQ ID NO: 12757 - DNA, 371 bp, Glycine max
  Clone ID: PAT_MRT3847_111526C.1
tatcctcctacagcaggccgccctccttttttttatttttttcttttcttttttttcttttttgtgttttttttaaacattttgggggtaaaaacacccttctcaaacacatgcttataatgtcaaagacaaaaaccttttttagttttaaacggaccaaaattcttcccccccccccactattaatgaacaaaaaccaatggaaaaaccccttcaaacccttttttcttatccctaaaacaagctataccctccccttcctaacacaacctctttccgacctctttcttgaccatggaaactattcaaaagaagccccctttgcccctcccaactttgcttttttttcaagccataaaggggtttggtcc

SEQ ID NO: 12758 - DNA, 204 bp, Glycine max
  Clone ID: PAT_MRT3847_111527C.1
tcgagctatgcattccccgaattaattctcaaacaatcacatgcccatttgtttatcaagtaccatttgtacctcggactagactgacagctttgggatatgtttattttacaacttatgctctgcgtttgtattacattctgtatttgattagcattaatccattgtgagtcttactatctcctattattgtagctaatcctg

SEQ ID NO: 12759 - DNA, 333 bp, Glycine max
  Clone ID: PAT_MRT3847_111528C.1
ccgggtcgaccccgcgcgcgcggcgcgatagcacaacgaggggaaatcagattgtgcgagaaatataacagagagtctcttgaacaaaaacttcgaactcaccaactcaaactgagtgctttgaaactagaaagtaaaacccaactctatttccttctctcaggagtcagagagacacactgcaaagatataatgcggaatgggtgacaccaacgctcaagttagaaactagtctcacaatgaatccactgtaacttctaaaaatcatgaacttaagcatgggcctaatggggcagtgttcattagatgtgagattacaaatgtgggcaagat

SEQ ID NO: 12760 - DNA, 1211 bp, Glycine max
  Clone ID: PAT_MRT3847_111529C.1
tctaaatttatcattgctagcctgttagctttttccttgggatgcatggcttttgtttgtaaagctatggctacatgttgctctgcgagcctgtcggccgctccccgcgtccgctgctttcttttctcttcttattcgttagggcactcaacattttacactcttttcttcttctcgttgttgcttcggtgttgaatcatggatcagaaagtcgatttcagtgctccgcattccatgggaaccactatcatcggcgttacttacaacggcggtgtcgttctcggagccgactctcgaaccagcactggagtgtatgttgccaaccgagcatcggacaaaatcacacagctcactgataatgtttacgtgtgtcgctctggatcggctgctgattctcagattgtctctgactatgtgcgctacttccttcaccaacacacgatacaacttggacaacctgcgacagttaaagttgctgcaaaccttgtccggcttctcgcatataacaataagaatttcttacagaccgggttaattgttggtggttgggataaatatgaaggtggacaaatttatggagttcctctgggtggaacaatagtacagcaaccttttgctatcggaggatctgggtccagttacttgtatggtttctttgaccaagcctggaaagagggaatgaccaaggatgaagccgaggatttagtaaaaaaggcagtttcactggctattgctcgtgatggtgcaagtggtggggtggtgcgaacagtcataataaactcagagggagtgaccaggaatttctaccctggcgaccaacttccattatggcatgaggaaatggaggcccacaactctctgctagacattcttggtgtcccagagccgatgagcatgtgaagtgaagaagtttctgtgttcataaatgtttcctgatagattatatcttgtcacctctccttcatgaactagttaacgatttgtggagtcgattacattgtttggttggatattgtttctggtcaggttatccttgtgttatgtaccatgtttaacctttgtttcatcatatagctccaaagtaacatgtaaactttggtgaattggtgttgatacaaagcaattatcaaatcattttaaattcttatttttggtaaaaaaaaaaaaaaaaaaaaaaaaaaaaaaaaagcggcccccctagaggataccag

SEQ ID NO: 12761 - DNA, 201 bp, Glycine max
  Clone ID: PAT_MRT3847_11152C.1
ccggtccgaattccgggtcgaccccgcgtccgttacactttgcggactgaagtcatcccgggaagatttcttatgaccgattgctgcgaatgtttaactaggttctactacagcagcggtcagctaccagaactgcaggcttgcaaggccttatgatttctgtgagagtatgctgttgattcagaaggtggacaatggcat

SEQ ID NO: 12762 - DNA, 202 bp, Glycine max
  Clone ID: PAT_MRT3847_111530C.1
gcggttagggttcacaacctttccttttccttttgcttgcgaatctgaatcaaataatcaatcatgcattcattattcatcatgtgggcggcgaaaaaaatcacgctcaaaagatccgaccgcgaggctttctaggtggaggaagccgtggcgcttgaatctcacaccataaagcacatgatcgaggacgactgcgccgaca

SEQ ID NO: 12763 - DNA, 357 bp, Glycine max
  Clone ID: PAT_MRT3847_111531C.1
tggcttggaacctttgggctgatttatgtgcttgcatgggtgagaagatgatagaagggggacctctctcgaagatctcccgccccccaccccaggcgcagatccgcgggcaaccaacaacccagccacaaccaggaccgtctccgcggtcgtcgtaaccgagcccccgaagaccgtagcgtcatccgcaggacccggaccacgccagctcccccctccccctcccccccccccaaacccgtccaccggtcacctgacggctaacacgacgcaaactctctcattccggctagtcggcccccccccctccgtacggttacggcaaacgaccttgggccaagctcccggtcacggccc

SEQ ID NO: 12764 - DNA, 505 bp, Glycine max
  Clone ID: PAT_MRT3847_111532C.1
aaaaccccaaaatttggtttaaccaccccaaaaaaggggggggccccatggaaattaaaccaacccataattaataaccccccccccaacaccccagaaaattaaaggggccggcccggcctttcaaccctttaaaaggggggagggggaaacaaaaaaaagggcccgggaaaaaccaaaacccccaaaagggccccacccaaaaaaatggtgggggggcccaaaggaaagcccggtcccttaggggccaagcctctaaaaaaccagggccagggggggcccggaaagggtggaagcgcgggcagctcccataaaaaagcccccccccccaaaaggggaaaaggggtttcctttaaaaaaaaagggttttcccccaggggaaaaattaacttttcccacctaaccaagggggggaaaacaaaaaaggggaaaagaaacccgttttggccaaaaagtggcccggaaaaccaagggggtggaaaaaccacaaaaaagggggcccatt

SEQ ID NO: 12765 - DNA, 593 bp, Glycine max
  Clone ID: PAT_MRT3847_111533C.1
gcgatctcagaaaactcaaaactccagctaccttctctgcaattcagatccctctcggtctcaaaaccttgctcactaactcgttctcttccctttctcaactcagcgaaacattcaccgagtcaacacgctctcgcagcacatggcaccacgatactagcgtagacgcggctgcatttaatttccccccgaagatctcactctccgtggcgtcgccgagtcgcaactcgctccgaactcgggaatggcttcttcggaagccgattcccggctgagtcaggtcgtggttcccgcgctcgagaagatcgtcaagaacgcgtcgtggcggaagcacgcgaagctcgcgcacgagtgcaaatcggtgatcgagagcctcagccaccagcaagcgccgccgccgccgggatctccttcggataccgaaccggaaaccgccgtccccggcccgctccaggatggcggtccggtggaattctcgctcgcggagtcggagtccatcctcgcgccgctcatcaatgccgccgtctccggcgtcctcaagatcgccgatcccgccgtcgacgccatccagaagctcatcgcgcacggctacc

SEQ ID NO: 12766 - DNA, 503 bp, Glycine max
  Clone ID: PAT_MRT3847_111534C.1
tacggctgctagagaagataaccttatcagatttagcagctgcagaccttgataatgatggatcaatcaggtatgcctgaatgtttgtagtctcatataatatctttccttgttgttttgtcgcttgtataataaatggattaaagcagaatcagtgcattggttacaaagagagttataagaagtcaaggcctaattaaaagcaagagtaaacagaatattactagaagttcgtggctaaagcctgttttagtcactttgaaaataagaaattgtaggataaattagcaaaggggaatccctgagtatatcacgttcctagaacatttcctagttgttttagcttcacaaatcacagttaaagaagcaagatggggacagaaatcaaaagaccatcatcatctcagaccaaccttaaatcaagaaattatcatgttttgaagaggataaataatatatttcactcttgtcccaatgctctactgtaaatttgtaacttctta

SEQ ID NO: 12767 - DNA, 425 bp, Glycine max
  Clone ID: PAT_MRT3847_111535C.1
tacggctgcgagaagacgacagaagggtactcgcttagcgagctgacttcctcgctaagtggataagcctcgcttagccaatctagctcgctgagcgagcccttcagcagcatttcaaaatcttctcttctttagcctaaaaatccaaataagttcaacattagtcatccaaacgaagtttccactgtatgaattcacacaaaaataaattatttacaaatctcacaaaagaaaccataaattagaggaacattgctactttttatcctatttttaatgcatttattactcatgaataacaattaacaaactccaccaaatttacagttttgtttgtcctcaagcaaaagaaaataacagtggtcaatcaaatcaatttttgtctgataagaatcaatcacactaacagagatgactggacatgc

SEQ ID NO: 12768 - DNA, 417 bp, Glycine max
  Clone ID: PAT_MRT3847_111536C.1
ttttatcctgcgttcactcgatctcataatgggggtttctttcaaacgaatagggggccaatcacaaacatcgccgccggacggcctgaagaggcgactcaccccgacacgttgaaggccgatttggctgagttcatctcaaccttcatcttcgtgttcgccggctcaggctccgatatctcctactacaagctcaccgacaacggcgctgccacccttgccggactcatctcctcctacatcgcccatgcattccccctctacgtcgccgtcttcatcggcgccaacatctgcggcggacacatgaacccctccgtcaccttctgcgccttcagaggctgcaacatcacctttctccgcggcatagtctacgtgatcggacaactcctcaggttcatcgtcggctccctcctactg

SEQ ID NO: 12769 - DNA, 172 bp, Glycine max
  Clone ID: PAT_MRT3847_111537C.1
aatcactgcttgaaagaggttcatgaccatcatctccaatgaagatattatcatagattactgcagcaattgctgcacctatgaatggaccaacccgatatacccagtgatgggtccatgaccatgtaacctacagagggtccaaggacacagcttggttcattgatgcacc

SEQ ID NO: 12770 - DNA, 261 bp, Glycine max
  Clone ID: PAT_MRT3847_111538C.1
cgaacccgaaccaactaccaccacggtcaacgacatctcaaaccacaatgaacaagatcgtcctcttcgccgctcttttcgccttcttcttcatcctcattgaggccgctcccatgaagatcgtccctcagcctgctgcccctgcccccaaggccagcgtttgcgatgcctgcactgaggtcattggtctcctcgagtccgctggacttttgaccaactccaccgccactcagatcgagaccgccctcaaccaagtctgca

SEQ ID NO: 12771 - DNA, 252 bp, Glycine max
  Clone ID: PAT_MRT3847_111539C.1
tgagaactacgaagaaggaaatggcttccttaatgctctcctccccagctgttaccaccgacaaccgtgccggtgccggcatggttgctccattcaccggcctcaaatccatggctggcttccccacgaggaagacgatcaatgacattacctccattgctagcaccggtggcagagtactatgcatgcaggtgcggccaccacttggcaagaagacgttcgagactctttcctacttaccagacctcgatg

SEQ ID NO: 12772 - DNA, 214 bp, Glycine max
  Clone ID: PAT_MRT3847_11153C.1
ccctcgtgaccgaccaaacatacgattatttttgtggggattcataaaaaagatccgaggtgagtataaatcgcagcgctgccactaaaggacagcccaatccttaaactatggcgttaaagtcaaatacaatattaaaaaagagtgactcgaccatgataatcctctgccattataacacattaaaaacaaacacaacaactcttcaattcaa

SEQ ID NO: 12773 - DNA, 751 bp, Glycine max
  unsure (1)..(751): unsure at all n locations
  Clone ID: PAT_MRT3847_111540C.1
cacgcgtccggcttggagagcttagaaagaaaataaatgggaagttagaaatgtcaagataagctttggaagtacgtgattttgtgaagtagaaataagacagaatacttgaaatgtaagttaattagaaaaccattaatcttaccttagaggtgaaaattgtaaaccataccaaaagtcactcagactatatgggtttcattatactaaatggcagagaaatagagggagaagtaaaccataggattcaagtgtgttggactaaatggagtgtttcacgttatttgtaaccaaaaggtactcaagcttattggaaaattatactgcataagatctatgatgtagggaactaaatattgggtagtaaaagctaacaagagaataaactcaatgtagtagaaatgagaatgttgcgtcggatgaacaggcatactaaacataataaagatggtagaagctcacccaaggtggcttaggcttgattgaagaagagctgtaaaagccacactaaagagagtagatctgatggagggtaactcaaatcaccatagacaaagggaagattgagaaaaaataatatgaaaaatcgttaagagactcagttaaaatagtttgtctataaacatgatttacaatagaacatgacaccatttgtttcacggagccgacccctcatgggaaaaggctttgttattgntgcatacttgcgtcgtttatgtcatatagttaaagcataactgaactatgacca

SEQ ID NO: 12774 - DNA, 661 bp, Glycine max
  unsure (1)..(661): unsure at all n locations
  Clone ID: PAT_MRT3847_111541C.1
ccggaattcccccgggaagcctcttgaaacacacctactacagttgctaaagtccttacttgcaacaatgaagcttgtctttggcaccctactattatgttctcttcttctaagcttctctttcttggagccagtcatagcctatgaagactcatcttattgcagcaacaagtgtgcggacagatgctcatcggcaggggttaaggataggtgtgtgaagtactgtggaatatgctgtgctgagtgcaaatgtgttccttctgggacctatgggaacaagcacgagtgtccttgctacagggacaagctcaacaagaagggcaagcccaaatgcccttgaacttcaactcaaacaccaagtcgaatagagacttaagagtagtagtttttgcatgtggttgtattcttgttttcaatgtctgttgggtatgttagatctgaacaggaataaattacacatcctctctgtctcagtttcgactttttgacctgttcatcaacctataaacattttttttatctgttttataattaattttaggctaagtgttagctttgtttttttttatattttaaaaattttatttcgattgtttttgagatgtctgttggatatatgttagatcaaaaccgcgagacttgtcctctcnnngataatata

SEQ ID NO: 12775 - DNA, 721 bp, Glycine max
  Clone ID: PAT_MRT3847_111542C.1
ttccggagcgtatatttaatgacatttcatatttaccactttcttttcttttcagttcatagtaaaaaggctattcactgaatcagtctaatttaattttcaaggttcatcactataaataaatgctcttgctaatgccaaagcaaaaacctcttgttgagagttgaaacacacctactacaattgttaaagtcctttcttgtcatagcaaaaatgaagcttgtctttgccaccctactgttatgttctcttcttctaagctcctctttcttggagccagtcatcgcctatgaagactcgtgtaagattttctcttactgctataaagaagtatatatataaaatcagtgaatatttttgtgtgtttgtggcagcttattgcagcaacaagtgttcggacagatgctcatcggcaggggttaaggataggtgtctgaggtactgtggaatatgctgtgctgagtgcaaatgtgttccttctgggacctatgggaacaagcaccagtgtccttgctacagggacaagctcaacaagaagggcaagcccaaatgcccatgaagtcttgaactcaaagaccaagtcacatagagacttaagagaataagactagtggtttgtgtttacaattacatcgtgaattcccaagcataatgtgtcttggatatattatagatctgaacgggaataaattacatatcttggatacattaatcttggaat

SEQ ID NO: 12776 - DNA, 1317 bp, Glycine max
  Clone ID: PAT_MRT3847_111543C.1
ccacgcgtccgcttcttttttttttagaaaaaaaaggaagaaaggacactgaatctgaattttatgggatatgtatatttgtaggttgacgggtaacacagcttcggctcgtcctgtgtgtgtgattacattacatgcgtgttctgtgttccgagatttgttgaacccatcaatcagcattcagcattgaaccgtacgatccgattcggatcgaatgcggcaccgtaatgtagaggtcaattctcaagagtttaacgtgagcacgttactgaatcttgaaatttagatcgcaaatccacaatgtcttggggattgggttggaagagaccttcggagatcttccacctcactctcagctatggcatcgacgatccgccggagaatctcgcccgcacttcaacctcctcccgctcttcctcttcttcttcgtcctcgtcgtcttcgtcgggttctatttcctcaatcctctcgcaggatcaggacctcgggtttcgcattgaattggattggtcggcgtcggacgacgaggatcaggtggcgttgaagcttcagtcccagctgatggtggcgttgccgatgccgcaggacacggtcgtggttgagttgaggccgagggacgatgatgagagcgtggtggacttgggaatgaagcttgttaagcgaagggagcctctcagggcggtcacaatggccaaggccgttgcctccggtcagcagagcgacggcactggtattttgatacgcttgttgcgctccgatttgccgtcctcgatgccgccaaacgttggagatgccgttgccggttccggccaccactggactagtcttgctgcgctcagcctctgcggctgtggcttgtcggtattaccagtagagcttacacaattgccacaccttgagaaactctatctagataacaacaggctaactgttttgccacctgagcttggtgagctaagaagcttaaaagtgctcaggattgacaacaatatgcttgtctcggtgcctgcggaactgagacagtgtatgcagttggtggagttgtcattggaacataacaagcttgttaagccacttcttgacttcagggctatggctgaattacgggttcttaggctatttggaaatcctcttgagtttcttcctgaaattttgcccctccacaaacttcgacacctttctcttgcaaatattaggatcgtggcagatgaaaatttgagatcagtgaatgtgcaaatagagatggaaaacagttcttatttcggtgcatctaggcataaactcagtgccgtcttctctgttatattccgatttttt

SEQ ID NO: 12777 - DNA, 350 bp, Glycine max
  Clone ID: PAT_MRT3847_111544C.1
tattgacgtattttttaagaggaattcataccttctgctgggtgaacaattcttactggtggaatcatgtcggggacttcattgtctgtatctgatataccgtcaacactgtcatcttcgtctaacgactcttcaacatatgagttagacacaagataatcatcatcatcatgatcatcatcttcgtcaagatttaaattgctcatatttggtggcggctgggtgtgatcatttgatacataatttgcacatgatgttagggaattcgcagaatgaaacattgaaccaccagccacatacttttctatgtacaaatttttaactgacatttattgctgttgtttaaaact

SEQ ID NO: 12778 - DNA, 423 bp, Glycine max
  unsure (1)..(423): unsure at all n locations
  Clone ID: PAT_MRT3847_111545C.1
ttttccacaaaagtatattcaatattccccaattgttgaatcggaccaatttgatggccctattccaccacttttacgaggtttcatatttcttgatttattcaataacaaaagatgaacatctaagtataaaaaaatgaacaagaataattttattgcatttctgaaatatagattaaattgtttacaaaatattaatttctaattaatagtcaatgatgataggatgcttgaaaataatatatatattcaaggaaagatctccaatctaaatcttactattttcttatctcaaaatgtcttttaaaactacaaatcatttatgattatgttaataacgtaagattatcattttttgataagttatttgtttaaaaagtatataatgtgttgaaagagttttactattattaancttcatta

SEQ ID NO: 12779 - DNA, 419 bp, Glycine max
  Clone ID: PAT_MRT3847_111546C.1
ggctcgagattatcttttgttttgttttctttggcgaacaaggggtgtatatataaaaagggcaggggggcccgttacgatccttaatacctcaaacaaattcttcatgacatctgatgttacgaatgactagaaattataggtagcaacgaacagccatctatttaatgtaataccaccctaccaggcggtttaatattattggatacgaaggctctctggaacgattgtttacttttgctttcaatgggacaggtacctaagtcccttaaggtcataaaaatggatttctacatgaacaaagccctttggaagaaggttagaaatgaacctgctcaacgcatgttatgattttttggaggccggcctggtatccaccaacccctacacggtcatgataaagatggtgaggtggaaca

SEQ ID NO: 12780 - DNA, 567 bp, Glycine max
  Clone ID: PAT_MRT3847_111547C.1
ggttaggttaccccagtacaaacatggaaagctatctagcaaactcgagttatggcccaagtgattgtcaggatatttgctggaaaaattgcagttgtattgcatacagtgattatgatggtaataatgaaactggctgtacattctatcattggaattcaaccaaaggtactaatttagcaagtggcggcatgaagtttcgcttattggtaaagaacaccgatcgcaaaggtaagtctactataatttcacaacttcctatttaccattttaatctgtttcataacttctttaatagtaacacaaaaagttgctaaatataataagcgatagatcaggaatcacatatacagaactcgttgcttgtaagttataaatggtgcatgcaggtacaaaaaagtggatatggataactattctaatagtagcaactctagttgtaatcagcgctttcgttctgtttctggccttgaagaatagaaaacttttgtttaaagaggaaagaagaaaaggaatgaagactaataagatgacagatttagcaactgcaaatagattctatgatgt

SEQ ID NO: 12781 - DNA, 1294 bp, Glycine max
  Clone ID: PAT_MRT3847_111548C.1
tacggctgcgagaagacgacagaaggggattgatatcattatctcttctattggactaaagataactaaactcccagatatttgttcacttcactttctcagtgcagttgttgcctaatgcaatggaggaagaagccaaggtggttttgttgggtgcacggttcagtatgtttgagatgagagttaagatagctttggcagagaaaggaatcaaatatgagtacatggaacaagatctcaccaacaagagtactttgcttcaagaaatgaacccaattcacaagaagattccagttctcatacatcatggaagacctatctgtgagtccctcataattgttgagtatattgatatggtttgggacaacaattgtcctttgcttccctctgatccctaccacaaagctcaagccaggttctgggctgattttgtagatcagaaggtgtatcatgcttctaagagagtttggatttcaaagggagatgagaaagaggtggcaaaaaaggacttcctagagagcttaaagcaattggaggagtttcttggagacaagccttattttgggggtgacacatttgggtttgttgatgttgctcttattcctttctattgctggttttatacttatgagacttttggaaacttcaaagtggagggagagtatccaaaacttatctcctgggccaagagatgcatgcagaaggaaagtgtatctgaaactcttgcagatgagagggaggtttatgaggctgttttggattataagaacaaatttatattgaactaagggaacactgtgaagtgtttgttaaagctgtgagagtttgcctgtgagatagacctagtactacagattctgttagttatttttatattagttagctattgtgatcccaataaaatctcaagtagttgaggttttttttagcaaatttcaaaattattataaatttcaaattggctctaagtgtataaataggcattctcatttatgaaatattgccttctatcttcaattcttatgcctcaatttttatctcaagcaagtttcagttttttagtttctcggcaagttttagttggtggtgacaatttgcattagacactgaggtgtgtgaactgtaagaacaaaaccacatggttctagccttgtcattgccgtgtacttatattctttaatgcacattcttattgtattttcaagacttctgactgaatttccattatgaagatctcttcacggaaaaaaaaaaaaaaaaaaaaaaaaaaaaaaaaaaaaaaaaaaaaacacag

SEQ ID NO: 12782 - DNA, 412 bp, Glycine max
  Clone ID: PAT_MRT3847_111549C.1
aaaaattgatctgcagatcgtctctgatccgttgcttcaaaaatcgacgttttcactacatttgggacaaacaattgtgatgctacagtaacgctggaacaagggatggtcctgctatcggaaacgactagtcaactacataatcctgctacagcgtgtgtgatcaatactcgtggttgaatatcaatagccaaacgactctacaggtaagtaacatactgaccaccaatcggtactgtggcgtttcacctgaaatagaaccgttgataggttatacggtcacaaaccaggtcgctatgaacccaatcattactgtattagatgcaacacctatgattggtatacgtatttctgaagcatccgtacaaagtgacatgactcagtcgccgttcaaggttaatcctggacctgc

SEQ ID NO: 12783 - DNA, 675 bp, Glycine max
  Clone ID: PAT_MRT3847_11154C.1
aactgcaatatcaaaatactgtattgggtgaaaatgagtcttaagactgcgcaagactaacttttaaggttactcttttctttaaaaatagaaactcttctaactaacctctatggaagcttatcttttaaacttttgttcgcaagtaaaactgttcatgcagctaatatagaacatttgttccactttgcaagtactaaccttttacctggctcttctgatttggacatgacaccaaatcatagagattacttatgcagacactttctcattttcgggcttcagaaaaccaccttacttcaagcactgacctcttttcaagataactcagcctcaagagattctgtattttttgccttggcttcacccacccttctcaacatatcatgatgcagctaaaatgctatgttgagctctccattactgcaacaaccatcatacaggttctaaacctttggtttagagcatgttataccacaatttaaatggtgctcttatatttacccttcagaaatgcatgtaaattttgtcttggcttcacccctctcctcaacatatcatcacgcaattcaaatgccttgtcgagctctccattaacacaacagccatatattagcaagttatatgcaaccaaatctggctcgagacctctgtttaacatggtatcccataatt

SEQ ID NO: 12784 - DNA, 1032 bp, Glycine max
  unsure (1)..(1032): unsure at all n locations
  Clone ID: PAT_MRT3847_111550C.1
cttgcatgcctgcagcanntgtccaaagctcgaagtaaaatcattagttaagctggaacaattctgtgctagttgtttatatactccgctataaagtttaggttgttttaaaaattgtaagccggatgatctaatttttatataataataacagctcccacaccaggttaagaggaatgtataatttaaattttgttctggacgtaaataacaacattgcaactaaattatatagctcttttatagtacatccgagaaagctaagatttcaactctcacatagtatataagaaaagtataaatctgcatcagcctacgcaatggctgctatgcagtcaacaatgtctgcaaatcacgggatgcatatggaggcttccactccactggacattgtctgaccctacttaaaaaaatcattagttaattatgcaaatttttataatggttttgttattattaattaatactataaaaacaggacgttagttaatttatctgttcttgttggtagcagttggccttgttttcttgtgttggaaaagaagctcaacaacattggcgccattgtcaactcttctgactctatctacctccctccatggagtagttaggaactaattttgtctccacttattccatatattggctcgtttgtaagacgtgccacaattaaggtggtgaaagaaagaatgaacattttatgaaacattgaatttttattttccttcccaataaccagtttgttagatcgtttctctagcaagatgtttggtgtcattagaagaaaactccggcacctttactcaaggatattgtggctactatggaagcgtcccaagtctaaagttgttatcaaaaggtttagaaaattgaactttaagggtcaccacagagcagaattgcgtaaaaacaaatctacaagtgactcaaatggcctcttagttgagtctcaatctggaaggcctattaggattgctacattcaatgttgcaatgttttcacttgcacctgcttgttcaaaatttgatgaat

SEQ ID NO: 12785 - DNA, 529 bp, Glycine max
  Clone ID: PAT_MRT3847_111551C.1
cattcccgaaccgaaaaagaatttccccggccataaacaaaaaaaacaaaaacggccccccaatggggggggaaaccaaaattggctggttaaaacaaacgggaacagaaaaaaaaaaaaaaaaaaggccctaaaaaaacccccccccagaaagagacacggaaaaaacaaacaaaaaaaaaagaaaaaacccaaaaaaaaaaaaaagaaacagcgaccccaaaaaaaaagggaaaagaaaccaaaaaacaagagagaacgggccaaagaaagagagacacgagcgaggaacaggcgcccaacccccccgtgaagaagagcgcgcaagccaaaaaagcggggacaaccgccccaaagccaccgggaaacggacaccgccggaaaaggctagggagaggaaccacgagctgcacgggggccacgacagtccaccctgagcaaacgcaccttaatacaccattgcgccgttgtgggaaagaaagggagagggggaaaaaccatcttgccccagcgaggccctctgactggg

SEQ ID NO: 12786 - DNA, 326 bp, Glycine max
  Clone ID: PAT_MRT3847_111552C.1
ttgctcgagcaggggtaagctcgaggttatttgctactaccttagggggaacagctatattaggattcatcctctttttccaaggggtccataaggaatactgaaacatacacagcaagagcaccagataatgcgattgcattataaggacaaaatatcgtgcttccgagggggttgaaacagacggaacatgatctctattaataaaaaaaccgccgtggagagcaacaagggtgcacagatttcctgattgacacccacgggggaaacctccctgtgctgcaggagcccacagtgacaacaaagagggtgctgaactatgagca

SEQ ID NO: 12787 - DNA, 2415 bp, Glycine max
  Clone ID: PAT_MRT3847_111553C.1
cccttgggaaaaaaacaagaacctcacggccatgatcgcattttgctgaggctagaaagataagcaaagcgtgaaagcaacaatcaaagcgtgtcgaatcgcaaaataccatatcacaatcaacagtgactacgtttcgttcctctccttcgtttcgtcttcgatcttcggtttcattctgcgtttgttcacatcatggccaccgcttcagtggcatttaagtccagggaggaccaccgcaagcagattgagttggaggaggcgcgtaaagcagggcttgcgccggctgaactcgatgaagatggaaaggaaatcaatcctcacattccccagtatatgtcttctgcaccttggtatcttaatgctgagagacctagtttgaaacatcaaaggaaatggaaatccgaccccaattacaccaaatcatggtatgatagaggtgctaaaatctttcaggcagacaagtatcggaaaggtgcatgtgagaattgtggagctatgacacatgattctaagtcatgcatggaaagacctcggagagtgggagcaaaatggacaaacaaacacattgctcctgatgaaaagatagaaacttttgagcttgactatgatggaaaacgggacagatggaatggctatgatgcatcaacatatgctcgagtcattgagaggtatgaagctagagatgaagctcgaaagaagtacctgaaagaacagcaactgaagaaattggagaagagcaaccaaaatggtgaggatgctgcaagtgatgaggaggaagaggaagatgaagatgaagatgaagatgatttaagggtagatgaggcaaaggttgatgagagcaaacaaatggactttgcaaaggttgagaagcgtgtgcgtacaacaggtggtgggagtacaggaactgtgaggaatctacgtattcgagaggatactgcaaaatatcttcttaatcttgatgtcaattctgcacactatgatcccaagaccagatccatgcgtgaggatccacttccagatgcagatccgaatgaaaagttttatttgggtgataaccaatatagaaatagtgggcaagctttagaattcaaggaattaaacatccatgcttgggaagcatttgacaagggacaagatgtccacatgcaagcagctccatcccaggctgagttactctataagaatttcaaggtcatgaaggagaagttgaagtatcaaacaaaggaaaccattatcgagaagtatggcaatgcggccgatgaggacaaacttccaagagaacttctgctgggccaaagtgaaaggcaagtcgagtatgaccgtgctggtagaattattaaaggctactgaagtagtctcttccccaggaggaacaaagaagagagagattacaaaagatgagagggaccgctaatataatgttagatggaacgatgaggttactgcataggacatggaggcatacaggatgaagaaagtattgcactggtgctgctggtattgatgcggcagaggctgcaagcgatcttaaaaaagcgaatattgctcgtaaggaggctgctacagaggatcctacacctgtggaggagaaaaagcttgctacatggggtactgatgtcccagatgatctagttctagatgaaaaattgcttgctgaagcactcaagaaggaggatcaaagaaagagagaagagaaagatgagaggaaacgcaagtataatgttagatggaacgatgaggttacagcagaggacatggaggcatacaggatgaagaaagtacatcatgatgatccaatgaaggattttctgcattaagcttggaaaggataaaatggcctgcatctctttccttagaattaaagggcaatctttctttgctagtccacgagcctttctgttatgttactgccagcagctggattgggcagaatggattatcagtttggcatccttgatcctttgacctgtagtgagaaggaggaactagggtggaactatcaaaaatgtttgtacagcttttgtgtgcttcatttaatcacttttgacttggttcaacttgaaaatgtttgctttaatagcaagtttacattttctcgacccttaaaagaggttagtttccttttttgaggggtgatgtgtaaaagaaacagcaactttaaggggttagattgaaaaatgttaactcgctgtggatgatgttagaataaatagtattagattattgtaatagagttgcaattattcaagtgcactcttggggagttcaatctagttgatattagtattatgttagttgactgagttagtgagagtttgttaatgacagctgttgacagctgtcataactaattggctagcctatataatcaaaactataatcctcaattcagctggcccaaaatattttctt

SEQ ID NO: 12788 - DNA, 2224 bp, Glycine max
  Clone ID: PAT_MRT3847_111554C.1
ccggccgtccgaaaaagataagcaaagcgtgaaaaatcgcaaaataccaaatcaaaataacaagcacaattacagtgactccgcttggttcctcttcttcgatcttcggtttgattctgcgtttgttcacatcatggccaccgcttcagtggcatttaagtccagggaggaccaccgcaagcagattgagttggaggaggcgcgtaaagcggggcttgcgccagctgaactcgatgaagatggaaaggaaatcaatcctcacattccccagtatatgtcctctgctccttggtatcttaatgctgagagacctagtttgaaacatcaaaggaaatggaaatctgaccccaattacaccaaatcatggtacgatagaggtgctaaaatctttcaggcagacaagtatcggaaaggtgcttgtgagaactgtggagctatgacacatgattctaagtcatgcatggaaagaccacggagagtgggagcaaaatggacaaacaaacacattgctcctgatgaaaagatagaaacttttgagcttgactatgatggaaaacgggacagatggaatggctatgatgcatcaacgtatgctcgagtcattgagaggtatgaagctagagatgaagctcgaaagaagtacctgaaagaacagcagctgaagaaactgggagagagcaaccaaaatggtgaggatgctgcaagtgatggggatgaagaggaagaggaagatgaagatgaagatgatttaagggtagatgaggcaaaggttgatgagagcaaacaaatggactttgcaaaggttgagaagcgtgtgcgtacaacaggtggtgggagtacaggaactgtgaggaatctacgtattcgagaggatactgcaaaatatcttcttaatcttgatgtcaattctgcacactatgatcccaagaccagatccatgcgtgaggatccacttccagatgcagatccaaatgaaaagttttatttgggtgataaccaatatagaaatagtgggcaagctttagaattcaaggaactaaacatccatgcttgggaagcctttgacaagggacaagatgttcacatgcaagcagctccatcccaagctgaattactctataagaatttcaaggtcatgaaggagaagttaaagtatcaaacaaaggaaaccattattgagaagtatggcaatgcagccgatgaggacaaacttccaagagaacttctgctgggccaaagtgaaaggcaagttgagtatgatcgtgcaggtagaattattaagggccaggaagcagctctccccaggagcaagtatgaagaagatgtttacattaacaaccacacgactgtttggggctcatggtggaaggatcatcaatggggctataagtgctgcaagcagacaatacgcaatagctattgcactggtgctgctggtattgaggctgctgaggctgcaagtgatcttatgaaagctaatattgcccgtaaggaggctgctacagatgatcctgcacctgtggaggagaaaaagcttgctacatggggtactgatgtccccgatgatctagttctagatgaaaaattgcttgctgaatcactcaagaaggaggaccaaagaaagagagaagagaaagatgagaggaaacgcaaatataatgttagatggaacgatgaggttactgcagaggacatggaggcatacaggatgaagaaagtacatcatgatgatccaatgaaggattttctgcactgagcttggaaaggataaaaaggcctgcatctctttggttgcaagtcaacgagcctctctgttgttacttactgccagctgctggattggccagaataggttatcagtttggcatccttgatcctttgacccgtagtgagaaggaggggctagggtgaaactatcaatgtttgtacagcttttgtgtgcttcatataatcgcgtttgacttagatcaacttgaaaatgtttgctttaatagcagttttacattttgtcgttcgtttccttttttttttgggggggggtgatgtgtaaaagaaacagtaactttaaggggttagattgaaaaatgttatattgctgtggatgtgtagaataaatagtaacaggtgctaaagttatgtttgggggaaaaaaaaaaaggtgaaatatgggtgtggatgtttaattacccagattattaaaatcaaagacggccactgcaatttc

SEQ ID NO: 12789 - DNA, 1821 bp, Glycine max
  unsure (1)..(1821): unsure at all n locations
  Clone ID: PAT_MRT3847_111555C.1
gtggtattcagcccgggaatccaatttaggggaccgtcactcgtcacgcactgaactgcaaagaaatttccgtagaaatttccgtgaagaaagagtaaatacctaaagtagtaaacgttcacaattacatgaataatcaattgatcgattccccttgatcgctctgttttactgtccgtttcaaatccgacagcagcccagcccggcccggcccaatcatgactcccaaactccaaaccgcggcctccgtggtggccaccgcgatgctcctccgttccctcgcccgcgactacgtcccggcggagctccaccactacctccgctgcaaactgtcgaaactcctctcctcattctcctccgaactgactctggtcatcgatgagtttcacgggctgacgccaaatcccctcttcagcgccgcgcagctctacctcaaaccccacgccgcccccgatacaaaacgcttccgcgccaccctgcccccgaaatcgcgccacgtttccctcctcgtggagcgcaacggagaaaccaccgacaccttcaactccgtccagttccggtggaaactggtctccgaacgcgtccccgcgaggttcatccatcaggactccttccactccttttcgaaatccgaggttcggttcttcgagctgagattccacaagaagcatagggacatggtcctctcggagtacctcccgcgcgtgatggaggaagccgaggtggcgcgtgagcggaggaagacgctgaagctcttcacgccggcggacatgaggatggtgggaaggagagggtgcgagatgtggcagggcgtgaatctggaccatcccgccaagttcgagacgctggcgatggatttggagatgaaggagatgataataaaggatttggatacgtttcttgagaggaagtttttgtataagaatgttggaaaggcttggaagagaggatacttgctatctggtcctccaggcactgggaaatcgagcttgatcgctgccatggccaattatctgaattttgatgtctatgacttggaacttactgatgttaggagaaacactgacctcaggaagctgttgattggcaccgggaatcgctctattcttgttgttgaggatattgattgttcccttacattgcgggttagcctggcatgtcccagttcctcgcagcctgttgcgatctcgccatggccgtccctcccacttgaccatccttaaccccgggggtccttttcggcctgcctgtatttcgttggtggctggtggtctagtgggggggatgcgaccaacacggggttcacgaccaatcacaagaacaaattggcccctgctctgttgcgccctggccgtgtggatgtgcatatcgacatgacttactgcaccccatgtgggttcaaaatgctggcttttatttaccttgggatcacagagcacccacttttttgttgaagttgagacattgctgaagaccacccatgtgactcctgcggaggtgggggagcagtttttgaagaatgaagacccggaaattgccattagaaagcttgatggagctccttatagagaagggacgaaaccatgaaaagaacaaagcagctctcaccattgaatgctttgagtccgcagagagttttgaaaatgaggctcgacttcgacacgccagtcggggctctgtgatcccaaggtagttggatgccagccctttgctcccacatggggtgcagtaagnnatgtcgatatgcacatnnatacnnccagggcgnnacagnncnnngtcnaatttgtncttgtgattggtcgtgaacactatgatcct

SEQ ID NO: 12790 - DNA, 608 bp, Glycine max
  Clone ID: PAT_MRT3847_111556C.1
ggatgtgcatatcgacatgacttactgcaccccatgtgggttcaaaatgctggcttttaattaccttgggatcacagagcacccactttttgttgaagttgagacattgctgaagacgaccaatgggactcaaagcattcaatggtgagagctgctttgttcttttcatggtttcgtcccttctctataaggagctccatcaagctttctaatgcaatttccgggtcttcattcttcaaaaactgctcccccacctccgcaggagtcacattggtcgtcttcagcaatgtctcaacttcaacaaaaagtgggtgctctgtgatcccaaggtaattaaaagccagcattttgaacccacatggggtgcagtaagtcatgtcgatatgcacatccatacggccagggcgcaacagagcagggtccaatttgttcttgtgattggtcgtgaacactatgatcctctcatccccacaactagaccacaacccatctatgaaattcaggaaccccgataacgtcacctggggttttggattgtcatgtgggtggaaaggccatggtgtgatagcaactggttgcgatgatttgggttttgcaagcctatcctg

SEQ ID NO: 12791 - DNA, 321 bp, Glycine max
  Clone ID: PAT_MRT3847_111557C.1
agactgcttggtattaaatggctgcagttatatcaccaccgtagtcttgttttcgcacgcgctgctttcgtccattgcctattgtccttctttgtggacgactcattctggacctaacgggtgattgaaccactcttattcaaacgtctgcacttgatgaccagttgtgagtggcggctatgatgaaaggctgaatcatggtcactattgcaaggtacgggtacgcaaacgtgttaaggattgattgggccctattgctacaggtgtttttgacgtaccacatcacatctgatcactgtgatgcacgtatgtggtcaaaac

SEQ ID NO: 12792 - DNA, 346 bp, Glycine max
  Clone ID: PAT_MRT3847_111558C.1
atcacttcctcaattattgtattgagttgctgtctgaataaatggagctcaccaaacaaatgatccctcctaagagggggctggtcacgatcacgcctgtgaaaagtgtcatcaagtccgccatgtctttccttgctgctgcctttactccaagtgcccctgatcgtacgtaaccggttactgtttaacaaattcaaccacatatgtgctattttttatgtttaaattctttgatttatgcttatgtattcaattgattctggttgggaatatttgcagagacgccgatgtgtgtatttgtgattattattattgtattctataaaatgctcatatttattttttg

SEQ ID NO: 12793 - DNA, 218 bp, Glycine max
  Clone ID: PAT_MRT3847_111559C.1
atcggcttaatgcgtagtttccctcgccggggatcggtcgaggacggggcggcttcgcggcggcgacgctccatcggcgcgcgaggcgggcatttggggatctgtggacgccgacgactttgcggacgtctttggtgggcggggggcaactctccttgcgtggagggggcgcgagtccggggcggggggcaggggggtgtggggggggcgcggagttt

SEQ ID NO: 12794 - DNA, 254 bp, Glycine max
  Clone ID: PAT_MRT3847_11155C.1
atgcctattaacatccacagtagtcccaagaaagaacatggcaaaaacagaacagaaacacagatgggttgcaatatctccaaggctgagccaccaccgttggaaaacaccatgcatcatcatcatcatgcagacgttgcagagttccaaaaacccaaaacccttgaacaagacgtagtgctacaggttccaggatgcaaagttcatatgatggaccaaagagaggccatcgaactcgcacaaggtcacttcac

SEQ ID NO: 12795 - DNA, 410 bp, Glycine max
  Clone ID: PAT_MRT3847_111560C.1
cgctgccacaaaaacgatgatgattgtgggatttggttgttcataatccttccttcctttctaccagaaggaggaaaaaaacaaaaagaatttatgggggtgttttaaacaactccttcgatgaccccacatgcttgaaaaaaaaacggggtgaaccccctttctttttttttaaacccccccctccagaagcccgcccttttttttccagacatgggggggtgaaggtctccttctttttcccccccacgtctggagggagggccccttttttttgggccctacgggaggaagttgggccccctctccctcccaaatgttttggggaaaaccccttattttgcaaacggttttttaaaactttaggagccccctttatcattggtcccccccaaaaaatttgaaggggg

SEQ ID NO: 12796 - DNA, 514 bp, Glycine max
  Clone ID: PAT_MRT3847_111561C.1
ccaaacctccggccatttaaattaaacctggaaccattcaaattccttccagagccttccccccgtttttcaaacccaaaggtaaggcccagacccaccaagggtaaataccattgtctttaaaccttccttaaacccaaacctggcaaatcaggcttcccccttttcctcctccaaaattaaagccttccctgtgggtttggccaataaatctgggtcctttggaaagggaaatttggaaaaccgagtctccttccaaatttcgggggccaggaatccataggttttcttcaagcattcaaaagtacccttaacaaatttgccaagggtttggggggaccccctggaggaggtgaaaccttcttcattcccagcaaactgcagccctttttggggacccttagccgccacattcccggaccccttaggcgcgggacccttcctaacggtaacggccccacacttccccgtacccttgcacggaacgggggggggcttcccaattttgttcccc

SEQ ID NO: 12797 - DNA, 449 bp, Glycine max
  Clone ID: PAT_MRT3847_111562C.1
ccgggcccagatccgataagcttgatatggacgccctttttttttttttttttttttttttttttttttttttttttttttttttttttttttttttgttttttttttttttttttttttttttttttttttaaaaattaacccaattgggggggtttaaaaaaaggggccttaacaaagggttaaaattgggaaatttaccggggctcaaaggggaacagtttttgaaggggccccccaaaaacagattttacccctaacggggtcccaatggggaaattttgccttggaaaccaagggggtttttggggcaaaaaccccgggaaaaaaccccccaacaatggcctaaaaaggggggaggggccccaaaggggcccttcctcaaaaataaaaaggccccaaagttgggggggggccgggccccttttaaaaggggggttcccccccgg

SEQ ID NO: 12798 - DNA, 250 bp, Glycine max
  Clone ID: PAT_MRT3847_111563C.1
ctcaaggatacgcagcacctgaatatgttgcaacaggtataccttagctttgtgtaaactcttgttaccttgcattgtctctagtaaatggttaatggcctgtaatcatttatgtttatttgaacatgctatagttctagtcaattgtatgagagcctacacattgatattgaaccacacttcagtttcttctgcatgtgtacaccaaaatgcgctgataggcctgtcacacatatgctaatcatgtgtt

SEQ ID NO: 12799 - DNA, 466 bp, Glycine max
  Clone ID: PAT_MRT3847_111564C.1
ggcaggcacgctccattattttcttttgtttcgttctcttttcttattctttcttctttatttctttatttattatttctttcttattctttatcttttattgtttttactatacgattttattttttatttctgttttttatattaccatagggggcaaaaaaaaaaagaatctacgaccgatccaaaaacaaattttcttaaaaaattacccccagcgaaaccctttggaaatgaatgccgcaaagaacacaaccaactacgcgaaaacacaccgagagtcaaaagcctcacccccaaaattggacacccggaaaaaaaaaccctttagaacaaaaaaaaacaccggccctcaaaaaattcaacagcatggcttttataaaaccacaacgaacccaccaaacctgtacggggcggcacagaaaaaaccatggcccccaaaaaaatgtccggcgccaacagacag

SEQ ID NO: 12800 - DNA, 437 bp, Glycine max
  Clone ID: PAT_MRT3847_111565C.1
cggctgtgagaagacaacagaagggggagtgtgtcttttggattcgatcacttcgacatctcccattgacgacgcgcttgccctagcagcagcttctctcctctgccgtttgccgtgctccgcgctcctcgtccgtttgtgcctgagctcccgtccatgccgcccatgtaacttccgttaccactcacaaaggcagataacgtggttggccaatttcataaacttcaaaaacctccacctcaggctcaactatctgactcaacttcagagggatcacatcgtgagcttccttcgcttaacattgttcgtagtgcttttgttaaggtcatggatgttccactgccactggataaattggctttagatttgattgataatgagccctcccctgcaaacatgagcaacagcaggatatatgtaattctggtggcaactgg

SEQ ID NO: 12801 - DNA, 182 bp, Glycine max
  Clone ID: PAT_MRT3847_111566C.1
tcgaaaacaaaatactaaaaaaaaaaaattaattatacttaaataataaaacgacaatgggtgtaggttttccaggtttacttctgcgggccgccttcatggttgggccaagctaccgtattcttgcccaaaaaggcgttgcacttgtaatcactgacctaacgttgaaaacagctgacgcg

SEQ ID NO: 12802 - DNA, 120 bp, Glycine max
  unsure (1)..(120): unsure at all n locations
  Clone ID: PAT_MRT3847_111567C.1
gtgaagacngtgaagnccgatgaaaaggaaaccggttgntgttcctaggcagtaagagancnncgagcaagcaacggcaatggananccnatggcancngnggaagttggnccgtntgac

SEQ ID NO: 12803 - DNA, 366 bp, Glycine max
  Clone ID: PAT_MRT3847_111568C.1
tccgggtccgaccaccgtccgattttgaataccataaaggggtggttgggatgggaaatgccaatttagctgagaaggttcgagggagaaagatggcgccttagggcccaaaacggggaagtgaccggcttaaagatgcttgttgcaaaaaaagaaaaggaccatggtgttgtttaaacggcttcaaaacttttgtcctaaaggagccaccagatttagttctgagctccctggttaccgtacggtggacctgttctccaagattcggaccacaaaggccctttctacggaaaccagttacacgggttttattttgtgggcggaatttatggccttaatgatcttttggggggggaacaaaaggtc

SEQ ID NO: 12804 - DNA, 435 bp, Glycine max
  Clone ID: PAT_MRT3847_111569C.1
aataaaaacaggattgctttaaatagattttaaaaaaagagttacattttaagagttggtctgcgaggctcaatggaggtttcttattgtcatgggaggttttacactttaaggtttttttttggaaaaatataaaattgatttacagcatcctgctatattgtactgggataataaatatgttcttcatattgaaacaaatcctatttttcatgaaaaaacaaaacacattgaaattgattgccacataattcgtgaaaaaatgataaatggtcttgtaaaacttcttcctatgtcttctgcaaatcggatggacgacatttacaccaaggccttgattctaggtgcttttcaatttttgtattccaagtctagaatgtctgatatccattcttagcttgaggagggctcttagcatggatcattatgtaacta

SEQ ID NO: 12805 - DNA, 592 bp, Glycine max
  Clone ID: PAT_MRT3847_11156C.1
tcccggcgtcgaccctacgcgtccggtacagtttagtaacaaagcctacgcgagcgtgagggaacgccattattatctctagaaccgcacggaacttgctttctctatcctcaacctgagacagcgagcgcttgttttatgaatcggaaggagtggccagcgtctgcaggggatgtggttccggtggcgatgatacagaagacgatgatgtgagggatgaagcattgcgggaccttgatactagcggattacaccaagaaaagcgaaaacttcaccagcatggcgctacaggggaaccagaaactcccttcctacaaaacaaggctactcacaactgccatggacacaccttgaaataccttgttgccaacggcttaacatactgtgtgatagataaaagacacttggaacacttgtagaaaccaattgcatgactcgaacgaatcaaagcggattataccaccaagtatgcacaaggaaagagcttaccagcggttgctcatatccataacagagagataccacctacagggaaggaagagatgcagatcttcttagatcacccggaggaaattaggacgcttgctacagt

SEQ ID NO: 12806 - DNA, 1152 bp, Glycine max
  unsure (1)..(1152): unsure at all n locations
  Clone ID: PAT_MRT3847_111570C.1
cggacgcgtgggcggacgcgtgggcggacgcgtgggcggctgcgagaagacgacagaaggggcatctcctaacattgctcaaaaggtaggtctcggtttcgttatttccactgtgtaacgttgaagtctcttacgttaccaactgtggttcagacgaaggatggaggttgttttggcgtcgtcgtccgtcgacggcggaatagggtgctgggaccttcacaccggcgcggagcagctccgctacaaatcttgcacctccccttctcatggcctcgtctctgtcggtgctcgcttcatcgcttcgtcgcagcttcgagaagatcaatcagcccctggctctgttctcttctggtcctggtccaagcctcaagttgaagtgaagagttttcctgctgaacaaattaaacctcttgctactaatcacccgggaacctttatagctgctggagctccgtctggtgacatttacttgtgggaggtaaatttttattcatttatttgttaataattatgcatcaagaagagagagagagagagagacagagctattttttcaatataggttaatctagaccgatgagtgagcaattcactttggagcatagttgtgaaacccggtccgatcattgatccaatcgagatagtgggtcagtagtccaaccggtgggccagtaattagtccgattggacctagtatatattaaaaattcaaaattacatatgtatctattatatataagtatataattaacattatttgagtaacaaaagttcatccatattccaaaatccaaaataacaattgataataatgagacattaagacgacgtcgtagaggtggtccattttttttaaaattttttataaaaccggccgagtcggactggtccaaccgggatttggtacctaaccggccgggtttgaccgggtcatctcaggtccattgcatgaccgatccaatagtggaaccagtccggttaggccactaggtcccagttagaccagtccgaccgaccgggtcgggcagaaccggatttcacaactatgctttagagagtaaagtaagtaatctcggnttgttaatcattgattgactgatattacttactccatncttagtttagaggaatcaaatctaatctaaacatgtg

SEQ ID NO: 12807 - DNA, 229 bp, Glycine max
  unsure (1)..(229): unsure at all n locations
  Clone ID: PAT_MRT3847_111571C.1
tccgggcancaaaacaatgcattctggatttcatgcttcaatatataattggcccaacaacacctatctaacctcctagggttttacaaaaaaccaaaaagccccccttcaattcaaaaggcaataaccccctttaaaaaccccccaaaaaacccccttttataccctgaaccattcccgcgaatttcaacctttttttttccaaaaccctgcatttaatacctatttt

SEQ ID NO: 12808 - DNA, 456 bp, Glycine max
  Clone ID: PAT_MRT3847_111572C.1
gtatttacattttattcaatcacttcgcatggtatgacaacatttgctaattaagcattgaccgttcatacagttatctggttcttcagatgatttgccagttgttttccccatttccttcagttttatcatgtacctattttcacttaatgaagtagcactttagatctagctaggaataggtattcatagtagaaacttttaatccttagaaagttctattttcattttcaacattatataattacttgccacaggttgagtttatggagaagtttcaacactgagactatatttcacaattttttcctttaagttggataaagattataaattgtaatataatccaataaagggaaagagaattttacagaatacatattgtttctttcctatagagttgttaagcactatgcatagttagacacttagacaatgtttgagggtttaagtttt

SEQ ID NO: 12809 - DNA, 336 bp, Glycine max
  Clone ID: PAT_MRT3847_111573C.1
cgtttatgtagcacgtatttaatcgcgtttatgtagcgtttatccacatggctccaccttgtcttgctgttggtgtaaagcttcagttgtctattcttcatctcaatggccttggtcttccaacacatgtttgaggtaagactcggttatgaggcttctatagcgcttttgaaaggtaagtttgtagtaccttttttcatccgaagaagagttccaaggaaaggactgtgttttaagggtggttttgtatgaacccaccacaccttcactccttggaactcttctatgatttttttgttatcgttcatgctaagcatcaacggggtgcctgtgttt

SEQ ID NO: 12810 - DNA, 117 bp, Glycine max
  Clone ID: PAT_MRT3847_111574C.1
tgaactattgcatactgcccatcttaatctaaaaggattggatgagcttttgaaggaagctcaggcgcatgctgatggcgtaattccaaaataatatcgcatttaatcgaaacacaa

SEQ ID NO: 12811 - DNA, 632 bp, Glycine max
  Clone ID: PAT_MRT3847_111575C.1
ttctgatgaggtcacaaagctcatggatagagttgagaaaacattcactaagcacttctacaactcaaatcgtaataaagccatgaatatcttaagaccaaaggcaaagagagaaagacatagagttacattttcaatgggtttcttagcaggatgcacagcggctcttgtgttagccctaattctaatcgttcgtactcgtaaaatattggatgagtcagggagtactaagtacatggataccttgttcccactgaacagtctatatggatacatagttctacacatgctgatgtatgcagcaaatatttacttctggaggcgatacagagtgaaccactcattcatatttggttttaaacaaggcactgagttgggctacaatcaagtccttctcctaggttttggtctagcagtattggcgctcggcggtgtgcttgtaaacctagacatgcagattgatccacaaacaaaagattacaaaacattgactgaacttattccactcatcttgctgcttgttgggattgctattttactgggccccataaacatcttttatcgctcaaggcaggttttctttctcatatgctttgttcactgcatatgtactcctctttacaaggtcacac

SEQ ID NO: 12812 - DNA, 1117 bp, Glycine max
  Clone ID: PAT_MRT3847_111576C.1
ggtctagcgttgcccctggtctttccgccgcggggaaagacagatgcgatgagtggacctggcctatcatcaaaatcagattggggagtcaactatcgggcacttcatgatcttttccatatctcccagagtaggagaagctctattgtttatgaagttggagttcaaatggttgaaatttataacgaacaagttcgtgatttactatcaagcaacggtcctcaaaagagacttgggatttggaatactgcccaaccaaatgggttggctgttcctgatgcaagtatgcattctgtgaattcaatggcagatgtcctcgagttgatgaatattgggttgatgaatcgggcaactagtgccacagccttgaatgaaagaagtagcagatcacacagtgttctctctgttcatgttcgaggaacggatttgaagaccaacacactgttgcgtggatgccttcatcttgtatatcttgcaggaagtgaaagagtggatcgttctgaagcaactggagacaggcttaaggaggctcaacatataaataaatcactatctgcactaggagatgtaatatttgctctatcacagaagagttcacacgtgccatatagaaatagtaaattgacccaacttcttcagagttcgttaggtggtcaagcgaaaacccttatgtttgtacagcttaatcctgatgttgcttcatattctgaaactgtaagcaccttgaagtttgctgagcgggtttccggcgtggagttaggcgctgctcgtagcaacaaagaggggagggatgtgagagaacttatggagcagttggcatctctcaaggatgtaattgcaaggaaggatgaagagattgaacggttacagtcactcaaggctaatcataatggtgcaaagcttggtatgatctcagtaagacatgggtcatcatctccaaggagacattccatagggactccccgaattagcatgagacttgcaggagcaaggagctttggagtcaatggaaaggcagcttctgacatggataactgctcagagtatagtgataagcattcagaaactggttctcatcaatcaatggatgatttcatgaacaagtccagttcccttc

SEQ ID NO: 12813 - DNA, 554 bp, Glycine max
  Clone ID: PAT_MRT3847_111577C.1
atttaaagtcagaaggatgtgaattggatgggcctttagttgaatgagaaatactagattgtgattgataatgagtaattttgatgaatcagaagagttttttcccaaactagtattgtcggaggagtcttgcaagataaaatagcacatgaaaaacattcttactagctcttttattagaaaacgcacacatttacactgggagtgggtgtgtgtctaaatgaaagaatgcttgtactgacgtactatttcggagtattcagattgctttcagttcttagtatattccctctaaagaagggccattgccaccatctcgtcggagatcactctttacgctggcaacgtcaatgattgtgttttcttcaaaatagtacaacattgaccatcttgtccagagtgccaaggcagtgcttacggagaaggttgatccctaccttcagttaattgaagatcacaagttgcaagctgtcggctttgctcctgataatctaggcgtgaactatggatctaatgaagacgatgataaggccttagacatactgtctgatatg

SEQ ID NO: 12814 - DNA, 688 bp, Glycine max
  Clone ID: PAT_MRT3847_111578C.1
agtttttatccaatgggggtatcaacaatgacgaagctctctatatggaacccaaccgaaaccctatcacaatgaaaatcagtgatgactatgtttcctttgggcacaatgaaatcatccaccaaagggttctttttttcaattgtagcaccagaaatggtgccttgcgctccaaatcggcccacgcgtccgaaaaaaaaaaaaagtcacaaacagagaattaggcaataagataattaaagatgtctgacgattgcaaaggtaagagctcatggcctgagctagttggagtgcaagggacagttgcggaggctacaattgagagagagaaccctttggtggatgctatcattgtgcccgaaggaaacatggtcatcactgatttccgctgtgatagggtttgggtttggatcgataaagatggaattgtcaaggaagttccccacattggatagaaactgctccccactagctagggatcaaataattgtttccagttttatgttattttattcagaataaagtttcagaaatgtcaaaagattaatgtaataaaccaactagagttggccttgtataatgttttagactcaaaatctgttcttgtcattctatatatataaaaaaaagttaatataatcatcttttatatgcattgcctatgctgttttctcctccgatgctttca

SEQ ID NO: 12815 - DNA, 1110 bp, Glycine max
  Clone ID: PAT_MRT3847_111579C.1
tacggctgcggaagacgacagaagggggaaactagaaagtaccgttatctaacttttatctctctctctctcaacgtgctcgtgcaattaagcaatctgaatccaaggttgtaattgtaactagctaatatgtcttcttcataccattttcaatctcagtcctatgctccatctgcgccagaacaacctccatattccaattaccatcacacttcttcatcagcatcatcgagttttccaccagggacaccccatgacgtcattaggagctttcagatggtggatagggaccgaagtggcttcgttgatgaacgtgaattgcagcaagctctctcttctggattccaccacttcaacctcaggaccattcgttttctcatgttcctcttcaagagtccaaacctacccctcacaattggaccaaaggaatttgcagcactctggagttgccttggtcattggcgaggcatatttgagaggtacgataaagacaggagtgggaaaattgatccattagaactcagagatgctctgtatggtattggctatgctgtaccgggctcggttctacaacttctgctttccaaatacggtgatggaagtggtaggagggttgaacttggttttgacagttttgtcgagtgtgggatgattattaagggtctgactgataaatttaaggagaaggatacacggtatacgggttcggctacactttcatacgatgcctttatgactatggtccttcctttccttgtatcttatgattgataagtgatgttcgtcggcaagatttccaagttctttggtcctacattcaattgattgttttatgactttgattgtgaataaatttttagggtgcaacgatttgttatattcatttgtgttccagtaatgctcacatacatctcattcatttacatttttttttaaccaacaagttacctattatagctaaggggtttgtggcaagagaagtgattaagcgttagtaggtgagtggtgaaagtgtgtatatagaagaatgtatgtatttaaacttttttctcttgtaaacattatgtaaaagatgtgcaagttccaagaatttgtttcaataaaaaaaaa

SEQ ID NO: 12816 - DNA, 396 bp, Glycine max
  Clone ID: PAT_MRT3847_11157C.1
ggctcgtgaaactaaatgaaaaaaagagttttttttaaaaaaaaaaataaagaaactaacatgagggtgatgtttaagaaaatataggttggtctcgatactaacataacataattagatactactataacaccaccactttcttcacatggtctacaccttctgggtctttcaaccactcgtgatttcctttatccggccatttgctgcccccaaacccttgcttgccttcttgccacacgcaccaagtgattcctcccctgacagtcctcccgctgttgacattggttgaatcctgaggtagggcaaaggctttcaacatcccaattcctccttatgaaaaccacccaattgatcaaccacctcaatgctcagtttctcacaactaaatcaggc

SEQ ID NO: 12817 - DNA, 1977 bp, Glycine max
  unsure (1)..(1977): unsure at all n locations
  Clone ID: PAT_MRT3847_111580C.1
ggctcgaggagcttctttacagctcagtggagaatgaggaacacatatgcgtattgaaggaccgcaacaaaccaataatcttcaccatggcaaggcttgaccgtgtgaagaacatcacggggcttgtcgagtggtacgggaagaacgcacgcctccgcgagttggtgaacctggtggtggtggctggagacaggaggaaggagtcgaaggacttggaagagaaggccgagatgaagaagatgtatggcctcatcgagacctacaagttgaacggccaattcagatggatatcctctcagatgaaccgtgtgaggaacggagagctctaccgtgtcatctgtgacacaaggggtgcctttgtgcagcctgcagtttatgaggcctttgggttgactgtggttgaggccatgacttgtgggttgccaacgtttgccacatgcaatggtggtcctgctgagatcattgtgcatggaaaatctggttaccacattgatccttaccatggtgaccatgctgctgagatccttgttgagttctttgagaagagcaaggctgatccatctcactgggacaaaatctcccagggtggactcaagcgtattcatgagaagtacacatggcaaatttactcggacaggctcttgacactcactggtgtgtatggcttctggaagcacgtgaccaatcttgaacgccgtgagagcaaacgttacctcgagatgttctatgctctcaagtaccgcaaattggctgagtctgtgccccttgctattgaagagtaaattcatgtttgaagagaacatcaatggagaaaccggcttttggtcgtttgaagtcttatggagctttcataaataacgccattgattttgattgtgatcagcttttggatttaaagagtctaaaaaaaagtgtcgtttgtttttatattttgcttaggttttgggtaaaaaaagtaaaaaaagaaagtcttttttttttttttaaattctttttgttgttgcaatattgtgtatgattggaaatctttaaattcgggttttccaccccatcaattcaatttaaagatatgccttcttccattcnnaanaaanaaaaaaanaaaactcgtgccgcttctcttgttcctcttcaagaatccacaccaacccctcacaattggtacctaacttctgttccaattttatttattgggttggagtgttcctttgtgttgatttcaattgcctgttgcttgtgccttcacaggaccaaaggaatttgcagcactctggagttgccttggtcattggcgaggaatatttgagaggtacgataaagacaggagtgggaaaattgatccattagaactcagagatgctctgtatggtattggctatgctgtaccaggctcggttctacaactactgctttcaaagtatggtgatggaagtggtaggagggttgaacttggttttgacagttttgtcgagtgtgggatgattattaagggtctgactgataaattcaaggagaaggatacacggtatacgggttcagctacactttcatacgacgcctttatgactatggtccttcctttccttgtatcttatgattgataagcgatgctcgtcgtcaagatttccaagttctttggtgccacattcaattgattattttttgactttgattgcgaagaaatttttaaggtgcaacgatttgttatattcatttatgttccagtaatgctagactcactttcatacagagtacttcacattcatctcattcatttacattttttttaccaactagttacctatatatagctaaggggtttgtggcaagaaaagtgattaaacataagtaggtgagtgttgaaagtgtgtatatagaagaatgtatgtatttaaacatttttttctttacatatagttgtaaacatttgtaaaaatatttattgatatgaatacactcaattatatttaacatttc

SEQ ID NO: 12818 - DNA, 1238 bp, Glycine max
  Clone ID: PAT_MRT3847_111581C.1
ccacgcgtccggggaaattggtcggaattggagttggagaaggaattcggagacgccatttcccgaacccgtttcgcgccccactccaacaaccttctcatctcttcttgggactccaatcttcgcctctacgacgtcgacgcctccctcctcagactccaagctccctcgcaagctcctcttctcgattgctgcttccaggacgacgccgtcgctttcgccgccgcctctgatggactaatccgaaggtatgacttgcattcaggacttgttgatacagtgggtaggcacgatgacatggcaatgtttattggatattccaatgaaacatgtcagttggtcacatccggatttgacaagaagttactgttatgggacatgcatacgaagaagacttctttatgtttgagaagtctagatgcagaggtagactccatgtctgtctctgggtttaatgttaccatagccattggagcatcaatgcatgtttatgatttacgttactttgaccaaccagttgagtcaaaagaggcattcaatggaacacacttaagatgtgtcagttcaattccagatgcagaaggatttgcagttgggtctgtagatggacgagtatcactgcagatttcctatccatccggttcagatgaaattagatatatattccggtgtcatccaaaatcaaaggatggaaggcattatttggtatcagtgaatgacattgcattcagtccacttgtatccggtgcttttgccactggtgataatgaaggttatgttaccatatgggatgctggaagtaggagaagactagttgagttgcccaggtatccaaatagtgttgcatccttatcatacaaccacacaggtcagcttctggcagtagcatcaagccatacttaccaagaagcaaaggaaatagaaaaaccacctcgtatattcatccatagagtggacaacattgatattggatcaatttctgctagtaagagaagttgaagcacttatgctatgcttgctgacgaagatttgtgtcatcagagacacaagtggaggcaccggtgaagaaaatagatgctctttaaaaagggatactgggagatcaagaaaaatattggaggaaaatattaaaagagtttgattgataaagtattatcattaagagtttgatttttggcggtgtttaataaaatcatgtactgtatttttatgtataaaaaattaagttatcatttttt

SEQ ID NO: 12819 - DNA, 109 bp, Glycine max
  Clone ID: PAT_MRT3847_111582C.1
caaatcttgtatttgcgcattatcgtatcctgcacagtgtttttgtgtagacataaacgattactgctacgaacctcgcaaacccactccggatgacatggtaaactac

SEQ ID NO: 12820 - DNA, 438 bp, Glycine max
  Clone ID: PAT_MRT3847_111583C.1
gttttccctataaaaagagaacacgtgatgataaatcctggtaataaagaacgaggttttataaaaaaaaacaactgaacggaggggatccttatactcctttgacatagaggcattcttatttacctattcaaaaccccctaaccgccggattttggattttgccccaaacccactggtaaggagaaaagccaaaaaggaaggaactacacgaatttaactggaacgctgttcttgttttgggtgacacaggacaattgatcataatttaagcgggggccattattaattaagtgttggtcatgaatgatccaaaacttttgattgcagaaactttaaaaatgggttgatggttgaatgcaaccaccagagtttcgactgacggatcaacccagcaaatccattgggggtgccagtctttgaatttgatgttcacaa

SEQ ID NO: 12821 - DNA, 526 bp, Glycine max
  Clone ID: PAT_MRT3847_111584C.1
ctcagatgatggaatggaagagttaaaaagattgcctgtctctacaaaacttgtgactagctgtctggattacccatgggcacaacaagattcccatcattcaagtacacctcaaacaaggggaaattctgattctgcatctgcccagactgcttgtaattgcagtggagaagctgagagtaccacagatcgaagtgattgtaagctctctggtgaacatccaaatgatgttgcttttgtacttagagcacatattcttgactggttatctcacagtcctactgatttggagagctacatacagcctggatgtgttgatgtgaccatttatctgccataggctgacgctttgggggaggaacttcgctatgatctgacttgcattttgaatatgctgtagtatgtctcagatgatactttctggagaaacggatgggttcacatgacggtgcatgatcatatggccttgattattaatggtcacgctgtcatagatacctccttacctttcagcagtgatcattat

SEQ ID NO: 12822 - DNA, 408 bp, Glycine max
  Clone ID: PAT_MRT3847_111585C.1
ggcctagtcttttaattaaataggccaggccaggccaggctttatgtaggccaggtcgtaggcccctgtaggccggcctagcctattcccacccctagatatacccctgaaggagaggagtgaaactcttgtaacaacttagggatccaacttgaggaagagggtataggatctaacaaaagcagttagacagttaataaccaacttacagaattgggtataggctgttagggagtagaacactacaaatagaaagagaggagaaagagaagggggtgaagaagttagtgaaaaagtagagagtagttgacgtcttaaggagctctcctatcatcctgaagagtgtattctgttacttctggttacattgaccagaggggtatcaataaaaatccttgttacatagtt

SEQ ID NO: 12823 - DNA, 413 bp, Glycine max
  unsure (1)..(413): unsure at all n locations
  Clone ID: PAT_MRT3847_111586C.1
ggttttctttttttttttttttttttttttttttttttttttttttttttttttttaaaaccttcctcactttagaggaatcaaatccaaaattgcaattttaactttaatgggaaacaaatcccgacgagaggagagcancaactccctggtctctaatgaagcaaaagccgggggaagccaaaggacatgcctttgttttattaaaagtaaaaacagttttaccaaaaaaacaatagtggctctctccctaccaaaaatcctcaaagaaacaaacaattacaactaaaatgctgccctgcaatgcccgacctttaaacaaacaaccaaaccccaaaattaattggttgggggccccaactccagccccactatggggagggagtttcgtccactcggtatgaaaagcccca

SEQ ID NO: 12824 - DNA, 555 bp, Glycine max
  Clone ID: PAT_MRT3847_111587C.1
aaaagggaatgggaaatttatttttaaagtccaagatggccaaagctgcgcagcagataaagtgtgctccatatcagtttcacaagaaggagccaatcaatcttattccgaggcgcatgctactgtcattgttcacccagacaatgagggtaaacaacacgttcaactgaatgctttggctgtttcagttgacgcctcatgaatcacattctgttgaagtattcgtaacgtggagggaatactttctgtctttggaaaaagctagggttcatggtaacccaccttttttccaatccagctgtatagttactttaacgtttgccaatttggaacacgtgaatggatgtctggagccgtaaagggcaaaccaaacactcactatattgttgattatggttgacatctcttgtatataatgatattcgtttgatgttgcggtgccatatccctcccgatttgtgtatgatatgcgaagcgtatgtatcagttatgaaaatgaataccatcgttctggcattcttgtatataatgatattcatttgatgttgctgtgcc

SEQ ID NO: 12825 - DNA, 386 bp, Glycine max
  unsure (1)..(386): unsure at all n locations
  Clone ID: PAT_MRT3847_111588C.1
aagaaattttttttaatcatcatagttagaattttttttctttttcggtagaatttagagatatttttacaaacttcattatcttgaattaatgatgagattaactctcaatctaaaatttagttatatttaaagttatttttctctttcaaaaaatatattatgtggagaattacaaatatccaaagacaaacatgcttaaagcattattagacactatggaatanaaaacctttattaaagcacctaaatactttaccaaaaaaagaagagactaaatacaaaagccttttcaatgtttttatattaatattacttttttctttaaatcctaattttattttcttttttaaaaaaaattatattattttttctcaaaatcttag

SEQ ID NO: 12826 - DNA, 315 bp, Glycine max
  Clone ID: PAT_MRT3847_111589C.1
gttgctgcaaagttatccatatacaaacactagtcatttgctccatgtagcaaataagttgcttgttcagtcagtctaatggttttcaccgttgattattttgcattatgtttttctctctaacatagtgtttaattttataattgtaaattactctgtaattgttaatgtacgttaagagcagcatctggtattttctaatgctctggttttgtcattctcttttaatggttagcccacattactatgatcttggaggaaataaattatatgtccataatctttcaccatatttttttgaaaatattcttttta

SEQ ID NO: 12827 - DNA, 213 bp, Glycine max
  Clone ID: PAT_MRT3847_11158C.1
agaaaagaaaaagtagagagttgtcgggaagcatgcattacggtaccaaacttggaaatttacataaagaagtagctttcacaaattcacacaccacatttatacaccggacaagaaacttgaagttacaaaacagtttcttctggaaaaaacatattctaatttaaggtcacacttggacataaaaaactaccccccaacaaagaaaactta

SEQ ID NO: 12828 - DNA, 508 bp, Glycine max
  unsure (1)..(508): unsure at all n locations
  Clone ID: PAT_MRT3847_111590C.1
gtgtaaatgatatttatttttcatccaattatagatattgataacatagtgaataaataatcatatatactcacgactaaaacaatttgcactatcattctatctcaaattggttaataatgtatttttttttgcactgacaaagcatataaattaaactcataaaaaaattgtagttatttgtgtttttcataaatatatatagatttaattggcccctattcatgctatatttgtgctctataataactttataatttatcaaaatatatctacagtaatgattttataaatacgtgcgtgattcataattttcgtacgtgtcacggataattaatctagtatttgtaaaatgaaatagaaacataggattttacgtaacttaaacgcatgaaaatctcatatttgaatgtacatttctttatatcagctaattntacgtctatgattgcgtgtaaaaatataattgttcttttttatttagtaaagatcatgtgttaactaattc

SEQ ID NO: 12829 - DNA, 143 bp, Glycine max
  Clone ID: PAT_MRT3847_111591C.1
ccgagtgaattagattatgctcccgactgctgcatgcaccatatatatcttataagagtgtaatgggaaccatagtagatgagggcctgtgactttctgctttttttcctaccttgtcatcttatagttgtatcagccggaga

SEQ ID NO: 12830 - DNA, 410 bp, Glycine max
  Clone ID: PAT_MRT3847_111592C.1
gtgaaatattatggcggaatacatgactcgccgcagttaccagctggagtgaagatagacccaaacgaccaagaagtatcacaacattcggaggcagaaggggcgtctgatgcatgcaagcgttatgcgatcaatgaccagtttatacctgcactctgaggcgaaaacgggatcatgtaatccacactcagaaaagctaccaggtgctccatgtactacttacattattgtattcaaattattccatgaccaattaactaatctagtttcgcgcacaataatacttatagtatatacacatcagtgtattattatttattgggagacacaaccatgtgctgactgaaccgcatgcatgaactgaatgggtttaacaacgaagtgagagatcttttctgcgatgcggatct

SEQ ID NO: 12831 - DNA, 372 bp, Glycine max
  Clone ID: PAT_MRT3847_111593C.1
gtcgacccacgcgtccgtacggctgcgagacgactacagaagggggaagtgggagtggtggctttaccactagccactggcaactggttcaagaagattgaaacgattacacgtcaactctatggctgcataaactgattctgatgatgatcaggctcgcagtggtggcggtggagcccctctccgttgtggtggtacaaagtgataacacacatgctcctaccgatgctaccgaagcaaccgacctctcacccatgtcagcgttaaatatcaaatggcatgctgctttgattaaaaatagaggccctatattggatggagactgtcagaacattcaccccatggtggcaatgcagattgctaaggaagtgg

SEQ ID NO: 12832 - DNA, 169 bp, Glycine max
  Clone ID: PAT_MRT3847_111594C.1
tgcatcgagcgcgccttttactttgaactcgggagcggagggagcagagaacacccacaccatgtttggctactgtcaaccttatttcttctccctccggcaccccttcttgtaaccccggttttggaaccccttcttgggagcctggttttggaaccacttttttcaa

SEQ ID NO: 12833 - DNA, 263 bp, Glycine max
  Clone ID: PAT_MRT3847_111595C.1
ctcacccgaagtctcgactctgtgactaaattctctataccttgctcatgtgatgttcttgagtgcatcaaatgctaccagctgacaggttgtctaataagacttcatcatctacaacatgtaaatgaatatatacatcttaaagaatgaactgggataaatcactcaatagcagtggctctaagtgtactcacactattgctaatattgacgatactgacgaggcatatatgctatcactatcatggaatcacaactatggg

SEQ ID NO: 12834 - DNA, 392 bp, Glycine max
  Clone ID: PAT_MRT3847_111596C.1
agccgcccgcttgcccgtcggtcgctagctcgctcggtgcgcgtcgtcccgctccatggggctcttcgtgcggctgctggctctcgccctggctctggccctgggccccgccgcgaccctggcgggtcccgccaagtcgccctaccagctggtgctgcagcacagcaggctccggggccgccagcacggccccaacgtgtgtgctgtgcagaaggttattggcactaataggaagtacttcaccaactgcaagcagtggtaccaaaggaaaatctgtggcaaatcaacagtcatcagctacgagtgctgccctggatatgaaaaggtccctggagagaagggctgtccagcagccttaccactctcaaaccttcacgagaccctgggagtct

SEQ ID NO: 12835 - DNA, 251 bp, Glycine max
  Clone ID: PAT_MRT3847_111597C.1
tgacggctgcgagatgacgacagatggggggtacatgtaattggaagacaagttggagggtggttgttctgttctaagatccaacacttaatctctctgtgtacatcctatatgatctgatggcttcactccctgttctgcgccacaaccacctgtttttcgtgccctctttcggtctgccctaagcccaccttcttctccttcttcaggatccgatagtccctccgtgagaacgggcccttcatcgccgt

SEQ ID NO: 12836 - DNA, 226 bp, Glycine max
  Clone ID: PAT_MRT3847_111598C.1
tctgcaatccctagagcggcctctctgccagtcttacaacaccgagttctgctactacatctactacatcttgtcacagcctaagcacttttgccaagcctgctttcgttactggactgcaggcggcactctctcacacgttcccggtggtggcgcctgcaaaacgaacaagcgtgcgaatcgccctcctcttcacggagattcttcttcttctgctgctatgctc

SEQ ID NO: 12837 - DNA, 173 bp, Glycine max
  unsure (1)..(173): unsure at all n locations
  Clone ID: PAT_MRT3847_111599C.1
cgcncngnngcgtagtngctcggnattnggcncgngggntttgctagaagcaggaagagaatcgngacaggnnnacccncaaantcntgccanntgagctanctnaactctgaagatttaggatnctgcccaanccagcgntgttttcangnaattggccaagttngcctttn

SEQ ID NO: 12838 - DNA, 259 bp, Glycine max
  Clone ID: PAT_MRT3847_11159C.1
gtatgggttaactttcttgaatgaattggtcgaggagcatccactggggacgcataacttcatgaaaattccagtgactctttggaacttcgtttttgggcttcttatcgagggcagactctggcgaggacagtgcgtggtatgatgtactataggagggctttaatgctgcagagctttctggagagcagatcacttggagtggacaattattctcaaaacaacttcattacaactcaagattttgaatcatctcgcg

SEQ ID NO: 12839 - DNA, 434 bp, Glycine max
  Clone ID: PAT_MRT3847_1115C.1
ccgcccacccgtccggcttgtaaaaaaacaacatatggtagggaaaaattgaaccaaaaattggggagtttctttttaaaaaagccaaccgtttataatttttacttaataaatctaatttttttaaaaagtccgatccttttaatcttccagaaaatcctggtaccgctgaaaaaaaaaaaataaattgcttttaatccgttattcccaacaatcgattttttgggaaaacatattcaagggatctatacttgttcaaagccttaaaccagttacttggaaatttttttaaaaaaagggtgcattcccccctttttttggataaatattaaaaccctttattctttttttttgatagtttcaaaataattaatttatttttttttttaaaaattggatttcaaaaaaggtaaaattttgaattttttattatt

SEQ ID NO: 12840 - DNA, 482 bp, Glycine max
  Clone ID: PAT_MRT3847_111600C.1
cccacgcgtccggaagacgacagaagggaatgttacaagaagcatggttatcctcttgaacataaataccataagtttcaaagctcaaacatcaataaaatgaatatgttgaaagactgaaatgaagttgactccttaacaatataaggctctaatggccctactacagcaacaaggctcaagtcacaacaattcacatgtgaatcaaattagtacaataactggttccaacaatgcacacaaaggtaatgccttatccattacttgtattgtaagcaagacaggtccggatgaatggatcattgactcaggagccactgatcatgtcataacttttcctcatttgttttcttcttgtaagaagataaattccataattgttaagctccccatcggttgcacagtcactataactcatgacttcattcttctattttctcagtttctatacttagaggatgttctatatatacctagctttc

SEQ ID NO: 12841 - DNA, 168 bp, Glycine max
  Clone ID: PAT_MRT3847_111601C.1
tcgagggaatctattggctagcgcggtgtaatctgtaaccatcatatgtggtagtgcaaaggaaaacaatttgtatggctagcagctaggtattacggtagtaggcatgaaggcaagctaagaaaagaaagtggaaccgcttggctttacactcaaccagtgggattt

SEQ ID NO: 12842 - DNA, 644 bp, Glycine max
  Clone ID: PAT_MRT3847_111602C.1
aacgtgggctcgagattaattccaaaatcacactcctatatatcttcctatagcaatatatatgatgggtgacactgagatcaagccatcagttgaagtagtcgtatgtgcttccatgaacaataataatagcgcaaacaaccacaccctcccaaccgacatcaccaagccatcacaattaccaatcttgaccaggctccatgctggttactttttcatatgcctttcctttggagcacaagctttgctctggaagagtttgagtaaacacaacaaggactcacaaagtctctggcatggattcaacttgatgccttccattgcatttctacttctttggtgtgtgtcactgctgactgccactagtttgtctttactttacgtgctcaagtgcatctttcacttggaaatggtgaaggaggaattctcacatcatgttggagtgaactgcatgtatgctccttggatttcttggcttctcatgcttcaatcagcacccaccatccttcattcaacttcttgctaccaagttctttgcttggccttttcgtttgtaatattgctgcttgacataaactatatggacaatggttcacaactaaaaagaggctcctgtcagttggcgcaaaccctactagccaggg

SEQ ID NO: 12843 - DNA, 306 bp, Glycine max
  unsure (1)..(306): unsure at all n locations
  Clone ID: PAT_MRT3847_111603C.1
tggactgtgcaaaaacccaattaataaagaatgagtgtgagagaacaatctatggtggtgctttaaaggtgtgtttgttgcttttcttttcctttgtnngggggttacangnnctgcacgcnnatggaactgagctttttcttcaaaagnntgatcagtcatttcaagttatttgatgnnntgatgagnntattcaaaacncnnatgcttgtgatctttcttgcatgtngnccacacgcttcannatgccttccttcaattgcagctttgtgaaagaatattaangcttgaaattcaattgccact

SEQ ID NO: 12844 - DNA, 1444 bp, Glycine max
  Clone ID: PAT_MRT3847_111604C.1
taccgtctggaattcccggtcgacccacgcgtccgcccacgcgtccgtacggctgcagaagacgacagaagggggagtgagacaatatcacacataatataattccaaaatcactcctataatgctatagcaatatgatgggtgacactgagatcaaaccatcagttgaagtagtcatatgtgcttccatgaacaataacaatagcgcaaacaaccacaccctcccaaccgacatcaccaagtcatcacaatcacacttaccaatcttgaccaagctccatgctggttactttttcatatgcctttcctttggtgcacaagctttgctctggaagagtttgagtaaacacaacaaggactcacaaactctctggcatggattcaatttgatgccttccattgcgtttctactactttggtgtgtggcactgctgactgccactactttgtctttactttacgtttacgctcaagtgcatctttcacttggacatggtgaaggaggagttctcacatcatgttggagtgaactgcatgtatgctccttggatttcttggcttctcatgcttcaatcagcacccatcatcggttcattcaacttcttgctacggagttctttgcttggccttttcgtttgatattgcttgacataaaactatatggacaatggttcacacaaggttcacaactaaaaagagttgtggcaaaccctactagccaggtgtcggttatagggaacttggtgtctgctcaagttgttgcagaaattggttggaaagagagtgcagttttaatgttctcactcggattggtatattatctaattatatttgtaacgctgtatcagcgtctgacaagtggcagccagttccccacagtgctaaggccaacttacttgttgttttttgctgcaccaagcatagcaagtctagcctggaaatccatcacaggtgcttttgtcaccccatcaaagatgctcctctttctgtctttattcctgtttatgtctcaggcttgcaggccagccatgttcaagaaatccatgaagaggttaaacgttacatggtgggcgtattcattccctttaaccttccttggactagcttgtgctgaatatgctcaagaggtggaaagtggcatggcctcttggttaatgctggttatatgtatggtctccgtgctggtttttattgctttgatgatcatcactgtactcaaaattgagaggctgttccataaaaatgctccgattatgacttgaaaatgaaatgtcattcaactcaaaattgagtggctgaaaataaaatgctccattatagctgcatccattatagctggccggcacttctctcttgtgctctttaattaattagtaagaagattaactgagatagcacaagggtaaaaatggaaatggaatttatcccgctgtctcccaaaaaa

SEQ ID NO: 12845 - DNA, 1318 bp, Glycine max
  unsure (1)..(1318): unsure at all n locations
  Clone ID: PAT_MRT3847_111605C.1
ttcatcttctatacccatgccttcgaaaacaatagatccactcccttcacctctttcctatacaaaccaatattttcagaaaatagaaaccatggtgtcatcaaaacctggtggcttctatgaacaagggagatttccatcgatcaaaatcctcatacttgtactccttaattctatactccacaaagccaactcaggcagcaacatttttttttccaactcgtccgcttagttccatttctatctcatgagatcctctcatcattgcaaacactacctctagatggccactttagcctaagggacaatgaggatgctgccaaggactttggcaacatacaccattttcctcccctagcagtgctgtatccaaaaacagtttctgacatatcactcaccatcaagcatgtttttgaaatggggtttgccgcacagctgaagattgctgctagaggccatggccattcacttcaaggccaagcacaagtacatggaggcctagtcattaacatggagtctttacagggtcctgaaatgaaagttcacaatggagaattgccttatgtggatgtctcaggaggtgagttgtggataaacattctgcatgagactcttaaacttgggttggcaccaaagtcatggacagattaccttcacctcactgttgggggtactctttcaaatgctggcataagtgggcaagccttcaaacatggacctcagatcaataacatctttcagcttgaagtgatcacaggaaaaggagagggtggttacctgctcagggaaccgaaacgctgaccttttttaatggtgttcttggagggcttggtcaatttggcatcattacaagggctagaatttctcttgaaccagcacctatgatggtgagtgtacattcaaaactctaatattaagacaaaaaaaaacagttcctaataatatttattgattatgacatgatatgtgcctttttgacaggttaaatggattagggtgctctactcagaattttctacatttactatggatcaagagtatttgatatcacttaacaacacatttgattatattgaagggtttgtgatcataaacagaactggcatccttaacaactggagatcatcctttgatcccaaaaacccacttcaagccagccaattcagttctgatgggaaaaccctatactgtcttgagatggcccaatactgcaaccctgaaatggagaattgccttatgtggatgtctcaggaggtgagttgtggataaacattctgcatgagactctnaaacttgggttggcaccaaagtcatggac

SEQ ID NO: 12846 - DNA, 371 bp, Glycine max
  Clone ID: PAT_MRT3847_111606C.1
aaaaaaaaaaaaaaaaaaaaataaaaaaaaaaaaaaaaaaaaaaaaaaaaaagggaaaggaaaaaaaaaaaaaaaaaaaaaataaaaaaaaaaaaaaaaaaaaaaaaaaaaaaaaaaaaagggcgtatctttttaaagtacccaattttacttccccttgaatccaaagctttaccttttttataagccctcctaatttcaatttattggccatttttttaaaaattctttactggaaaaaccctttttttaccaaatttaatagctttgaaaaacatcaccttttgcccagcttgattatttaataaaaggcccgaaacatcggccctttcaaacatttgcacaccctgaatgccaaatggaactcacct

SEQ ID NO: 12847 - DNA, 347 bp, Glycine max
  Clone ID: PAT_MRT3847_111607C.1
gattcgaatttcattatattattttaaattcgatctatcaatatatgtcattacattgtcaaatgtcaactctaaaaagtataaaaaaattctctccaaaaactattatatcaaaaggcaattttataagggaaattacagagttttcgtacaaaagaaaacagagaaagttttctcttataaacagacagcattcagaagaaaatcaagaaatgtccaagtgaccacccagacaattgatcccttcacttccgcccatggaagaatcttttctttataatcttttctcccctgtcccttcccggcttccttcccgtggcttgggggtttgtgcccggggggcggtg

SEQ ID NO: 12848 - DNA, 368 bp, Glycine max
  Clone ID: PAT_MRT3847_111608C.1
cgattctctcatgggcacaggagaaggaaggagctgatgaatccgataagatcttcgttaaacagacagaagacttcattacgtggctaagagaagcttctgaagaggaagacgaagaagatgaagattgagcgtgactagatgagtttcggttttttttgcggtggacgggaagcagcatcaggtttcaggaaagcttggattcaaatcagtgtactaagattataaaatttgtgtaggtctttaagcctgaacttggtgagagagacatggttctggtcttttgttgatgttgttccgagtaacaaaagttagtctcgtacaatacttgaaatgaagaacgttacctggtcagtgccaatatttgc

SEQ ID NO: 12849 - DNA, 244 bp, Glycine max
  unsure (1)..(244): unsure at all n locations
  Clone ID: PAT_MRT3847_111609C.1
cacgagcctccaagctaataagggcactgctgaacccttagtttaaggtggcacttggtanttggtatcacctttaacaaattgttcaatttctaaagttaacttctacaattattaatctttttcatattaattttctcagaatatctttaaatataaaaccacagaaccaattatataaaaaaaaaaaaaaaaaaaaaaaaaaaaaaaaaaaaaaaaaaaaaaaaaaaaaaaaaaaaaaaaa

SEQ ID NO: 12850 - DNA, 321 bp, Glycine max
  unsure (1)..(321): unsure at all n locations
  Clone ID: PAT_MRT3847_11160C.1
nagntgngagtacgcggacgnaagctcgngaaggcggctngaggaganattcatngtcnaacaagnntgaancaagttaccgtnggtnntgtatnctgntnnntgagnnangctncgctnnctgaacatngnatngaaagcagnatanggcagnaaggnanagctagnatgagnaacagaagatncnagcaganttngcccgcngnanncatgaacatacggcttaagcangagactccngancnacctgaanctngganaacngtgncnagtntgtcnctacaagagagtnnnagagaanctgntcgtgntcgnacngan

SEQ ID NO: 12851 - DNA, 755 bp, Glycine max
  Clone ID: PAT_MRT3847_111610C.1
ggctcgagtgataccattgttggcaaggaggatggccttggggttgaaaacttgagtggaagtggggctattgctggtgcttattcaagggcatacaaggaaacctttacactgacatatgtaactggcagaactgttggaattggtgcttatcttgctaggcttgggatgagatgcatacaaaggcttgatcagcccataattcttactggtttttcagcattaaacaaacttcttggtcgggaggtatacagctctcacatgcaacttggtggacctaaaatcatggcaactaacggagtcgttcatcttacagtttccgatgatcttgaaggtatttcttctattttgaagtggcttagctacattccttctcatgtaggtggtgcacttcccattgtaaagccgcttgatcctccagaaagaccagtggagtatttcccagaaaactcgtgtgatcctcgtgctgccatttctggaaccttggatggtaatggaagatggctgggaggaatttttgacaaagacagctttgtggagacactagagggatgggcaagaacagttgttacaggaagggcaaagcttggaggaatccctgtgggaatagttgctgtagaaacacagacagtaatgcaaataatacctgctgatcctggtcagcttgattctcacgagaagggttgttcctcaagccggcaagtgtggttccctgattccgcaccaagacagcccaagcatattggatttaacag

SEQ ID NO: 12852 - DNA, 253 bp, Glycine max
  Clone ID: PAT_MRT3847_111611C.1
cgacagacaagtctctcttgctcttctctctcctttttcttctttccttttccctcattttcgtttctttgttaatttcttctcagtcaaccatggactctccgatgtaccaccaagagcaccattactaccaccaccatcatcgtgtgaaccttcttccttcgccgcgacacagtttgagttcttcatacagcagcactagcagcaccagcatcaacaacaatggtctcaccactcctaattactgtcagct

SEQ ID NO: 12853 - DNA, 800 bp, Glycine max
  Clone ID: PAT_MRT3847_111612C.1
ctagcttgctgcctgagggtgagggagtgtggtggggtttaggctttcatggtgatgagaacgcatggggcatccaccgctccactcgtgcgcgctatctatcaatggcggctccaacaatcatcattattggcatggtgtcaaagccgaaccatgctagttacatagtaatttctcttgttcttcttgtccataatcacatcaaataagaattacgattcatctttaagtcgatcacgaaccaatttaattatgcataaatttaaaagatcaagtcaacaaaatcaagtttaagaaaaataatccgtttttgattaactaattttataaagaaattaaacagaaatgttatcttttaaaatattaacaaagagtaataatacttgaatattcatttatgttaaaaaacacatcaatatttctcatttctttctatctctcttttttgttacataataaattatatgatatctttatttttctttatttctctctttagagttttacttggcatctagtaacattgttggtgttaatttttttcattaacaaaataactatatatatatatatatatatattaaaacggcttatgtttaaaaataaataataaaacttatgagaaaactcaacatattatatttacaaataatgagagagattttttattttccttgttaagaaacaaagcaatataatacttacagttgtataaatgtaaatacaaggaaaagaattgtaaaaacaaaaattaaagaaaaaaccattaatatttacaaataatgagaatttttttatta

SEQ ID NO: 12854 - DNA, 576 bp, Glycine max
  unsure (1)..(576): unsure at all n locations
  Clone ID: PAT_MRT3847_111613C.1
tacggctgcgagaagacgacagaagggggagcatcctcactgcatttgttcaataaagggaagatggtctcttgcatatacctaaagtgttgaagctgatggctctatgatgcagcaaactggcatgtttatatctcttctgaagcaacaccttggcttggtctatgatatgcctgtaatagttagatatgcttgccacccaagagatatagggtgactttgtgaattgggtggctgcattgtgactagtctcattatgctcgtgctcatgtttctgcaagcaacaccagccgttctcaattaggatcacagctacctcctacctgtaaaggcagccaatgaggaacagaaaataccgtttttacaagatattgcactcatttgtgcttgttgtatgatgtatgaggacatgaaaccgcaagctgtaacattctgtgacataagattttgttagaagctgcattttaaaaaaaaaaaaaaaatttttagctagtgcataaatgttgggtgccactttggttttatgcagggatggtaattggatttgaatcnnnnnggatacctagaaaaaaatac

SEQ ID NO: 12855 - DNA, 541 bp, Glycine max
  unsure (1)..(541): unsure at all n locations
  Clone ID: PAT_MRT3847_111614C.1
tttccgtcatcactgtatgacgtcctccttctttgggggggggggggggggggggacaagaagaagaatgaaaaagtgtggttagtcgataatgaagttacgtttgaccggtgataagaatagattaaccgaaaagggtattaaaaaaaaatagaatcacccacaagatggacaaaatatagctacagtgggagggtgcaccaataggataaaaaacccgatttacaaaagaaagttgttgagggagagagagatgtggcaattgggttagcagtgattgaggcccgtaggagctagtggtttatgggtttgcggaggcggttagagattggtgatntttagcgtttgcatgcagatgaaggagcgtatggatcaccatttagtaccgtttaagtgcgaatgaaattaacgctaaattgtagttagtgtgtgaccaattcgcgaagcattaactttagtagaccagggcaagcgtaatagagtcaaatttgctgcaatagaaccaggcactacagggggtgttgagggcgaaaccatgata

SEQ ID NO: 12856 - DNA, 738 bp, Glycine max
  Clone ID: PAT_MRT3847_111615C.1
ccggaagacgacagaagggtacggctgcgagaagacgacagaagggtacggctgcgagaagacgacagaaggatacggctgcgagaagacgacagaagggggagcagaatcttcaggccaagccaggtaagcacaaccaaagcaacaccccaaatggcttcagcttctgttcccatggcgttgtcactgagctctgttaccaacaacaacaagccttcatccgaagccttcttcaggccactacccctacgccaaccaaagaggaccctcttcaccacgaaggcagtgtcaaactccaagcctcaaatcaatgcatctttgaaggagaaggcagttgccggactcacagcagcttctgtgacagcatctatggtggttccggaggtggctcatgctgctggatatgagttctccccttccctaaagaactttctactcagcatctttgctggtggggttgttctagcagccatatttggagccgttattggggtttccaactttgatccggttaagagaacttaaatcatgcatgctccaatgcttttcattttctctctctctttttcactcttcttctagcttcttgtttcatgcaagttatatgcaactggttctgttatatgcatactatctatatcccagctgccctttattttatattttccttattaatcttcatggttcaatgtgtttatgtttaatgggtgatcctgctaagagattacggtttgtgat

SEQ ID NO: 12857 - DNA, 357 bp, Glycine max
  Clone ID: PAT_MRT3847_111616C.1
ccacgcgtacggcgacaaatgcatctatttgtccttaccgttgctatatgacgacaaaagggttcatctctataaaattagaaattgttcttggctatgtaaacaactcttacgatataatatattacagcttcatattgctactgctgactaacgatttttttgtcataatatatctgtctttcaattcttattacgactagttctacaatatctagaattgacatccattgcactctaggttagtgtgttatgttaacatcctaagttacactaatagcttcacctacacatagagttttatttattaacgttatcacattaagcgcaatctaaaaaacatatttgaaactactt

SEQ ID NO: 12858 - DNA, 370 bp, Glycine max
  unsure (1)..(370): unsure at all n locations
  Clone ID: PAT_MRT3847_111617C.1
ctttatttgatgcgttattcaaaaatgattctacatatgctaggatttaaaataggatgacctttgcaatgggtgttgttgggtttcctatccaatggcgtggccccaacccagaattaagtgcatgttacatttgcattttgcaatgcttattggagattaggttaatggtggacaagtaaatatactcttttacacactaaagcattgaagttgtaaattgtgattgctatgatacagtcctcctttntaacttcggnggacaaacagagatccaaagcgtagcattaccgctgttacttgtaacacaaggaaaggtttttgggggaaatgtattacttttgcttgaatttgttggtcaatgagtttg

SEQ ID NO: 12859 - DNA, 449 bp, Glycine max
  Clone ID: PAT_MRT3847_111618C.1
cgagaagaccacagaaggggatagcagtccctcattctcgtcatgtcacgtttctctcgggacctggaactcaacacactcgtcgaaactctggatctgttcttcttctgcttctgagagagaacatcctattatcttctcaatctcattctctaccagagagtaaaccctaagaacaaagaaatatggtttacaccatctcgggaattcgatttccggtttttccttcgctgcacaacttgagcttccgtggcgatcgcagaactgcgtctcttcccgtttttctccgaaacaactccttctctcggaaaacccttgctgtaaaatcttcccatgattctgattccttgtcttctgcgattgccgaatctgataaagtacttattcctcaagatcaagataactctgcattcttgacagatcaacttgaaactcctgatataacctca

SEQ ID NO: 12860 - DNA, 1832 bp, Glycine max
  Clone ID: PAT_MRT3847_111619C.1
gaaagcgtcatttttcaattggtattacttttctatctacctaggtgccattgtgtcatgcagcttaattgtgtggattcaagacaatgctggatggggtcttggatttggcattcctgctttgtttatgggattatctactataagcttctttataggcacacatctatacaggtttcagaaacctgggggaagttcttatacaagaatggcccaggttttgtttgcatctgtccggaagtggaatctggttgtccctgaggatagtagtctcctgtatgagatgccagacaagaaatcaacaattaaagggagttgcaaactggtgcatagggatagatacctaaatccctaattctcctcttccaccacgacctccacggcttctccacacctcgcaccctcgcactcgcagtctctctctctcatgctctcgccaccacaaaaatggtgcttccttgaaacttggtgaaacctagtttcatttttctaccattcttatattgattttgtgttggaagcagctcgaattttgtgagtgggaggtgtcttgatagagtagctatagtatccgattatgagagtaaaagtggtgactattctaatccatggagactttgcaccgtgacccaggtggaggaattgaaaatcttgatctgcgtgtttccaatttgggctaccgggatcatttttgctgcagtctatgcccagatgtcaacattgtttatggagcaaggaacaatgatgaacacatgcattggttccttcaaactacccctctcaacttttgatgtcataagtgtggttttgtgggtccctctctatgacaggataattgttccaatcataaggaagttcacaggcaaggaaaggggcctctcaatgctgcaaagaatgggaattggccttttcatttcagttctgtgcatgttatcagctgctgttgttgagtttatgcatctgcagctcgcaaaagagcttgaccttgttgataagcatgttgccgtgccccttagtgtactttggcaaatccctcagtatttctttttaggggcagcagtagtattcacatttgtggggcagcttgagttcttgtatgaccaatctccagatactatgaagactttaggtactgcaatgacacttctgaacttttcattgggaaattacttgagttcttttattcttactatggtaacttaaccacacaaggtggaaagcctggttggattcctgataacttgaacaaaggtcatctcgattactttttattgcttttagctggacttggcttcttaaatatgttagtgttcatagttgctgccaaaagttacaagccaaagaaggctttttaagatttttcagggagtggaagcatgttctgatatttccttctgtcattgattcttctgtttgcatatatgctacgcataaaagtaaacttggcctctctcaagagcctctaagtgagaatacacttttttttaatgaaaaaacactttaaaattattatttttttaaatttaaataaatttacccttgttatatatgcaagttgaagaaccataaaatacacatgtaaattatgtgatgtgtggttgtttcagattaactagaggccccaaattcgagttttaaatatttagtgagagagttttgacgcctataataattttatccaattcaaataagagttttgaccgaggtatatgttatttagaaagaaaaaaaggcacaacaaatagtgtgataccatgttagatttcatcttaaaactgattgacattaagtaaagttgtccaaaagatatataagctgcattccaaggagtg

SEQ ID NO: 12861 - DNA, 1117 bp, Glycine max
  Clone ID: PAT_MRT3847_11161C.1
gccatcctagaatcaataagggatttaaggccggaatcccgggtcgacccacgcgtccgggaaaacatttttcttggttatggggatccttcagctgcacagtggactaatatgcctgatctattggagacagtagatttcaaagacacttttgttgatgctgatcacttaaaagaaagttttttggattatgaggtgtcttttgttaatcctgatggctcaggaaatttgaatccaaggcctccttttaagatcaagcttccccgaacactcaaaccaaacaatggtgctcttactgggcatgcaatatctacttctggtgcaacaaatgaaatcaatgtggttgatgctaattatcagaaagaagcactaattattgagacatatactcctccagatcctggcccctatcctcaagatcagcctaaacaaaattcagttagatttacacccacccaggttgaagcaatcatctctggcattcagcctggtctaactatggttgtggggccacctggtacaggaaagactgatacagctgtacaaattctaaatgttctttatcataattgtccttctcagagaaccttaataattactcattcaaatcaggctttgaatgacctgttcgagaagataatgcagagagatgttcctgcacgttatcttcttcgacttggtcaaggagaacaagagctagcaactgatcttgattttagccggcaaggtcgtgttaatgcaatgcttgttagacggttagaattgctgagtgaagtggagaggctagcaagatctcttcaattgcccgaggatgtgggttacacttgtgaaactgcgggatacttttggttgcttcatgtttattcacgctgggagcaatttcttgctgcttgtgctgagaataaagagaagtcaacatttgttcgagatcgttttcccttcaaagagttcttctgtgatacaccacatcctgtatttacaggtgagtcttttgagaaagacatgcgggctgcaatggggtgctttcgtcatcttaagaccatgtttcaagaacttgaagagtgtcgggcattcgaattacttaagtcaacagctgatagggctaactacttaatga

SEQ ID NO: 12862 - DNA, 475 bp, Glycine max
  Clone ID: PAT_MRT3847_111620C.1
ccccacttcgtttgatctttgctgccgttcctttctgttgatagctgcttccttgacccttcgtttcatttttccatttcctaacaatttatggattcacacgttccttccaaccctgcaacactgctacctctcataaactatcaaagctttggttacttttctctgtacgagtaaaaaccacagtttttcaacgtttttaaacccccccatcaggttgaaacctcaggctaggattttggttataacagtgattcaaaccatgctgtgaattcttttaaccctgcagtgtattcaagtttccaacttgcttcgttcttttccaaaaggtagttggcttgagtgtcttgttttcatcctggttggtggttggtgtgtgtgataaattttagggacaaatgtcgttacaaattttaataggagcgtaggagactggagctggggccatagctatgttttgcaattgctttggtgc

SEQ ID NO: 12863 - DNA, 195 bp, Glycine max
  Clone ID: PAT_MRT3847_111621C.1
ttgtgttagaatcatcatggggttgcaaaaccaatgtaacgacgtgtcgtcggttcgattcgctctggtgtgtgcaataccactggtcatactcagtcatgttccgcttgaaaccagctagcgatcatcgacaattcgcgacgtctgcgcgcgatcgctgcgactatattctcgatagtactagagcatctcaca

SEQ ID NO: 12864 - DNA, 267 bp, Glycine max
  Clone ID: PAT_MRT3847_111622C.1
atctcaaggacataatgctgaatctgagcaaaaaagtggacagcatgatgagcagaggagcttacttctcttgctgaagccagagatcagaaagctttgtgatgttcttcttcttccagcttataatgaagtgggaatgaaatgctactaatctggaattggaaaggctaaggttgaagggaaagagattagataaactgaattatcttttgctggaatttctgattgtctgttctaaagtaatctttgctgggtaaaaacccaact

SEQ ID NO: 12865 - DNA, 472 bp, Glycine max
  Clone ID: PAT_MRT3847_111623C.1
ccacgcgtccgatttattataaactgctttatttatcaatattgtaaactataggtttctccatagaagcaataatcaagaagcagaagtttatttatggtatgattacttaaccttaaaaaaaaaacatctcaactaaagatgtgtagctcagttgttgattgagcagtatgtcgattgttatcaatttcttgataagttgaactcatcgacctttcaatgaaaacagaacatcccttgaagcatggatggatccactcaagggtctttgagggcagctgcccccactagattgttttttaatattatgtatatgtatggttataaattgtcttcataatttaaaatatacctaaaaaaataatttataacataaatattgcccttactaaattgtatagttgagtattgctcccccaactaaaaatttcaggatctgccttgaagtggatagtttcttaacttactaaag

SEQ ID NO: 12866 - DNA, 584 bp, Glycine max
  Clone ID: PAT_MRT3847_111624C.1
cgggtcatttccttggtcctcttggatccaaacccacgcgtccggtttggagaaattgtgctggcacagaaggtaatgtatgaaaaatttggggatgattttctagttcattttgtatcgaaaggattttcttctgcacattgcccaccagatctggcagagcaatatcgtcaaaaattgcagggtggtgatttcaaggcactaaaatctttctatcagtcactagtggaaaatttgagactgcagcagaatggaagccttatattcagatagcatacttgtaatggaaaattaagagtcctcttcctatatatggctatgttttttggccgtctcctagtttggtgcttcatttctgtctactgaagggtggtgtatatagcttttgcggatgagagatggatattctccttgccctgattttgatgagttcctcatgcaacctgaccaatcagctaattgtctcgggtctttctgtattctttttgtccctcagttgtaaattttttgtattctcttaacagtggacatccatcggaagcttgtcaatatgagatcaaaattttggtgtttatttctcaaaa

SEQ ID NO: 12867 - DNA, 245 bp, Glycine max
  Clone ID: PAT_MRT3847_111625C.1
cagaaattaccacacctcatttcaatcaaaggatcaaggagaaaaactgaatattaacaccccacaaacgttgaatgctaaagaatcaggacatgctatggatacccaacaaattatacaggtctctaccttcaatcaccgggtgcccaagaatcaataaaaaccacttcctaatccgcaattgactggcggacatcaattgccgagataaaactttgcaaccaactatagagcatggtttacaa

SEQ ID NO: 12868 - DNA, 394 bp, Glycine max
  Clone ID: PAT_MRT3847_111626C.1
ggcttgcaacggcaacattaactatttttattgatagaattacttggaaaggaccggtgacacattgaatgaatactagcatttattacgacgccgtcgatgactttatcgacgcctagaagatatagaatgatcgatatgaggtcattatactaatttttgtacaaatcaaatgaaggatacgatgaacacgaaaccatacatagatgagctcccaggcataagcatgtaacgacttgactggtttacagctaagcttctgactttgcttggagggacagcatgaagctgtcaacatgatggatgatcctaagctcatacataagctaagaacatgcgatgctctaatgatgcttctgaaactacacacccttcataatcataaatttaccga

SEQ ID NO: 12869 - DNA, 435 bp, Glycine max
  Clone ID: PAT_MRT3847_111627C.1
gacccaaacctttttttttttggtttttatggttgtcaggccccaaacctttttttttagggtcaaagggaagcaaatcaaaatttccttaccctaaagtccaaaccaaaaatgctcaaaatttccaaacccttttttccccccccaattaaagggaaaaatcctttttgaaaaccccaaccgcggttaaagacaaatttccttattaaagcccaaaactggggggggggggtttaaaaaacttaaggcttttgtgttccacccctgaaattttgcttgcattggcaaaaggaatcctacccggccggcctaaaaaaaaaggaaccccaaaaaactttcctcccaacctgggggcaaataaaaaaattgaaaaacgcccaatcggcccctccccctttaaaggccggaaacaaccccaggacgttagaaattttt

SEQ ID NO: 12870 - DNA, 429 bp, Glycine max
  Clone ID: PAT_MRT3847_111628C.1
ttccagcctagtggaaggcttatttgttcacccatctagcggaggaagggacacatttgatctgaaaggatggactcccactgagacaaacaaagggccggagtggacacaaccaccataggtgtgccttcactaactgaagaggcttttaaaacgtcctcattcaagggggctgaaaaggggagaacttacacacaggaccaatagctcacacccacaggatcaggtggcggacataagcaacattgcctaaacactgtgcgtgcgtactcatgctgggctaaggccaggctgaagctggatcgaaggcaatcattgcgcgctgcgtgacaaagtattccgcatcccgggccaggctataaacaagcgatgggtaaacccagttcttgctgccaggactcacggggaagcaacctcccattatctgaa

SEQ ID NO: 12871 - DNA, 1528 bp, Glycine max
  unsure (1)..(1528): unsure at all n locations
  Clone ID: PAT_MRT3847_111629C.1
gaaggaaaaaaataataattcagtgtggaatggtggggggttaaaagtcggagaaggcaagagagaatagttaaggtgtgagctantcttgggtggttctatattttccgtaaaatcttgaatgcaagagggaaagaaagattgtgtagcaggccaatgaagaaggcatcgtattaaatttcattgggcgggggggcgtagtgcaaanagctctctcatatggatgcaggctacattgatcaaacccaagtcatcgtcaacacaagggcaaattaagtattttgtatacagcattgagcatgccattttaaaccttccaccacaccaggaacagatgggctggctgggagatttccagggggttcaaggctgtcagatatatcattcaaggtgggacgtgaatctgcccatattctgcaagagtattatccaaagcagctggggttaataatactatacaatgcacctatgatcttccaaccatttttctcgatggtgaagcttatccttagtgatctttaaatctgatgttagctgctatataaggaaacaatttgtaatgtgagagtgaatcgctgcagatggtaaagccctttttagagactgagactgttaataaaataaagtttggctattcgaacaaccacaacacaaagaagattatggaggatttgtttgataaggataatcttgaatctgcatttggtgggaatggtgacacaggagttgacataaataaatatgctgagagaatgaaagaggatgtcaataagaagcattcttttgaatctgcatttggtgggacacaggccaagtccatatcatcagttgcacaaaatgctccgtcagattcaatcaggttagatgcagttgatgcttctaacactaagaaaatagactgttcccgtgtccctaattgatcaatacatcttggttgctcaaagggacagaaaagccgtggcgttgtggaatgagaaattacatacctaaatcagtgttgattcaactgtaatgcagcaagatgctatgacatatattctagtttgaaacccagattcaagacacctagtgtcaacttcatgtatgatttatgatgataaataatttttccttgtgccttgaaggttctgagttttgaaacaggcaagaaatgcaagctaacgcatcagcttctcatgtgattgacaatattttccctcataaacagggataaatttaagcattataaaaaaactaaaaataaataattaaaaaaaaaaaaaaaaaaaaagtaaaaaaaaaaaaaaaaaaaaaagggggggggccccctttggggctgctcccccccggggaaaaaatccgcccggcccccccggggggggccccttttttcctttggggggcgcataaaaaagggggggaaaactggggaaaagtgttcccgggggggaaaatgtttcccggaacaatcccccaaaaaaattagccgcggaaagtaaaaggtaaaccccgggggggcccaggggggggcgaccccccttatttgtgg

SEQ ID NO: 12872 - DNA, 549 bp, Glycine max
  Clone ID: PAT_MRT3847_11162C.1
gtttacagtataaactttttataaaatatcctcgatggaagttttagaactatgtcccaatttatacaattgaagaaactaattaatcagaagcaaaaatagcaagggaaaaaataccctcgagcagattcaactgcattaggacctctaatccaaaaattaagtagctagctagctatctaccagataaaatagtgtttgtggttcccaaagagtaagtagatgtacaatccacatggctggacacagatgtcaacaaccttgccaaatttctatgatctgcaggatcttcatcaacagcaagcaaatcaacaagaatcattcttgaaccaggtggttcatccaccctcacacgcccttcaagcatgtcaaccacttgtgccatgctaggcctcaaccttggcttctcttgtatgcaccacaatgcaatatacaccaacctagtaacctcactctcctcaacaacactcccacgctccaccaacctacgatccacaatctccatgaatttcccttccctcactttctcattcacaatcttgggaaaaa

SEQ ID NO: 12873 - DNA, 978 bp, Glycine max
  Clone ID: PAT_MRT3847_111630C.1
ctcgaggttctgccggggaaggaaaaaaatataattcagtgtgtaatactgttgttttaaaagtcggagaaggcaagagagaatagttaaggtgtgagctagtcttggttggttctatattttccgtaaaatcttgaatgcaagagggaaagaaagattgtgtagcaggccaatgaagaaggcatcgtattaaatttcattggtcttgaaagcatagtgcaaagagctctctcatatggatgcaggctacattgatcaaacccaagtcatcgtcaacacaaggacaaattaagtattttgtatacagcattgagcatgccattttaaaccttccaccacaccaggaacagatggtctggctggtagatttccagggtttcaagctgtcagatatatcattcaaggtggcacgtgaatctgcccatattctgcaagagtattatccaaagcagctgggtttaataatactatacaatgcacctatgatcttccaaccatttttctcgatggtaaagccctttttagagactgagactgttaataaaataaagtttggctattcgaacaaccacaacacaaagaagattatggaggatttgtttgatatggataaacttgaatctgcatttggtgggaatgatgatacaggatttgacatgaataaatatgcagaaagaatgaaagaggatgaaaataagattctttctttctggacacaggccaagtctgtgtcttaaataaagctccttttccttagattcaatcagggaagatgcaaactctgatgcttcttacaatacatcttggtttctcaaagggggagaaattagaatgagaaattaccgacctaaatcagtgttgagtaaactgtaatgcagttacatgctatgacattctagtttgaaacctaaattctagacaacaagtgtcgacttcatgtatgatttatgattataaataattttgcctcgttgcttg

SEQ ID NO: 12874 - DNA, 137 bp, Glycine max
  Clone ID: PAT_MRT3847_111631C.1
atattatgatattgggaattaacaaaacagaacattcacatttttaaatattgaatccaacccacacttacacagtggttgtaactagcaacaccacctttgtatgttaaggaagggagaaaaatagaatttaaaaa

SEQ ID NO: 12875 - DNA, 386 bp, Glycine max
  Clone ID: PAT_MRT3847_111632C.1
acgagggtaagtgatcacggaaatttaatccctatcgtaaaattagcagttatgtgcctgatgtacaatgggaggtgtttgtttttacccccgctcaattatttcttggagaaggaggtgtttgtttgttttctgtttttattttcagtaaaaataggaagtgttggaaatgtgtttgttttaattttagaaaacattttctaagtctaaagctgaaaacgtttaaacatcattttctctgttttgatggaaagttgaaaatgcgccggcaagtgttgtgattacaacaacattctttcttcttctctcagaccatccagttcaccctcttcaacgctaccaacctgttttggtttggaccatggacatgtgagttcgtgtaggcg

SEQ ID NO: 12876 - DNA, 734 bp, Glycine max
  Clone ID: PAT_MRT3847_111633C.1
tgcatgcctgcagaataaattactgttttataaggatatgcaaaagtcgaagtccaatagaagctaagttttcagaagattctacatgttgctaataatcattgagaaatcaaaacaaatgttgttcaaagctctcattgatgaattgactaatcagattcttggtttgattggaaatgttctcaatcccaagggtaaaatggtcttgtgttttatagatcattgaaaaatttagttttgggggggtaggaaattgttatattccagaccagtctttgcaggaatcatgaatgcttaattttatttgtataatactagaacgcattgtgtttttctcaattctttaaaatttattacatgcatcaaatggtaataattggtaatttctggttctttaacaactcacaaagaatcaaaactacttgatatctgaacttcattgcttctttcctttatactggtaagtcatcaggtaagtgctcttcatatagctcttaatttgtcacatctattaaattattgtgtgtttgcaaccaaaacaaattattttgtgtttactttctttgtatctgaaactactctgttgcaatgatatgctttctgaactttgatgtgaatgttctttatcaaatgctcatgtctttattgtcattaggtcggttttatgcctttgaactagctcacagactagatccccaatcaagtgggcgtggtgttcgccaattcaaaactgc

SEQ ID NO: 12877 - DNA, 259 bp, Glycine max
  unsure (1)..(259): unsure at all n locations
  Clone ID: PAT_MRT3847_111634C.1
tgatcgaaggagngcagaangagagtgcgttgccgggctcttgagaagcccgcaagatcacaactcagccacggcaccgcctcgccgccgacaggtgtgagagggttngagntcttgataatngaggcatgncataaactaggttgttctccaacgaacaagagtanagacacaantcagncatctgtgcatttnttngagtgcagaaatagaagtgcagtcnatctaagctccagaantaagngtatnatttnganat

SEQ ID NO: 12878 - DNA, 476 bp, Glycine max
  Clone ID: PAT_MRT3847_111635C.1
ttcggcttcaacctcaacccgattcggctcgagaaaaaaaaaaaaaaaaaaaaaaaaaaaaaaaaaaaaaaaaaaaaaaaaaaaaaaaaaaaaaaaaaaaaaaaaaaaaaaaaaaaaaaaaaaaaaaaaaaggggcggcccccaataagaaacctcttcaccccgaaaataaattccgaaccggaccctgcaggcgaccaaattttccttaaaaaaagtctaataaaacctgggcgaaataaggaccatacttgttccctgtgaaaaattgataccccttaaaaattccacacaaaatacaacccgaaaccataaagggtaaaccctgggggccctaataaggaacctaactcacattatttgcttgaccctaactgcccgttttcaagagggaaaacttgtggtccaacttgcttaaataaatagcccaacccccgggaaaaggcgttttgcatattggcccccaggagggtttt

SEQ ID NO: 12879 - DNA, 589 bp, Glycine max
  Clone ID: PAT_MRT3847_111636C.1
aaatccttatactatttttctcgggggctggagtatttctcttgaagcctctccaatttgccttcacttcttaataataataatatcctcttttcttgtaccaaaccaaattgatattttgaactcaatggaaggtagcacaacaagctctgaactccctcctggctttaggtttcacccaacggacgaggaactgattgtgtattacctttgtaaccaagccacctcaaagccatgccctgcatctatcatcccagaagtggatctctataagtttgatccttgggaattgccagataaacagaatttggagaaaatgaatggtatttctttagtccaagagacaggaagtacccaaatggggtgaggcctaaccgagcaactgtgtctgggtattggaaggctactggcacagacaaggcaatctacagtggatctaagcatgttggggtgaagaaatctttagtcttttacaagggtaggccaccaaagggtgccaagacagattggatcatgcatgagtatcgattggctgaatcaaaaataccatctagcaggaaaattggatccatgaggcatcaatactggg

SEQ ID NO: 12880 - DNA, 824 bp, Glycine max
  unsure (1)..(824): unsure at all n locations
  Clone ID: PAT_MRT3847_111637C.1
ctctccccctaccctttccgccgcttcgccttttccctcggatccgtgctttctagagggggaaaaggaatattattctatctttatgtaccaaacagcactcatttttgccaaaatacattagatacatcatgaactaaaacacacattttacatatctaacattttcacttaccaaactattgtcacttttgcttgctttctacaacatttatattatcaactaaaaacacaagcatcctatcatgttgcagtgtctgaattggagatgctctgtgatgactgatgacaatggggacaaatcaccttctgaagctgctgattgaagtctttgccttggcgtcatcatcttcttcaggcagcttcactgcagtgtaggtacctgccccagctaaagctccaagtatgggagctactagatagacccatatggctttgtagttgtttgccgccacagcaggacctagtgttcttactgggttcattgagcccccggatactggccctgctatgagtatattgagcatcacagtcgctcccaccgcgattcccgcgagttctcccacagctctggtgtcggtggcgactgcagtgacaacgaactagagggtggagccaataatgaattccaaaggaaaagaatgggcggattctttcgggaggaagggggagctcttccactcatgaaaagggggaaaaaaccnccttggaaagaaaatcgggggcaaaataaaacaaaaaattggggcacaaaattaaaagggagcaaaggttttcaaggggaaggggttttatggggagaaggaaaagggggaagggggggg

SEQ ID NO: 12881 - DNA, 2007 bp, Glycine max
  Clone ID: PAT_MRT3847_111638C.1
aggagattggcacaagcacagtcacagagcccttctccatctgaagacctcggcaccaagatctcaacatcaacatcatcctcttatcaaattctgcagcaccatttcggactccttcacagtctcctacctcatcacccgcttcggcttctccccagagaccgccctcagcatctcccgcaagttccgcctcgacagcccccacaggcccgactccgttctcgccttcttggccacccacggcttctctcctttccaaatccgccaagtcatccaaggccaacacaccatcctcctctgcgaccccaacaacctcatcctccccaaattccagttcctccgctccaaaggcgcctccacctcccacatcatccgcatcgccaccgcttcccccaccttcctctcccgctccctcgacagccacatcgtccccgcctaccaattcctccgaaccttcctcgtctccgacgaactcatcatccgatgtctcagccgcgactcctccgtctttttctccgacgacccccgcttcccgcttaccgccgaattcctcctcgataacggcttcacgcgttccgccgttgccaggctgctgcacatgtgtccctctgttctctgctcacgtgacttacccgacacggtgcatgcactcaagcaattagggtttgatacctccgcccccaatttcagtgctgcgttggtcgcgaaaagcacagtgaataaaaccaactggggtgagtcggttagggttttcaagaagtggggttggtcccaggaacacgttcttatggcgtttaagaagcatccttcttgtatgctgacggaacctgatgagatagatgctgtgttcagttattgggttaaggagttaggtgggagttctttggagcttgtcaagtatcctgttatttttcggttgagccttaagaagtggattgctcccagggcttccgtcgttcggtttcttgcagcgcaaggtctattggaaaggagtggcaacatggtcgcgctgtttattatgtctgagaaaagattcctggacacgtttgtgaaacgttatgagaagcattcgtctcagttgttgaagatgtataaggaaagtgtgaatatgaatgttgccaatagcaaggagaacaagaagaaaacttgcttgtagtttaacagccttgcgctgttgttcacttggaatacatgatatgttcttgtgtctactgaagatctgacgaacaatcatgctagcttgtttatgggatttgttattttgcaggagttttgcctgtggaaatttgttgtatgttttcctgcagaagctaaataaaggaagcacgagtcttttgatgaaagagagaattgatcatgcttgtgagtgtaaattgactgtgaactttgtatttggtacaaactacaaagactttggagcttccatgatgttgatgtgcatactgcatacctatgctcattagtacattggcgattgaaaaaaaaatgggaaaagatgttggatgtgcaatacagctatataaaacaggtaaacagatttcatatggatatttcaggtgaaaaaaatggagcattctataaaccaggcaaataagggttgatttgaaagattatttggtaacatcctcaatctcattaaaatacttatttctgcatataaattgttgctcttggtcaaattctatcttcttttttgggaggatgctgttcttctcacctgtcaagcaggttattttgtgtgaattatttaatttaaatattgctgcttatttcataatttcatattcatccttctgggatgtgtgtatttagtagagttgttccagattttggctcgccttgtttcattgtttttctttagtgaaatgagctgatactcaaaagaagctatccgccttttgagataaagcacctactcttcataaaacagatatgatctgatgtttttctgagtagctgttattattttgcaatagatgactttatctgtgtggcttattgtaaact

SEQ ID NO: 12882 - DNA, 487 bp, Glycine max
  Clone ID: PAT_MRT3847_111639C.1
ccgggaaaatatcaaaccaagtcacaacactcttaacctcctcgccctcacccacatccactcctaccacacctgcaaccttaaccccgcgtggtaccacacgcctcttttctactttgccaaattccttccattcaaattctttggtttcgacttctccctcctccacatcctccaccctgacaccaccctcaccttccatgtcacctctatcgatgcctgttattgccccaatcggtaatcttatcacttccaactctatcctacttttcattttgtaacttaccttttgtacaaacttaaatttgaagttagcatcgattgagctgactctaacaacgacaataaaaaaattagacagagtctattaaagtttgacatggtaataatacaatagtggaatgtgtcattctgtttacatgtcatcacttgattgacaacactaacaacatatataaaaatcgattataaaaaatattataggtac

SEQ ID NO: 12883 - DNA, 101 bp, Glycine max
  Clone ID: PAT_MRT3847_11163C.1
gctgcccacgcgtccggtggactactgatgctgggcttgtaactgagcttagtgagtatgggcctgttaaggaggtgaagattttacatgagatggccagt

SEQ ID NO: 12884 - DNA, 605 bp, Glycine max
  unsure (1)..(605): unsure at all n locations
  Clone ID: PAT_MRT3847_111640C.1
cccacgcgtccgcccacgcgtncgcgagaagacgacagaagggggttggcaattggcatcacgtcccttttcaaaccaagttccacagacaccaacaacgctttagctctctcttctctccgtcaccgtcaccggcgatctacatctgaacccgatccagccaatagatctcagaaatccaaatggagaacctaatctctttggtcaacaaaatccagagagcttgcaccgccttaggcgaccacggagaaaacagtgcactccccacactatgggactctcttcccgccatcgccgtcgtcggaggccagagctcaggaaagtcctccgtcttggagagcgttgtcggcaaagatttcttacctcgtggatcaggtcgtcgtcgctctctctcttccttaaatcgatgcttgtgatttgaaacttatgcgtgcgaatctttgcaggcattgttacgcgacgacctctcgtgttgcagcttcacaagattgacgagggaagcagggagtacgcagagttcctccacctcccgaggaagaggttcaccgattttgctgtgaggaaggagattcaggacgaactgatagagattttggtcaaccaaa

SEQ ID NO: 12885 - DNA, 2389 bp, Glycine max
  Clone ID: PAT_MRT3847_111641C.1
gaattcggcacgagcgtcgtaaaagcgagtatcccgttggcaatttggcatcacgtcccttttgaaaccaagttccccagacaaaacactaaaaatcgctcttgctccctatcctccacctgcagacactgcaccaaacaccaacaacgctttagctctctctcttctctccataaccgccaccggcgatctggcactaacagatcgccgctgctacatctgaacccgatccagccaacagatctctccaattcaaatggagaatctaatctctttggtcaacaaaatccagagagcttgcaccgccttaggtgaccacggcgaaaacagtgcactccccacactatgggactctctccccgccatcgccgtcgtcggaggccagagctcaggaaagtcctccgtcttggagagcgttgtcggcaaagatttcttacctcgtggatcaggtattgttacgcgacgaccgctcgtgttgcagcttcacaagattgaagagggaagcagagagtacgcggagttcctccacctcccgaggaagaggttcaccgattttgttgctgtgaggaaggagattcaagacgaaactgatagagagactggacgaaccaaacaaatttctactgttcccattcatcttagtatatactctcccaatgttgttaacttgacactcattgatcttcctgggcttacgaaagtagctgttgagggtcaaccggatagtattgtgaaagacattgaggatatggttcgctcctacattgagaagccgaactgtataattttggccatttcaccagccaatcaagatcttgcaacatctgatgcaattaaaatttcccgtgaagtggaccctactggagataggaccattggagttttgacaaagattgatcttatggacaagggtactgatgctgttgatatattggaaggaagagcatataggttaaagtttccctggattggtgttgtgaatagatcacaacaagacataaacaagaatgttgacatgattgctgctaggcgtagagaacgtgagtacttcaatagtacccctgaatataaacaccttgcgaacagaatgggttccgagcatctggcgaagatgctctcaaagcatttggagacagtaatcaagtccaaaattcctggcattcaatctctaattaacaaaacaattgctgaacttgaagctgaactaactcgtttaggaaagcctgtagcagctgatgctgggggaaagttgtatgcaatcatggaaatatgccgctcatttgatcaaatatttaaagaccatcttgatggcgtgcggcctggaggtgataaaatttataatgtctttgacaatcagctccctgctgctttaaaaaggttgcagtttgataagcagctttcaatggaaaatataaggaaacttattactgaagctgatgggtatcagcctcatcttatagctccagaacaaggatatcgtcgtctaattgaatcttctctaataactattaggggccctgctgaggcagctgttgatgcggttcactcgctgttaaaggacttggttcacaaagctatcagtgagactttggacttgaagcagtatcctggtctccgggttgaggttggggctgctgctgttgattcactagaaagaatgagggatgaaagcaaaagagcaacactgcagctagttgatatggagtgtggctatctgactgttgatttctttcggaagcttcctcaagatgttgataagggtggcaatcccacacattcaatttttgatagatataatgattcatatctaaggcgaattggaaccacaattttgtcatatgtcaatatggtctgtgctacactgcggaattcaattcccaagtccatcgtctattgtcaagtgcgggaggcaaaacgaagtctacttgatcacttttttaccgagctaggcaaaatggagaccaagcgtctgtcatcgttattgaatgaggatcctgcaattatggaacgacgtagtgcgctcgcaaagagactagagttataccggagtgcacaagctgaaatagatgcagttgcttggtctaagtagatatatgtatgtcagatcacgtttatacgagagccagcagtgtcattattcattgtttccctatttccagttcattattcatactcattttttgttgtcatcttatccacttgtattgtcatcttaaatagatgagacgattctgaaaagggaaaaaaatgattttttgggttatataattgagtgtccccatatatttcatttttcagaccttccaaatctccactgcccatttttatttgtatgagattctgatgcgttcacaatgagaataatctttatacatttttgggttatata

SEQ ID NO: 12886 - DNA, 284 bp, Glycine max
  unsure (1)..(284): unsure at all n locations
  Clone ID: PAT_MRT3847_111642C.1
attggattgtggtttagaacatggtgatgatctgtattattctgaccctgtggatttaaatgacaacgttgggtttctgaataatanaaatagggangacagtactgaanaaaatgaattacatgaaattgaagatggagataaaaagcatgattttgttctggcataatgaacaaactttccatttcatggagtcngcaagcactggctttatccatacctggtntgncgccctgcnatggcagccctgttgagtcattcgaaatgntggggcngccttntgg

SEQ ID NO: 12887 - DNA, 461 bp, Glycine max
  Clone ID: PAT_MRT3847_111643C.1
tttatctttagtcttttcaaatctatgctaaatgcgagagagcctacaaattaaatgaggaattaaaaaatgtctattgtaggtggacgccccttcctttgacatgagggcaagcccctgtaatacaagaagagggtgtgttctacaggaagagctatgcggttgcatggaggcccatcacaccctaactttctaagaccctggtgggcctaggacgtgacactggaagaagatgcgatcctaactcctatggcccgtggagagccatgattaaagaaaggcgcagaagccctgaacaaccaaatgtcagccgcggataactcaattccctgtttcaccactaaacttgagtgagcaatccttggttcccaaacgttatttgctcggactgctagaagattcctgatcgacactgctcatagcaggaatccaacgaaagacggaagaaatcttcagctccc

SEQ ID NO: 12888 - DNA, 467 bp, Glycine max
  Clone ID: PAT_MRT3847_111644C.1
gtttctccctcttggcttgctccgcttaatttgtttttcattttttggccataatagctctctcataagtcctaaaagactaaatatattcacacttgctgcatatttgttatatatacatacatatatatacggtgcctctcggagagggtataagagagggagataaaactcagaaaaatggagaagtgggtggctttggtgttgctgttggttttgtggaaaataagggaaggttttggcgttgaagctgaggaggtgacatatgatggaagatctctcatcattgatggccagagaaaaattctcttctctggttcaattcattatcctcgaagcactcctcagatgtggccagatttgatagcgaaagcaaaacaaggaggactagatgtgattcagacctatgtgttttggaatttacacgagccccaacccggaatgtatgatttcagcggtagatatga

SEQ ID NO: 12889 - DNA, 555 bp, Glycine max
  Clone ID: PAT_MRT3847_111645C.1
cttgagaagaatggggttatagtgaacaaggccgggaagagcaaggatgaacttctgaatttgtttcacacgattacgaagggagcagaacacatggattcgagctatagctacccgctgagtttaagcatatcaataagcggaggaaaagtcacaactgcatttcaaggattgcctgtggtcacttggcacaagtgcaggcatgtttttcagatcattgcatactattggggaaactggtacaaaattttgaaacgcgatcatttccccacggtgtggaaatccataggagtgttagcggctgctgcacttcttgttctcactattatgcagacctattactcatcccgcaacaatgactgatttagtgttttcttatttcaccaagtttcctttagcaaatgtgaaatcaagaggaatcatgtgtctgtttattgattgccttttactagatgagtaaatcaaaatcttgattttgtggtatcaaaaaaaaaaaaaaaaaaagagaaaagaaccaagatgaaaaaaacttgcaatatgcttatatattatgtc

SEQ ID NO: 12890 - DNA, 506 bp, Glycine max
  Clone ID: PAT_MRT3847_111646C.1
tgcacacggacatgagaaatttccattatagcttttccttcataatttctgcttaggattagaattgtagttgctaccatacactgtgtaatagttttgcttggtgaagttcataaggggaccgtgcgtttaatggcgttacctgataattgcagggagcgtgtaacatgaatgcgttacgtaataattgaaggggcgtctaacatggatcggtccaaaatggtaacatcacatgggtctgagaatcagttttgttttataggttataattatatgatatttgtgtgaaatatcttttagctttttttatcttcttttaattatatttgtttgtccatcaaatttaaatatgaagctttgtttaagaagatgaaatctaatttttgtcacactaaatacatatttctggcctggaccaatttatagatttataaattattaaatgagtcggcaaaattgaatatgcatactgtatgactgaatatgggatgttgatcaaacttctt

SEQ ID NO: 12891 - DNA, 349 bp, Glycine max
  Clone ID: PAT_MRT3847_111647C.1
caaatccagctttctgctctccacacgctctctcactggcattatatatctctgtccactctccaactccaactcccaaattcattactactagtgagtagggactttttaattcaaggtcctaacttttttctctttccattggtctttttttttcactcccaacaccaatggcattccatgatctactcttgacacccaccatttccctctgtataattctattgcctttctttcccaccccttcccattctgcccctacttgcgctctccagaagctaaaccgaacttacgccaactgcaccaaccttcccaccctgggcgccacccttcattttaccttcaacgc

SEQ ID NO: 12892 - DNA, 247 bp, Glycine max
  Clone ID: PAT_MRT3847_111648C.1
gtcttaattagatagagagaaattgaagtcgaaattaaagaatacgacgactgaagatgttgaagacgaagccattccaaggcgcgaacgtgttcatgtcgcgaaacctcgtgccgccggaagtcttcgacaagctacacgacgcggtcaaagataacggcgcccaaatccacctctgctgcgacccttcccgaaacggccccaacgattaccacattatttcttccagcaaacacgaaaagttcga

SEQ ID NO: 12893 - DNA, 418 bp, Glycine max
  Clone ID: PAT_MRT3847_111649C.1
cttgaaaaatctgagtggagatcatgaaaggcttggtctttgatttgggtatatatcattacagctagagatctacacctactgggcctacttgaaagaaaacatgttgatgaaatttgagaaatggcccaaaatgattgccctgatctattgaaatagcttgcctttggacaggctacaccaggataatacttcattgaaccctctatagatgtagctgcttatagtggaggatttccattaactgttgaagtccttgcttttcatttacttagccagacacagacagagcgggaatgtgccttgcccagataaaattgactgaccaacgatctattttaccttaacttaacaatttgtgttgttcactcctatgatcctgtggaaaaagtatatttcttgacattttccttcttta

SEQ ID NO: 12894 - DNA, 386 bp, Glycine max
  Clone ID: PAT_MRT3847_11164C.1
tcggcggcggccgcccgtaatttagacatggtgttttccaggcttctattgattaacccccagagaccttatactatggggagaagtcttagatgcccttcagggggataatatataaactggatccttaaaggtacccaaccttttactgaaacccatgaaacggacaaccgacaccattgtcctacaccctgggtgtatggctaagcctacggatgaacttaacgagggattttgaaaaagcgtacggtacttttagcgtacaaattgataaattctccccctagaagtgaattactggatctgcgaaatatcaaaacgcaactgctgttgccctattggagcctggaaaacaccatgtctaaattctggggccgcatccccaa

SEQ ID NO: 12895 - DNA, 394 bp, Glycine max
  Clone ID: PAT_MRT3847_111650C.1
atcgagatagctcgaagcagcgtgacgaaaatgaacgtccttgaattattcgatgctacagtcttgggagcatggcaatgccatgcgtacgatatgatccctgtacgaatgaacactggctatggcgcccgtactccggaggtgaaatgcgcatgttggaggctagctgtggaagcacacaacatctctggctctgagaccattcctgaagagtgcgctgaagcaacagaggaatacatccatggcgaacactatagagcagactccatagcagatcaccaacacgcttacttttatggccaaagacctcgaaggccataccatggacacatctgagttcatgatagacaggaccgtactctctaatatttcatactacaaactacatggatat

SEQ ID NO: 12896 - DNA, 363 bp, Glycine max
  Clone ID: PAT_MRT3847_111651C.1
tctatattggatacacacacactttgacttatagcatatacgagtgagtgatgacgtgcagcaaaactgaatcggttcacagcttactccatcttcaccttaagatcaccaaacggctgtgtactatgtgcaagccttcaagggattctatgatggggcacgtatcttcaatgcaggcaactcaatatcaaacagcctatggagtctcctcacaccctcattcggcgtactaaggaactcttcccgagccgcttttcggggattttaggcatcttcgggaggaaagggcgttgaagaggaatgataaggggggcctggtgtgagtgattctggagaacggcttatcatgagtttaagacaagg

SEQ ID NO: 12897 - DNA, 672 bp, Glycine max
  Clone ID: PAT_MRT3847_111652C.1
gttcttaacctttcaatccattcggctgaggttaccttccccttggccataatcacccaaaaaataaaaataaagaaaagaaaagaaaaaagaaccttcatggcaaaaatgcataatttcttccttttaacgtgtttgatagtcatcatacctaccttgcatgccaatgtcaaggaggatgaaatatattggaagaggcaaagtcaaatacttaatgattcatattggaagcaaaaagcatcagttgcagaaaaagagaacaaacaagcttatacttctgacccatattcactcaccaagaacttgacctatagtgttagcgaaatcatagttggtgagcagaatggaagaaggaatttgaagggaaaaggtggtaattgtatggcaacaaacccaatcgacaggtgctggaggtgtgaccccaattgggcaaacaaccgaaagaagcttgcaaattgtgtgcaaggttttggcagaaacactgttggtggaaagaatggtccattctatgtggtgaccagtaatttagataatgacatggtgaatcctgttcctggtacccttaggcatgcagttacaagaaccggacccttgtggatcatctttgctcatagcatgaagattaggctcaatcaggagctcattatggcaagtgacaagaccattgacgga

SEQ ID NO: 12898 - DNA, 446 bp, Glycine max
  unsure (1)..(446): unsure at all n locations
  Clone ID: PAT_MRT3847_111653C.1
gtcaacgacccgttcatcgaactcgactacatggtgtacatgttcaactacgactccacccatggccgtttcaagggcaaaatttccacaaacgccggcaatttggtggtggagaaggaggggaagagcgcgcacaccatcaaagtgttcaacctcaaagacccggccgaaatcaaatggggcgaagcgggcgcggaatatgtgatcgaatccaccggagtgtttaccaccattgagaaggcctctgctcatcttaaaggcggtgccaagaaggtggtcatctccgctccgtctgcggatgcgccgatgtacgtgatgggcgtcaacgaggacaagtacgacccggctaggacgacgtgatcagaatgcgtcgtgcaccaccaactgcttagctccgttggcaaagtgataacgacgagnttgcatcatcgaggactgatgacact

SEQ ID NO: 12899 - DNA, 569 bp, Glycine max
  unsure (1)..(569): unsure at all n locations
  Clone ID: PAT_MRT3847_111654C.1
aacagagagcggccgattttttttttttttttttttttttttttngccaatccctaaacaccccacaataaatttaacctgtcacattttctctacatttcacccaccactccatgaaaaaattccctctaaacatacattatttaaaccattcttttcacaaattcttctaaaaaaacaaaaattattataaatttacttaaatcacaactactttttatataaatgcccaaaacacctttttcaattaatttttaattccgtcaaaaaccaaaatggatcaatttttaaaaatatgcccctatgcttaatacaacgataattttttgcaccactttcctcaacatagcattataattaatacacttctgtctttctttatacttaactaacataaatcaaaatgcacttcaaacatcatattaacctccagcgtacaaatctttctcactcttttaatatgattctacaataacaaacctcttgttcttcaagctccccaataatactttccattattccactcctataaattaacacacatttttccttcacctccctaattctcc

SEQ ID NO: 12900 - DNA, 572 bp, Glycine max
  Clone ID: PAT_MRT3847_111655C.1
attgcttggtgcttgtagcatacatggtgattctgagatgggtaaatatgctgcaaatcaactgtttttggctacaccagacagcccggctccttacgttttgatggcgaacatatattctagtgaagggaaatggaaggagagagcacgttccattaagaaaatgaaagagatgggggtagcaaaagaagtgggtataagctgggttgagattgaaaagaaagtcaatagtttcgtagtaggggacaaaatgcatcctcaagctgatgctatattctggcttttgtccaggttattgaaacacttgaaagatgaaggctatgttcctgacaaaaggtgtattctctattacttggatcaagataaaaaggattaggacctgtttgattttctattgctgagttgtttctctgcatttattctgatggttcattttctagtgagaagaaccctatagatgtttgtgcggaaaactagccagaacttggtttggatcggatcgtggatcatggacaaaaagtacattacatcaatacatcattaaaataatggcacgacaattttgttttctt

SEQ ID NO: 12901 - DNA, 341 bp, Glycine max
  Clone ID: PAT_MRT3847_111656C.1
tataattgaagatgaacgcatggtctgacgcgggggatttgttaaaggataaagaatgaaacaaaaaatgatggaaggaaaggtaaaagtgtgcaatatggtgagatatatgataattataggttgggaaaaatacaataagaattttagagagagtgggctacatagatgaaagatggtacagaaaatttcattggtaattgtagaatacagagtgcattgcgttgaaaaacttaagtgggttcaacgacttaagaaagtcttttgggatcatatatgaataggggaggaagttgtttttttaaggaatactatagattcttattagagtgtctattagg

SEQ ID NO: 12902 - DNA, 555 bp, Glycine max
  Clone ID: PAT_MRT3847_111657C.1
ggctcgagctcgagccgaatcggctcgagcaacctcctctcacagatatggcaagatggatacagtcaacgacaaacagcctgattgctttagctgtgggtcgccgccaaaacctcgctttaagacagaggaagaaaaacgaatctcttttggagaaaagtggtttccgaccgtttcaaaatgcgacccaaagtacgacgatctggggatctaagatccgtttccagcttatgagctctatccatcgtgacaaccccttcggtaaggggtctaacatggacgagcttgatcaaatgaatgactcagcttcagcaagggaatccgatgaacgtccctcagatatacgaaagaccggggcgtttcatgttcaacgacgtttgtatttaagcccgtcgttgttgaagtcatcaaagacggtcatgatggctggaccgtcgtagaaataaaaaatacaaagtcggtgttacgaatcaccgtcgtagatttttgagtttatatattctcgcaacaaagcaccagcgcccttgcttgcctgaattacaactcgaaaaacct

SEQ ID NO: 12903 - DNA, 750 bp, Glycine max
  Clone ID: PAT_MRT3847_111658C.1
acgttcacagttgaaatcttatattgcccacatagcagaggagatgtatgtctacaggtctttaccccttggacaagatcgcagacgtaaccgatattggcagtttgttgcttctgcttctagcaatgatcctggttcaggcaggatctttgttgaatatcatgatggcaagtggaggcttattgattctgaagaggcctttgatgctcttttgacatcattggattcacgtgggattagggaatctcatttgcgcttaatgttgctaaagattgagaattcctttaaagaaaatgttcgaaagaggaatgcatgttgtgccaaaaatggaagcaggggcgaattttctattaaaattgaagctaatgaagcatgttctatccctgagcacaatgctggatctgacagtcctagcagtacccttcatgacttgaatgctgatccatctgaaacttcatcatccttcaaaattgagcttgggaaaactgagagtgagaagaaagctgcattgagaaggtatcaagattttcagaagtggttgtggaaagaatgttataattcatcggttttatgtgcaatgaaatatgggataaagagatgcaaacctcagatggacatttgtgatatatgtctcaatctttattttggtgaagactctcattgcaattcctgccaccagacttttccctcaaataatggattttaatttttctaaacatgcattttaatggcgagacaagttatccaaag

SEQ ID NO: 12904 - DNA, 283 bp, Glycine max
  Clone ID: PAT_MRT3847_111659C.1
cccacgcgttctgataaaaaaaaaaacccctttgccggaagccatggagaatgcaaaaaaaattaattaagcgggtgacccagcttcaggtggggctggcagcggctgggaggtccctcgatactggcatctgggagctgaggggtgttgcctccacttttgccctaagttctccagggcctacggcttttatcctgggtgggatatgcacacctgtttgtttgcgcaagatgggtgattcccttggagatacttagaggccgcctggcgctctacttcctgg

SEQ ID NO: 12905 - DNA, 205 bp, Glycine max
  Clone ID: PAT_MRT3847_11165C.1
tgtcgggcatatcttagacttacaagaaacttggagacagtctggttttaaaacttctggagggagggaatccccagatgttggacactaattacccaaaactggcggtcaaatgctgtttttataacgtttgctgggcggatagagcgcaacttgagacattggtgtctattggccaataaaattctaatgtagctaaacatat

SEQ ID NO: 12906 - DNA, 404 bp, Glycine max
  unsure (1)..(404): unsure at all n locations
  Clone ID: PAT_MRT3847_111660C.1
cgactcttcgcctttttttgctgcaaaacaacccttcgcctttggacgcccgccgctcaagatggttctcggtcctaccgcccgccgctggcttccctacatgaacttcaccgttgccgtgtccgcgcttgcgttccagaccggggtgctctacccgtggcacgaggagctggaccacgagttcaagaagctcaaggaggaacacaagcagcagctccacatctaccacgagatgaagctgaagcgtcttgaggacctggagaggaaggtcgccgctgagcgcgcctcacagaggttctccctctggctcccgtggcagagcgaagcctcgaccaactgatcgacctataacacacaccgtncaacatcgcgcaacccggggatgaccacattcgagccccaag

SEQ ID NO: 12907 - DNA, 260 bp, Glycine max
  unsure (1)..(260): unsure at all n locations
  Clone ID: PAT_MRT3847_111661C.1
aaaaccnaagcttagaattaganacanagaaaagaanaaaggaaagaattgatcgttgaaaatgcagggagganagaaagcgggagagtccattaagganacagctacaaacatnggtgcttctgccaangcttgcatggagaagaccaangccactgnccaagagaaggcagaaagaatgacagcacgtgatccggtgcaaaaggagttggcaacccaaaagaaagaggcaaagntgaaccaggcggantggacaagcc

SEQ ID NO: 12908 - DNA, 520 bp, Glycine max
  Clone ID: PAT_MRT3847_111662C.1
ctcatatccaccacaatggccattggacaatcctcccagcagcaggccgacggccagaatgtcgtcagccagggtgcctctgacaaggctgccaaccccatgcgtgagctgcgcatccagaagctcgtcctcaacatctccgttggcgagtctggtgacagacttactcgtgccgccaaggtgctcgagcagctgagcggtcagactcccgtctacagcaaggcccgttacaccgtccgtaccttcggtatccgccgtaacgagaagatctccgtccacgtcaccgtccgtggtgccaaggccgaggagatcctcgagcgtggcctcaaggtcaaggagtacgagctccgcaagcgcaacttctcccagaccggcaacttcggtttcggtatctccgagcacatcgacctcggcatcaagtacgaccctgcgatcggcatttacggcatggacttctacgtcgtcatgtcccgtcccggtgagcgtgtcacccgccgtcgccgctgcaagaccaggattg

SEQ ID NO: 12909 - DNA, 102 bp, Glycine max
  Clone ID: PAT_MRT3847_111663C.1
cttttgtccgtctttgagcattcatcgcgatagcgcactatcaatgaatcgaaccactatggcgaccaacatattctttccccttgcgctggtaggcatgct

SEQ ID NO: 12910 - DNA, 271 bp, Glycine max
  unsure (1)..(271): unsure at all n locations
  Clone ID: PAT_MRT3847_111664C.1
ggacggggaaggggtggcgctgccgagggtgttcgtgaaggggaggtacgtgggtgggtggaggagtttgggtgacctnnnctatacggntcgactcgggagaatattgaatgcgactcgtgtggagagggggattgggaggcaaacgtgtggaggttgtggtggcgctaggttcgttccttgcttcgactgtgcttggagttgcaagcttcttcaccgagagaggtgctccaattgtaatgagtttgtcttgctccactgccctgcttgt

SEQ ID NO: 12911 - DNA, 3315 bp, Glycine max
  unsure (1)..(3315): unsure at all n locations
  Clone ID: PAT_MRT3847_111665C.1
ggcacgagagtcatggagttcatctgtgtcacaaatgtggatggccatttccaaatccacatccgagtgccaagcacaggcgtgctcataagaagatctgtggaaccattgaaggttacaaactgtccgcctccgagggacaaccccatttgaatggctcagatgatgaacatgtttctgatgatgatcacaaaacaccaggtccaaaatccttggagacaggcaacaaagagaagggcaatgaaggaaatggagaaaaaataattagatcagaagatgaggtgttctcggatgcagttgcagacttttcggatagtggatcaattccagaaatcaaggaacggttgcaagatagtttggactcaggtgctgatgtggaaagggttgacataaaagaaacaaaattttcaggctcttctgaggacaaagatttcaatggtgggaagatagtatcgacttgtgtgcggcaaaacattttggcctgggtaattaaaaataaggatgcaagtcagttaattgacaagtcaactgatgacagccaaattcaaaatcctaatatttttcaaaatgaaagtgttgaattgggaaacatggtggagttgcaaggtcaattgtcgggccctactgtggatccattgtcaagttccattgcagacttgagaaccgaagtatcaactaatgtggatagtgatgttttttttggtttgttaagtgactcacttcctggcaaagctgaagccatgcttgatatattgccagaaaagaaaatccatgctgttgagaatgtgacagattgcattttgatatctgttgcaaaggaaactaatttgaaagaaaaggatgagattaattctgctggagatgcgattgaaattgtggaatcatctgataatgttgtaggtgaaacatgtgaaggagtgtctaaaatagctgttagtgatgcaatttccttggatcatcaagtgggtgatggagctgttcatctgaaggaaaataatggcgctgagattatttcctacagagatgtggttgaaattgtggaatcatctgataaagttgtaggtgaaatgagtgaagaagtgtctaaaatagccgtttgtgatatagtttccttggatcatgaagtgggtgatggagctgttcatctgaaggaaaataatggtgctgagttcctttctttgttgcccccagataacctccctcttgagttaaactcggttgtaatcacaaatgacgcacagggagactctgcatatgtggtacagtttgctacttccagtgatgacaaaattttgccagaaaagggagaaggaaatgttaatgttgatcttcttcctacgtgtgatgatatatctgatgaagcacatcctcaaatgagcctacgcctaaagaagtgcatgctgaacagtgtaccgaagtttctccagcccaggctcacagttgaaagtcatcaaagatcagatgagactgatgcatctatgaaagctatgaaaactgagaaaaatgaaattcatatggttcacttttctgaagagcatggacctgatgatgtgtgtaaaaattcccagcagataagtttaccagaagatagtttaatggcctcttctaatgagagtcagagggacgaatcctttaggtctgcaactagtgaaacaactagggcaattaacatagacagcacaactttagatggcaaggatgtagaatctaatttagaaaatgatattgaaattatattgaaagatcttcaacctggtgacatcttgcaatctgaagtcaagcaatcagatgacttatttaagagtgacagcgctggtaagagtgatgctgctggtgaaatgggtaaaaatgaacaatgtgatattcctgatgctcaatgtatggaaaggcctactgtgagtgatgctttattgccaaaatctgctactggtcattttgaaagcccagctatttcagagtctttagacattgtggatgatggacctgtgaacaagtcaaatggtacagagtgcagaaatattaatccactaccaggttcccagaaagacataaaagaagatgaaatcaatattaatatcaaactaaatgaagaatataacaaatctgttgatacttataccgaatcccgtcaagctcaagatgctggactattagtgaaagctacagaagaccttgctagggaatatacatctttaactactgtaccttctgctcagccggacagggaagtgtctaatgctgtgcctgttcaagatcaaactggtaataacttgggtaaacttggttcatccagagttgatgcttcagttgactcaggtagccggtgtgacagtttggaagggaactggggttctgtttcagttctctcaatgcaatccgatgccccagctgttactgatgctgaaactttgccatcaactggcttgctggcatcaacagggaaatcaagcttgaacaactcaaaagctacacctgacagacagcagtctggaaactctgaaatgtttgaaccaccatctttcatgaccttggttgatcctagtcaggttagccccaaagcttctgcttctgaagtcctgaaggggcagaacacacaacatacagattccacttcacaggctgcttggtttcccactctcacgcaggttgtcaacgagtctcaagggaggaagaagaatgaagaaataattgccaaggtgacaaactggagcaccagtaaggagcacactcctctgaagagcctcttaggtgaggctgcccatagtagcaagccaagatctccaaaaatggaaaactctgtgaatcagaagagtggtaaagttctggagaagaatggttctggattgacaactgttaactccattctgggtcctgaatcccctgtggctcaagtggttaaaggagaggctgcaaaagaatggaactctccagcaagatatcctgcagacatcaagagagaaaaaaggaaagtcaagagcagaccatactggatacaattggtatgctgcacgtcagtcggtcctcggtgaaggtagaaaattactaggttttgataatgcttccactcagctttccactttgatggatttttgttattgacatgctatttgcagtatttttctgtttttagtttgtctttaggtgcatattttgatcatgtgtcttctgttcattttggtagcctcctaggagtttggttttagtttgttgaccattttcagttttttttcaaggggggggggggggggtgtttggttggcggccgcttcttagaagcattccaaagctttacgtacggcgtggcatgcgnacgtc

SEQ ID NO: 12912 - DNA, 3273 bp, Glycine max
  Clone ID: PAT_MRT3847_111666C.1
atggataaccaggatcaaagaagaactcacactgcagggcacgagagtcatggagttcatctgtgtcacaaatgtggatggccatttccaaatccacatccgagtgccaagcacaggcgtgctcataagaagatctgtggaaccattgaaggttacaaactgtccgcctccgagggacaaccccatttgaatggctcagatgacgaacatgtttctgatgatgatcacaaaacaccaggtccaaaatccttggagacaggcaacaaagagaagggcaatgaaggaaatggagaaaaaataattagatcagaagatgaggtgttctcggatgcagttgcagacttttcggatagtggatcaattccagaaatcaaggaacggttgcaagatagtttggactcaggtgctgatgtggaaagggttgacataaaagaaacaaaattttcaggctcttctgaggacaaagatttcaatggtgggaagatagatgcaagtcagttaattgacaagtcaactgatgacagccaaattcaaaatcctaatatttttcaaaatgaaagtgttgaattgggaaacatggtggagttgcaaggtcaattgtcgggccctactgtggatccattgtcaagttccattgcagacttgagaaccgaagtatcaactaatgtggatagtgatgttttttttggtttgttaagtgactcacttcctggcaaagctgaagccatgcttgatatattgccagaaaagaaaatccatgctgttgagaatgtgacagattgcattttgatatctgttgcaaaggaaactaatttgaaagaaaaggatgagattaattctgctggagatgtgattgaaattgtggaatcatctgataatgttgtaggtgaaacatgtgaaggagtgtctaaaatagctgttagtgatgcaatttccttggatcatcaagtgggtgatggagctgttcatctgaaggaaaataatggcgctgagattaattcctacagagatgtggttgaaattgtggaatcatctgataaagttgtaggtgaaatgagtgaagaagtgtctaaaatagccgtttgtgatatagtttccttggatcatgaagtgggtgatggagctgttcatctgaaggaaaataatggtgctgagttcctttctttgttgcccccagataacctccctcttgagttaaactcggttgtaatcacaaatgacgcacagggagactctgcatatgtggtacagtttgctacttccagtgatgacaaaattttgccagaaaagggagaaggaaatgttaatgttgatcttcttcctacgtgtgatgatatatctgatgaagcacatcctcaaagtgagtatggagactttaaagatcttgaaggagtggtataccaaaatcctttcctacaatcatccgagtcattgaaatataagggagatgacttaaagaacaatgttactgaggaaaataaatttcatttcaatgcaaaccaattgagtgaaaaaagtgacatcctctctccagatatggatgttctagataatagcatgaagatggagctggtaaacagtgagcctacgcctaaagaagtgcatgctgaacagtgtaccgaagtttctccagcccagctcacagttgaaagtcatcaaagatcagatgagactgatgcatctatgaaagctatgaaaactgagaaaaatgaaattcatatggttcacttttctgaagagcatggacctgatgatgtgtgtaaaaattcccagcagataagtttaccagaagatagtttaatggcctcttctaatgagagtcagagggacgaatcctttaggtctgcaactagtgaaacaactagggcaattaacatagacagcacaagtcatcatgaggaaaaaataactgaaataaatgatgtagctttagatggcaaggatgtagaatctaatttagaaaatgatattgaaattatattgaaagatcttcaacctggtgacatcttgcaatctgaagtcaagcaatcagatgacttatttaagagtgacagcgctggtaagagtgatgctgctggtgaaatgggtaaaaatgaacaatgtgatattcctgatgctcaatgtatggaaaggcctactgtgagtgatgctttattgccaaaatctgctactggtcattttgaaagcccagctatttcagagtctttagacattgtggatgatggacctgtgaacaagtcaaatggtacagagtgcagaaatattaatccactaccaggttcccagaaagacataaaagaagatgaaatcaatattaatatcaaactaaatgaagaatataacaaatctgttgatacttataccgaatcccgtcaagctcaagatgctggactattagtgaaagctacagaagaccttgctagggaatatacatctttaactactgtaccttctgctcagccggacagggaagtgtctaatgctgtgcctgttcaagatcaaactggtaataacttgggtaaacttggttcatccagagttgatgcttcagttgactcaggtagccggtgtgacagtttggaagggaactggggttctgtttcagttctctcaatgcaatccgatgccccagctgttactgatgctgaaactttgccatcaactggcttgctggcatcaacagggaaatcaagcttgaacaactcaaaagctacacctgacagacagcagtctggaaactctgaaatgtttgaaccaccatctttcatgaccttggttgatcctagtcaggttagccccaaagcttctgcttctgaagtccagaaggggcagaacacacaacatacagattccacttcacaggctgcttggtttcccactctcacgcaggttgtcaacgagtctcaagggaggaagaagaatgaagaaataattgccaaggtgacaaactggagcaccagtaaggagcacactcctctgaagagcctcttaggtgaggctgcccatagtagcaagccaagatctccaaaaatggaaaactctgtgaatcagaagagtggtaaagttctggagaagaatggttctggattgacaactgttaactccattctgggtcctgaatcccctgtggctcaagtggttaaaggagaggctgcaaaagaatggaactctccagcaagatatcctgcagacatcaagagagaaaaaaggaaagtcaagagcagaccatactggatacaattggtatgctgcacgtcagtcggtcctcggtga

SEQ ID NO: 12913 - DNA, 321 bp, Glycine max
  Clone ID: PAT_MRT3847_111667C.1
acccacgcgtccacggacgcgtgggtgcaagcacacaaaaaaaaaaacaagaaaaatataaataaaaaaaaaaacaaaaatgtaaacctgaaaaaagaacaaatcaatcaatcaaaatatagatttggtgtcaggggcggcccctccaaaggttcgtggctctcctactcttgcatgcaacgtcgtacgtcttcgagcctggcacgtgtatccaagtccactgggtctccttttgcactgcctgtaccggggatgcctcgcgataactcatcttatcccccttgcgccatacccccctttcaccattcggctttctgccca

SEQ ID NO: 12914 - DNA, 3767 bp, Glycine max
  unsure (1)..(3767): unsure at all n locations
  Clone ID: PAT_MRT3847_111668C.1
ggtttttctggcctctccattcttcttcttcctctgggtttttcacttgttggattttcttactctctttcattgtcaatggataaccaggatcaaagaagaactcacactgcagggcacgagagtcatggagttcatctgtgtcacaaatgtggatggccatttccaaatccacatccgagtgccaagcacaggcgtgctcataagaagatctgtggaaccattgaaggttacaaactgtccgcctccgagggacaaccccatttgaatggctcagatgacgaacatgtttctgatgatgatcacaaaacaccaggtccaaaatccttggagacaggcaacaaagagaagggcaatgaaggaaatggagaaaaaataattagatcagaagatgaggtgttctcggatgcagttgcagacttttcggatagtggatcaattccagaaatcaaggaacggttgcaagatagtttggactcaggtgctgatgtggaaagggttgacataaaagaaacaaaattttcaggctcttctgaggacaaagatttcaatggtgggaagatagtatcgacttgtgtgcggcaaaacattttggcctgggtaattaaaaataaggatgcaagtcagttaattgacaagtcaactgatgacagccaaattcaaaatcctaatatttttcaaaatgaaagtgttgaattgggaaacatggtggagttgcaaggtcaattgtcgggccctactgtggatccattgtcaagttccattgcagacttgagaaccgaagtatcaactaatgtggatagtgatgttttttttggtttgttaagtgactcacttcctggcaaagctgaagccatgcttgatatattgccagaaaagaaaatccatgctgttgagaatgtgacagattgcattttgatatctgttgcaaaggaaactaatttgaaagaaaaggatgagattaattctgctggagatgtgattgaaattgtggaatcatctgataatgttgtaggtgaaacatgtgaaggagtgtctaaaatagctgttagtgatgcaatttccttggatcatcaagtgggtgatggagctgttcatctgaaggaaaataatggcgctgagattaattcctacagagatgtggttgaaattgtggaatcatctgataaagttgtaggtgaaatgagtgaagaagtgtctaaaatagccgtttgtgatatagtttccttggatcatgaagtgggtgatggagctgttcatctgaaggaaaataatggtgctgagttcctttctttgttgcccccagataacctccctcttgagttaaactcggttgtaatcacaaatgacgcacagggagactctgcatatgtggtacagtttgctacttccagtgatgacaaaattttgccagaaaagggagaaggaaatgttaatgttgatcttcttcctacgtgtgatgatatatctgatgaagcacatcctcaaagtgagtatggagactttaaagatcttgaaggagtggtataccaaaatcctttcctacaatcatccgagtcattgaaatataagggagatgacttaaagaacaatgttactgaggaaaataaatttcatttcaatgcaaaccaattgagtgaaaaaagtgacatcctctctccagatatggatgttctagataatagcatgaacctggagctggtaaacagtgagcctacgcctaaagaagtgcatgctgaacagtgtaccgaagtttctccagcccagctcacagttgaaagtcatcaaagatcagatgagactgatgcatctatgaaagctatgaaaactgagaaaaatgaaattcatatggttcacttttctgaagagcatggacctgatgatgtgtgtaaaaattcccagcagataagtttaccagaagatagtttaatggcctcttctaatgagagtcagagggacgaatcctttaggtctgcaactagtgaaacaactagggcaattaacatagacagcacaagtcatcatgaggaaaaaataactgaaataaatgatgtagctttagatggcaaggatgtagaatctaatttagaaaatgatattgaaattatattgaaagatcttcaacctggtgacatcttgcaatctgaagtcaagcaatcagatgacttatttaagagtgacagcgctggtaagagtgatgctgctggtgaaatgggtaaaaatgaacaatgtgatattcctgatgctcaatgtatggaaaggcctactgtgagtgatgctttattgccaaaatctgctactggtcattttgaaagcccagctatttcagagtctttagacattgtggatgatggacctgtgaacaagtcaaatggtacagagtgcagaaatattaatccactaccaggttcccagaaagacataaaagaagatgaaatcaatattaatatcaaactaaatgaagaatataacaaatctgttgatacttataccgaatcccgtcaagctcaagatgctggactattagtgaaagctacagaagaccttgctagggaatatacatctttaactactgtaccttctgctcagccggacagggaagtgtccggacttactgctgtgcctgttcaagatcaaactggtaataacttgggtaaacttggttcatccagagttgatgcttcagttgactcaggtagccggtgtgacagtttggaagggaactggggttctgtttcagttctctcaatgcaatccgatgccccagctgttactgatgctgaaactttgccatcaactggcttgctggcatcaacagaagcagggaaatcaagcttgaacaactcaaaagctacacctgacagacagcagtctggaaactctgaaatgtttgaaccaccatctttcatgaccttggttgatcctagtcaggttagccccaaagcttctgcttctgaagtccagaaggggcagaacacacaacatacagattccacttcacaggctgcttggtttcccactctcacgcaggttgtcaacgagtctcaagggaggaagaagaatgaagaaataattgccaaggtgacaaactggagcaccagtaaggagcacactcctctgaagagcctcttaggtgaggctgcccatagtagcaagccaagatctccaaaaatggaaaactctgtgaatcagaagagtggtaaagttctggagaagaatggttctggattgacaactgttaactccattctgggtcctgaatcccctgtggctcaagtggttaaaggagaggctgcaaaagaatggaactctccagcaagatatcctgcagacatcaagagagaaaaaaggaaagtcaagagcagaccatactggatacaattggtatgctgcacgtcagtcggtcctcggtgaaggtagaaaatcactaggttctgataatgcttccactctgatggattctggtcatagacatgctatttgcagtatttttctgtttttagtttgtctttgggtgcatattttgatcatgtgtcttctgttcattttggaagcctccttagaagtttggttgaatatgttgaccatcttcagttattatttatccctgcggtcaaacatttttcccatacatagtaacgtatcattattttggcctggacccatattttagtccggtcttagggctcggggctttttggccccgtcggtcgggaagtctcgtctttgcctgcggtttctgccttttacattgngattcattcttg

SEQ ID NO: 12915 - DNA, 676 bp, Glycine max
  Clone ID: PAT_MRT3847_111669C.1
agtacatgtttagttgtttgctgaagccaaaccaaataattctgcatttgatcactgtgtctttattttgattcaaaggctacaagacttcataactacctactaaatgcttatcttgttcctcatttcctggatcataacccaacctcttcattttgcctcatcaattcctcttcttagagatggcttgtgaaaccaagacatggttggttatggttcttcttttcttggctgctaactacttgcaagattgtgttcatggggtatcccaagttccttgccttttcatctttggggactctttatctgacagtggaaacaacaatgaacttccaacctctgcaaaatctaattacagaccatatgggatcgactttccattaggaccaacaggaagatttaccaatggcagaacagaaattgacataattagtaacatttctttacccctattaagacctctaatctatgtgctgcaatcaaagatttcaaattcatgtctggttatgaattttaggtgtcaaatttatgagttggtgtggactaccttctgttaaccgaataaatttttttgatagtgctgaaagaatgaaaacaatattggtatatttatagagctaagtgtcttttctcttgcccgaaattgttttgttcaagctcatactaaagttttaca

SEQ ID NO: 12916 - DNA, 835 bp, Glycine max
  unsure (1)..(835): unsure at all n locations
  Clone ID: PAT_MRT3847_11166C.1
ngacattctcaaaccgtggaagattgatgagcataatggtcttcattaccggcgtcttaaccgtcgtcgtcctcctcctgctgtctccctccacggcggagatcaaaaccattaccataacctccgacacccgacccctaatcctcttcgagaaattcgggttcacctacccaggccgtgtggcgatcgcggcgtcgtcggtggccgtggtggcgccgtcatcgcaaccgaacctctcgcggctagggttcttcctaataagcgaaaaatcccttccccaatttataatagaaatggaacaaaaccctaccttctgcatcctcaattccccttacacctctcacctcttcaccttcctcgatcttcctccccctcccgctactttcaacaggtcttactccgtcaccatctccgacgaatacagcctcttcttcgcaaactgcgtccccgagagctccgtctccatggaaattcacacggagttcttcaacctcaaccgcgacgcttcccgcaactacctctcctccggccacaccaacctcccttccctcttgttccttttctccttcgcttacttctccttcttcctcgccttctctctctatccccgccacgtcagcaagcgctcccttgagaggattcacctcttgatgccccagctcctcctcgcgacgggtctcagccatctcttcgccgcactggacatgcaccacgtaaagctcaccggcactcacggttgggatgcgttcttcttcaactttgacctcattcgcgtcgttttgctcttcagcgtggtcattttggtggngactcgttggaccttcctccaccgctc

SEQ ID NO: 12917 - DNA, 273 bp, Glycine max
  Clone ID: PAT_MRT3847_111670C.1
cacgaaatgcttatcatctcttttccatttccaagtacttttgcctttaatgaggggtaacaaccagatatgactttttcaatgggaatcaatccccccttaaatggaggaaaaagaaaatggcgaaaaggaaccaaacccaaattttagcccttcagtcataaaaacaacgtagtacaccgtaacaaacaacatttggccccatttatgccggcttttggatacatttcggatggtgaaaaatcccattataaatcaattttcggagaaaaa

SEQ ID NO: 12918 - DNA, 629 bp, Glycine max
  unsure (1)..(629): unsure at all n locations
  Clone ID: PAT_MRT3847_111671C.1
caacaacaagtacaacaccttgccccacaggtttttgtttcctaattacaaaaaccatctattaggttgctagaccactggttatagtgcatagaaaaatctttctccatagctctaatccatgtccagtgcaaaaacacagcatcctccagcaactttattccattgaactgtgcattctggaagatgacctgattcctatgcttccatagagaccaagttagggctatccaccaagtcttccatctgttatacctcttcgatcctggtgtcccatgtacatgctgcaaaaagtgttgtcttttgttaattggagacacccccaaggatcgtacccaagtctgagattcccaccatagaggtcgtattttattacattcaagaaatatgtgagatgcgtcttcctccctaattctgcaaaatggacagaggctatcttccaacaccacttgtcttctatgcaggttcgatttagtcggtagtcgatctctaattagcctccaagcaaagattgatgccttagcaggaatctttagcttccataggtcttgaagagctccatcctgatcttcaccctctaaatgaccctgcangcagttatatgcactccttgtcgaatagaggtcatt

SEQ ID NO: 12919 - DNA, 292 bp, Glycine max
  unsure (1)..(292): unsure at all n locations
  Clone ID: PAT_MRT3847_111672C.1
nngnaaganncgnatgcacgcgtacgtaagctcggaattngntntggnatggtanntgcaggngtactagntttaantatagtgagtngnantngaggttggcgtnntaatgataatagctgnttnatgtgtgaaattgttatccgttcacanttcgacagatangtangatnnnngcgtngcacncatgangaagttattgtnatncaaanaaggnanantnncnatgtgngtaangnaagcngcatangantccaatngttnanntttcgnannnatgagagnatntatc

SEQ ID NO: 12920 - DNA, 419 bp, Glycine max
  unsure (1)..(419): unsure at all n locations
  Clone ID: PAT_MRT3847_111673C.1
tggtgaacaataaattcagtcaacaaaatattaacctcaaaggcattgctatagggaacgcttggattgatgatgttacaggtacaaaggggatagttgattacttatggactcatgctttgaactcggatcaaacacatgagttgattgagaagtactgcgattacagttctgagaacatttcgcaaatatgttccaatgcaacaagaagggcattaactgaaaaaggaaacatagacttttataacatctatgctccactgtgtcatgactcttctctcaaaaatgaatcatcatctggttctgtatatgatnttgacccgtgttctgattactacaggggaagcctatctaaataggccagaggtcccactagctcttcatgccaaacccaacaactggtcccattgcagtgatta

SEQ ID NO: 12921 - DNA, 1574 bp, Glycine max
  Clone ID: PAT_MRT3847_111674C.1
attaaaattataatgtattaacattataaatagatcgactaattaaacgtgtgcacatgatggtttcctacataggatagacaaagatgtctaggacaattccttttgaccatatttttcagagacacaaatctaaaacataacacataaactttaaaaaggcacggccaaaatgaaaaggcacattcctttcaatctctttattttaattattgagcgcatgacttcacgcaggtatgtgtagttacccttcaacgacgtcgttccggggtccagtgtggttcagaggggctaaaatgaacggactcaaccctagagtcgagcaactccgttatgggcgtgaaggtcacgcaccgtggaaccttgtactggctaatagacgcgccacgtgagatagcgtagtccataagctcctcaaaggttccattcttcaccacacgaatctctaacggtccaatagaatggtccgcaaccctaccttgtcgataacggcgttcagcgattcttccattgttaaacaacactgctccaacgcttcagtagttggagcgttggaagagtccttcatcaagagttcccagtaaatcacgtagtgccccgggatcgacttcgtgtccgcaaagctcgtgtactccaccacgctcgtcttgaactccttcaacagcacggaggcgttctcgacggcgttttgtaactccgcttcgtccgttttgtcggagtcgatgctcaacaatacgttttttctcctcacgaagctgaactgcggggcggtgttgtggaaccccgtgactcggagaatgtcgcccacgcggtaacggcacagaccggagtacgtggtgacgacgagctcgtaggattttccgagttcaacatctgccaggtcgagcgagtcgcgtgactgggatcggagcctgaagacctagcagataaatcttcttcgtggggaaggaactcgaagtaacccatgtttggcatgatggtgtaggacacgtcagagggggtgcaaattgggtttaggttaagcccaaagtaacactcggatgaggcgtacatggtgcaagctttaggtaggcctccgctgtaataatcgagggtcggaatatactgcgccatggcaccggtcacaatcacgtccagatactttgtgtttggccagattcttgtgattatgcggtcccagttttctcccgagcattctttcacaatgaaatcagcgagttctggatttggtgtgaggatttgggtcatgcgttctttgatggcaaggtcggagattttggggtttagggttccggtggagatgtcgtgggctagttcagcccaattgagctggaggaagcggatggctcggagaaggcccgaggcgaaaacggctccgactctgaggacttggtggcgcatgatgaggccgcacagcatttgggtgtacatgctttggaaggaatcggggcagaggattgcttcgtctgggcttgtgtacacgttgaatggatcgtagggtctgttcttgaattggtcgctcttgtagaggctagttagcactggacgtgccactaacccactcggagtctttg

SEQ ID NO: 12922 - DNA, 593 bp, Glycine max
  Clone ID: PAT_MRT3847_111675C.1
ggctcgaggtgaatattaaatgttctacatcattgtcttctgctccggctatatgcgccattgacacgctcaacctctgagctagcgcggatctcttcgtagggtagactgacaccggatcgtgagaccctgctgtgaacaactgcatgctcatgctctacggcctgaaccttctcgaagctgccgggtccctgtggaccatgcttaacttgaaactcctctacctcgactttactgtcccgatgacccttcatctgattgtggatggtaacgggtctgcttcttctgacaccccctgctacgtctaagccaatgagaggattgctgaaactccggtcatggtctacatcagaggatgtatagtcgaattatgtgtcttgtggcctgactgcatctgctggtgtgcgctgacctattatgtcgaagcacagacgtgctgtcatggagattcgggatgagtgaggaaatcctaggcgtgtagcgggaacgacgcttctctgagacatgcgcaactagtaatggatatgaactgcgcgatcacatgatggattgcggagattcaagaagggaaggggacgccgagagaaaccgag

SEQ ID NO: 12923 - DNA, 162 bp, Glycine max
  Clone ID: PAT_MRT3847_111676C.1
gcgatctagacccacgcattcattttctcgcggacccacgccggaataccagacgggggcctgcaagcataccaaattgccctaccaagagccaaacaagagcaaggcgtaacaaagggcctaaaagcagactgggggaaagagccatccaatcacaaccgg

SEQ ID NO: 12924 - DNA, 201 bp, Glycine max
  Clone ID: PAT_MRT3847_111677C.1
ctctcttctccaccacttcttaatctcttcaatcaacaatcatgtcggacgatgagcaccatttcgagtccaaggccgacgccggagcctccaaaacctacactcaacatgctggtaccatccgctctatcgggtacatcgtcatcaaaggtggcccctgcagagttatggtcgtttcgactcccaaaactggaacgcacg

SEQ ID NO: 12925 - DNA, 445 bp, Glycine max
  Clone ID: PAT_MRT3847_111678C.1
tccaggaaggtttcccgtcatcactgtatgacgtcctccttctttgggggggggggggggcagatcggtccaaaggaatacctgagtgccatgtaaggagtagcagtcattagcgagtatagaggtgatacaggagaaaaccacacattgaaacacatagggtagagaggtagaaagacgcaaaggaaagccaccgacgataacttacattcgtaaagcagcagcagtaaatagttaacgaagtggatccgttacaagtgccagctatttgggtatgccgcccccaattaaacctgcccttggtgtgatgagcgcatagcacatgtgtaagccccgagtttggaactggcgcaccaataaggagtaacagtaggcaaacgtacagtaggggtgcaaataatccgagtgcgacctaaacttgccagtgcagttagaggtaagagtg

SEQ ID NO: 12926 - DNA, 593 bp, Glycine max
  Clone ID: PAT_MRT3847_111679C.1
gcacgagcatgattcccttgggatatggtattctgataaccaaccacttgatccttcaatgtatgaagaattggaggggtgcttgcttcttgatcctgattgttctggtaatagtggtgaaggtggagaatgtaatcatcatctgcttctgtttgatataatcaatgaagggttgttggagatttttggcagatcatacaactattatccaagacccttgtcttatctctcccatgttcatccacttccagcaggagaaaatgttctctataaagtgtggacactcattagctggtatctgatgaactcaacaacatatgagctttatccgtcattggattattatgtgagcaaagatcttgcaaaatatgatgggtggatgaatctccaatttgattctgaatgtgtggggcttgagctagatgacttgatttttgatgatctattggaggaaataatctccacctaaccggagttttgcaagcttggtcttttctccataccatatatgattaaatttttatgtgagttaatgtagctttagtattgttcttcctgatgcaattcattttctcagagaatacttcaaggca

SEQ ID NO: 12927 - DNA, 239 bp, Glycine max
  Clone ID: PAT_MRT3847_11167C.1
atgggtgaaaaaaaaataaccccgtccaatgtttagtgattgttaaaaccttttccccgctataagggccgggattcggactgggaggggcccgacctcgccttcattttcctttggaaaaaaaaacgcccgggaaaaaaacaggggattaggggtttcgggggagaaaaatctggttggcggggaaagttttaaatcttttagcggggggggggtttttgaaaaccccctttgggggg

SEQ ID NO: 12928 - DNA, 377 bp, Glycine max
  unsure (1)..(377): unsure at all n locations
  Clone ID: PAT_MRT3847_111680C.1
gatgatctggtgataatgaatatcttaatttgtatgatagaacgaaacagtttatatatatggcctacacctcaatcccaactggattttcccactacctaaatttcttttaatgctatatctaatactttcctagttgagaaggcccaagctttattatcttaatgatttgaagtcgaaggaagacggtgaggtcggcttcatggatcacatgatgtcattcgacccggttagagataaaatcttcagagatattatttatcatgagattcctctntactgtctccaatgtccttcttttttgggtagaatatatcaccgtgtttcgattccttaaatctcttctatttatttgaaggcttacttatattttggtc

SEQ ID NO: 12929 - DNA, 694 bp, Glycine max
  unsure (1)..(694): unsure at all n locations
  Clone ID: PAT_MRT3847_111681C.1
tctcactaacattattcattccacactatggcctctttttggaaccaactctcattctttttgctcttggtgcttgttatctccccccaaattcaagccagagaaggcaagctcttcagcttgttctcccatttcagaaccatctataatgtcaaagaccctcttgacaaaacaaatgctgaatctccagcactaccaccaggaccaacaccaaaaccagcctcagcaccagaactagaaccagaatcagcaccaacaccagcaccttcagctgaacaagaaattgggtcaacaataccatctgggccagcacctgagcctgaattttttgacagtggagagggttatggcctctatggtagaggctcttatagccaataccctcccaccaaggagactcctaccaccaccacgacctttcaaaatgagcttctcaatgaagacttcaatgatgagagctacaaaactggctaccccaaaaccaatctctacaacaacaacaatgaggagtacaaaaacaatgacaacactaaggaagagtacaggaacagttacattggtggctactccgacgacttcaataggtactccaaccacancaacaacaacaacaacggcaaggaaaattacaacaacaactancatggcaagggaaaattactacanacacaacgacaactatatcagcaatggc

SEQ ID NO: 12930 - DNA, 3102 bp, Glycine max
  Clone ID: PAT_MRT3847_111682C.1
ccacgcgtccgtggagagtgactaaagccaccgctactatcttcagtgtttttctcatcttttgctcctccttttcatcgttggaagcaacaccagttggttatggctacacaatctcaactgtttacaattttcccataaccaactctttaactgcaaaccttgatctcatcaaaccctcctctgttttcggacccgacattccacacctctccctcactgccagttttgagaacaaggataggttgagagtgagaatcaccgactccaatcaccaaagatgggaaattccacaagaagtcattcccagaggctcctctttccagtattaccctcttggcttcctcaatagtaaacaaggttcccctcagcaaaaacactctctcagtctcacacatccagactcagaccttgttttcactctccacaacaccactccatttggcttcacagtctcgcgcaaatcttccaacgatgtcctcttcaacacggcacctaacccttccaaccccgaaacttttcttatttttaaggatcaatacctgcagctctcttcctctcttccatcacaaagagcctctctattcggcctcggggaacacaccaagagctccttcaagctgcgaccgaaccagacccttacactgtggaatgcagacattggaagtgacaacttggacgtgaacctttatggctctcaccctttttacttggacgtgagatcaccctccgctgatggaacagtcaaggctggcaccacacacggggtgttgctactcaacagcaatggaatggatattgtgtacggcggtgatcgcattacttataaggtcattggtggagtttttgatctgtactttttctctggatcctctccagaactggtgttggagcagtacaccgaactcattggcaggcctgctcccatgccttattggtcctttggttttcatcagtgtcgatggggctacaagaatgtaagtgatcttgagggtgtggttgacaactatgcaaaagcaggtataccccttgaagttatgtggacagatattgattacatggatgcatacaaggatttcacattagatcccatcaactttccgctggataagatgataagttttgttgatgctcttcacaaaaatggtcagaaatatgtgcttatcttggatccaggtatcagtgtaaataagacggatgcaacctatgttagaggtttgaaggctgatgtctacataaagagaaatgaagtcaattatcttggtgaagtttggcctggaccagtttattacccggattttctaaaccctcgcagccaagcattttggggtggggaaatcaaattatttagggaccttctttcttttgatggtctttggcttgacatgaacgagttatctaatttcattacttctcctcccaatccatcttctaatcttgataacccaccctacaaaattaacaatggtgaagatcaacattccattaatgacagaacagttccagcaacatctttacactttggtaatatcactgagtataatgtccacaatttatatggactactagaatccaaagtaactaacaaagccttaaaggatataactggcaaaaggccattcatcctaagtagatcaacttttgtgagttctggtaagtatgctgcccactggacaggagacaatgctgctacatggaatgatttggcatactcaatccctgcgatattaaattctggaatctttggaattccaatggttggagcagatatatgtggtttcggaggaaatacaactgaagaactttgccggcgctggatccagttgggggctttttaccccttcgcaagagatcattcagacaagaactccaataggcaagagctttatctttgggactccgttgcagattcagctaagaaagtgcttggcctccgttatcgtcttctcccttatttgtacacactgatgtatgaagcacacacaaaagggacaccaattgcacgaccccttttcttttctttccctgaggatgtcacaacttacgaaataagctcacaatttctattaggtaaaggggttctggtgtcacctgtgctacaatctggggcaacctctgttgttgcatactttcctaaaggaagctggtttgacctctttaatgtctcaaattcagtgaatgcagaatcaggcaagtatgttactcttgatgctccatctgatcacataaatgtgcatgttggggaaggtaatattttagctttgcaaggtgaagcaataacaactgttgctgcccggaaaactgcatttcaacttgtggtagttatcagtaacagcggaagtagttttggacaagtgtatttggatgatggggaggcacttgacatagcaggggtgaatgatcagtggacattggcaagcttttatggcgcattacacaacagcagtgttatcgtaacatctaaggtcactaatggaagatttgctctggaccaaaggtggatcatagacaatataagattcttggggatacctaagaataagagatttaatggaatggatttggcaggaaatgagttgaaaattgtgaatggcatggattcaatgaggacggcagttgtgaagtcagaatttgatagctcttctcaatttgttaatgtacaagtttcaaaattgtcacttcctattggagaggaattcaagctggagatagaaatcaagtagaagggtatttaagatagcaaattcccacaaagaatttgtgctctctttatagttgcatcgttttggctcttcgttttatcactgctaaggttactatataaggatgtcattttcccaaaccacgacacaaacattcataaaatgtcatattttgtgtcaggaataaattttacagaatattgtcaacatggctatgaagttcaagcctaaacgtatgtctgcctatcaataacggggtgagtattacctagtactggtggtcgctcttaatttatgcaatcaatgtagcaattacctttagttgaggttccatgagtcctactcttataactcttcacactctatttagttggattcatgctagcagtgcagtatccac

SEQ ID NO: 12931 - DNA, 348 bp, Glycine max
  Clone ID: PAT_MRT3847_111683C.1
atatagcgcagcgtggatgggtaccgtggaaagctcgggatgatcatgaagagaagagtctagactcagcacatcacatcgctgcacgtgctctggggctggataagatagcgtaggacgcattcttcgacgactaatgcggactggccgtcgatctctactatcaagccatacgagtggctgcgcacgacgccaatgtattagcggacagaggccaagcccatatctgactcagcgctatcactgatgccgattacgatgccagcaaacgcataccattactcccttccttgcccaacggctatcttcatactgccaccgcttgtctcacactccaagattatcaca

SEQ ID NO: 12932 - DNA, 485 bp, Glycine max
  Clone ID: PAT_MRT3847_111684C.1
cgattttctctttccctcttcgaagcaccgattcagggaacgaacgaacacacgcgcgagcacatacactctccctcagtgttagtgtgatggcgacggaagagaaagagaagggatacgaagggggagcaggagggaagtttcggaaacgccccttccgcagcaggatccaaacgacgccgtacgatcggcccccaacgtccctcagaaaccctagcaggaagaacaacaatggttggttgtcgaagctggtggatcccgctcagaggctcatcacttacagcgctcactctctcttctcctcgcttttccgcaagcgccttcctccaccaccttcttcagagacggaacaggaagcgaggaacaatcatctggaagatgccgtctttgttacaaacaacaattcctctggcacacagcaaggacctgttggcggaagtgatgctcaaataattgttctgcaggggtggattaactgacttgaa

SEQ ID NO: 12933 - DNA, 436 bp, Glycine max
  Clone ID: PAT_MRT3847_111685C.1
aaaaaaaaaaaaaaaataaaaaaaaatttttttatatatatataaaaaaaaaaaaatcggaggggtattttcaaaaatgggttctcccttcctaatatctatatttctctatactcccttccctcccaattttatctcctattttttaaccaaaatacccattacttctcccaatttataacaacattcaactttaacaaccctcactattcccacatttattactttttaccatttttccttttttctacttatcctgaacacaaatagactcctatcgatcaccctcttcaacccattttactctcttattggcttaatttgatactaccctttttattgactatttataattttacacacttttttttctctataccccttttttttatctttttaattttttattatttccctatatattcctccttatttt

SEQ ID NO: 12934 - DNA, 609 bp, Glycine max
  unsure (1)..(609): unsure at all n locations
  Clone ID: PAT_MRT3847_111686C.1
tccctcaacttcgaattctgcttctggatggtaaaagcctatgccagctccaagttcattcaaaatctctgggtgtacttaacctctatggttgttcatcacttagggaattcttagtgacatcagaggaattgacagaactgaacttggcttttactgctatatgtgcattgccatcatcaatttggcaaaaaagaaaactcagatctctttacctaagaggttgtcacaatctcaacaagttatcagatgaacccagattttgtggttcttacaagcactccatcacaacattggcctctaatgttaagagattgcctgtgaacattgaaaatctttcgatgatgacaatgatttggttagatgattgcaggaaactcgtgtctttgccggagcttccgctgttccttgaaaagttaagtgcctgcaactgcacttctttggacacaaagatcactcatcagcaagtgttacaacacatgttacaaagtcgcataccctacttacgcaaacactatcttaagtgttatgatgaagaatatttcttcccnggggatcatgtgattgatgagtgtangtttcacacgacacagaattcaataaccattc

SEQ ID NO: 12935 - DNA, 338 bp, Glycine max
  Clone ID: PAT_MRT3847_111687C.1
gtggcccataattcccctgctttataaccatcccccccgggaaaactgaacaaaagtggttcccttaaaaacccccccgggaaataaaaattggggccccttaaaaaaagaataaactttcacaaggggacacgggggggatttccctccacaaataccatgaagcttctttttcttacaagtttaacacctcgatggagggtttatatggatttatgtcccctcaagaaatttaaaaccggggggggaaaaaaagtatgcaccatgaattccttgaaaaaacccgcattttttggcccagacaaaaaatgtccttaaagccccattgggggatactt

SEQ ID NO: 12936 - DNA, 213 bp, Glycine max
  unsure (1)..(213): unsure at all n locations
  Clone ID: PAT_MRT3847_111688C.1
acgcgaccgcttctcgtccgcccacgcgttcgcccacgcgggggcgcttttgaaaccaatggctgtcttatcaaactacatnnctttccttttcctcactacgcttttgtttgctcttcaaaaaactgctagagacaggcagttcttcagccaagtcacccaaattgtgaaagacactgccaaatatttgaagatatccacaacaaccctgca

SEQ ID NO: 12937 - DNA, 155 bp, Glycine max
  Clone ID: PAT_MRT3847_111689C.1
cccgtgtcgacccagacgtgcgcccactcgtcctaccacgcgttcgattcattctagttctttattcctactagccacgttgactcggatcctggattcgttctcaattatctggtagtaaggaatagcttaaaggcacattacaatgaatgcat

SEQ ID NO: 12938 - DNA, 432 bp, Glycine max
  Clone ID: PAT_MRT3847_11168C.1
gacctttgttcactcttctactcttgcttctagggatttagcgcatcttcttctacatttaaggaagatgggttaggaaaaggcccacatcagcattgaggtcattggccatgtctactctgggaaatacactaccactgatcacctaatttacaagcttggatgcattgacaagcgtgttactgagaggtttgagaaggaagctgctgagatgaacactaggtcttatcacgtatgcctgggtgctggacaaacttaaggctgaacgtgaactacgaatccccattgatattgcttcgagtaagtctgaaacatcaacgtattattgcacagatcttgatacacctggacatatggatatgattacgaatatgattactgggacattccaagctgactgtgctgctcttatcatcgattctaccactggtg

SEQ ID NO: 12939 - DNA, 286 bp, Glycine max
  Clone ID: PAT_MRT3847_111690C.1
ggtacacacacttgtacagactttcttacggaacatattggcgctaccatgggcgggaactttcaagtcatggtcaagggaatgtacgataaatgcacaaaataccctgactactcacttgactcaaactttgagggaaatgtatcagattcttcatcacactatgcttgcaccattgacatcacattatacatcacatcatctaatggagcatgtcacagattattatccacatggtgaactgcatatgcaacttcataaacatcttactaaaccagcatcgagg

SEQ ID NO: 12940 - DNA, 186 bp, Glycine max
  Clone ID: PAT_MRT3847_111691C.1
ttttgtaaacacctcactgtaatttggctggtgatatcccatgatatacttactaggacatgacgaatggactgagcaaatgaggtcgacgaaacatccattattagcaaacctggagcatactggtttgatctcgcacactatctactgtgtgcgactaaatgagatttaaagactatatcttat

SEQ ID NO: 12941 - DNA, 1185 bp, Glycine max
  Clone ID: PAT_MRT3847_111692C.1
cagcaggtaatttatgtgaattgttgagcaagatttacgtcaggatgtggccgtcctgtaagacattgggaatattggtcagaggcttagtgctaccggcatgttctccaagtccgaagtgaggcagcataaatcttggccatgattatggctgacttatttgcgaaggtgtaggaaataaggcgctttgtgttgttccatgcccaaggccaaaagtccagcgtgtgctttctactgtcacaagatttctttttatgagtgagcaaagcattgtgaaaggcataaggggactcctcatcaaatgttctaacaacttccggatgcagtctgctctctcgatcccccaagcctaattggccacggttgttataaccccaagagtagcacactaaatcttcaccattgtatgcctctccagcactaacccgagctacaacatgctcatttccacatgcaaccttgacaacagtgtggccctgaaaatcccaaactggagttggagtgaaactgcttacaagtgctaacccaccttctttgtttgtcgtgggcagtttccccacatccacagggtcccatggttatcaatagctagagacatcattcctccagctttgacagcacatatctgagtaagttgaacagacacacccgttgaagaagaatcagggggatgcaattcaagaaacttgttctgtaagcagggcaccagagaattttctccaattgcatattcattgtcatgtgattcctctccattaataccaagttgaccatccatacagtagtcaaggatgcagatgctagtacataatataaattcaacaaacttctagaagtcaaaacaagtaataccagtaagactgtaactgagatccaccgagggactccaagcatattaaggatacagaaattgtaaccccaacaccaaacagctccgtcttctttcaacacacagattgaagaattagatgggggaatgaccttcaaatccaaatcagatgaatcagcctaagtttacattagataaccaatactcatggtgtttcacatctgtttgacaaatctaaatgcatgcattcactaatcactcttatgaaagtttagtaacaaggtgaacaataattaggacatttttttattgtttttatattaccagcaactaattgcatgtttggatccgcatca

SEQ ID NO: 12942 - DNA, 266 bp, Glycine max
  Clone ID: PAT_MRT3847_111693C.1
cactaccaaaggaaacacggaaaatgccaacagcctagggtagaaagcaaatatgaaggaataacgccaagcaatacaggtatctttcattgctaaaaggggaaaatgaacgggcccgagagaaaacaagaacctatcttagaaaaccgtctaaaggatgaaaacaaggaaaagcctgggctagagccaccggtgcctgaagaagaggaggtaaaaatggacctcagcctccccactatgagggggacatgtatgcttttcaggac

SEQ ID NO: 12943 - DNA, 210 bp, Glycine max
  Clone ID: PAT_MRT3847_111694C.1
taggtcatgatttgatttttttattttgcttttctttgtggaaaacacagattgactattttttttaagatgtgataactcatgcaacctcatcctgtttgatttagtcacttgacaattttggagtgatggcaatggagccgtttgacatttaatcaatcaaccgaaatatcccttctgtcgtcttctcgcagccgtcggacgcgtggg

SEQ ID NO: 12944 - DNA, 260 bp, Glycine max
  Clone ID: PAT_MRT3847_111695C.1
ggctcgaggtgggactttgacctctttaggtgtacgacgggacaatgcataactgcggggacgggactgtttggacagaaactcctatccaccaccagggcaccaagaggacctaccacaccgagggatcaacgggaacgcccacatgctggagcaggcaagaatggcagcagaatggcacagccaaaagaccgggaaccaatagacgaagaggacggctgcccgagaaaaaacaaacagccagggctaaccgaaagggc

SEQ ID NO: 12945 - DNA, 547 bp, Glycine max
  Clone ID: PAT_MRT3847_111696C.1
tcttttttttttttttttttttttcttttttttaaaaattaagcatgcaggggttgacgtttacttttgacatgaataattgacaaaatagttatcctcaagctaaactttttgatcttctgttttgggaagctaaaacttaactgcttttggttcctataacagcatattactttttttttttttttaaaagaacttgtatcccgggaagattagaggacacatttggatcaaagttattcattgccattgggggctctgctattgacattctacatcttgatttgttggggtatccttaaaaacatgttgcccttcctctttgctttttccccatagaagaatatacacgccagcaataaccaaggcagatcctgccaaacttcccaggtaaatttcctcctttagtacagagaaatcaagcgtggccacaaatatctgcataaggggggtaaaagctgctgtaaaaactggacccctttgtttacacaccatgacattgccacatagcataagcccgatcctatcaatccagcatatgcaacac

SEQ ID NO: 12946 - DNA, 391 bp, Glycine max
  Clone ID: PAT_MRT3847_111697C.1
ggcaaagtcttacccaaccgtgagcgctgattaccacaaggcctgcgtgaaggcgatgatcaagctcataggctctatatctgacaacagcatgcgctccctctctatgcttcctttggcttggcactccgctggaacttacgacttgagctcgaagaccggtggtcccttcggaaccataaatcacccctccgaactcgctcacggcgctaacaacggtcttgacatcgctgttaggcttttggagccactcaaagcggagtttcctattatgagctacgctgacttctaccatttggatggcgttgttgccgttgaggtcaccggtagacctgaatgctcccttcattctgcaagagaggacatacctgagccatcaccagaggttcgc

SEQ ID NO: 12947 - DNA, 567 bp, Glycine max
  Clone ID: PAT_MRT3847_111698C.1
ataaaaaacccttatggaaattaaaaaaaaaaacaacagtaacatcggaagataaaaaaacatagccttttaatcctcccatccccatgaaccgggaggggtctcggttcattgaaccaccccatttaaaggaaaaaaccttaattattttttgcaaaaaaaataacaaattttcttcctcgatcataaacaaggggaggaaaattcaagggccctgatcatggggcttggtggcaacattgcactggtttctgacctcaccctttgggccagggaaagggttgttctttgaaagcaagggaatggctctaaaaaactccttgaaaaaatagtcttggctcttggccattttcttcacaaaaggcttggccctcttggcattggctaggtggggatccactatcaaaaaacccttgctggctaaaatgtttctgaagaaggtggtggctaaaatcatgggagggccacgggcgtttctcacgtactgcaccgccttagggtctggaatggcatcagggcactttttcaaaatgggagggacgtggccagggttcaaagctggatcaa

SEQ ID NO: 12948 - DNA, 473 bp, Glycine max
  Clone ID: PAT_MRT3847_111699C.1
cataacgctatagtagtacgttgcctctgcaagatagcatgagaaacatgagtctagaagctatatgcgctgcagagatggtccacctccaaggagcagagccagaagacatgaaaagctcaccctcaccctaggatgacatcagagcgcatagctaggtcatgatagaagcttgagcattccatccccgaaaaactgcaatacaatgggtctgtacatactccattgctcccaaacctactaatgcatataaacatacgaaaccagataatgggatgctcgaaacatatcatgatagtaatgatgataccataggatgccaacggggaatctagattgattaaaggatactgactccaaaagaggctcatgagatgctcaatgcaactctgaagaagcccaaagaggtatctggagatgatgatatatccaaagagagatgatatcaggtgacagacgaaggaatcttgagc

SEQ ID NO: 12949 - DNA, 348 bp, Glycine max
  Clone ID: PAT_MRT3847_11169C.1
aaaaaaaaaaggtttgggtttttcccctggtttttaaaaaaggaccccccctgaaagggttttggggttttggggtggaaccaaatgggcccgttttaagggaaattgggcaaatttaacccgggttaaaattcccttaatttggccgggggggtttggtttttaaaaaaatttaacctttttccccccccccccccctaatttttacctttttttccctaaggggggggtttttttaccccttaccccaacgggccaggggcaggggaaatatttccctgctccccagggggggggccccccggccggaaacctaaattcgtttttggggaaaatagagggttaaag

SEQ ID NO: 12950 - DNA, 423 bp, Glycine max
  Clone ID: PAT_MRT3847_1116C.1
cccttcccttctcaaacacactcttgcctttgcttatgatcatacttttatttttctggtcactgactatgtattcctatccattcgttcgtggtgcgacaatcccctataaccccactccgatgattaagtggtgcctgatactgaccacactccaccttctaccctttctgatagcggagactccgaatgatagcaaatgcagaaagtatctattatcaggtggccggaagcatgataatgcccataggggtgtaaaagacaatattctccatactgaagctgaggctggctctgttgttgaagacgatgcacatagcttaataaagtagctggaatgatgcacttagggcccagaatgaatcaaaggacgatattatctaatcggtgtggtgctgggaagataccatagtggttggcaac

SEQ ID NO: 12951 - DNA, 432 bp, Glycine max
  Clone ID: PAT_MRT3847_111700C.1
aggacttacggcaccggcgcctaataaaaaaaatgtggacactttggctaaccaggttttttgttaccactgcggagtgccacttatataaaataaagctttcacttgcattcaaattttcgttcgttcttcaacataaattatgagattgctgctcgcttgaaaaacagctctttttggccctcggatgggatacttctgggggcacatgagggccgactcctcatacttggtccggctacaattgaacatgggtggaatgtttggctggagtggacaatcagggttgggatccgagagcagtgagcaaatatgcctaaggaccctggagagggctagggacgggctccagtgcttggtgagaatggtaagaaatctactggcactgctgcagatgtatggggggcacaccataggccgaagggccacctt

SEQ ID NO: 12952 - DNA, 331 bp, Glycine max
  Clone ID: PAT_MRT3847_111701C.1
gttatgatcctctaattggccaaattgccgtttgtggaatataataccacttttggaacttcatgccattcacactgaattatcttttgttattaaatgggaaccggtttgagcgcttcagcttgaacacaaatatgcatttatgctcacttgtcgctgccaattcaaatatccaaagttcaaatcccccaatgctatcaataaaagcattattcctcttcataaatactgctattataaactaggtttgcaccccacattcctcagtaaaatttaacgcccttgtcaaaagccatcaaaaaatgttgtcaaaaaagaacttatttttgcc

SEQ ID NO: 12953 - DNA, 349 bp, Glycine max
  Clone ID: PAT_MRT3847_111702C.1
tgccgtccgtttcctttcgaccagcgtccgttcgtggacaagacgaagagggggcacaagtgagtttgtgatcgaatactagagacgggtgatgaaaatgaagtcttgtttttcgtgctacaattttggtagcatggcaatgccatgcgtcgatatgttcctctcgaatgaacactggtatggtgcccgtctccggagtgaaatgcgcaagttggagcttgctgtggaagcacacaacatctttgctttgagaccattctgaagagtgcgttgaacaacaaaggaatcatcctggcatcaatattatcagactcaaaacagttatcaacatcttacttttatgccagag

SEQ ID NO: 12954 - DNA, 2308 bp, Glycine max
  Clone ID: PAT_MRT3847_111703C.1
aaggcaagtagcgccaaacaaaacaagcaatggctgcttctacttctccaaacttcacaacatctttgcataagaactcccacaaaacaaagtttccttctttaccagggaagaaaactctgcacaccaaacttagtttctcattttcttttccgttcaataaatcgatacgtgtgaaatccattggcacggcgaagtatgatgaagttgtggtggatgaagagttggacaagattagaaggctgcagaatggttcagatgttagaggagtggcattggagggtgaaaagggcagaacagttgaccttactcctcctgcagttgaggcaatatcagagagttttggagagtggattatcaaaggtttaaagaaggaaaaaggataccctgtagagaatgttagagtgtctctcgggcgtgaccctcgagtcacagggtccaaattgagcgtcgcagtctttgcaggtctggctcgcgccggttgcatggtgtatgatatgggactagccaccaccccggcttgtttcatgagcactttgttgcctccatttgcctatgatgcttcaatgatgatgacagcttctcacttgccatacaccagaaatggtctgaaattttttacaaagagaggtggactgacttcaacagaggtggaggaaatatgtgaaaaagctgctcgtaaatatgcaaataggatggccaaggtgtctactttgcttaatgttcttccaacaaaagttgattttatgagcacctactcaatgcacctacgagaaatcatcaaggagagaatcaatcatcctttgcattatgacactccactccagggatttcagataatagtaaatgctggaaacggctcaggagggttcttcacatgggatgtgttagacaaacttggtgcagatacctttggctctctacatcttaaccctgatggaatgtttccaaatcacattcccaaccctgaggacaaaactgccatggcactcaccagagcagcagtgctacaaaactcagctgatcttggaatagtttttgacaccgatgtcgaccgaagcggcgtggttgatagcaaagggaatccaataaatggtgacaagctgattgctctcatgtctgcaattgtgctgagggaacatccaggatcaaccatagtgactgatgctcgtactagcatggcactcactagattcataactgatagaggtggtcaccattgcctataccgtgtcggatacagaaatgtcattgacaagggagtgcatcttaacaatgacggaattgaaacgcatcttatgatggaaacatctggtcatggtgctctcaaagaaaatcatttccttgatgacggggcttacatggtggtgaagattataattgaaatggttaggatgaagcttgctggatcaaatgaagggattggtagtcttatagaagatcttgaagaaccgtatgaatcagtggaacttaggataaatatcatctctgaacctcgacttgctaaagccaaaggaatcgaggctattgaaatatttagaaattacattgaggaagggagacttaaagggtgggagttagactcatgtggtgattgttgggtgagtgaagggtgccttgtagatacaaatgacaccccagctcccattgatgctcaaatgtacagggcaaaagtatcaaacgatgagcatgcacaacatgggtgggttcacatgaggcagagtattcacaacccaaacattgctgtgaacctgcaatcatctgttcggggaggttgcttgtctatggcaagagcttttagagatgagttcctcaaagcaagtggagttcatacattccttgacattactcaagttgataagtttgctgaaaatggctccaaagcctaatttgcaatacttaataaaaatgctgagagtctgcagattgaagccttcatcaaagctcaaacttctgtataatttcaatattatagtagtttaagtgaattattgcaacataaactttaagaaaaggaaaagaaagtatacaactacaattgagtacatagtaaaaaaagtataacagtgtttccataaaaaaaaataaaaaagtataatagtgttaggtaagcaaagcaacatttcaatcataattactgattcctgtcataagcttttgaataacatatatcagttcaaactccgcaaaaaaaaaaaaaaaacccaactttgcaactgctggatccaccattagaccccagaacacaacccttcatcagactggaaaaaaaaaaaaaaaaaaaaaaaaaaaattggggggggggccc

SEQ ID NO: 12955 - DNA, 642 bp, Glycine max
  unsure (1)..(642): unsure at all n locations
  Clone ID: PAT_MRT3847_111704C.1
agttgtatactttcttttccttttcttaaagtttatgttgcaataattcacttaaactactataatattgaaattatacagaagtttgagctttgatgaaggcttcaatctgcagactctcagcatttttattaagtattgcaaagtaggctttggagccattttcagcaaacttatcaacttgagtaatgtcaaggaatgtatgaactccacttgctttgaggaactcatctctaaaagctcttgccatagacaagcaacctccccgaacagatgattgcaggttcacagcaatgtttgggttgtgaatactctgcctcatgtgaacccaaccatgttgtgcatgctcatcgtttgatacttttgccctgaatttgtcacaattaaatcagttttgatgagcaaaacataaagaaatgtaaaatcggatctattgaagcgctgcttgaattttctttaacttgattccacctgtacatttgagcatcaatgggagctggggtgtcatttgtatctacaaggcacccttcactcacccaacaatcaccacatgagtctaactcccaccctttaagtntccctttctcaatgtaatttctaaatatttcaatagcctcgattccttttggcttttagcaagtc

SEQ ID NO: 12956 - DNA, 260 bp, Glycine max
  Clone ID: PAT_MRT3847_111705C.1
acatgtatctttattttttttgttttttctttttatttttatgttacttgtttttaaaaaaaactactaatccaactatgtacaaaatgaataatggcgatcgaggggctattaagacgaacaagcctaataggatatactacccttgccaacgtgctagaatgacctcactctcggatacgctattgaactgcggaggttaatcagggggcacatttggatccttttcaaagcgctagattatgctagtgctccaactg

SEQ ID NO: 12957 - DNA, 327 bp, Glycine max
  Clone ID: PAT_MRT3847_111706C.1
ggatgatgacgatgataatgggtttatgatagcctgtaacgttgcaaaatccgagtatgttgatgaggccgaagctgctgcacatgacgcactacataatacagcagtggatacacttaacacatcagaaaggacacatttctgggaggagccgttaagagacaagtatcaagagcataaagacgaggaattcaatgccttatgcaaacgtaagccaaaccagaagtccatgtgttacagagaagaggatgaccttgctggatctggcagatgtaagctctgatcgtaatatgacagtcattaagcataccttacttatggtgattc

SEQ ID NO: 12958 - DNA, 358 bp, Glycine max
  Clone ID: PAT_MRT3847_111707C.1
taggggttacgcaagatacagctgccatttcttccggtctgaactatcctatattagaagagaatgctacacatggagctttatttactaatgcccagaggagcatctcttcctcatatacaaacatgatggaaagcgtcctctcctcttgcgaatactcagctttacgcgcatttaaacgtcgagtggcatatgcaaatgcaaattatgatcatatggtaggatggcgcacctcatcaattcatgggcaacatgaacttccaaagtccaatcatcttgtaactgatgagagattcccccacattgtttatgttgaaggagagactgctgatgaaatttgcaataaaacatctaccac

SEQ ID NO: 12959 - DNA, 200 bp, Glycine max
  Clone ID: PAT_MRT3847_111708C.1
aacattcattaaaaaaattattttaaccaattttacacacaaccaaaaactccgcaaaacttggcctttcttcccgggcaaggcgaacaaactacaaaaccccttcttaatatttacctttgccaaaaacgacaacgtcctacacaaaccccttatgtgttggaacaacttactaatcaaaccccctttgtttcccaaaa

SEQ ID NO: 12960 - DNA, 384 bp, Glycine max
  Clone ID: PAT_MRT3847_111709C.1
gaatccggtccaatcccccccaacctttcccaatcccaaaaaccctttgaatttttaaaaggaaaccaacatggttattaaggccaacaacccaaaatccatggcaaaggttctggtcaacccaaccccttcctggccttcaccggtattaaaagttatatggagcctaccgccacccacctatgtaccaaagacccccttttggaaattacccaaaggcggcattgcatttcccggtaatgcccaaattcaaagctaccatggatttgtccgcaactgcaaaatctgccacaccgtctttgttgctgctccagcagaaaaaggccattttcttttaaactttctcatgggaagtgtttcagcagctgtctccaaaactgctgc

SEQ ID NO: 12961 - DNA, 505 bp, Glycine max
  Clone ID: PAT_MRT3847_11170C.1
ccacgcgtccggcgaggacaatcggtgaaggcctggagggtgaatcacttctgatctgttctccattggaagccgtcgtccattctgagtcagatcgaaaactcacagtcacactcattacgagttgaaatcgttggaacctcgtcgaacaaccattcaaattgagacagacacacgtgctctgactcgccggaatctcaccggaaaacaagttcgtcggaactcagttggcgaacttgaaattgacgcttagggcaactccaaccaaaaattccgtccaaaacgagggaattctaaaattcccattcgctctctctctcgctcttgcagattcacgctcgttctcactctggcggatcgtggctcgttttcgctctcaagctttctctctggttgaagctgaagagtaccctgagatatccaaggattattttgcagaatttgaaaatgtcaatggcaagcgaatcaagctgggtcgggagggagccagtgaaacgcattgggg

SEQ ID NO: 12962 - DNA, 501 bp, Glycine max
  Clone ID: PAT_MRT3847_111710C.1
ccacgcgtccgtccacgcgtccgagcagactcgcaagggggtagggttgtgtactctgcgcctgtgcggacggcggccggcggacggcgaaggagatggatcgcctgcccgagtcgacccggagcatgaggaagtacgcgtcggaggccggcggcctgcgcgcggcgcggcagggcccccacgggcggtcgctgacggcgcgcacggcgcacagcatgtccacgacggcgctgcgcaccaagtccaagtcggccgcgtcgctgctgcgcagggtgcccttcgcgccgctccgccccgtcctcgccaacctgcaggaggtgttcctcggcaccaagctcgccgtgctattccccgccgtgccgctcgccatcgccgcccagtgcgcgcacttcggccaggtgtgggtgtttacgctcagcctactcggcctcatccccctcgccgagcgtgtcagcttcctcaccgagcagatcgcgatatacaccggccccaccgtgggcg

SEQ ID NO: 12963 - DNA, 216 bp, Glycine max
  Clone ID: PAT_MRT3847_111711C.1
aaaaacaaaatggggttggcaattaacatttttatttggggtaaacagaaaacatttttgggccttggggggattaaaaattgggttcatggaattttttgggttccctttttccttgaaaagatggctccaatgaaagggatgggcgactttttgtttttttttctgagagaagggggcctttccaactttttaaccccgtgttgggggtttggg

SEQ ID NO: 12964 - DNA, 283 bp, Glycine max
  Clone ID: PAT_MRT3847_111712C.1
ggggggggatgctcatttttaaagttttttttccagcttggaaaggttctttttttgcccccccctttaaaaaaattaaaaatttaaatttaatttaattcccgggccgggttttccccctaaggcccggggaggaaaatttaaggaaattggggttttttgataaaaccaaatcctccttacattacaagatttttaaaacctttcttttcctaccttttaaaagttcggttttttttttttcaaggaacggttaatggtttttttcatttccgaggggggc

SEQ ID NO: 12965 - DNA, 245 bp, Glycine max
  Clone ID: PAT_MRT3847_111713C.1
ctggattaaaggggccgttaatccggggttatggttattcctttgcctcatggacaaacctgaatggttaaccttggtttcaaaccttgcctaaaatttaccttcctttcccagaaggatggacctttagtggccaaacctgttaccacattcttccagcgacctcattctacctaaccattggcctgggactggttaaggatcactccttcatatttcacctgaacccacttcatagcatcctc

SEQ ID NO: 12966 - DNA, 487 bp, Glycine max
  Clone ID: PAT_MRT3847_111714C.1
atgaacaatctttatgtcaatagggaaccgttttcaatatcacaggcttttcaattatctctgtgttggactgcagcttctttgctgaaacacaaacttgaccccattgcttctcttatacaagatttgaactttgagtgtaagaaagaagaggtggactacatttgttctatgttgtgttgtttgaagaaaatattcttatatcgcacaggaaattatcatgataccggctttacaaaagcatctggaccatcaaacagggcatattcctgtacaggagttgcacgagaggttgaattgttcaaaaaagatatgtccaaaagtattaaagaaattcagaagaagtgtgaaaagaagctgaagaagctacatattttgcaagaagaagagaagcaaaggttgagagcagctattgaggaagaaaaggctaattttgatgaaaggtacaacatagagtctgctgatattcgatcctgctcttccaatg

SEQ ID NO: 12967 - DNA, 151 bp, Glycine max
  Clone ID: PAT_MRT3847_111715C.1
cgatccttcaccccattaaagcaagtccccaacaaccgtcttcctcttatgctacaaacatattaatatcattgtataaatcataaccttgaattgggattcatacaaaatatcccaaaccctatacaacgatactctttttttgctttaa

SEQ ID NO: 12968 - DNA, 286 bp, Glycine max
  Clone ID: PAT_MRT3847_111716C.1
atcatattgaagagtctacagaaaaataaagtaagatgaagtcttaaaatgaccaaattttaagtgaatgattagctgagtaagtagttgtttaaaaagttgataaagaattggtgcttaaaatatgaagcagtaatagaatcttttcaatgacctacagaaagcatacaaaaaaaaaaaaaaaaaaaaaaaaaaaaaaaaaaaaaaaaaaaaaaaaaaaaaaaaaaaaaaaaaaaaaaaaaaaaaaaaaaaaaaaaaaaaaaaaaaaaaaaaaaaaaaggggggg

SEQ ID NO: 12969 - DNA, 226 bp, Glycine max
  Clone ID: PAT_MRT3847_111717C.1
tccctcctctttttcttttctctccttccttggctccgccctttttcaatctctgcttcacgggcttggatgtgactttgccctacgagaacaccctcattcacacccttctacggcgtgcctggcgttgcttggcatattgcagctacttcctaataacgttaactcggttctcaatgtcattggcaactatcatcaacataaccttatagttttgtttgattcc

SEQ ID NO: 12970 - DNA, 328 bp, Glycine max
  Clone ID: PAT_MRT3847_111718C.1
aaaaacaatggggattcatttccaatattttttttttttggccccaaattcaatacctttgaaacaactttaaaatgggttagcggggggggaaccctcgaccccagattaatggacccccctcaagatgggttaccgggggcccgcccttttcccagatttaagtacgccagcttgacaaatgttttcctccggattggggcccctaatgtaaattccgctggccctggtttcaaaacgggggacccgggaaaaacggggggggccccacttgaacggcccctggggacaaccccctttttggagggggcgtaagaccaaagagggc

SEQ ID NO: 12971 - DNA, 408 bp, Glycine max
  Clone ID: PAT_MRT3847_111719C.1
gtgtttttttattttattttttttttttttttttttttttttaaattagcaaaaagagaaaatgccatttactaagattcaaggcctttcgattataggaatattttttttaccgaatacaaatggcgaaggagctcaacccctcctcaaaacagggggggatgctcatacgtatactcaaccaaattccccggcttaatagtaaccctttaaaaagggttcttttttttaaaacccgcccttggtcccccctcccaggggaaggaattaaaaacccgaccagccccctggtacaaattaagggactcccaccccccgaaaaggttgttataatttttttttgggggggaacattaagcaggggttggcaaaacggagcccccaaggggcctggaaaatcccgccccc

SEQ ID NO: 12972 - DNA, 250 bp, Glycine max
  Clone ID: PAT_MRT3847_11171C.1
taccggccatctctaagggaagcccgagacccaattctgcctataatgagagctattaggcacaacacactgatcggcaggttacaaaggaatgactgaaaaaacccagaaagatcccaacttaagcttcttgaaggacagcccacgttgcgcttttgcatctagcaaccaaatatgtcgaattcgatggtgcttcgcaatcttatgatgatcctgaatgctaaaggcaaatggtaactgccatcatgac

SEQ ID NO: 12973 - DNA, 1472 bp, Glycine max
  Clone ID: PAT_MRT3847_111720C.1
gcactcttcgtgttatgatggaacagttccgctatggcaataagatttgtgatgaaattgagcttaataaggcccagtggagcgcactttttcaggcttatattttttttgaggcatacaatccactccatctacaagaggaaacaagactttgttttgctttcatcagttgcaaaactaatttcctagcaaatggatttgatctacaatggcctggattctctcttttcctctctccactcccttttttccgcggctacagagtcctcctatcgggctgagaacaccaagggcagaccagaatcagcagtgcaacaggggtctaatctcggctgagactgcataccactcatatagagcgagatacaaatgggatgctgcagtgccatccttacccacatgagtatgtagacacatccaagccatgtgcacattctgcatttttcatgggcttgcaaaggaaagagggagtaagaggtcaagaggggcagcaatttgatatacgtgtgaacagttgatgaattcagacaagaaataaatatgtacatgtactggaagccagggatggatatttttgtttctcatgttcgtcgaaagcaactccctgcatttgtttttcctgatggttacaaacgcactcgaatgccaaggcatataagccatcaagctgaaataacaggtgatgatgccacaaactgctactctgggtctggattgtctgaaagatgcatcaagaggaaaaattaccctgaaatggtggataagaagccaggcaaaccagataagcgggcatctattagcccacaaaggttagaatgtgtttctcctgaaagttgtacttgtaaatctggtggtacagctcaaatgagtattgagtgtataaaaggggttaggttagctggttcaacaaccaagtgatgctaacagcaattgtgaagttaagtcatctgatgcactccctggaagtggactatgtactgaggtagctgacatgcagtttagtgaagcggtgctttgttaacactacacatgatatgttgaaatcaagaagtgttgaagttccaaatgagaatggagttctcaatggggacaaagctcaggatctggctttagattgcttggaaagtgcagaaaactgaatctactaacagcttgtcaaactataaagagggtgatattgatatggatcaggcgactagacaaagcatgtaatttcatcacaagggctgaatgttcagattatgtaccaaatgccagttcccagaacctcaattgccgagccaggtctcagactcggtagtgctgtataaattgaagaaggggctaggatgatgagtttggagtgaatcacccgttcgtgagggggtttgtggtggatttggataacaatatgaacaacagtgggctcatctctgatatttgggaagtgaatgggctgaattgctgctcatgctgctaccctgtgctatgct

SEQ ID NO: 12974 - DNA, 836 bp, Glycine max
  Clone ID: PAT_MRT3847_111721C.1
ggctcgagctctctctctctctctctcacttattgtcatatctttgctaggtccatcaaagaagcagtgagcttccaaataaaatgaacccataatcataatcatcatcatcaccacgcctcttccttctttctctttcattttctccccacctttcacaatgtcatcgataaaccactattcaccggatacaacactataagccatcaagctgaaataacaggtgatgatgccacaaactgctactctgggcctggattgtctgaaagatgcatcaagaggaaaaattactctgaaatggtggataagaagccagacaaaccagataagcgggcatctattagcccacaaaggttagaatgtgtttctcctgaaagttgtactagtaaatcaggtggtacaactcaaatgagtattgagtgtatcgaagtggttaggttagctggttcaacaaccaaggatgctaacgacaattgtgaagttaagtcatctgatgcactcccaggaagtggactaagcactgaggtagctgacatgcagattagtgaaccgggctttgttgacaccacacatgatatgttgaaatcaaggagtgttgaaattccaaatgaggtaagatgcatgaaccagtggaggaacctttggaagttgtttggttcatatgaagttccttaattagaagttggtgatgcgtttcagaatggagttctcaatggggacaaagctcaggatctagctttagattgcttggaaagtgcagaaactgaatctactaacagcttgtcaaactataaagagggagacaatgatacggatcagcgactacggacgcgtgg

SEQ ID NO: 12975 - DNA, 291 bp, Glycine max
  unsure (1)..(291): unsure at all n locations
  Clone ID: PAT_MRT3847_111722C.1
tcgtnttnnctnttctgagatgcaagtcaatgagcntngngtntttcttcnatnctacagttttngtagcnnggnnatgncntgcgncacnatgtgntccctnnccgaatgaacactggctanggtgcccgtactcncggnggtgaaaatgcgcaagttggaggcttgctgtggaagcacacaacatctttggctttgagaccattccctgaagagtgngttgaagcaacaaagggaataccatccatgggcgaaacaatatagatcagactcccaaaccagttaacccac

SEQ ID NO: 12976 - DNA, 556 bp, Glycine max
  unsure (1)..(556): unsure at all n locations
  Clone ID: PAT_MRT3847_111723C.1
ggctcgagcttgcatgaattcaagctattacgtttttgcaagtactcttcgtgttatgggggaccgagttctgctatggcaataagatttgtgatgaaattgagcttaataaagcccagtggagcgcactttttcagccttatattttttttgaggcatacaaaaactatttacaagtggacataattgcatcagacacggatgatttactagcatggaggggatgggtagaatctcggttgagaatgcttaccctgaagatagagcgagatacaaatgggatgctgcagtgccatccttacccacatgagtatgttgacacattcaagccatgtgcacattctgcatttttcatgggcttgcagaggaaagagggagtaagaggtcaagaggggcagcaatttgatatacgtggaacagttgatgaattcagacaagaaataaatatgtacatgtactggaagccagggaatggatattttgtttctcatgttcgtcgagagcaactccctgcattngtttttactgatggttacaaacgcactctaatgccaag

SEQ ID NO: 12977 - DNA, 149 bp, Glycine max
  Clone ID: PAT_MRT3847_111724C.1
aaagcttacaataagcccttgatgttgctagagcgataggaataccttcatgggccagcacgccagaccttgatacatggggacctcaagtcttctaatattctactgggggatgatttccacgcaaaagtttcctgtttttttctttt

SEQ ID NO: 12978 - DNA, 257 bp, Glycine max
  Clone ID: PAT_MRT3847_111725C.1
cccacgcgttcggacaattatacacgtaagaggctagttcgctaacagagattgagtatttagtgattgcaatgattgcgcattttacctacactagtgccaaaatcaaaccatgtagtggattatgtatttaattaccaaagtacaccttatattaaggacgctcacgttaaagtgacagacaataattttttggcatcttgtatgcctactgaatttgcttatgaacagagcagatgtatctaaatgtataaaat

SEQ ID NO: 12979 - DNA, 170 bp, Glycine max
  Clone ID: PAT_MRT3847_111726C.1
tgtgaatgtaaacttaagcttcctttagccaataataagtacagaatctcatggttatgaacctaatgtcagagctacaagagtaactgtttcggtacacatacaaggcacataaccatgagattgtgtacttattattgtgtgaatgtaaacttaagcttcctttagcc

SEQ ID NO: 12980 - DNA, 263 bp, Glycine max
  Clone ID: PAT_MRT3847_111727C.1
gaaaagccttttaaaaagtattctccaggtttgtcagggtcactctaaagataaaaatgtaactaagtcttctgtgaaatatcatccatctaatcttgatgctgttgcagatggtggtgacacaagttaattgacaaactactgccaaatggtgcatcatattttgtataaagtacccagtagccccatttcatacaatgtacctaaattatgcagtaacttggcatcatcgttccctccttgttgctgtgtaattagtcagt

SEQ ID NO: 12981 - DNA, 395 bp, Glycine max
  Clone ID: PAT_MRT3847_111728C.1
ggaattcggcacgaggagcttttgggaagcctttgtgcttcaagtgaaaactgagcaggaaattaaactgaataaatgattgatcacattttgaattaaaaaaaaaaaaaaaaaaaaaaaaaaaaaaaaaaaaaaaaaaaaaaaaaaaaaaaaaaaaaaaaaaaaaaaaaaaaaaaaaaaaacctcggggggggccccggcccccatttcccccttttggggggggttatacccccccctccttgcccgtggtttaccatcgtggggacgggaaaaccctgggggttccccacttaattcgcttggcaccaaatccccttttccccagttgggtaaaaaccaaaagggcccgcccggtccgcctttccaaaaatttgcccaccttgatgggcaat

SEQ ID NO: 12982 - DNA, 571 bp, Glycine max
  Clone ID: PAT_MRT3847_111729C.1
gaaaaagaaatcctgccactgctttaattaacaaaaaccctcttaatacagagatcatgaaacaatgctacattccattgcttttttattcaccattttgtgggagaggagggaattttccatattatataaatacattttcttaaatccgtacaacctcaacctttttttaccatgctcgtgaccacatcaggttaattaagaactaacaatagataaaaggacgcttaaaagttataacccaaaaataactccaccttaaaacactatctttttcacttggttgtgatgccctcgctctacaaaggttagaacattggccacacagtttcagttcagattttcacaggctgaagcaaagctggtaattggtatgtgacacagctccacagggagtccattttcattttcattttcccattcccaaacccatcacgtacaagttaagttatactacaatcagcccacatattatggatcatgtgccctccaacgtcatgcctaaactgctcctcttgcaattgttgctggttttgtaccaccttcacgccatgactaagacccaatgttt

SEQ ID NO: 12983 - DNA, 254 bp, Glycine max
  Clone ID: PAT_MRT3847_11172C.1
cgaattggtcagaattcataatcgagaaatcattctctcaatcagacgcaagcagcgaggtacttctcacccaattaaaaaaagagaccggaaataatgacaacgtggttcaatcttatcctattctcttgacatattcgaggttaagtacacacagcaagatgactcactaacaggtcacatacactaagtcaaagtggcatatatgctttaacttgcctctatgtgttgacaagcgaaatcaaactcattaa

SEQ ID NO: 12984 - DNA, 890 bp, Glycine max
  Clone ID: PAT_MRT3847_111730C.1
tcgcccacgcgtcggcctctagtgcccccgtctcttcctcctctctctgcatcgctgcgttttccgaatcgaaaggtgacgttagtaagtaacaatggtggagaaggccaagggtaggaaggaggaggttgtcactcgagagtacaccatcaacctccacaaacgcttgcatggctgcacatttaagaagaaggctcctaaagcaattaaggagataaggaagtttgctcagaaagcgatggggacgaatgatgtaagagtggatgtgaagctcaacaaggctgtgtggagccaggggatccggagcgtcccaaggaggattagggttcgcattgctcgcaagaggaacgacgatgaggatgcaaaggaagagctctattcccttgttactgtcgtcgaaatccccaaggaggagctcaaaggtttggaaaccaaggttattgatgatgaagattgattatgtgttggttatatatctgtttttttttttagttgatgtggatttgcgaatatcttttattttgttgagacattggagatatgtagtttgataattgtttgccttcctctgttttgattcttagaaaggttaaaaggcatcaatgcatgcttttgagtttagacactctttttccttctttttttgttgctgtggataatgaggaaaataatttcttcttaaaagaacaggatgtaacaaaatttggtaaaggagtagcttaagccttttgaggtactactactactatcttttaatgtgtgaaggcaaacctagaaaccggtggaatgaatgaatctacatgaataaaataaaagagaattttatcctatgattaggatacgaaaaaaaaaaaaaaaaaaaaaaaaaaaaaaaaaaaaaaaaaaaaaaa

SEQ ID NO: 12985 - DNA, 465 bp, Glycine max
  Clone ID: PAT_MRT3847_111731C.1
cggggccaaaaaaaataaaaaataccccgaaaaaaggggcaaaaaacaaaaattaaattaatccagggaattaaattaaaccaaaaattatttgggccaaccaaaccccccataggaaaattccattctttacttgaaaaaaccccaaattatctcccccttaaaaatgggagagggaaaaaaaaaatcaaaatcttcctaaacccacgtaatttcttcaaaaaggctttgcccaacccaaggattttgcccccccaaaagctaggcgggggctcccattggaaatcccattaaccgccgggaaattaacaaggctaaggacctatttctgcattacaaacgttggtgcccaaaatgggacttcttacaagaaaataatggggcccaaagccggcaaaacaaaggacccatcttattgggaaaaaagtacccgggtttgccaaatcaaaaaaaaaaagaagggcc

SEQ ID NO: 12986 - DNA, 982 bp, Glycine max
  Clone ID: PAT_MRT3847_111732C.1
ccggattcccgggtcgacccagcgtccggcccgaatcacatactcaagatatatagatgatgttacactttatccttattatctctctcttgatcttcacttcactacccttggctctagctcattcactcactcccatccaacaatatggcccaaaacggcgacactgaggcccaaagcccatcaacccccgaggcccggcccgtcggcggcaccgagttcagctggtgcaaggctgttcccatcggcactggcgtaacggttctgagcctcctcctcctctcaaaaccgccgcaaatcgctgttgtccaaaatgccctccacaaactccaaaattcccaccctattctccgctccaagatccatctcgatccctccaacaacactttccacttcctcacccctcccactcccaccgtccaaatccaccccttcgatctcgcttcaacggctcacatcatccaatgccaatccgacggccacgatcccttccacgtgctcctcgagcacgagatgaaccaggaggacacgtggcgcaattacgccgccgacgtcgacgtactccacgccgccgtgtatagcatcagccacgaccgcttcgccgtgttcctccgcctccacaccgcttcgtgcgaccgcgcctccgccgtggcgctgctcaacgagctcctccgcttcgtcgccggcggcgacgaggcgagcggggagaaggtaaattctccgatcgaggatctgattcctgaggggaagacgaacaagccgttctgggcgcgtggactggacgtgctcgggtacacgctcaacgcgttcaggttcgcgaatttgagtttcgtcgacgctggctcgccccggagttcgaggataataagggtgcaactgaacgtagctgaaaccgagaacttattagctggatgcaaatcaagagggatcaaactttgtggggcacttgctgcagctggaatgattgctgcatggacctcta

SEQ ID NO: 12987 - DNA, 527 bp, Glycine max
  Clone ID: PAT_MRT3847_111733C.1
ggaattcggctcgagccagaacttgaatggcatataacgtcattgctgacagaatcatctttagtagctgagttatccttttgttgttgttgctcacttaatttaatttcaggagttctgtgtagatcaaatgaacagctgaaaggtgaggtaaaacctatatcagaaggaagtaaggattgccttaaggtggttgccgttcatgatactcctagtacagaaagtgaatttaacaagcaatccgcagctgatgctgaaccggtccaaagctaaatttgcaatatttttgaaagggtcacctagttacagaagagtataaatatttgacaattacataggctttacagatatactgtgggattataattcctatttctactctaaccttcactttactcttcttctagctctctccttgtctttgggcaggttgactaaatatgcaaattacaattaatactacattggaggatatcataactcttataccattattatttgagttaaataagaattacgtttcgtac

SEQ ID NO: 12988 - DNA, 2249 bp, Glycine max
  Clone ID: PAT_MRT3847_111734C.1
cgctttgccttgattttgaatcgtcaaataaataacgagtgttctaggtggactctctcccattgcttccttccacccaaacccacaacaacatatacgacatcttctgcaacacaacaactaaacattgttttgtttactcaactcgcactttcccttctccaatttcgaggtctcaattccggctttgaacagccacaagcacgcattgcttgttcaaggttcaatccatcattcaagacattcatggaagcagttaatgaaactagacctgtttccttctgatatacataaaaagggttcacatggtttcttcagacaaaagtgcggatcaaaatatcccttctgataaattgcagcagagagtgagtcttgatagtgatactacattgtcacaaggtcatgatactaaaaatgatctgtccaaaccagaggaagcaagtattctttctattgtagttaaaaatgaagaagggaaggattctgatgctattgcttgtgccttggaatcagatcaagaaggaagcacatgctctttaccacttgagaaacctttgcagaaccctgatactctttcgcatgagttgcctcgattgcagtccagtcaggaatttccctctataatacgcgaaaaggtatcaaaagatggctataactggcgaaaatatggtcagaaacatgttaaggggaatgaatttataaggagctattacaagtgcacacatccaaactgcctggcaaaaaagcaattgcagcagtcaaataatgggcatatcacagattccatttgtatcggtcagcataatcatcctagacctcaattgaactccacagtatcagttgagtgtgttctgcctgttgttgaacaagcaccacacaaatcctctttagccactgttgaagacaaagcatccgttgagcatggatgtatgcctcaacagatccagcctttacaatcctttccgcctgcaaaagtttccccagttaataagttgaatgcttcacatttatcattgactaaggcaaagaaccaggttcatgacaacgaggaacccgagtcaaagcggctgaagaaagacaatactaatcctgatgtcactagagttgacatgtcaactcgtgaatctcgtgttgttgttcaaacttcaagtgaggttgatttggtaaatgatgggtatcgctggaggaaatatgggcagaagctagttaaagggaatacaaacccaagaagttattatcgatgctcgaatcctggatgccctgtcaaaaagcatgtggaaagggcctctcatgattcaaaagttgtaataactacctatgagggacagcatgatcatgaaatcccccctggaaggaccgtcactcagaatgcagctacaaatgctcgcacaacggccagtaatggcaaggctggaaccaaatctgagggtaatattactgatgatacaggggaacgaagcggcttgggctcagcaagcagattaacagagcaactaaatggcgagtcaattactaagtcaaaggctggtgatatggttgagttttgtgtgatcagcctttctaatgagggtcctgaaattaaattaagtgagcaacaacaacaaaaagataattcagctactaaagacgattctgtcagcaatgatgttataagccattcaagttctggagttctgtgtagatcaaatgaacagctgaaaggtgaggtaaaacctatatcagaaggaagtaaggattgccttaatgtggttgccgtgcatgatactcgtagtacagaaagtgaatttaacaagcaatcaacagctgatgcagaacccgtccaaagctaaatttgcaatatttttcaaaggtgctgctagttacagaagagtataaatatttgacaatgacacaggctttacagatatactgtgtgattataattcctatttctactctaaccgtcactttactcttctagctctctccttgtctttgagcaggttgactaaatatgcaaattacaattaatactacattggatatcataacttgtataccattattatttgagttaaataagatttacattttcgtacacatgtatctaaaattctaatgtattgttgaacatactaagctatttgcatgtaattcttgttttgcctactaatgctttaatcttcctctcttcatgtaaatttagaaaatgcgttgcagaattgcagtaattgagtacagcaaaagttattccataaaaaaaaaaaaga

SEQ ID NO: 12989 - DNA, 520 bp, Glycine max
  Clone ID: PAT_MRT3847_111735C.1
aattcggctcgagacggctgcgagaagacgacagaagggctggtaaatgatgggtatcgctggcgcaaatatgggcagaagctagttaaagggaatacaaacccaagaagttattatcgatgctcgaatcctggatgccctgtcaaaaagcatgtggaaagggcctcttatgattcaaaaactgtaataactacctatgagggacagcatgatcatgaaattccccctggaaggactgtcactcagaatgcagctacaaatactcgcacaacggccactaatggcaaggcaggaaccaaatctgagggtaatactgatgatacaggggagcgaagcggcttgggcttaacaagtagattaacagagcaacaaactggcaagtcgactactaagtcaaaggctggtgatatggttgagtttcgtgtgatcaggctttctaatgagggtcctgaaattaaattaagtgagcaacaacaacaaaaggataactcagctactaaagatgattctgtcagcaatg

SEQ ID NO: 12990 - DNA, 158 bp, Glycine max
  unsure (1)..(158): unsure at all n locations
  Clone ID: PAT_MRT3847_111736C.1
gcctgcagaccggccggaatttcgggcnaccgaacgcgcgtcacaatctacagctctaattctgagttcctctatagctactgtaagattgccgccataactgggctcctttctgagggtcaagctcatgctacacctcacactccaaagaacacgga

SEQ ID NO: 12991 - DNA, 568 bp, Glycine max
  Clone ID: PAT_MRT3847_111737C.1
aaaaaaagtccaacctacccttctctttaataaggaccaaaagctaaaaattttggggggaatattctggaacgatcaatttttacagggactcaatcctaaaaatcacaatgggcgggttaaataaaaagggggggtaaaaaaaaaacaatttatgatatatatttatttttggcgagaaggaaaaaatgaaaggtaccaaaggaacaaagcttccacaaactgcagttccaaaatccaaatttgtttataaacccctccgtgtacaatgcaatttgatctgctctcatcctgtattggcagggggggggttctatacttgaatggggggatgatggattatttgcattttttatatttaaagtttccggggggtaccttttggagctttcattaaaagcccattcccccttccccattttaactggcactatttgaatgcctttgtgatacaaaaaagctggcaccatttttgctaaactgggtaaagaccttttttaaatatttggggtaaaagaccaattgcccccccttggaagggggacaaggaaatttcttttttccaaat

SEQ ID NO: 12992 - DNA, 292 bp, Glycine max
  Clone ID: PAT_MRT3847_111738C.1
gggcacaaaagtttggcctagggttctttctcatcatatatataaaataaattttttggcctgaaaatttcaacaatcctttacaaaataataacgatgtttttgaaagggaaacagacaatacagtttatattgattcaaatatgcaagggcaaaaagtagggtccaaacaaaagaactaaacagggggatatgtaacagactttttaaccggaggacctgagaaaaaaatacatggaaaaattctctcaacgttaaagggacccctttaagggcatgaccggaaacaatt

SEQ ID NO: 12993 - DNA, 311 bp, Glycine max
  Clone ID: PAT_MRT3847_111739C.1
aaaatttaaaaatttaaaaaaaaaaaaaaaaaaaagggaaaaggggaaaaaaaaaaaaaaaaaaaaaaaaaaaaaaaaaaaaaaaaaaaaaaaaaaaaaaaaaaaaaaaaaagggccgccccccaactagggaccccgtcaacccggaaataaattccgacccggaccctgcaggcgacccacctttccctataggaagtcgaataaaacctgggcgaaaaaatggaaaaacctgtttcctgtgaaaaattgttatcccttaacaatcccacacaaaatacaacccgaaaccataaagtgaaaaccctggg

SEQ ID NO: 12994 - DNA, 387 bp, Glycine max
  Clone ID: PAT_MRT3847_11173C.1
cacacactggtccacagtcatggcaaccagctcgacgttcagccagcagctgctgcagaagtatggcgccgaatttgagcgcgcaacgcaacacccgttcctcacggccgccggccagggctcgctagacaagaaagtgctggttgggtggctgcgacaggactatctgtacgcgtacgtggggtacatcaagttcgcttccatcctcatctcgcgcctcccttaccctaccgttccccccacaccatcatcttctggcacagccgacggagcgggcgcgggcgcgccgtcgagccgggagcacgttctgcacaaggccctctcgacgctcatttttttcctgtccaacgtcaagcgcgagacggggtttttcgtcgagacggcacg

SEQ ID NO: 12995 - DNA, 841 bp, Glycine max
  Clone ID: PAT_MRT3847_111740C.1
ggctcgagggcaacacaaaaccacaccctctggcatggccaaaaagcgcaagcccaagaagaaaccccagaatcacaatgtaaaccaaagccaaaacgtggccgctttgatttggcgagtaacacactcagcagagtccttcctctcccaaaacgaccttgttctcctcccttcccaatccctccgtctcgaatccctaatctcatccatcatctcccactctccctctccgcctctctctccgccgcaccgtgactcctggttcagccgcttccgctccgtctccgattcccaatggctccacgccttccgcatgttcaaacccaccttctcccatctcctccacctcctctccccctccctcgccccctccttcccccacatggcccccgactgcgtcctcgccgccgccctcttccgcctcgcccacgccgccccctaccccgccgtctcccgccgcttcgccatctccccggcggacgcctgccgcgccttcttcgccgtctgtaaggccctcgctgacaacctcggccacctcttcgagctccgcaccgactcccagagggtcgtggtggggttcgggttcagctccctccccaactgtttcggggttttaggattcgctaggttcaaaatcgacgattcattattgggtgaaaatggagctttaatggttcaagccttggtggattccgaaggaaggttcctggacgtctcagcagggtggccaagtaccatgaaacccgaaacaattttgcgtgagactaatctttattgtgaggttgaagatccaaggaaatggtgaatgggccgccttataatctcagcgagggttgtttga

SEQ ID NO: 12996 - DNA, 141 bp, Glycine max
  Clone ID: PAT_MRT3847_111741C.1
ccaaaaggcatatagtctttgcaattttgtataacaccatacttgggggatttccatgggaatagttaataccataacccaaattatgctgacaaaattgcccaagtttacacacaaaactacaatatgggggacgcgggg

SEQ ID NO: 12997 - DNA, 425 bp, Glycine max
  Clone ID: PAT_MRT3847_111742C.1
aaaaaaaaattgtgggaaattttttttaaagtaaaaatttggggccccctttaaccttggccctaaaatttgaaaaaagggttttttcacattaccccaggcccttcccgggttcccccggccccaatgggcccggcccgggggccccccgaatcaccctttttggggaaaattcgggcttgcaccgaccccccttttgttaaaacaaaaaaaaagggggccggccaattaaaacccccttgggttctttttttgaaaaaccggccctttccggggttcttaaaaaaagaccccggggggaggggtaaaaaaacccgaaagggggggacatccgaagggttttttttcctaaaccgggccccgaaaacccaaggaagcgcgggccctaaaaggccccctccccgggggtgggcccaggggccccc

SEQ ID NO: 12998 - DNA, 584 bp, Glycine max
  Clone ID: PAT_MRT3847_111743C.1
aaactaagagacattacagtttgtattattgtagaagagagagggagagagatggagttgagcatgaaagtgttggtgaaagttgcttcgttgcttttcctattggaattcactgcaacagttgttgatgctcgcttcgatccaagttcattcatcactcagtttctccccaatgctgaagccaacaattactatgttaaatccacaacaaaagcgtgctgtaacagctgtccttgcacaaaatcaatccctccacagtgtcgttgttcagatattggagaaacatgtcactctgcatgcaaaacttgtatttgcactcgctcaattcctccacagtgtcattgcagtgacataaccaacttctgttatgaaccttgcaactcctctgaaaccgaagctcactaggaatattgagcatgttccagtgactaacatgtttgacagagtcactaggctttgttttcatctagctagtacttatgatgtatgggaataaataactactgaatgaataaaagctactaggccaagcagtttgttttctacaaattgctggtcgtggtgtttgttttattttttaaaaa

SEQ ID NO: 12999 - DNA, 455 bp, Glycine max
  Clone ID: PAT_MRT3847_111744C.1
tctatcacgcgtacgcccacgcgtgcgaggacgcgtacgtccacgcgtccgaccacgcgtgcgcccacgcgtccggacggctgtgagaagacgacagaggggggttgtagtgtgtgattgtatgttgacgtaactcgttcttttactgttgatgatctgagtttgtgtgagatttttatttcacctgcaaatgtcttgcatgctgaggagactgtggttgcaggaagcttctgcaagtgtggcaatgggtgtggtggctggaagatgttcccatacttgagtgtacactgattaaaccacgatacgagaccttggtgatgggagtggcacctgttgagggtcaatgtgagggtgctgcaatggatgtgaccattgagaacgatgggtgcacatgtggacaaaactggtagtgcatgctctgcgcttggatgtgaggtgttgggagagcaagcttg

SEQ ID NO: 13000 - DNA, 1956 bp, Glycine max
  unsure (1)..(1956): unsure at all n locations
  Clone ID: PAT_MRT3847_111745C.1
nggcgacttcaatccaactccaaagtaccgtaacgtaacaaacttgactttgtgtgcctcagctgctattgttcatcgcaagctacctaacaagttcgaggctgaacctgagacaatggcgaatcacaatagcagattcctcttacgctccttcatccccttcttccatcgccgaatgaactcacctcttcttccttcagcaacgtcatgtcctcggttaacttcggggacagcttttgatgaaaaattcacgcagttaccgagcaatattgttcgcggggatcatcgtcaagttttgtcttttttcaatccttcaagaaatttcgcggaaaccaaacaatggggtgttggaattcggcacaaatgctttggttctatggctgggtcggttcaaaggaaccccagattctcaaagttgaatgatgatgatgttcgatacttagagggtatattgggttccaaaaatgttgttcaagatgaggacaagcttgtcacttcaaacactgattggatgcataaatacaaaggctctagtaagctcctgttacaacctaggaccgctgatcaggtttctcagattcttaaatattgtaactccagaaacttggctgttgttccccaaggtggaaatactggtcttgtaggaggaagtgtgcctgtctttgatgggaaaatataatgtcattcctggacaatgaaggatttattatgccactagacttaggtgcaaaagggagttgtcagattggtggaaatgtttcaactaatgctggtggtttgcgtcttgttcgctatggatcgcttcatggaagtgtacttggtgttgaagctgttctggcaaatggtactgtacttgacatgcttaagacattgcgcaaagataatactggctatgatttgaaacatctatttataggaagtgaaggttccttgggaattgttactaaggtttcaatacttaccccaccaaagttatcttcagtgaatgtggcttttcttgcttgtaaagactatagcagctgccagaaattgctacaggaggcaaaagggaaacttggggagattttatctgcatttgaatttctggatgtccagtctatgaatttggttttaaatcacatggaaggtgcacgaaatccattgccgtcattgcataacttttatgttttgattgagacaacaggcagtgatgaatcttctgacaagcaaaagcttgaagcatttctacttggctccatggagaatgaattgatatccgatggtgttcttgcacaagacataaaccaagcatcatctttttggcttctacgtgagggtataccagaggcattgatgagagcaggagctgtttacaagtatgatttatcaatacctcttgaacacatgtacaatcttgttgaagaaatgcgctctagactaggtaacacagctaatgtaataggatatggtcaccttggagatggtaatttgcatttaaacatttctacttctcattacgatgacaagattttgtcacatattgaaccttatgtatatgaatggacatctaagcaccgaggtagcattagcgcggagcatggcctgggactaatgaaagccaacgaaattttctacagcaaatcacatgaaactgtacaagtgatggcttcaatcaagaatttgctggaccccaatcacatactcaacccatataaagttcttcctcagtctctcatttcataatctcttgtcgaaaacttgatgttgtattcatatctttgtcacttccttgaagtgagacaaacttctttacttgatccagtaagtacacaggaattctctccacatgacagtgccctcactcatctaaaaagtgtattgctacattatgaataataaatatagatatttgactaaagtgtaataaattggtaacaatcttttattaaaaaaaaaaaaaaaaaaaaaaaaaaaaag

SEQ ID NO: 13001 - DNA, 630 bp, Glycine max
  Clone ID: PAT_MRT3847_111746C.1
atgaacgagtcaacgccaaacacggaaagttatctctatctccatccaagcgaaaacccagctgtggcactcgtctctccagctttggattccagcaactaccattcatggagcaggtccatgataacagaattgagcgccaaaaataaagtggaatttgtgaacggaaatgcaccagaaccattgaagactgatagaacgtatggagcatggagccactgcaataacatggtggtgtcctggatagttcattcggtatccatttcaattagacaaagtgttctatggatggacaaagcaaaagaaatctggaatgatttgaagtctcggtacgcgcaaggggatctcttgaggatctccgatcttcaacaagaagcttcatcgatgaagcaaggtaataattctttaccaaacttcaaccttgaagcgaaggaaagttcttctatcaatgttgtcaagattgtttgtgagttttgtggacgtgttggtcatactgaaagtgtttgttacaagaagcatggtgtaccttcaaactatgatggaaaaagcaaaggatacaatgcgaggaacggaaagacgtgcacccattgcgggacacggagggctactttgtccacatatgtaatgtaa

SEQ ID NO: 13002 - DNA, 253 bp, Glycine max
  unsure (1)..(253): unsure at all n locations
  Clone ID: PAT_MRT3847_111747C.1
gncgtcctttttttttttttttattttttatttttgtcacttttgatcttatatatataattcacgggcacagatttatannaatcacttagcaaacgtttctaagtttattacttttttttatnnnttttttatatctctctttcaagacatttaacaaaaaatatgttnatgcggcgtttttttaacagaaaanatgctttaccccaccataagataaaaagaccccgaactgggggtttcttttgtgctg

SEQ ID NO: 13003 - DNA, 985 bp, Glycine max
  unsure (1)..(985): unsure at all n locations
  Clone ID: PAT_MRT3847_111748C.1
gtttcttgcagtcccatcccactattgaccaataatatttagggtgcagtccattaagatgaacaaaatgtagtacatgtgtatgaaacagcaccctcaagttgtcaaacgaggaaaatgacaattttgcctcacattttgccctttttggtcaggtgaggcctatggtctgtactatagtctgcagttgtaggggacccaaaaaccttgagttttggaagtgacttcgttttcaatggccactattggcattagatttggagcaacacacaattagatatgcacactccaacaactccatcatcacttcctccctgttattatcatcattagggttttctttttttcacacacaagaagagaaacccatgtcaggtgtctctgctaagatttcaaatttttcaacaactatggttggtcaactgcttctgcaacgttgacattttctctcagtgtcaaaagtggtttttaggagcaggaagatgaaagtgaagtcaaattggggttgctttttggatgctgtggttttctcttgcgggcttgctttattcgctttttgggttaaaaagaagtgaaagagttacaaaggaaggattccttcttcttctgttagctcattcttgtgtatgacgaccctatatggaagtgttatcctttttggatggtttagcacatgacacaccaaaatngggtgtgtggaaactgaaatgtggggtgcaagagattttcagatcaggattgtggagtcttgacctgacatcatgagcctagtggatggtggtgggggttattagagtgctctcaatctaaaagatgtttcttatttgttttctgtttgtttttttcaagttctttgggatttttgaagaaaataaggaaaggggattttaggtgttttaattgtttttcatgaatccttaaataagaaaatatgaaatgtattttttaacccgaataaaaatagaaaaaaacagtatgctggggg

SEQ ID NO: 13004 - DNA, 501 bp, Glycine max
  Clone ID: PAT_MRT3847_111749C.1
atgtaggacctgtaggctgcagttgggggagggggagaacctatacagcactaaagatttcaaatttgtcgagtgctagacaatgtctaccctccttaggggacaatttaataggattgctttctaaggctgcttatagatgtggggtatattggtaaggatgtgtgactaaatttttaatgagttattcctgattattatctgtagatagatagcgtctattcagtaagttgtgcagaacataggatccacatgggactgtaggattgatcataagactgcacctaaaactcgcatgttcagttttattgagttatacattttctatttaactatattttgtgataattgttcttctacttgttaaatgcttcatagaacaatttcttcacataaagacttatcattcttcaatgctcttgacacacttcatagtgaactctaataattagttctactgggttctgttgacaaggttttacctggttatggtaggttcta

SEQ ID NO: 13005 - DNA, 485 bp, Glycine max
  Clone ID: PAT_MRT3847_11174C.1
ctctcattcgcggggcgccccctttttcttttttttacacaagccagtctggcatttcataacgcgccaaatgattagcaaatgttatacctttcgttggaaggcctaattaagacgtgttgaggtcttacagtatattacttctgtgccaacactctacacacagacctatttcccttcgacttttgcggataaatagaactcccttgatctgacggtcattgctatattactattctatgcttcttcaagcatctgccgacctgtgctaccctttattaatatccacttcctgttgactccaacaggcatatctagggtgcttcttttgaaggagaacggtgatcatcttccaccaaggctggcgatctatcacatctagcattgcttcctgctgatccaccagtggcctcttggacgatctcagcatcagaccacatccgtaggaaaccagatatgagcaactctagtaaaaaaaccagtaa

SEQ ID NO: 13006 - DNA, 171 bp, Glycine max
  Clone ID: PAT_MRT3847_111750C.1
ggctcgagctcgagccgctggagccgttttgtttctagatttgatggagtaagatgagttaatgttaatggaatgttgcactgaaactgatctagtcgtagcacaagaaaatcactggaggaagggtagcatgagcacttgaagctagcagatggatggtacatgcatatg

SEQ ID NO: 13007 - DNA, 383 bp, Glycine max
  unsure (1)..(383): unsure at all n locations
  Clone ID: PAT_MRT3847_111751C.1
ngtaaccacctactactcgaggagttgcatcaaagtgtgtttagaggatgactggccttcacctcacctgaagagggaagcagaccactgatatggtacttcaacgagcgaaaaattgcttacgggatagcacgcgctttaaaggacctacatgaagattggtcaccatcggtcgtgataactaatatctaaaggggacacacatatagatcgatacagattttaatcctcatctctctgacagaggaatggcaagctattttccaaactgcaaaccaggctttaaacaataatgctggatctggtatttaagctcacaacggtggtttgaatggtcattatactctcaagagtgatgttcatagcctcagagttgtcatgat

SEQ ID NO: 13008 - DNA, 816 bp, Glycine max
  Clone ID: PAT_MRT3847_111752C.1
cccacgcgtccgcatgtgctgtgttgtgtttatgcattggtgattactgattagctagcagtagcatcgtccccttctccaaagatcgtataaccttcaatccatcttcatctccggtgagtcaagttgcagctactttggcatcgtattttctgggtcagttctgtcgaattccttggtccaagactttgcagctgaaccaacagcatggcgggtcagtcctccaatgaaggctccagtactggaaacatttcagcagaatgttccgattcaactgttcagctcaatatcaagactctagattcccgcatctacagttttcaagtggacaaaaatatgcctgtttcgttgttcaaagagaaaattgcaaatgaaattggtgttccagttaatcagcaacggctgatatttagaggaaaagtcttaaaggatgagcacgctctttctgagtattatgttgagaatgggcatacattgcatttagttgaaagacaaccaaatcagtcgcaggcttctggtacgagttctggtgagtcaactggtacaagtggtaaccgaggaaatgatgtaggctcaggggctcctcgtaatcatgttgggcaaatttcacacagtgttgttcttggaacatttaatgtgggcgaaccggagaagggtatatgatctcacttcggttattgggcatccagagcacattagtggtccaatgctacgcaaacttcttcagttcagccaaggaatgaaactgatggaatgcatgctggaaatcaaacccagcaggaattcaggcaccatcgggacagacatttcatggcc

SEQ ID NO: 13009 - DNA, 435 bp, Glycine max
  Clone ID: PAT_MRT3847_111753C.1
gagatgctagaatgaggctcatgaaacatgagctctgtcttcgttgcggggtctcttgggatatgaagaatcgtctttctcgaagcgtcacaacttttgagtgaacctatgtatatgatgaatgaagctatctttactgacatctctcaatgacctttaggtgtggatttgaagtaaggatacttcctaaaattagaatgactcaagaagcattcagtaacacaagagatggtgtctggaatctccagaatgaacagacgaaagaaaggacagctgttgcttctgtcgtcttctcgcagccgtacccttctgtcgtcttctcgcagccgtacccttctgtcgtcttctcgcagccgtacccttctgtcgtcttctcgcagccgtacccttctgtcgtcttctcgcagccgtcggacgcgtgggcggacgcgtggg

SEQ ID NO: 13010 - DNA, 1658 bp, Glycine max
  Clone ID: PAT_MRT3847_111754C.1
agtttcaaatgccttgaggccacacgattgcactatcactccaattttgcggataatagagggcacatcgatcactctgcacgggtcatgcgagttattacatggaaccgatcctttaagggaatacctaatttagatgatgggaaggatgattttgactcggatgagcatgagacgcatgccaccatcttggacaagttgttagcgtgggagaagaaactctacgatgaagttaaggctggtgaactaatgaaatttgagtaccaaagaaaagttgccgcccttaataagctgaagaaaagaggcaccaactctgaagcattggagaaagcaaaagcagttgtcagtcatttgcatacaagatacattgtagatatgcaatccttggattcaacagtctccgagattaaccgattacgtgatgaacagttgtatccaagacttattcagcttgttgatgggatggccactatgtggaaaaccatgctagagcaccatgtgaagcaatcagatactgtgacattgctaagaaatttagatatttcccagtctcctaagacaactagtgaacaccattatgaccgaacataccagctagttcttgttgtgcaacagtggcattcacactttgagaagcttgtcaaccatcaaaagggatacataaaggcgctaaacacttggttaaaattaaacatcatccctattgaaagcagtttgaaggaaaaggtttcttcgcctccaagagttagaagcccacccatacaaggccttctctatgcatggaatgaccgtcttgataagcttcctgatgagcttgctaggacagctataggaaactttgttgctgtgatagagactatttaccatcagcaacaagaagaaatagctttgaagaggaaatgtgaggatacacgaaaggagctatcccgtaaaaccagacaatttgaagattggtataacaagtatatgcaaaagaaaataccagatgaatacaatccagatagggcagaagacgctaatgctcctgatgaagttgttacgaggcagtctgcagttgaacaagtgaagaagagattggaagatgaggaagaagcctatgcaaggcaatgcctccaagtgaggcaaaaaactctggtaagtctcaaaaatcgtatgccagagctctttagggctatgtcggatttttctcttgaatgttccagaatgtacagtgaattaaggccaatatcacagaacctaggccagagcttatcatgagctgggttgcgcttattttattttttcagttattttttctgggtaaaatatatttatcttggttgtgttatatgatatgatattacacttaagatctcttgattggggatgagtcctgaagattgcatttgacagtgttaaataaacagtatttgaattttcaaattattgcagagaatgcagttgaatggattcatgccctttgataaacgttccatgtatgttttgttcagttgtaattaatgtaaatctcctcaaaccgtttcaagatgctgcatgctggctgatagaaaaggtgtcatttatgtttataaataatcatgcttctggaaggaaaaaaaataattagtttatgaaatccaattctataatacaggggcttcaacttgtagctcttgatc

SEQ ID NO: 13011 - DNA, 549 bp, Glycine max
  Clone ID: PAT_MRT3847_111755C.1
ggtcaatgaagatgattctttattctcattatgttcaatctacatcccaaactgcagacctttattacatgctgcattcctttaaattgaattgaatacttgctggcggcaatcaccgtccccttgccaacttcacacagtatccctgagctaaggtctgacttggtccttacacgatactaaggtattcagagcgcgtctccggtggacttggagaactcgaacaccgggacctccggctccaccttgatttcctgcaccggcatggccagcttgcacttcctcccttccgtccccccctgcatcacttgccatgaactcgttgttcctccgccccctaaagctcagcttcgtggccaccccctccagcttacccatcagcgcctgagcctaggactgggagatgaacattgacggcgaccgcttgctcgagtcaaacaaattcctcagatcgaacccatgctacatggaccagattatttcaaaagcgttgtaagacggactagcaggcttagcccccgtcaactccccatcctcgttgttgctgct

SEQ ID NO: 13012 - DNA, 229 bp, Glycine max
  Clone ID: PAT_MRT3847_111756C.1
ctctgttggaatgaatctctcacaccctcactgcttccgatcccaagaaactgcccacactaatgttggtgaccagatggcctgcagcaacaccatcctctatgaatctgaagaccatcccgagcatgaggccgacattagtgatgaaccttaccaacccagaatgcgaaggttcatgtatcaatactcttctcagatattcctggtggcaaacaaacaagtgggctta

SEQ ID NO: 13013 - DNA, 335 bp, Glycine max
  Clone ID: PAT_MRT3847_111757C.1
ggctcgaggggaaaggtaataaccggcacaccagtagtagttggaggtgccgctttgatgctgcaggcgctcatgcacccgccggttggatcattggataagcgtgacaatgagacatcttactgggttggggcttgcgccgatctctgcgacctggcattgatgctcgattccaaaaccgctcatatcgacttagaagactgacctgacgtgctttgcctattatcttcaatcaaaagcgaggccgataacgcgcttggtgctggcatcggtcgaatgactggagaattgtatatcacagatgaccaagtgcttgctgcggtcttcaatgacac

SEQ ID NO: 13014 - DNA, 312 bp, Glycine max
  Clone ID: PAT_MRT3847_111758C.1
atctctgggaattagagtactaatattagtgggacacaatatgagatcaacacaatacctgacttattttaacgggacattatgacagaccctttaaacatcatagtattttaaacgccatgagaacacattcaacataactcctttagcataaagccccggacactgactgaggacaaggtgaagggttgattccttctgtgtgttgttacaaactaaggtacttacatcctggagctgtttggcagcaaaaattagcctatgctgacccagtgggatacctttcttggcctgaatcttggccttaaaatt

SEQ ID NO: 13015 - DNA, 575 bp, Glycine max
  Clone ID: PAT_MRT3847_111759C.1
gtcggtgggcgccctgctcgtgggtgtctgaaatatcacgacaagacactcttaccgcgttctacacatcgtgatgcgtcacttacaaatcagtttatgactattccaacacaaatcgaccctacacccactctgtcagtgacaggccgagcaggcagatgcaaccctcgactaaattacagggatgcgtgacaccgtccacgtaaggaacgggcacccggaagcgaggccacttgtggcagcgtagaatgctcatttcttgataagagagcattcactctgagcattgctgagcgtggacccttgtcgcagggggaagctgatactgtatcttcagaacggagagctgtagcggatgcgatccaatgaatccccaatagcatgctgctgaagctggcacaatgcccactgtaggtggaagtatgaaccgcgctgccatagtccctattgtcaagacaatgcgtactgctgacttgatcaagccattgagaagattggctgcaactaccaaagtcataggcacaatggtggcctcgcccactagagaagcagagctgacattacacgaaagggag

SEQ ID NO: 13016 - DNA, 466 bp, Glycine max
  Clone ID: PAT_MRT3847_11175C.1
tacatgtgtcttgggggggggggggggggggggggggggggaagagaatatgggggggggaggagagagggatgtatgggatagcacagaaagtgagggattgtaggaggtatggcaggttgaggattattagtaataaccgctttatcgccttattgatgagaaaaaggtgccactaactagcaaaacgctaagaggtatatgggtgaaagaaatggatgccggaaagagaattttaaaaggagtggcaggaattgcgtcggctagggccgccaaatattggtgcaagaaaggttaccaactcagctcaagacaatcgacccgttatactgcacagacataagcaagtaaatgcaacacagggagaactagcggtaagttgtggacgtagcggcgacgttgctaagagcgtaagcagattaaccggtactattatagtcgatatggtagcaaatagggctggggt

SEQ ID NO: 13017 - DNA, 242 bp, Glycine max
  Clone ID: PAT_MRT3847_111760C.1
cccacgcgtccggtcaataccagttctatatcctaaatgtcctctttgatgccgaggcacagagctatgtcccgttccaagctaaccgctcgcaagtccacctgcggataggcgctcgggaagcaatcgtcgactaaagccgctcgcaagttaactacggccaccggcggagtgaagaaaccccacctattcatgccccgaacgcgtgctctgatggagatcagaacgtgccataagagcac

SEQ ID NO: 13018 - DNA, 298 bp, Glycine max
  unsure (1)..(298): unsure at all n locations
  Clone ID: PAT_MRT3847_111761C.1
acgagagtaattaatgatgatgatgatcgcatcttcttctcttagtatattattgaaatcctcaagtgaacaacaacagcaaccccttgtcctttcaaattcaagggaactgtggtagaaaaagtatatatttatgctttttgtttcactttcatcgacagcttctctctctctctctnccttntttgttgcccttagccttttccctttgcccttttccctttttgccatttttccccctttttgggggcctttgctgccgcaatagctatggagccacctatgttgggggggtgaa

SEQ ID NO: 13019 - DNA, 450 bp, Glycine max
  Clone ID: PAT_MRT3847_111762C.1
ttttttttttttgtcacttgatatttgctcacgtgtatattttaagataatctctgatttattagtttggcactgtaacaaaaaaatgaattgaataaggacattagaacgaaagaggttaacaacaaaaagataaaccaagtaaaatgaaagaaaaataaataatgtattgcatgctttttttagcgtttgtgttgatttttagcttttaggattttggacacttggttgggccaacggaacattgtatttattaatagaaggcatttgcattctgcaccttccaaatatgaattccacacctcccaaaaagccttaatggtaaaaaattatcttaagccttaacacttcctctccctcttccatgtgccgcccaagtatctgatggcaccctcatccaaatcagcaacttcaacaacaactaaaaggaaatcggacgcgtgggtcgac

SEQ ID NO: 13020 - DNA, 630 bp, Glycine max
  Clone ID: PAT_MRT3847_111763C.1
aagcgcggacgccggctcgagcgctaatggactcgttctctttcaccactgttccatagagcaactcaaaaccacgcacacaaaaaaacatgaatccccgttttgcccctctctctttctcaatcccttctcttcgaaaaacaccttcttctcattggtgctaaccacacctccgctcgcttctgctcccgataaataataccacacaaaaaaaatcccaacttttttttttcttcttcttcttttatttcaattcaattcatttttttttgtgattttttctggttattgttattaatttctgtgaggaaaagaagagtgcacaatttgtttccatggatccaaccgtagcgaagcctggctttctcagaaacgttctggttcggttactcctcttcggcgttttcatcgtcgtcgtacggttcgcttacgtcatcaccctcgccggtgagtcctgcaccgtcggcgacttctgcttcttctctccgtcgatcaacctcgcaatcgccggcaccagatcaggcgccctcgcagcgcgcggaggagccgccgggccgccgagcgctatgccagcaaggactggatcaacggcgtccggttctactcgtcggctttccaggacatgatctc

SEQ ID NO: 13021 - DNA, 565 bp, Glycine max
  Clone ID: PAT_MRT3847_111764C.1
cttcaatccataaacgtggtttcctctccagaatcgtgggttgatcttttgttcttcaagaactacgtcttttgtcgagggttcaattagtggaaaagttggaaagacgcgttctcagagtattctagagtgatggaaaatgaaggcggaaatactagtcaacaaccaataggtaacacaatatttagacgtaattggactgaacttgaaaaggaaatcttgctcactatactagaggagatggtggtggctggcagaaaaaggagagaatgagacattcaagtttgacactcatgaagtagtttgtaaaaagatgaaagataagattcctgaaattattataaattccaaacaagtcattaacaagatgtaaaggtagtcaacataacttaatgatgttgttgacatgatgaatactagagggtttggatgggggatgatgcaagaaagtgtcacttgtgacaacaatcaagtcttattgagtatttggagaagcatccccaagttggcaatcgtgtcaatagagtttgaaagattgcaaggtatatttgacaaagatcatgca

SEQ ID NO: 13022 - DNA, 351 bp, Glycine max
  Clone ID: PAT_MRT3847_111765C.1
ggctcgagcacacacactctcatagctgtagcggcgtcactaagatcggagaatgaatggctatgactgacgtcgttgctgctctttacactgctccttaccggaaccctagctctcatccaggcgaagaaatccgaaggacgatctgaaggatgagacccacaaggtttactttgatgttgacattaatggacaagaagcaggtcgtatcgtaatgggtctttacgggaaggcatgaaccagacactgcagataactttcgcgcactttgcacacgggaaaagggaactggctaatgcaggaaagcctctccattacaaaggtcgctcaacatatgcaaccattcctagc

SEQ ID NO: 13023 - DNA, 292 bp, Glycine max
  Clone ID: PAT_MRT3847_111766C.1
gccacgcttaacactgaatcttctgagtggttccacttcatctttcagctcttgcatcacggtaccaccacgtcgtattcagggccattagcttcaagtcattgatatacaatcacacctgttatgcttaatcaagttgtcaacaaccacagctactaacatcaagacactgtaagttactaatgatctcatatcattaagatcatctacttatatcatctctgatttataaaatttacagtcttatgattatgtatgctaagcactaaaattacgattattaagaggtgca

SEQ ID NO: 13024 - DNA, 350 bp, Glycine max
  Clone ID: PAT_MRT3847_111767C.1
ctttcgctgttttccgtctcgtattaaaattggttgtagcgtacgctcactatgaacacgcacttcttcatcctcattgctctcactctctcttcgccgtttcttttcggccttcgctgttcgttctctcgccgaatttcaaaaccctagaaacgtttctctaaccccaaatcaaataaaatcaaatcgaatccaatcgacgcgctaggtatttggtgttcggctgctgtttcctcctagttgcttctgctgttttatggaaagatgtcttatcagttaactggcgagatgtttcggttccgaccatgtggttcaatgcaaacagtatgagtgcttcctggggtgtttgg

SEQ ID NO: 13025 - DNA, 470 bp, Glycine max
  Clone ID: PAT_MRT3847_111768C.1
cattcatgtaagattttttctgttgcttttgatgaagttgtttgttacataaacatatctccatggtgcccccatcaaaaccaaacttgttttattcattgggttacatggttaaaggttaaagaaagaaagactaagagatgatggaatatgaatcactagagttatattatatgcatcatctatttcattttcttcatttgaagtttgcaccaaaaaacaaagaaagaaagttttctttcaaatcattgcgatcctggttgtgatagattcttccttcttttgttctaagacacttgaaacaagaacaattatggaatgaaattaaccctacaaaatgggtagttctataaaattaaaatttctatggtggatttgtagtctaattacatataactcatctaacactaacatgtgtgttatatgtgcaggactcaaagtaatagttttctttaaaaaaaaattgaagt

SEQ ID NO: 13026 - DNA, 207 bp, Glycine max
  Clone ID: PAT_MRT3847_111769C.1
ggcacgcgggtcagacgccactcgtccgccttcctcaagctccttattgcttctccttgcaaatctacttctctcccgagaagtttaggcaaactaggagaatcccccattctacaaacctcccactgagaaaccaccattttataaacccttatttgataaatctccagtttacaaacttacatttttaaacccaccaatttataa

SEQ ID NO: 13027 - DNA, 241 bp, Glycine max
  Clone ID: PAT_MRT3847_11176C.1
ggggggacctcccgcaacatcataaccataatgcctacgtgtaccggcacagacgacatcatcaccagcagggccgactacagcagcgacactgtcactttcaagtccgaaagccctacagaagcacgccgatttctgacgttcgacatgaagctgatggacattcataatgaacacattgcgattccggaggcacagtatcaagctactgttaacatgagatcctctgagtttgcaacga

SEQ ID NO: 13028 - DNA, 408 bp, Glycine max
  Clone ID: PAT_MRT3847_111770C.1
gcacacccttttacttaaaaatacccgagctgactggaaaggtgagtgactcgggaaccgactcaacacagggaaacaagcccaccacagatccgagtatacattcactggaacaagccactatacgctctcccaggagggaagcttccaaacggaggatgctaataatggcctaaagagccatccaaacaagaggcaaggcgatgtgatacataaacctacacccatcaccgcctgataatataggacgatcatactagctagcaagaaggccctagacccaaaaagaaccggcctgaaccttagcaacaacaaactacccctacagtacaccaaaatgtcgtgccgttcgaaccggggcggtccctggcctggaaccacctatgcaaatgagcctcccaaggatca

SEQ ID NO: 13029 - DNA, 1781 bp, Glycine max
  Clone ID: PAT_MRT3847_111771C.1
acgcggttcgagtgtttgcccaaaaccttatctgacttaacttccacactgtctgtctctttctctccatctttgtgtcacatgaaatttgttctctgaatttttatttttttgacatcatttcaatggcagccatcatcccctgccactactgtgcttccctcagtcctagatggttcaattccaacaacacacattctaggcgtttatcctacccacttcgaggactccgaggtttgaatgctcgttgctcttaccaaccaccccatcattctgaatctccgaacaaccataatgggaggtcattttccttgaagcagtgtgcaatatctattgcactggcggttgggttaataacaggagttcctacattggagggtcccaccattgcccaagcagctaatcctgcattgtctgatctgtctgttttgatttctggaccaattaaggatcctggggcattgttgagatatgctcttcctattgacaataaggccattagagaagtgcaaaaaccacttgaagatatcacagagagtctcaagattgctggagtcaaggcacttgactctgtggaaagaaatgtgaggcaggcgtctcgagctctgaagcaagggaagactttaattgtatccggtttagctgaatcaaagaaagaacatggcgttgaactgcttagtaagctggaagctggtatagatgagcttgaactgatagtacaggataggaatcgagatgcagttgcaccaaaacagaaagagcttcttcagtatgttggaggctgagatattcgagaggccatgattttctgcagtgttgaatagcactcagttgaaagctcctcatttgatatgctggaggaagaccaatctctgcctctattgaatgggagagcatcagtggatatgaaagtcaaggttaaagacaatccaaacctggatgaatgtgttttccacatcgttcttgatggttataatgcccctgtaactgctggaaattttgttgatttggtagaaaggcacttctatgatggcatggaaatccaaagagcggatgggtttgttgtccaaactggtgatcctgaaggtcctgctgagggttttattgatccaagtacagagaaaatcaggacaataccattagaaattacggtgaatggagaaaaggcacctgtttatggatcaactttagaggagcttggtctatacaaggctcaaacaaagcttccgtttaatgctttcggtacaatggcaatggcaagagatgaatttgaggacaactctgcctctagccagatattttggctattgaaagaaagtgagctaactcccagtaatgccaatatattggatggtcgatatgccgtctttggctatgtaacagaaaatgaggataacttggcagatctcaaagttggtgatgtcatagaatccattaaagtagtttctgggctggataatttggtaaatccaacctacaaaattgctggctagttctgtgtttttgctatcaaataccgcatgagtgtttattggcacttgcttcaaggctattcaggaatgctggctattacattgcaaagttcactccccctagtttgtttccattgctattggaaaagccattattcattttactagaacctagcattcagttaaacagcttgagattttattctgttttaagactattcaccaccccggcttgtaactttcattctaccaattcatgaataaaattatgattgttcagtgaggaaaaaaaaaaaaaaaaaaaaaaag

SEQ ID NO: 13030 - DNA, 291 bp, Glycine max
  Clone ID: PAT_MRT3847_111772C.1
aacccaaatcatgggccctcaaaacaaaaacttgggtaccaattaggaaccgattttaaacaatattacgcacaagtacactaacgagctaaacattctgaaattcccagggccctagtaaaagatattaccacagatctcttaagcccaagggatggttttccaaaaggcctaacctgagacccacgtttcttgggaaacttcttctatcaaagaccctgatgctaaacattgctaaattctgattaggaaacggtacctaaaatgggcttgcttaggacctattaaaag

SEQ ID NO: 13031 - DNA, 383 bp, Glycine max
  Clone ID: PAT_MRT3847_111773C.1
ctctctcacgcataactcaaacacaaaaaaatagagcttttgatgagaaaatacaccatccaaaatccatgatccaacaccatctactattattgttgttttgaggttgaaaaaacacaattgggtatatatagaactccaaaacctacgagaagaaaagaagacagtgatcaaaaaataaagtgaagcatggaaaaggacaacgagacgtatctgaagctcttttgggggcgttctaatcatgagaagtcatgtttgctgtcaaagaagggcaaaagcacggcacttagcaccaccgtgattttgctcgtttgctttgtaaccactttccttgttttgactatctggaatacgtccacatttgcagctctttccattccaat

SEQ ID NO: 13032 - DNA, 391 bp, Glycine max
  Clone ID: PAT_MRT3847_111774C.1
aaaaaaaaacaattttcctttggttggaaacaaataattccctagaggggttaacccaaaaaggggcgttggggaaaaaaaaaaaatcgggggggttgggggaaaactttttcctttaaaaattggaggaaacgttcatcaaaaatctggggttcaaccacggatattggcataggggcaaattgcagcgatttggatgcctgcccaattttttttctaaaattataggtcggcaatatatcaattacccccatgggggggacaacattttatacctcaaaaagctttactttttttgcccccaccttatccttatcctcctgaaccctggaagtagcttgagctggcatgtttactccaagctgcccccgcaaccttggaataccgggaa

SEQ ID NO: 13033 - DNA, 228 bp, Glycine max
  Clone ID: PAT_MRT3847_111775C.1
tattacctcattcactggcctcaaggcaagctcatacaaatttagtgccgcatttaaagtctcaactccccaagccacaaagtctttcatcaaagcttctctgaaagacattgaagtctctattgttgccactgtcgctattgcattgctcactatcaacgccatgaccattgaaatgttgctgtgtccttataacacttctcttagctttccttcccaacaatttct

SEQ ID NO: 13034 - DNA, 207 bp, Glycine max
  Clone ID: PAT_MRT3847_111776C.1
gtcaccttttattttacttacacaaaaaagactaggataagaacgaaaaaaaaagtgatcccccttttcttgtttgtcttatatccatatttatgcgagatacgaattacatcgtgcatcattgtaaacaacatgacacatgtaataacattacgttttctgcgtgaactcgaaaatgatgagggagttattgataatttgaaaaga

SEQ ID NO: 13035 - DNA, 249 bp, Glycine max
  Clone ID: PAT_MRT3847_111777C.1
ggctcgagagctaaactgaacaagaataatgagaaacactacatggaagatagaaagaacgcccaaattaaagctgaaagcccatataacaacatgggtacaatacaaaatatgtgagggcggctggcaattatttcgccagcacacccgataatgtttcaggaaacgcaacttctcagactcctagctttccgggtgagatctcgctttaatccaaggtgaagagctgtccattgccagaacttggga

SEQ ID NO: 13036 - DNA, 118 bp, Glycine max
  unsure (1)..(118): unsure at all n locations
  Clone ID: PAT_MRT3847_111778C.1
gggcngctgtctgcgcnagccacagacttgngatgaatatccatatgttagncgganatagccacgattcggancnccnttnacagcatgatnctcagnncgctctntccncgatgaa

SEQ ID NO: 13037 - DNA, 548 bp, Glycine max
  Clone ID: PAT_MRT3847_111779C.1
actcaaaaaaacacactttgatgttatttgattaccctaatcagggtggagcacacattatgttgtaacttcacaattacaaccttaggtcaaattctctagttattatttacaaccagataccatcttttacttaaaagagttgtgacaaatacgtttttgacaccaccaaaatgaagcttttgatttaaagagttatatttgaaatcctttattgaagatttagatgcgtgggctgcacacgaaaggccaatggtattttgaaatgggaatctcttccgctttgatctaaccaatcggccccttttatcgcacctacctctgccaaacattgttgccacaaaaaattatcctccctgttttcctcctccgagatctttttgtgactcctgagcatgctgaatacatccttctgggtgtaggagacactgaatataccagtttctaatgcttactctacagccataagctccttgtatttaatacagttgcttttatgtcccttgacatgccttacctcagaatgcttgctgacattttatcttttg

SEQ ID NO: 13038 - DNA, 838 bp, Glycine max
  Clone ID: PAT_MRT3847_11177C.1
agggtcttgatcgaagcacatgaactaattaaaagcatgccaatgaggccaaacatggctgtatttggatcctttcttgctgcatgcaagcttcacaaaaatatcaaacttggggaatgggcagcaaaacagtttctatcattggaaccccataaaagtgggtacaatgttctaatgtctaacatatatgcatcagcaaatagatggggtgatgttgcatatataaggagagctatgaaagatgagggaatcgttaaagaaccaggtgttagctccattgaagtgaatggattacttcatgaattcataatgggagatagggaacacccagatgctaaaaaagtttacgaaatgatcgatgagatgagagaaaaactagaagatgctggatacaccccagatgtatcttgtgttctgcataacatagacaaggaaaagaaagtaagtgcactcaactatcatagtgaaaaactggcaatggcatatggactgattagcacagctcctggtgttccaattagaattgtgaagaatcttagagtttgtgatgattgtcacaatgcaaccaagttactgtccaagatttatgggagggagatcatagtgagggaccgcaatcgttttcatcactttaaagaaggatcttgttcttgttgtgattattggtaagaaaaactatacaaacagaagagtgttctagacttgagttttcaaaaacatacaataggcagcatggaattgttcaaacatcacagataatgcagttgaagcattctaagagaggtggtcaaccatatatcttgtaacataaccgtatagtaaaatgtccattttattt

SEQ ID NO: 13039 - DNA, 507 bp, Glycine max
  Clone ID: PAT_MRT3847_111780C.1
ttctgtttctggtctctccacagagagttttttagcctattatagtctttttcagaaccatgagattgctctaatcgatcgtttcgtatgcaattaatcggctgcttgctatgcgctgaggactacatgattccgggctgattgggtcccgcaccctgtgaaaaggactcataggcgttctcgttcatcgaagaggggactcgcatctgcgacgccgccctggagtgagtccgggaggtaattctcacactcagcgcccaaacagagtaccttaatcgcttcgaacgtagactgctgcgcatcgaccgacaagccttccattccaagattccggtcttagcctacgacgacgtccagtctgagattcaatgcatcgcctatggcgaccgtttccgcatcactgtccgaataccccatctcctagttattcaccaggtaattacctgcttcaacacatttgcgaatttttatattccagacagagatcattgacatcaccatgagtta

SEQ ID NO: 13040 - DNA, 478 bp, Glycine max
  unsure (1)..(478): unsure at all n locations
  Clone ID: PAT_MRT3847_111781C.1
atttgaactcaggatgggtcaagagcgcatgcttccacattcggcgaaagaaagaggaagaactcacggctgaggacaggatcatcatcggcgttaagatcggtcgtctggatcccggcgttggagagaagggacagcagggcgagaagtgggaaagtcggcctggaggaatttggattctgaggagcaaccgcagacatgacagtgattcagacaaggctgtgacgagtgtggatgtgctgtttggctccgatgctgttgatcctaggcctggctggactctggcgcgaacaccgttgttgattgaagcggacaagaacatgctgactgcacgcctgtccacgcgacacggacagccgcaccccgatcacaaggagtttgtaccccgtgtgcgtaaagacggcaagttcaagattntgcaggtctcagatgcgcatctggctacaggtacgggtgtttgcagagatgcgatcgatgc

SEQ ID NO: 13041 - DNA, 776 bp, Glycine max
  Clone ID: PAT_MRT3847_111782C.1
gattttggctccagaaaaaatagtagtactattgtaacgttgtgacttgtagggagggaaatggagggaggtgacgttgggcattgggtgttggagttccttctccgggctcggtacccagtcgtttccagtaacctactcaagaaagtccttcgaatagtcccactttcagactttgattccaggcttcagaagacgcttcttctccgaacccttcaagaccacttgttcgctgtctctgtccccgaatccgttctcgaaaccctcgagctcctcgaggaacttcaccgccgcgacgacggcgctctgatcaccgccgccgccatgagcgccgcctactgcgccattgcggtggactgcactctcgagcacctgctggtggaactccacaacaaccctgcctacctcggcgccgtgaacaggatatggcgtggtagggttcggcacatgagcggttccagggagggcagccttcttctctcgctggagttggagcggtggagaaccgacatcgaaacttcccttctggactcgttggtgaggggagaggttggcctccattgatacaagaagggacgccgtcgtcaagctccgggattatttgatggaagcatggaccgatttgggcccttcgtttctcgagctagcggcgttggcgcaaataaacaaaaatgccctagccgtgaattacttagaggattcccaacagccggagagagaaattgagaagtgcactgctgctcctgctgaggaagtgcatacctcaacagatgccg

SEQ ID NO: 13042 - DNA, 244 bp, Glycine max
  Clone ID: PAT_MRT3847_111783C.1
acccgttacgttgaatgtaaagctttggacagccgtaaaagcaatcatgcgaactctttctccgattcagtattttaattttcccttttgagtcgaaggagaccagaaatgaagtgaatggggacatgagaaaaggagggaaggaagtggggcttgtgatgatgaaaaggaagaaaagatgtgaggtagtgatgggatgtgagagctagaaaacagggtgttaaatgtgcttcttgtttgtttg

SEQ ID NO: 13043 - DNA, 343 bp, Glycine max
  Clone ID: PAT_MRT3847_111784C.1
ggtgttctccatcatcattctcttcccaatgtgatgtagtagtcgtcgctccaaggtttgaaatgcggcatcgtcatccgcagccgaggcgatacattttccactttgactagtcgcgccttcaagtcacttcacccttttctattcgcagcaggtcggtcacctgcgctacgcctctcgttaaacgttccgggttcgcgatccactggcctcttgacagagagagaccaatgcagtttcgaaagagatacattctccaggtgaatgtcggttggagccacttgccgtgatgctgttgttgttgtagttggtgaccgatcaatgttgggtatggagaaggatt

SEQ ID NO: 13044 - DNA, 364 bp, Glycine max
  Clone ID: PAT_MRT3847_111785C.1
gagagccaacgtccaactgctactagaaactacttaattttttccgaggaaaagaaagatataggaaagttttataaaaacacagcgtcctatatttccttttctcttcttcgtaagaaagataaatcaaacaatacattgtcgttcgcttttttcctcgtcatatatctcttctcttttgtcttcatactctctgcttaccaacaatttaattaatattgatttgattgttgacctgcttcatatgcactcatacctaaatttgattcctttacacatcttttgcattcttaattgtgcttttatattccatattttaatcttaaattttcaattatttaattcttatgcttttatattcttt

SEQ ID NO: 13045 - DNA, 379 bp, Glycine max
  Clone ID: PAT_MRT3847_111786C.1
taaacacaatgaagaaaagagttttgctccatccatcttgagcttatcctgtgcctgacagtgctgctttgactcaataacctcatgaggaacttcaaggctgttggtcaagccatcactgctctcttcatcatctctctgagtgcatggtgttatggacaagtagaacttgacatggctccaatggagaaggcagagcgggatgctctatactccaccattcaaggctttgttggtgattggtggaatggctcagatctctatccagatccttgtggctggactcctattcagggggtctcttgtgatctgtttaatggattttggtatgttactgtcttgaacattggactaatccacgataattctctaagttgtg

SEQ ID NO: 13046 - DNA, 474 bp, Glycine max
  Clone ID: PAT_MRT3847_111787C.1
cccattcgtcctttaaaaaaaaaaaaaaaaaaaaaaaaaaaaaaaaaaaaaaaaaaaaaaaaaaaaaaaaaataaaaaaaaaaaaaaaaaaaaaaaaagaaaaaataaaaaaaaaaaaattaataaaaaaaaaaaaaaaaaaaaaaaaaaaaatggggggggtctttttaaaaattcaaattttaaaaaccttgcttttaacaaatttaatttttttttggggcacctaaatttaaatcagttggccgttttttaaaaaggttggaatggaaaaaactttggatcacccaactaaactgctttggaaaaaaaacccttttttgcaagttggaataaaaaaaaaagggcctggcgctaattccttttaaaaaactttccaattcttaaaggcaaaagggcccccccattatgtcgctcatataacttaggggggttggggggatacccccaacggaaacctttaattttgagggc

SEQ ID NO: 13047 - DNA, 192 bp, Glycine max
  Clone ID: PAT_MRT3847_111788C.1
accatatcaacaaaaaactaaacagcgacttagaaaattcattagactttcagaaactatagcttacattctgattctcttcatccgataagaaatcaatcaatggattgaatgagtttctgacttttaatgcttagaacatgcaaagcaacattaaaattatctattacagcctaacatttctatctataa

SEQ ID NO: 13048 - DNA, 290 bp, Glycine max
  Clone ID: PAT_MRT3847_111789C.1
gaagcaataagatgaaaatgaaagtgcttgttttgtttgttgctacagttttggtagcatatgaatgccatggctgagactaccagaagttgcgtgtccaaatgaaaactgggtttggtgggcaatacatcaatgaggtggcatgtgccagttggaggcttggcgtggaaacaaacaacgctttcaagtggcaaactggtcctgcagcttggggaaaggacataacttactaccgtctatgagaccaattttaatcagatttccaaacaggttaccaacaaggttatttt

SEQ ID NO: 13049 - DNA, 357 bp, Glycine max
  Clone ID: PAT_MRT3847_11178C.1
cccacgcgtccggctagctcggatctctctcgatccttggccatgacgaagcgcaccaagaaggctgggattgttggcaaatatggtactagatatggtgccagtttgcgaaagcaaattaagaagatggaagtgtcccagcatgcgaagtatttctgtgagttttgtggaaagtattctgtgaaaagaaaggcagtagggatttggggttgcaaagactgcgggaaggtgaaggctgggggtgcttatactctcaacactgcaagtgctgtcactgtgaggagcaccatccgtcgtctgagagaacaaactgaaagttgatcaagagaagcaactatatcagtgtccctagtttta

SEQ ID NO: 13050 - DNA, 1031 bp, Glycine max
  Clone ID: PAT_MRT3847_111791C.1
ggctcgaggttggattgggaaaggaagagaagagagtgtgttcggaaaccctaagcttcacgcatttggggaacctccttcctccactcgctcatgctcctcgcgtgactcgtcaacgacgataccccttttctttctttcactctcaaactcatcatcatcgatcatcgatcatcgatcatcgtcaccaccatcttcaatctcttctttcagtaccctttaaaccatcaagcagaaagctgttttcatcatggatatagatcttcggttaccttctggtgaacatgataaggaggatgaagaaacaactacaattgataacatgttggacagtgaagaaaaattgcataatggaggtatagatggcagaaatatagttgatgctggcattgaggtacatgctctaaatggtggagatttgaattcacccacagttgatattgtaatgtttaaggaagatacaaatcttgagccactttctggcatggaatttgagtctcatggagaagcttattcattttaccaagaatatgctcggtcgatgggattcaacactgcaatacaaaatagtcgtcgttcaaaaacatcaagagaatttatagatgcaaagtttgcttgttcccgatatggaacaaagcgagagtatgacaaatcatttaatcgcccacgtgcacgacagaacaagcaagattctgaaaattcaactggtcgaagatcttgttcaaagactgattgtaaagcaagcatgcatgtaaaaagaaggtcagatggaaaatgggttatacatagctttgtgaaggagcataatcatgagcttttaccagcccaagcagttagtgaacaaacaagacgaatgtatgctgcgatggctaggcagtttgctgaatacaaaactgtggtcggtctcaagaatgaaaagaatccattttgataaaggtcggaatttgggcctggagtcaggggaggctaaactcatgcttgattttttcatacagatgcaaaacatgaattctaacttcttttatgcagta

SEQ ID NO: 13051 - DNA, 1095 bp, Glycine max
  Clone ID: PAT_MRT3847_111792C.1
tcacgcgtgcgccacgcgtccgaatttatgcatgatggagggtcttgatgtcaattttctatctgcacctgctccagtgtcaacaaattcagttcagaaagatgaagtacacgcacaggttgaaatagatggcaaggtctttggtaaaggtattggattaacatgggatgaggctaaaatgcaggctgccgagaaggcacttggaagtctaagatcaaagcttggccaaagcattcagaaacggcagagctctcccaggccacatcagggattttcaaataaacgtttaaagcaagaataccctcgaccaatgcagcggatgccctcatcagctagatatcccaggaatgctccaccaattccttgaaaagagtgctgggcttttcaatctcgcatactgataagactgttgttggggcatatgtatatgttactgattcagcaatacggagaatgacttttgggttggaccatttccgtttaagtgggtgcttggcctcagtcaccttgtcactgagccaaaaagccaaagtagaacacccactttttgtaccaatatgagttcctcactgaagtggggtgccatactggtcaaagatgttgtaacatactcacatcttggtcctcccaagcaatgcagtattggttgtgtatcctggaaatgctgagacaccggtttcacaagacaagatgatgaggcaagtccaatgctaacttgcatttctgtggtttatatacatgatgcagcatacttagagttaccttattggaattgagaattgattcagcgtttttctaactcatgtaatggtacaatgatttagtacaggttttcttttcttttttatgcatggaagtcggttttcactaacccaaccggcttatagttttttattgaactaattctgtcaccatttgcccctctgaagactctgttatttgcagagtcttgaggttggtgaatttgcatagtattgtaactcactgatgatgtaatacactcctcaattgttattatctgtgaattttgttcccatatcttatgttgagagttgtggtgcaataaacatctttctcaaaagagaaatgttattt

SEQ ID NO: 13052 - DNA, 344 bp, Glycine max
  Clone ID: PAT_MRT3847_111793C.1
cattcgaattcattttatttatatattaatatgatatgcaaatgaaataaaaagatattaaaagatactaattataagaatgtgaaagtgaaattatcaagttattaaacgattaatgaatttgtatctaccggatcctgtagtaaaaagagttacatctgatcgtgagtagcttgcttcaaaaggacttcgggttccccagtgaatgccttggaagaagatatgattatctttgaattgacgattattcgcgtataagtaagcgcgttactcaccaagaaattgccttacctgcccaattgctaatgaatcaagataaccattgcgtccactataaatagtta

SEQ ID NO: 13053 - DNA, 468 bp, Glycine max
  Clone ID: PAT_MRT3847_111794C.1
cccacgcgtccgaaaagagtaccaaacttttcaatctcgcacactgatatatgactgttgttggggcatatgtatatggtactgattcaacaatacagagaatggcttttgggttggaccatttccatttaagtgggtgcttggcctcagtcaccttgtcacccagccaaaatagaacacccactttttgtaccaatatgagttcctcattgaagtggggtttccgtactggtcaaaaatgttgtaacatactcgcatcttggtcctccctagcaatgcagtatcggttgtctgtatcctggaaatgctatgagaccggtttcacaagcaagatgatgaggcaagtccaatgctaacttgcatttctgtggtttatatacatgatgcagcatactcaagagtaaccttattggaattgagaattgattcaacgtttttctaactcaattaatggtgcaatgacgattt

SEQ ID NO: 13054 - DNA, 798 bp, Glycine max
  unsure (1)..(798): unsure at all n locations
  Clone ID: PAT_MRT3847_111795C.1
cttgatgcctgaggtttgtcctatgtgacgatgcttgtgttgtgcacttgtgctgacagatactatcatttatatgactggtgattggtatttggtttgcatttccttatatttgtcaattgaaattctgtgaacaggctgggaatttcatacccagaactgactgagatgcaggcccgtgcaatctttcaggctgctgtttcagtgagtaaccatggtattacagttcttccggagataatggttccacttatcggtacacctcaggtatggtcctttttcttacttatttcttctcttgtttgtgtcttttaatttgtttcaaatgcatctaatcatgtatgcatgtataatttaggattacctaagtttttagttcttaaacttttttgaaattcaatttttaatccctaaacttttgtttgaccggttaaagtctctcaacctttttctattaaggtttagttcctaagcttttgtttgactgatcaatgtcctcaacttttttccattaaggttttcagtcccaaaacttttgaaaactcagtttttagtcttgcaaatctcattaaataaataaaaataataggttcaaacttgtgttcagggattaaactaaaatttctaaaagtttaaggatcttgaccagttaaacaaaagtttaggaattaaaaacttaatttcaaaaatgtttagggactaaaaacttagttaacactataatttatgagtcaaatctcagttaatgttatacttagagacattgccttgnattcctttttccttaactgnatctct

SEQ ID NO: 13055 - DNA, 474 bp, Glycine max
  Clone ID: PAT_MRT3847_111796C.1
gaattcggcacgaggcggagggaatattttcagagcacgaatggaatgaagctgagattttattcgagttgaaatgtcctgcaccaagttctgtagaagcaatgtgggcccacaacatttccatggaaattatagactggactctaattggtgtctacaatcaaggaaacattaaggatgatattaaattcaaaatgccgatgtcaacttttttactccctaacagagaacctccttcattacctggttgtttgtactatgttgttagtcatgtgaccgataagcttgtattggtggtagacgatggaagggagaaggatgaacaggaagagaaaattattggataaatgaccattttagtctcttaatatgtacatctgtaacaatttagtcttcgaaagaatacaaatcctgttttagttcttgaatgtataagaaatgtgacaatctgagaaatggacacagttttagagt

SEQ ID NO: 13056 - DNA, 349 bp, Glycine max
  Clone ID: PAT_MRT3847_111797C.1
tacggctgcgagaagacgacagaaggggtcgtcgtccatttttctggctcgggatagaaaaggatataagtggctaaaaaggtcttatgctggagcttggcggcatcagagaggaataaggctacaacatgcaagatggatgcagggctttgacatttgaagggcaaagcaaaatcgtttaagccaaccaagaggaaccttacctaggttaaatcataccaaattcttttgaactacaccctcttctataaaatcctgtctacacagctaggtacaccatcatagacttcgctggtaggagattatgcttaggagccatatgtgacaagcctgttatactggtcatgac

SEQ ID NO: 13057 - DNA, 213 bp, Glycine max
  Clone ID: PAT_MRT3847_111798C.1
cataccttaaaatgtgtaggtacagaaagaacacatactagtactcataaaacggggggatttctttccaactataccggaatagtgggcccgaattgggtctgagggattgagctttacagaaaatctgagctgttaaagcacacaaaaccagctgcttgcaaaagtcccttaccaatagtgttggaacccctccaagataaggcggtccct

SEQ ID NO: 13058 - DNA, 390 bp, Glycine max
  Clone ID: PAT_MRT3847_111799C.1
gactattatgttttatttttttttttaatgaaaaaactagccccactatgcttctcggaaatgagttgacaaatacctcaccaccatcaataccccaatacaccagcgcaaaactctctggctcgccgaggacaggcaatcacattcccctgggtgaacccttctccttcatgcttaatatttaggtatatatggtctccccacgtcaattgagtcttcccttaacacttcaccataaacacccatataatcattgctctaaaggctcaaaagaatcagatccccacattttaaacttatccaacctaataaccagttgaatctggtagattatgcctggcttttcccagggacctctatcagccaattatcatacaaaattctcagccc

SEQ ID NO: 13059 - DNA, 492 bp, Glycine max
  Clone ID: PAT_MRT3847_11179C.1
ctcatgtgaacaaaggtcaaactgttgctgagaatgcttatgagctatctaataatcatgagagacagatacctgttgagaatgaaggcaatgtagaatcacattttcagtcaaatggtaatgatgattctcaggccacagaactggcttcatcagctcaagacgatgctccaaagaagtcttatgcatcaattgtgaaagtccaaaaagggagttcagttccaactaaagtctatgtgcctactaatacactaaagtctgggcctaacaaaactgagagcaaggtagttgagtcagtagaatctactgaagtgtctgaagcagctttggatagtgttaacaaccctgaaagtagtgatgctcatgaggaagttgaggggcactccatttacattcgaaatttgcctttaaatgtgacggctgctcagttggaactggagtttaagaaatttgggcccatcaagccaggaggcatccaagtcagaaataata

SEQ ID NO: 13060 - DNA, 1054 bp, Glycine max
  Clone ID: PAT_MRT3847_1117C.1
cgggggcatttgagaattgacaatctctcttattaatcaccaccaccacctccggcgaacattacctccgaattccggcgacgccacgcttctgacaccgttgtgtttcagcgagggcaaggtgcttgaacatctgatttgtttgcaaaatggtttcctttgagatgaatgatcgaaagaagattggattagggttaactggctttggtatatttttctcattcctcggaattatcttcttcttcgacaagggattgctagccatgggaaatgtcctgtttgtttctggagtgtccataaccattgggctaaaatccactatgcaattcttcatgaaacgaagtaatttcaagggaacaatctcatttggtgttgggttctttattctcatcatgggatggcctattgtgggcatgattgttgaggcttacggattcgtcgttctattcagtggtttctggcctacgctggctgttttcttacagaagattcctgttcttggttggttgtttcaacaaccatttgttcgatcgttgtttgaccgctatagaggcaagcgaatgcccgtgtaacacaagaatctatgaaaacataatgtaactggtagcaactgcatttgtaagtcaatgtaaagaaaatactcgtatggatatctaactgatttgagttcactttttgatggtagaaaatgattatcattttatcatggtagtcatttagtggaaaggaaatttgcaaaagaaaaaatgtttcagttttcactttactttgcttggtggaaaatcaatagatatggggagtggttagttccatcttcgtgactattccaatcagagacctttgggagttgtccccgccaagtataatggtggcttttgttcaaacttgtaaaaggagtataatggttttacattacatgatgtcattgcagcaatatagttagagaactactttctttcttccatattttttttctccgtatctttatgctgctaatgtgagatggaatcggtggaactctgcaatgtaacttgctctaaatattttaccattt

SEQ ID NO: 13061 - DNA, 381 bp, Glycine max
  Clone ID: PAT_MRT3847_111800C.1
ttgcatcacggttttattttgttctccctcagaacgaaggcggccagcgattgactcgctttttatcaaactgcttctcattattacaaaggggccacaaggctataattccacctggtgttatagcactagctattaatggttagtgatttaaagcaaatgtatttacccgtttagataatattttccctcgggaccaataaagggactaattaaacccatgtttttataataaattcggtcccccgattgcatcgggggcaatcgcctacaaaaagatggccgggatttcataaagagccgggtaaatgtttgcatgggttatttatccctattccaaaacaatctttattacataaaataccctaaaggattgggttt

SEQ ID NO: 13062 - DNA, 668 bp, Glycine max
  Clone ID: PAT_MRT3847_111801C.1
agctcggaatacggctcgagctcttcaccatttggcggcgcctttctgctttaattagcattgttattgcctttctctactctgctctcatgagggcaggagactttaatctcactttgctcggaactgcgagaaaacctgcttccgcaaggattgacgacccgcgacgaataccaaagactatcaacctcagggctctcgaccttagcgtagaatatctttattgtggattttgtcttctgcggcatacatcagcatcgatacctcgaaacagcgacctcataatctaatgcgatcaatattcggtatgcgcaatctttccctacatctactggccggtcttacagatcgaggcccatcatccattacctgaccggtatgccagatgcttgattttgtgtcaggcactggttcacatcacttgctagggatatcctcggcgcggtatctccattggcgccaagctgtacaatattggtcgaccatcagatatgcttgggtatcattcgaccagtcggagttgatggatcagaaattgttccgtatcagcttgcggaacatccagcttgctgggaggaaaatatgcaagggtcaatcaatcaatcccggtagattagctaagaaagatagccacaacaaaatgaaacccccaaagttgagacactctc

SEQ ID NO: 13063 - DNA, 409 bp, Glycine max
  Clone ID: PAT_MRT3847_111802C.1
cccacgcgtccgttattgaaactattatattagctgaaaaatgatcagcaatctactgcagttgaatcaaaaaaaaaaaaaaaaaaaaaaaaaaaaaaaaaaaaaaaaaaaaaaaaaaaaaaaaaaaaaaaaaaaaaacaaacaaaaaaaaaaaaaagtgcgagctcttaagtaagaaaaaatctaaacccactcacgatggccgctaaaattttacttctgggaatgcgtttaccatgccctttccaaaaaaaatataaggggtacacactaaaaaatctcgggcgtaaccaaattaaacaagcctcctgcaaatccttatatatgcgcccactataaaccttaaaaagagaggagccccccccttttctaaatgaaaaacccctctggttatgcaaataaacccccc

SEQ ID NO: 13064 - DNA, 219 bp, Glycine max
  Clone ID: PAT_MRT3847_111803C.1
ttttttttttttctttttttttttttttaagaaatccccatataagcgattattttactaaaaagtatttttcaaatggaagatcatttaaactctaatattgcttttttcacttacaaaaacctgattcataaaacaacactttctcttacctaccaaaaaaaaacttattgataccttccttcccctttacaaattatccccaattaaacccctttt

SEQ ID NO: 13065 - DNA, 443 bp, Glycine max
  Clone ID: PAT_MRT3847_111804C.1
gggggcaaaaaaaaaatttgcgccaaattaaaaatttctttaaggaaaaaaaaaagggttaaaacaactgcctttattctcaaaaagataaaacattggggggaaccaaaaattcaatcttcccctggggttaaaccaacaattaaaactggtaaaaattttatgaaaagcatttaaaaattgaaaaaaaaaaatcttcactatttccaccaaaattaggaaaaaaaaaaataacttacccccttgggggtggtggccccgggtaaaaattggggagttggatgggaaaaaaccattctgaaaaaaccttttgccaaaaaattttttataggctttcttggaaaccaagcattcgaggaaggggggggttacccgggaaattcggaccgggacctggagggggaccaatttttcctaaagggaggtgctttaaaacctggggt

SEQ ID NO: 13066 - DNA, 365 bp, Glycine max
  Clone ID: PAT_MRT3847_111805C.1
tgatactaaatacacgcttatgggaatttgtatgatatccgctgtaacctttccctgagggcttagaggggttggatgtctgatcttaatgatcaactgagacatttgataggaaattaagaccacaaaatattttttgattaggacatcatttattgatgagttgacaactgaccacttgttccctatttctccagcagaaccagtgaggacctgaaaggctccgattatctccattgactgtacaaattcttggaggaacttgttgtgatcaaccagttttttatctttgtcttatgattgctcttgcgttagaagggctgacttctgactgcaataggcccttcttctggacaaggcttgga

SEQ ID NO: 13067 - DNA, 872 bp, Glycine max
  Clone ID: PAT_MRT3847_111806C.1
acggctgctgcatttacaaagaaaaaagcacacatgggaggttgtttttcttctaagccatccttcacaatcaacaatgttcgtttggttcatctgagtggctatgtggaggattttgagaatccaatttcagtgagccaagtcacaggcacccctccaaagcactttgtttgtacctcagttcagcttctttcctcttgctcaaagccattgaatggagacacacaactccaaccagggaatgtgtacttcatgctaccatactcaatccttcaagctgatgtttctcctgtggacttggcttcccttgctaagaggctcactgcaatagccaaaactagaagcaggaggcttgagggcaaaaagtcttcttccctcaaagatggttccttttcaagcaatgtttggagttcaccttcaaggagtcctggcaggcttggtggtgtggttgagcaaattggcatgccatatggagggccaagcccgtgtcgagtgcgtccgtggaagcctatcttggacaccatcagagagaagtctttcaatcggagaagcgagtcagatttgcaagaacacaattgatgtttcaaagaccttggatggaggtagcactagaaaggaagaaggcatgttaggtggtttggtgtatctttttttactagggaaaaaaagtgaaatttgagacaattgctcttgaaaatttattgtgtatagttcttctattttgtatttatgaatgttcctcaaggcatgatccaaatgattaagcacttggtatttcagtttgcagatttcataaacaatctttggtctaagcaacctaatgggtatttcaaatatgtgtcttataattaaaattaatgaagcagtcccat

SEQ ID NO: 13068 - DNA, 162 bp, Glycine max
  unsure (1)..(162): unsure at all n locations
  Clone ID: PAT_MRT3847_111807C.1
gcaatttgtaatcagggaggttctgttgtaggtggataaccatggcttcgtcttccagcttctcctcgaccgagcgccgncgcggaacattcgaagaggatattaggggttatgggcgcacgcgananaaacggaaggacagcttcattcaanttctncgcc

SEQ ID NO: 13069 - DNA, 156 bp, Glycine max
  Clone ID: PAT_MRT3847_111808C.1
gccacgcgtgcgctgacacctacaccatcgccaggcgccagcttaagaggatggcttagcggggggcaacctctgtgatcttcacaccttcatgcactggctcttgctcatgaccattgtatatgctgccgactgcttgatagcatgaccctaagc

SEQ ID NO: 13070 - DNA, 440 bp, Glycine max
  unsure (1)..(440): unsure at all n locations
  Clone ID: PAT_MRT3847_111809C.1
acctggcggcgctgttggccttcaaatccgctctccgggagtccaacgacggcatattcaacacgtggaccggcaccgactgctgccacaactggtacggcatctcctgcgaccgcaacacccaccgcgtcgccgagatcagcctccgcgccggtcccgtctacaccaccttcgagaagcccttccgtcctggctacatgtccggttccatctcgccggagatttgcaagctcactcacctctccagcatcatcatcaccgattggcagggaatctccggcgagatcccgcgctgcatcacctccctcttcttcctccgcatcatcgacctcaccggaaaccgcatcgccggcactctcccctccaacantcgaagacttcgccatctgactcttctcagcgccgccgataacgtcatcgccggcataatcccgccgtcg

SEQ ID NO: 13071 - DNA, 430 bp, Glycine max
  Clone ID: PAT_MRT3847_11180C.1
gcgagtttcacgccaacatagatagatccttgcgccgttacaccacgctttctaaaacaccactctctgttattcctctttcacacatgatggagcccagcaaacaccaccaacgccaccagaacaagaccaagaaaaagtggttcctcccactaatcctctccctcctcatatccaccttcctcatcctcctctccgtcatcgtttcctccaactcaccctcccagcggtggcaccaccatcaccgagccccagtcccaaaggaagtggtgccccgtttcgtcgagtccaagctgaagataagtcccacatcgacccacttggttccgagaatcgcgtatttaatctcgggctcaatgggagacggtgaaagtctcaaaaggacgctgaaggctctgtaccatccgtggaaccactacgcagtgcactt

SEQ ID NO: 13072 - DNA, 560 bp, Glycine max
  Clone ID: PAT_MRT3847_111810C.1
cctcgtgccgaattcggcacgaggtgttagtgagaaacttctaggaacggtcgagacctgatgaagggcgaaacagacggagtgaggaagaggatagaacgatggtagacgtctttgacctcgccattgctgtagtggtgttctgtcgccatctcgagcgccaccgcacaggtctcacgtgcccgatctcctcaatcatgagttcagctcttctttgtttacgtcaacgcacggcctcaatcgcccatacatgtcatttgggttcatcccaagaacaagtgctcctcgtggattaacgaagacgacgacatcgaagccagttgggaccaaacctcgagtgacaactacgcattccctacccctagagcccctcaagaacctcacgctctccatggacgcagtgtttggttttctacgaacgaagaaatcaacagtggaatagactcgaacaaatggtgcgcacacagttttggatctattatgaatatattttatttggagatggcccttttttatcaatcacaggcagagaagacaataaaaagaagacttaatagttg

SEQ ID NO: 13073 - DNA, 544 bp, Glycine max
  Clone ID: PAT_MRT3847_111811C.1
cttggggggtgtttctttatgaaaaatgtgtacttaagtcttagcatgtccctcggattattttttttcgtggatgtttaactactcattaacggaacttttgagttaaacttatatgtctaaaaattatactatttttaaaaataaatatataataaatatatacgtggggggtaataaaatattatactatcatccaataaaattctatcaattagctatatagcatgcttgctgaaaaacatatcttaaataaaagataataagactcttaaatttaataaataatatctattaaacgacattttagcttaataaatatcactttacataatataatataatatctatattaatgctacttgagttaatatacatattataaaatatatctttaattttaataaaatacctttcaattctactatcttaagtataaataaggctaactccaaaacgaagccgtcgcaactctagtgaattcagatattccgaccatttttaaatcattagcatactcgcctaacggacaccaattgcattg

SEQ ID NO: 13074 - DNA, 584 bp, Glycine max
  unsure (1)..(584): unsure at all n locations
  Clone ID: PAT_MRT3847_111812C.1
acgaggccgaacggcgatgtcggcgtggacggaatggtgataagtttggccaccgttctcgccggcgcggtaacgaacccgttcgggaacgggtactaccaagggtcggcgacggcgccgttggagccggtgtcggcgtgtcccgggctattcggaaaaggtgcgtatccgggctacacgggtaacgttttggtggataacgtaacgggagctagctacaacgcgttggatgtgcacggtcgcaagtttctcttaccggcgatgtggaaccccgtcacatctacatgcaaaacgctcgtttgatagtttgatatttatctctctctgagcgtgaccaaaaagaaatgtttcttggctttttgaagaggatattgatttattctacatattcaatatttagtattgttattatcatgtttacaagataaataaaaattacaattgatttaggatccacattagttgtgtttttctctctttgataaggcaatgtcttgttgcataatcaagatgcttgaggtgctttttgtttggtgagatgtctgtattctgtaatactaattcaattttgatagcnnnnnana

SEQ ID NO: 13075 - DNA, 562 bp, Glycine max
  Clone ID: PAT_MRT3847_111813C.1
ctaagaaaccaagcactagccctgggtgcatttggtagatagtcttaatgctcatcaagtagctgattagacaacttgtctactagctcactgactaccagtgcaagaactgccttacctgtcagaaagtatggcttcttgatcatccatagtcacctggctctaaacttttatcatcggatttacatcaaggctaatgccctaaaacatgatatggacggagaaacaagcggatctttaggacgtacctgggatctctgtactggaaatggaagacccttgagagcagatgccggcgaacgagtactcatctctataggatcaaaacctgtattcgcggggtgcactacggccgatatcgttgttacttagccttggagagttctggctgacactatttacacattcttcgagagggccattgtgcacctgcgacgctatactgcttcgaaagagcctctaagagttatactagctgtaggaacacgaacactcttacttgagactctgatagtcttgaagatatatctactgtagagttatggtgtggatagacttccat

SEQ ID NO: 13076 - DNA, 453 bp, Glycine max
  Clone ID: PAT_MRT3847_111814C.1
gaggaatctttgacagtttggtcaactcaggtgcgagccgcaacgactctgttgactgatgggtgcccatatctgtatgctatggtgcatgataggtcagtgtctacaataccaggcgattttgccattggtggtaagcagacaaccataaacaatatgtgtgcatatcggctcaatgatggtatttcaggatctcgaattttggacaccattcctaaggccatgtcacagcaaactgggtggaatcaaatggcaacagtgagaacaccattgaatgttgattctagcaagcagagctttagccaattttgtattgaccatctccgtggaggaattctagtggacaaaactggataatggatcacacttatacaaaaacctgcacttagcaactggttgagaggcgctgcttggaagaaaggttgtataatggtcaagaatgtgatgtctggg

SEQ ID NO: 13077 - DNA, 328 bp, Glycine max
  Clone ID: PAT_MRT3847_111815C.1
gagtaagagcaggttgtaatttctaatggaccgtaagggttgtgaaacaagcaggaaaaagccatggtgcacgtttctttcaaggagattgatgagaacaccatcaaggatcttcggcggcactagcatcatgtatctatgcgtaccttcttcacttcggctcctcactagcatcgtcctctccatagggaattattaagtgtccaataaaccccttcgcatcatctgtagaactcctataggacaattgcaccgtgtttcacaaaacctgcaccgattcttctgcggtgacgctcttcacctatgaatgattcgtctcggtatcttc

SEQ ID NO: 13078 - DNA, 343 bp, Glycine max
  Clone ID: PAT_MRT3847_111816C.1
ggctcgagactaaattgttcaatgcttggcttttccaaaaagagagttagggcctatgtgggagggcgcccgtagaggccctttttaccacatacaaatgcttcacgacatatggatgctccattgactacgacctttagatatgcaccaccaaactgcgataaacgtattcatacagttcctctcagagcagaaaggacgtctaccaattactctaagaacggctattttcgttcacggtgaaacggactgggtcagcgataacttatgcacacaaaacggattttaagataaagaaacccgtttggacaaagggttgaaaggctcgtgctcggaaaatgag

SEQ ID NO: 13079 - DNA, 393 bp, Glycine max
  unsure (1)..(393): unsure at all n locations
  Clone ID: PAT_MRT3847_111817C.1
tcgngttctcgtgggaataaagaaaacacttgtattggtggtgcttaggagaaactaagaactaccaaggttaagagtttgacagccaagggaaaagagaatgtttcaaggaatgtggcggtaaatcagaaatgcatttcaagaggtgcttctgcagggggccttgttagaagtcatagaactacagaacacaatcatccacagaagggtgacaaagcaggatcaactgctttgacaattgtgggaagagataacgatcaacatgaggcaaagaaccaaattaatcttgccaaaagcatttacctacgttagaggagcacagctgcgtgctcgttttagtttttcttttaggtgataaaaaaaattagaccatgtcacatgcctcaatgaagc

SEQ ID NO: 13080 - DNA, 430 bp, Glycine max
  Clone ID: PAT_MRT3847_111818C.1
tctggtcacgggccgaccgcaatcggtcactggatacgattccttctggtctcatcacgggctcaggtgggctactgcctggaacagcgttctgctctacgtgaagggtggcgcggctgtggtcggcgataagtttgacatctacataaaaaagaaaaaacacaagagaaaaaggaagtaagatcaaaaccaatggtcaacaaaagggggagaaaaagggtgcgaagagagcagaaggagaaaaaaaaatagaaaaaaggagaaatgatataaaatagaaaaatacaaattaaagtggtggggagaaaaggatagaaaaaagaaggaagaactgaaggagaatggttctcagggaaagaaacgataatagaaaaaaatacttaatacactgtaagagaaataaaaggtaaggtgatcaagggaggaatag

SEQ ID NO: 13081 - DNA, 1457 bp, Glycine max
  Clone ID: PAT_MRT3847_111819C.1
cggctcgagattatggacaacttcaaatttcagatggtaacaaagatctaaaaattggtaaagttcggatccggatctcaaccctggaagctggtcgtgtttacacaaacgcttacccattactagtcctacatccttcaggtgtcaagaagatgggtgagttgcacttggccattagattctcctgttcctcaatggttgactgggatgccaaggcataccaagcctcatctgatgaaaatgcactatagaattccccttgttgtgcgatggttaggggaagtgtccacatggaagcatcctataacaacagtgctggtgcacattctttttctgatgcttgtatgtttgcctgaacttattctgccaactgtatttctatacatgtttgtcatcagcatgtggaattggaggttccggccgaggtgccctcctcacatgaacaccagactctcctatgcagaaggggtgaccccagatgagcttgatgaggaatttgacacattccccagctcaaagagccctgacattctacgttggaggtacgaccggttaagaactgtggctgggaggattcagagtgttgtaggagatttagctactcaaggagagaggatccaagctcttgtgaattggcgtgatcctcgtgcctccgccatgttcatggtattctgctttgtggctgctatagtgttgtatgtcacacccttccaactgcctattcttctgactggattttacttgatgaggcaccccatgcttcggagcaaggtgccgcctgctccggtgaatttcttccgtaggttgccttctctcacagacagcatgctgtaaatggatactcttgtgtgttctagaatcttgaaaacttatctgctgctgccagtgtttgaattaatttttggtagtggttgtagaatcattggcgctatctcactttgtgttgtttattaagtgttgaccgttggtgcaactgtatacttagtttggtaaactccaatgtagttttcatgttaattaatcagcgtttgtgagcttgtgttctatacttgtcttgaaaacttatctgctgctgccagtgtttgaatctggcattagtttttggcagtggttgtagaatcattggagctatctcactttgtgttggtttattgagtgttgactgttgatgcaactgtatacttagtgtggtaaaactccaatgtagttttcatgttaatcagcgtttgtgaacttatgttctatgcttgaatggctcgtgactatgttaaatgatctgtctaagctcttaagtgactaagaaaattgtatttctaagaggagtactgaaatgatctttgggctcaatttgtcactccttaaaacatgagggtataatatttagagatgagtattgtaattatatgaatcccggcccaaaaaaagggcggccccagaggagtagctctcgacccggg

SEQ ID NO: 13082 - DNA, 1040 bp, Glycine max
  unsure (1)..(1040): unsure at all n locations
  Clone ID: PAT_MRT3847_11181C.1
ccggaatgcccggggtctacccgctcctccgtgatgatgttgaggatcattgtgaaaaggtggatgcacatttggaagttcagaaggagacggatgctgctcctctacttgactgtaaagagacgcagcagggatctgttgattggaaaattgatgagaggccgattgaggaagtaatggtgctgagtgagctgaggaaggtgacagtgctctacgagcttctctctgcttgtctatcagatttaggtgaaaataacaagaaatttagccggaggagaaagggctatgatgctcgacaacgtgtcactctgcggctgctggcaacttggcttgatatcaagtgggcaaaaatggaggccattgagacaatagttgctagttctgcaatggcttttattaaagagcaagaggcaagtaaagaagaaactcaatcaaaagaagacaagtgggctaaatggaagcggggtggtatcattggtgctgctgcattaactgggggaactttgatggctattactggtgggttagctgcaccagcaattgctgcaggtcttggtgctttagctccaactttgggtactctgatccctgtaattggtgcaagtggatttgctgcggctgctagtgctgcaggaactgttgctggttctgttgctgttgctgcatcatttggagctgctggagctggacttactggaagcaaaatggctaggagagttgggggtgttgatgagtttgaattcaaggctataggagaaaaccataaccaaggcaggctaggggttgagatcctagtctcaggatttgtctttgagaaggaagattttataaggccatgggaaggacagaatgacaacttggagagttaggtatgcgctgcagtgggagtccgagaatctgattgctgtgagcanctgcattcaagattggcttacttcaaaacttgcgatggagctgatgaaacgaggggcaatgatgactgttttgagctcactcttaactgcattggcttggccagctgcattactggcagcaactgg

SEQ ID NO: 13083 - DNA, 981 bp, Glycine max
  Clone ID: PAT_MRT3847_111820C.1
caaatcttcccacgtaacaccaatacacgaacgctggccctcctgccacgtcagccatcacaagtactttccgtaatcaacgagaacttcccaatctacccccactccccctccaaattcaccaacccaccctcccctcatataaaaaagataaaacgcagaacgcacaacactcccgagggaccctaatacccatttcggtaataacacaatcgcaatccgttactcactctcttccatggcgacggggttactgaagagggcggcgcagcgtgtcccctcctcgctggtgttcaagctggccattctctaggcctacatgtcggaggtacaggcccagcaggtggagcccaaggcccgtgaaagcccaacccgcaaaatcccaaccctcaaaaccttccaaatctatcgctggaaccccaaaaacccttcaaagcacaaggtcaaggactaccagatcaacctaaaggagggtgggccgatggtcctcgatgcgctcaacaacatccagaataagattgacccgagcctcacgttccgccgctcatgccgcgaggggatctgcggctcctgcgcaatgaacatcgacgactacaacaacattgcgtgcctcaccaagatccccttggaaaaaaactccgccgccatgacgatcactcctctgccacacatgttcgtgatcaaggacctggttatggacatgacgaacttctacacaaatttaagagaagttatgatatgtgctaccatacttgtttattgtagttatagatggtttcacattcctggaattgtaataagatttttcttaacttttaatttgtcttctctttgctgatgtgtattgtgttccttctgtaggtcctccataaaattaatcactcaaatatcataaagttgaaagaggtcttagagaaaataatgaactatttttcatttttgaatacatggtaaagaaaaatctaatttatcatttttttt

SEQ ID NO: 13084 - DNA, 740 bp, Glycine max
  Clone ID: PAT_MRT3847_111821C.1
cggctcgagataatggacaacttcaaaattcagatggtaacaaagatctaaaaattggtaaagttcggatccggatctcaaccctggaagctggtcgtgtttacacaaacgcttacccattactagtcctacatccttcaggtgtcaagaagatgggtgagttgcacttggccattagattctcctgttcctcaatggttgacttgatgcaacagtatttcaagcctcacttgccaaaaatgcactataagaggccacttaacttaatggaacaggaaaagctgcgacaccaagcggtcaatgttgttgctgctcgacttagtagggcggaacccccgcttagaaaggaggtagttgaatacatgtgtgacacagattctcatctctggagtatgaggcgcagcaaggcgaacttctaccgtctgatgacagtgttttctggaattctctcggtggtaagatggttaggggaagtttccacatggaagcatcctataacaacagtgctggtgcacattctttttctgatgcttgtgtgtttccctgaacttatactgccaaccgtgtttctatacatgtttgtcatcggcatgtggaattggaggttccggccaaggtgccctcctcacatgaacatcagactctcctatgcagaaagggtgaccccggatgagcttgacgaggaatttgacacattccccacctcaaagagccccgacattctacgttggaggtatgat

SEQ ID NO: 13085 - DNA, 387 bp, Glycine max
  Clone ID: PAT_MRT3847_111822C.1
aaaggtccaaaacccccctaattaaaggatatacctggcaacttattccaaaaaattccaggatagggccataacagggaaatcaaaaaacaaggggggctggaaaggccaaaatctaaaagacaagacccagggaaggatctatcctctgcaaggaacggagtccttgaaaggacttcaaattctaggggggggacattttaaaaataaataaataataaataaggggttccccttttactaagaaggggggggaaggggaaaaaaattgaaggggtcaggaggggcttccactttttaagcaaaatggacaacaaaccctttttaggggaccccctaaaagtattgccaggtataaagggggaacaaagcataggcaccaaaatt

SEQ ID NO: 13086 - DNA, 383 bp, Glycine max
  Clone ID: PAT_MRT3847_111823C.1
gggaaaaaaaccccccgggaaaccggaaagggggggccggtaaaaaaaccatgggtttttcaaaggggggccgggccccacccgggggggcctaaaaatggcccaaaaaaaaacctttacaaaaaaaaaaattggggcaaaaaggcccaaaacccccaggggggaaaaccccaggggtttggggcccctggaaacccccttaaaaaaaaaaaaggggggggggaacggggaaaaaaaagccctgaaaaccctggggggggaacccggccccccggggttggggccccaagaaaaggccctgaaattggccccccaaaaaataagggcccgaaggccaacttttggaaacaaagaaccaccaaggggtccgggttcaggggggg

SEQ ID NO: 13087 - DNA, 274 bp, Glycine max
  Clone ID: PAT_MRT3847_111824C.1
cactgattctagatgactacggagagcaacatggtgcgagatgacggcgtaatggttccttttgtagattacgacagatacagctacacacatggtactgaacttattcaaaagtgatcagtcatcacgtcctgattataataactattctaaactcatgctttgatctatgtatgtgctcactcttaatgcctcctaaatgcaactgacaagacattattcttaaatcatgccactcatattgcaatatcctcacgaaattaaatattccttc

SEQ ID NO: 13088 - DNA, 266 bp, Glycine max
  Clone ID: PAT_MRT3847_111825C.1
ctatgataaggaaacgttcaaattggtggagacgtccatgcgcaaggtgtttattcttaacttaaaaaccatgaccgggttatttatgaaatggaatgccccgaaagcacactgattattaaacgagtgacatccattatcagtgctagttgcatcacaagggataaagtttggtcaacaagcttattgcaacaaaatgatgagaggcttgtatctttaacttattgatgtacgacaaagatctcttttgggtgaacagaatataa

SEQ ID NO: 13089 - DNA, 347 bp, Glycine max
  Clone ID: PAT_MRT3847_111826C.1
attaggcaaaaaagaaatgccccaattttattgggggggccccaccaggttttttttaagcttctaaaaacaaactccattcactcactttttgaccccccccccccccccccccttattcttttttttaaaaggaaagggggagggttttaaaaagattttcttaacaccacaatccccttaagggcggcccgggaaaaaaaaaaaaaaaaaaaaaggggcaaacccccccccaaagaaataaccccaattcagagattaaagccccgggtcaacctcgcttaaaaaagttccccccaatgggcaaaaacaacaggcttggagggcctgccccaacaggaaccccc

SEQ ID NO: 13090 - DNA, 320 bp, Glycine max
  Clone ID: PAT_MRT3847_111827C.1
acttatatgttggttcttagtttatgaatagtctgatttatcatacggggtatgtaaaaaatggcgggggatgcaaataatcccgatcctaccccgaattcaaaatcctgataggcatggttgcgttataccactctttgttggcctggatccttccattttattttgggtaaggctttgggccgaaccttttaaattttgaaaatggacacgcaaatctttttcttagggttgccccaaacccctcaaaaatagtaaaggggagggaaaaaacggaactttgtccacaggccccactctgcattcattaaattgtggaa

SEQ ID NO: 13091 - DNA, 405 bp, Glycine max
  Clone ID: PAT_MRT3847_111828C.1
ccacgcctttccgcccacatcgtccgcccacgcgttccgatatatttatcttttcttggatgaaggaatccaaagaatggctatgcacaagagcagttcatgttcatcattgagtccgggaggcttggacttaactcaagccttctttaagtcattcatgaacgctgcaggttgttcttccaccaaactccacaacaaaatctctgttgttggggcatgcaacttgggaatggccatagcccaaaccattctcactcaggatctcacctacaagcttgtgctcatggatgcaatttctgacaaacttcgcggcgagatgctatgacctccagcacgccgatgcctttctgccacgcaccaaaattcaggccttcaccgattactcggtcacgctggactctgacc

SEQ ID NO: 13092 - DNA, 424 bp, Glycine max
  Clone ID: PAT_MRT3847_111829C.1
ggaatgggcgttcacagcagttaggttttgggtgaagtggaggagattaaacagaggtttcatcaattctgattctctgaccgccagaacatggtgttttttctgttccctaatgcttcgttagaacccgaaatgaagatggtgatagattggtggacgagaattctattccgaggattctccaagtcttctcttcgcttgaacatctggtgttaattctgcagtctttgaacgagaatgagaatgagagtcagagtgaaggtgtccaagttgaaagtctttgcttctcgatcccctcattgaaatggttcgagctttgttccgatgaacaggagttcaatgttgttgtgaaggcagaaaatcttgtcaactttgtatgcgatcttgagggattgcacaaggttgcaacatgtgaaattacctc

SEQ ID NO: 13093 - DNA, 1329 bp, Glycine max
  Clone ID: PAT_MRT3847_11182C.1
acgtaagctctgaattcggcgaaagaaggtgtgtggcgtcaggtagagataatgagattaggtgtgagtgtgagtgtgcggtgctcaatcggcaccgcttcaggcaacacccaaaccgattatcccgccaaattccaacggtcatctttctcaactgccaacttcctccccgacaacgcttcttcagatttagcagtttcaatttcgagtagtagcagcaggagagggctaatacgcatagccacgttgccatgtcttcttcccctcataggttgcctcccagccaacgccatgcagccaggttcaaaggaatatcttctcattaaagaagaggtgaggaaggtcttgtccaagggaaaggctgctggcgtgcttcgattggtattccatgatgccggaacctttgacatcgatgacagtacaggtggtatgaatggttctatagtctatgaacttgaaagacctgaaaatgctggcctgaaaaaatcagtaaaggttctgcaaaaagcaaagactcagatagatgctatccaaccagtatcttgggcggacatgattgctgtggctggagctgaagcagttgaagtatgtggaggtccacctattcaagtttcactgggcagattagatacactggtgcctgatccagaagggagacttcctgaggaatctctcaatgcttctggtttgaagaaatgtttccagagcaaaggcttttcaacacaagaacttgtggctttgtctggagcccacactattggaagtaaaggttttggaagcccaatttcttttgacaattcatattataaggttcttttggagaagccgtggacgtcttcaggtggtatgccgagtatgattgggcttccttcagatcacgctcttgttgaggatgatgaatgcttaagatggattaaaaaatacgcagacagtgagaatctattctttgaagatttcaaaaatgcgtatgtcaagctggtgaattctggtgtgaggcggaatagcttataaattcaggagttgaatgttccaacttccactgaaggggcaacttgcatttttattgactttctaacagtgtttatgcacagttgccatgaagttttgggtgctttattattgatttgaacatcaagatctactaccccctaaaaatcaaccaacgaagtatgtgcatgcagggccaataaatttcatggaaaagtcgtttaaggggtgtattggattaagattttaaaagactattttagcataatttttttttttgaattttaaagattatgtaaaattattatgatttattatatttctttacaagatttttatgat

SEQ ID NO: 13094 - DNA, 167 bp, Glycine max
  Clone ID: PAT_MRT3847_111830C.1
gtcgctgcacgctcgtagctagatccttaagacacgctcgcgatctacgcgctgatgacctaattgctacgtaatgggctaccctttcttatggtgatttactgcgtatatttataaaaaaacaagaaaaaagaaaacgatacaattccaaacaacatacatgaact

SEQ ID NO: 13095 - DNA, 316 bp, Glycine max
  Clone ID: PAT_MRT3847_111831C.1
gggaaagagaaaagggtttcttaaaccaaacaggcatacaacacccatgtattatacaaacttttgacataatatggacagttgaacaataattatacctttcccatgcatagcatttcaactatagggacttttttgcacccattgaagagttgagtgctaataaagtaaaaggaaaaaaaaaacattcaaaactcatatcaaactagtttgcaaaatggatatgcccttttaccacccatgaaatcaatacaaaagcatatatgtttgaaggaaggactcatcccttcttttataacccggtatcttatacttt

SEQ ID NO: 13096 - DNA, 521 bp, Glycine max
  Clone ID: PAT_MRT3847_111832C.1
cttcttttgcttctccagtgagtttggggaacctcatgggtgtgagttcctctggaaggtctcattctgtggtgaggagagtctctctttcaagagggaactgcagggggagaaagagatggcattgtgtgtcattgtctgtgtgtagatattcagttaccacaactgattttgttgctgaccaagggaattcagtgtcccttgattctaacagtagtaggagtaagggtggtgatgatggtgctggttttgtgcttaagcctcctcctaagcctgtgttgaagtccccagagaataagagtgaccccattttggggccctcaaggactactggggatgtggaagagaggaataaggtgattgaatcactcggggaggtgttggagaaggcagaaaagcttgggagttcgaaggtgaatggggacaggaataatggttcagtgaataaaccggtaaggagtaatgcaaatgctagtcctaaggctgataaaccggtgaattcagcagcacctcagaagtct

SEQ ID NO: 13097 - DNA, 459 bp, Glycine max
  Clone ID: PAT_MRT3847_111833C.1
cttaacccctccgtaaaccctagtatagctggaaagaagcagttgctttgccgctctgaatcgaaattcctcagttcagtcgctgccgtcgtctcgtcgttttactccagaagaatgaggaagaaagtggacgagcgaatcagaactttaattgaaaatggcgtcagaacaaggcataggtctatgttcatcatcattggcgacaagtcccgtgaccaggtctttttatattatagattgtaaatctacactacatgcttagcaaggcacagattaagtccaggccaactgtgttatggtgttacaaggacaagcttgaactaagcagtcacaagaaaaagcgtagcaaacagattaaaaaattggtgcagaggggtctctatgatccggagaaaggtgattcgtttgaattgtttgtggcaagtgggggattaacttattgtttatacaaggattcag

SEQ ID NO: 13098 - DNA, 207 bp, Glycine max
  Clone ID: PAT_MRT3847_111834C.1
gaaaatctatgcttagaattagaaactccgattagaagatatgaaataactgatcgttgaaaattcatggaggatagagagcgggagagtccattaaagacacagctacacataatggtgcgtctgccgatgctggcatggagaatacaattgcacagtccaagacaatgcataacgattgatatcatgtcatactgttccaaacga

SEQ ID NO: 13099 - DNA, 259 bp, Glycine max
  unsure (1)..(259): unsure at all n locations
  Clone ID: PAT_MRT3847_111835C.1
ctcccactctcctatctggtatangacttcgtgggtagactttnctatttgctctcctctcnntcactctcttcttctcactgatccgcattnccgttcaaagtggtcttatttgnaaaacacttgggcttggtgcnaaatgtntgcntacgtnaattttctnctggagacaanaggatcactgagaaaanaatttttacttgtagagatttngncatctggntgtttantatanantagcaatacaatttagaagatt

SEQ ID NO: 13100 - DNA, 336 bp, Glycine max
  Clone ID: PAT_MRT3847_111836C.1
acaaaaacaaaaggcttatacttatcacttatcaaattacaagcttccaacatccttttttagaaagggttgatttatcaatcatattccagtaaaaaaataatcccttacatatgattttttttcttcttttacttttggggaaaccccattcatatgaatttttgccggaaaggataaatcagtcaccaaaaagctccaatgcactggtggaacttggattcattaatccatgtaagttttattttaccccacatgatgcattgccttaattaaatatattggctttccttccaaccaacggctggaaaaaacccacccttcccgcggcttata

SEQ ID NO: 13101 - DNA, 274 bp, Glycine max
  Clone ID: PAT_MRT3847_111837C.1
ttggaatatggcttccttactctcctcattagtgctgctccttgcagctctaactctatcccctcaagttcgtgttgactacgatatgccaccaatttacatgccacctgttaacacaccgccagtatataagcctacagttgaataaccaccagtgttcaaacctacagtttacaatgcctccagtctaaatccacaccttcatacacctccagtctataagtcatccttattctatcctgcaatgtcttaacctttagtagattcactaccg

SEQ ID NO: 13102 - DNA, 266 bp, Glycine max
  Clone ID: PAT_MRT3847_111838C.1
taacacccaattctacagcctcaatttgacatgtccagggacagtcgttatgaccaagtactatcgagggtgtgaaaagatggtgagaatctttcccggggggtggtggcgctgacatgcatatggttaacactttgccagctgcttgactcccatacgtactgaattgcatggtctgtgatgtctaggagtctgaatcatggaagactgctggtccgtaagagaaatgctcaagaacctctatgctgagataggctacacaccaa

SEQ ID NO: 13103 - DNA, 1260 bp, Glycine max
  Clone ID: PAT_MRT3847_111839C.1
cgcatttcatgttgaacgagaagctgcagaaaatgggcatgctggggtgtcttctgtgcattgtggggtccactgtgattgtgctccatgcacctcaagagaagcctcttagttctgtagaagaaatatggcagttggcacttcaacctgcattcctgtcgtacactgcctcggcgatcgctgtagtgttctttttgattttgtattgtgctcctcgccatggccagactaatattttagtttatattggaatatgctccataattggatccttgactgtcatgagcataaaagcaattggcattgctataagacttacgatcgagggtgccgaccagtttgttcagttccagacatggatttttaccatggtcgctatttcctgcatcgttactcagttaaattatcttaatatggcattggatacttttaacacagcagttgtttctcccatctactatgccttgttcacatcttttacaatattagctagtgcaatcatgtttaaggactattatggtcaaagtataagcagtattgcatcggagctttgtggtttcgttactgttttatctggtacaactgtattacacagtacaagagagctagatcctccagtcaatacagatttgtatagtccgttgtctccaaaagtatcgtggtatatccaaggcaatggcgaaccttggaaacagaaagaagatgcaccaccctttaatttaattacagttatccggcaagaccatttcaagtgatacagaattctgagactggtggagaaagaagttagatctgtccgttgcttgatgtaggagggttatgtgcattaagcaacaaaatgtggcagtgtatacgtttttggctctgaccccatctatttgatttagcaagatttaaaagactgtcatcacattgtgcagacagagacgagacagtgctttattttttcgggggcttttgttcattggtatcatttgagatgaaagcttgtttgctatcatctaaaatactagggtgagtttgcatcatcatcatctagttttgcattatttttcccctcttgtattcctttccccaattgtattttttggggtccatcccccctccccactttgatttatctctgaacaatgagaaatctaatctatgtatattgatcagtgtaatcttaatttaatagaaggatgtgaataggtatgtatatctataatattatacagctggattcatctttgcttggagaccaaaaaacaacccccc

SEQ ID NO: 13104 - DNA, 807 bp, Glycine max
  unsure (1)..(807): unsure at all n locations
  Clone ID: PAT_MRT3847_11183C.1
tctttcaagcatttgcttgctgtactggccaataatgaacatttcttgatacactggcttcttgtttctaaattcttgtgattgattctcttaatttaggaccagtatttgcacatctaaaactgggttcaattggactattattatgcatgtgataatgggaaccacctgacctggataaatagttattgccaccattttctttgtctgtattataattaatcttcccttttgtgaatttggcatatatcaagtgatgaagtagttgaaaatgcaaagcaattatcattccaggaaggtttgctagttagtcctttttgttcatcttcccaactttatgtgtgattttcttaatgcgttctggtgtccattatcctatgcacatacaatcatgcacaagataatnggcgtttagcaccctcaccatatattaaataaaatgttatgttcgtgaatgatccttcccacaccctattgtgaagggcataagaacttatgttatttagcttgcacgataggagttaattttcttcaaaccttgtgacacctaaactctaacaccaatgaagagcttgtatatgttggttttatactctgcctcttacccgctctgctaacttcaattggaaaacaggtgagaatttcttcaggagttgccgctgcagcaaagttccagaaagatgacctctgatttcctatttaaaccctcaagtccttgttgtcgcccatcgccattgagtttaggattgcgaattgaagagtatatgatagatagtgagaaggagagagcggtgagagaaagctcgt

SEQ ID NO: 13105 - DNA, 245 bp, Glycine max
  Clone ID: PAT_MRT3847_111840C.1
atccggtgacgtcaaacatacggaagaattgtctttcagggaacacggtggagaaaacggttcgcgctcgtagctcgattgagcaagcctatgtatgtcaaagaaacaaagcagactcatctaaagatggcagccaatttgccgttatggacttggatacatatgacgagattcgtctgggtgaaaaggaaattggagacagtaccaaatggcttaaaagaggcatggactgcgatttgctgaac

SEQ ID NO: 13106 - DNA, 220 bp, Glycine max
  unsure (1)..(220): unsure at all n locations
  Clone ID: PAT_MRT3847_111841C.1
ggcttcctcaatgatctcttccccagctgttaccactgtcaaccgtgccggtggccgcatggntgctncattcactggccttcagtccatggcttggcttcccaccaggagacccaccatgacattaccttcattgctagcaacggggggagagggccatgcttgccagggtgggcccccgtttggaagaagaaaatttagaactttttctaccctgccg

SEQ ID NO: 13107 - DNA, 895 bp, Glycine max
  Clone ID: PAT_MRT3847_111842C.1
cttccgacggcccaaccgcctgctgcccatactgcattggccacattagataaagctgcacgaatcaattttatgattacccaaaatgttgataggctgcatcatcgtgctggtagcaacccattagaaatacatgggactgtatacactgtaatatgtatagattgtggatattccttttgccggagcttatttcaggaccagttgaaggcccttaatccaaagtgggcagaagcaattgataacttggaccatggaaaccctggatcagataagagttttggcatgaaacaaagacctgatggtgatattgagattgatgaaagattttgggaggaggattttaccatcccaacttgtcataagtgcaatggagctctcaaacctgatgttgtcttttttggtgataatgttcccaaggacagagctgatatggcaatggaagcatctagaagatgtgatgcttttcttgtactcgggtcatctctgatgaccatgtctgcttttcgacttatcagagcagctcatgaggctggtgctgctactgcaattgtgaacataggtgtgacgcgtgctgatgattttgtgcccctgaaaataaatgcacgattgggtgagatcctgccaagagtacttgatattggatctataagcatacccgctgtataatgatagatgaaaataatgtattatgttgcattcaaattcagcaaccagtattttatttcatcattcttgccctcatgtaaagatattgacgaggaattaaataaaaagtaattgatgtgttagtttctgaagcaaaaaaaaaacgcactcgtagatgaaaaaatggtatcaagttgcattcaaatcagtaacctgtattttattccatcattcttgtccccatgta

SEQ ID NO: 13108 - DNA, 272 bp, Glycine max
  Clone ID: PAT_MRT3847_111843C.1
gtgaaagccttcaaaaacaacccaccgttggtgcgatggcttatcacttcaaaggcgatgactagcttgttttggggccatggatatcgaaggctacagtgaagacacttaacacgactaaactgctgaatgtcctttctttgtatatgggaaagaggctacttgcattattctatgaagatgagaaacaatctgatgttaaattgtttgtcaagaaaggaaatgacccggctccgtgagctggaggacatgtagcaactgtggctaaacaa

SEQ ID NO: 13109 - DNA, 139 bp, Glycine max
  unsure (1)..(139): unsure at all n locations
  Clone ID: PAT_MRT3847_111844C.1
tcaactnttattgctgtggtctacctgttttcttactgaggaaggcttcatctctgcatagcgcacttttactcttaagggtcccattggtgctagttatcaccttctattatactactttgactgctgcaacaacaac

SEQ ID NO: 13110 - DNA, 764 bp, Glycine max
  Clone ID: PAT_MRT3847_111845C.1
gaatatgaattcatcgaaaggatcgtggaatcaaccgtgcaagccttgcccggatatgatgtttttctgagttttaccggagaggatacccgctacactttcacaggttttctctataatgcctttcgccgagagggattcaaaatcttcatggatgatgaggaattggagagtgggaaccaaatttcacagaagcttatgagagcaattgagagttcaaagatttcaattgttgtgctctctgaaaactatgcatattccacctggtgtcttgatgaacttgccaagatcattgagtgtatgaagaccaacaatcaaatggtttggccaatattttacaatgtgcaaaagtcggatgtatgcaatcaaacaaaaagttatggtgaagccatgactgaacatgaaaaaagaattggaaaggactctgagaaggtgcagaaatggaggtctgctttgtctgaaatcaaaaacttggaaggagaccatgtcaaacaaaatgagtaccaacatgaattaatcgaaaggattgtggaaaaagtcattaaaattgaaggtagcaagcatacagcaaatcctttccttttatccaatgacagctacgaggaagaatgagtgaaagagggtcaaatatatgctgtggagctgtgaaactaactgattgtaacctctataactggccttgaattcatttggtcctatcaatggtggttttaacatcaagtcaatttcctaaggggtatatggatccctcctaaacctggttc

SEQ ID NO: 13111 - DNA, 1017 bp, Glycine max
  Clone ID: PAT_MRT3847_111846C.1
gctacggccgaccaccaaattaatccggggacacaagaaaattaataatcccaatcatcaagataggaaaagaatggaggccatttgttccaagcaccttatgacatcccttgtcataattcttgcttctagtttgaccttatcacagggtgccaagaaaggcagtgacagtgaaaggccataccaagaagcgagcacggtgttcattagaacatcttgcagctccacgacctatccaagactctgctacagctccttagtgaagcatgcagacttgatccaaacaaaccgtgtggttctgacaggcacagccctgaatgtgacccttgcgtctgccaagtcgacctcggcaatgatgtcgacgctggcaaagaggcaaggcctgaagccaagagaggttgcagcgatgaaggactgtgtggaggagttggctgactctgttgatgagctcagaaggtctatttctgagatggctcaactaacaccctccaattttgagatgacaatgagtgacgtagaaacgtgggtgagtgctgctttgaccgatgagagcacgtgcaccgatggcttccaagagacggctgctgctggtggttcaaatgtaaagaacacggtgagaggccaaattcttcaggtggctcaattgactagtaatgccttggctttgataaatcagctggccaattctcatgcttaactactccatcttgtgctatatatagaacatcgcctaccctgtttttttgtctcatttagatgctctgcaactgtgaaaactagtaaatatctcagtagtttcttgagatttatgtccccgctagtgttaaactgttcatgtctcgttccagctagcggctggacccatcccaattttcagtgttgtgaatcaggatcttgtattgtcttttttagttggtttgttgaatcacttgtataattaatataaagtgaagttgttatggctatataaaagattttgaacttactggctgataaaaaaaaaaaaaaaaaactcgc

SEQ ID NO: 13112 - DNA, 2873 bp, Glycine max
  unsure (1)..(2873): unsure at all n locations
  Clone ID: PAT_MRT3847_111847C.1
ccctcgcgttcgcccacgcgtctgcttgtagtattcataagcggagaagaaaaagagagagagagagatacaaaatagaaagtaaaaattagaaaaactcttgtacttggtttcatgccagattagggaactcttttagttgtcaattagatcacagagatatggaggttgctatggaactggaagatgatcttttttttgctgatttgagcaaggaaattgctctactaattatggatgaagatgaagatcctcttgcttcttgtcctcctgactctcttcaggctttttctggggcaattcatcctcctccacagtttgctttcatctatgagcatgctttgagaagagaaagcaaagggacaggtgtgtttatccctcaagcaacacagccaagaaggaagcagaggaaaggaagggctaataataattcatatgcaaaacatcaaaagcagtctcaagataccagaatggcttctcaagttcctaacaagaattctttcaaatcccgaaatggctgaggatactatattatatcatatagatccttgtgaaaaacctgcataatcttacagattctactgattaatttgtctgccaagtttaataatttgtggatctaattctttagcctttaggcaataattgtatggttaattattttgtattgtttatgtataggtaaatgtacatgggaaaaccttatatacctaaatattaggcatgatgtaggaaggttcacccaaggttttgctaccttcctctgcagacaagcatttcattgttatcttgtttcatgtgataagtttgtcctggttgcaaagatataagtgtgagtattttattaaatggagatcttcctattggagttgacagaaacagtgtggatacctgggtttatccaaatttgtttcgaatgaacacttctactggggcacctccagattattttgataaaaatggccagaattggggtttccctacttataattgggaagaaatgtcaaaggacaactatggttggtggagagctcgattgacacagatggcaaaatattttacagcgtacaggattgagcacattttgggattcttccgaatttgggaacttccggatcatgctgcgacaggtcttgttggaaaattccgaccatctattcctcttagtcaggaagaacttgaacgagaaggaatatgggactttaatcgcctaagttacccatatattaagcgggaactattacaggaaaaatttggtgatgcttggactttgttgcaacaacttttctaaatgaaattgacaagaacttctatgagttcaaggaggattgcaacacagagaaaaaaattgcttccaaactgaaaacttgtgcagaaagttctctcttgttggagagtgtagacaaattgcagcgtaatctctttgatctttcacagaatatagttctaatccgagatccagaggatccaagaaaattttatcctcgtttcaaccttgaagataccataagtttccaggatttggatgatcatagcaagaatgttctcaaacgattataccatgactactatttctgtcgtcaagagaatctttggaggcaaaatgcattgaagaccctgcctgtacttctaaattcatcagacatgctggcctgtggggaagatttgggtctcattccatcttgtgtccatcctgttatgcaagaactgggattagttgggttgcgcattcagcgcatgcccaatgaacctgatctggaatttggtattccttctaagtacagctacatgacggtatgtgccccttcatgtcatgactgttccaccttgcgtgcttggtgggaagaagatgaagaaagaagactccggtttttcaagaatgtgatggagtccgatgggttgccgcccgatcaatgtgttccagaagttgcacattttgttataaggcagcattttgaagccccatcaatgtgggcaatcttccctcttcaggacttgttagcattaaaagaagaatatacaacacgccctgcaacagaggagacaatcaatgaccctacgaatccgaagcactattggagattccgtgtgcatgtgactttggaatcattgatcaaggataatgacctccaaaccaccatcaaagatctcgtcagttggagtggaagatcactccctaaggaagacgactcagaaatagaagcgagcccagtgtcggtgttgtcagcagcagaagctctttctgagaagcagaagtttgccagtaccacggaaaagcctgttcttgtcaaataaaaattgtagctgatgttattcatgctagtccttcaaatcatattatatcctataacctgctaagatgaagataacaataaggatcatccgtgctctgttccatctgtttgcattatgtttcttaatgaagtctacaaataaatcttgatgcatgtattgtttatgtcctgcccataagttgtagcttttataataatagtaatagtaattataagaggtactccgtactcataatgcaagtgtaaataaaacaatattgtgcaacatttaagtcaggctttctgcttgatactcactggcctgctacaaatgtcttggaattgagaaaaatatttacttagattaaattaacaactgttagtttatcacgcaatgtaaagatctatatgattaatagatatttaatttaattcagtataaaaaaaaaaaaaaaaaagaaaaaaaaaaaattgacccacccaataccagtaagnttaccctcatgtgataagttggtccngggcttaatgtctttctcaataaagcaatatagtaagagcacgagatcagttgttgtgaccgataaaaaagtacaggct

SEQ ID NO: 13113 - DNA, 479 bp, Glycine max
  Clone ID: PAT_MRT3847_111848C.1
agttaactccgctagataatctgttactattgaaccaccttatggaaaattatgatccaagtgtgcttttaactgttgtcaggtgtgcatgtgactttggaatcattgatcaaggataatgacctccaaaccaccatcaaagatctcgtacgttggagtggaagatcactccctaaggaagacgactcagaagtagaagtgagcccagtgtcggcgttgtcatcagcagaagctctttctgagaagcagcagtttgccggtaccatggaaaagcctgttcttgtcaaataaaaattgtagctgatgttattcatgctagctcttcaaatcatattatatcctataatctgctaacttgaagataacaaataaggatcatccttgttatatgttccatctgtttgcattatgtttcttaataaagaatacaaataaatcttgatgcatgtaaaaaaaaaaaaaaaaaaaaaaaagcggcc

SEQ ID NO: 13114 - DNA, 599 bp, Glycine max
  Clone ID: PAT_MRT3847_111849C.1
acatatgaaattcacttccatgatattaggcctaaacaggtgggtgcaagtttctgattttcgatgtaatttttaaaataaaatacattcggcaaaaatagaaccaaattggcttttaactcaatttcaaaataattttacatttattatcaaaaccaaaaaaaagattttgtgaatttaatttttaattttaaaaaacacattttaatcatcattatcataccacaaccattccaccaccatttttcctgtcatcattccaccacaaccaccaccactgttgttactgtcattattgtcaccattctgtcatcattattgcctccaccacctccacactgccacaaccaccaccacctccattattgcctttgtcattctaccaccaccatcacaccttgcctttgctgcctctaacatcattgtcattgtcatcattttgtcgtctccatcgtcgttgtcacagatgttgccaccatactactccaccatcaccatcccaccactattatcgtcactactattgtcaccaccatttcgccgccttcattgtcgttgttgtcattgttaccactattgcatcccaccaccactcataa

SEQ ID NO: 13115 - DNA, 744 bp, Glycine max
  Clone ID: PAT_MRT3847_11184C.1
gtcgattatgcgtccgaactaattatctcttgtgatattctctcacaagggtgtgtaattaaggcatagaaaatatggcatcctttgccagcaataattatcctttggtgtttttctttgttctcttttcactggccatgcgcttagctcatgggactaattatgcaccaacattattcatatttggagactcaacttttgatgttggaaccaacaactttcttaattctaaagcaaaggccaacttcccctacaatggcattgatttttatcctccatttcccacaggaaggtttagtaatggcttcaacactgctgaccaaattgcgagacaattcggttataagcagagcccaccaccatttttaactttggagaaagaccaatacagcctaaagaagaacattctgaagggtgtaaattttgcttcagggggatctggaattcttagagaaacagggcactcagaatggggagaagtggttttctttgaaaggcaggtggaacaatttgcatcggttggtggaaacatcagtgagatgttgggacatgcacaagctgctaaatttgtttccaaggctttgtttctcattagcgttggaagcaacgacatcttcgattatgcacgtaacgacagtggctccattcatttgggcgcagaagaatacttagctggtgtcaactcacatattactctcatataaagaaactatatgagttggggggcaaggaaatttggcatca

SEQ ID NO: 13116 - DNA, 262 bp, Glycine max
  Clone ID: PAT_MRT3847_111850C.1
ccacgcgtccggaaatgtatgaaattaagctttatccaaatccccttatggaatggattattatacaatgaagtggatttatcacaaatgcctcagcaaactaatttttaatttcatctcaaattatttcttttaattgttatgaatgaataataattaattcatgacccatgttttactgaatgaatagttcttatggtttagctgataagtaggattgggtacagaactatagatacaaatattgtaattttgtaggatg

SEQ ID NO: 13117 - DNA, 281 bp, Glycine max
  Clone ID: PAT_MRT3847_111851C.1
gctgcgtgagtgagtagtgtgacggacgaacgaactgctgctgcatcgagtgccgttgcaggctatagcgccgtggtcagatgctcctgggttttgtcaaaacgatagccttaagagtgtcattgcgatccagtacacggtaaactcgactcaattgatggtttactttaacgcttgttagctcaacgatctacgctcgattagtgccgtcactctaaccgactaaactatcaaattgaactacagcagctatcactagatgtcaagttaggattatatgc

SEQ ID NO: 13118 - DNA, 377 bp, Glycine max
  Clone ID: PAT_MRT3847_111852C.1
gggaaaaaaacggtctcattggataaccaaaaaataaattgggagtaaaaggagaaaaggaacattaaaaacggtttacgtattgttgagtggaccttaaacctataaatgaagtaataattaccttggaacacgcaatttatttatcctcacctaccaagacatccattgaagggagtgattatacttcacaacaatcttaagctagaggcttctaaaacttgaaaggctccacaacttaccaggtgaaggctgggacatcccttccaaagtggccatatgcagtagtctggaaaaacctatggcctcccctcttaagggccaacctaatgagcatcttttaaagtttgaagtacaaattctgcttgaaaattaga

SEQ ID NO: 13119 - DNA, 371 bp, Glycine max
  Clone ID: PAT_MRT3847_111853C.1
aggttcggctgcaaggcccgcagcgcgaccggaccggaaccacccacgcgcccgcacacccctttttaccctataataaccccgacaaccacacccaacacgcaaacggggccacgctttcaactacccccaggccccacaaaaaaccgaagcacagcagtagcgcagcagagatggcgagcacccacaagcggaaagccaaacaccccccagcaacggccccgaagggacgccccaacaatccccccccacacacaacacccacgttaaaaaaccacagcggacacgggacgagcaacacacgccaccacaacgaactccaaaagaaacacacagagcacgcggaagcacctgcggacacaaagccaacg

SEQ ID NO: 13120 - DNA, 570 bp, Glycine max
  Clone ID: PAT_MRT3847_111854C.1
ctcacaaggatggttttttgcttctatgtaacatcctgccgacaggaacatagcacaactagcgaaagtaaaattcatgaaaagacatggtgaatggcaagacctagacatacctcccagcatccggtcaattgtatgtctcaacttgcctagcttttctggcggattcaatccatggggtacaccaaataggaggaagcagagtgacgtaattttcatatgctaattctggaatccttgtttattttgcaaaaaacgttttttttaataaaataagcacttttatgtttttcttatgtgtttgtctaaaccacttttacttaaaataagtaattttctgctttttttaagaagaaaattctatgtgcttataaaaaaaaagttttgttttttaaagtgtttcttttaaaatagttttttttaaaaagtttaaacaaactcaccctaagtactaggcaactaactagtgaatatatgatactttcatgcaagttttttttttttttgtttttctcttagaaaactaaggtttcttgattgaatacagagagatttgacaccaccatttgt

SEQ ID NO: 13121 - DNA, 168 bp, Glycine max
  Clone ID: PAT_MRT3847_111855C.1
gctctctaggggtaccgagcgcacttgctctatagctcttatctacacattcttctttgacacaacatcaatgtctccagactaacttgcaaaactcataattgcttctattgaaaataacgttctagacttggtgacaaaccctttattcgacaaccgtcctaagca

SEQ ID NO: 13122 - DNA, 3018 bp, Glycine max
  Clone ID: PAT_MRT3847_111856C.1
cagagagaatattattagcgcctagagacaaagacgatcaattcatcacaagcaagttcccatgaccggtaacgagtttcgcttcttcttgtcctgcgatctcagtgttgctgccacggcttcagcttccgctgcttctctctcccttcgctcttctcccttcaaactcaaccctccaaaactcaactccgttacgctccgtttccctcaccttaatcgccgttataacagcgccttcagagtcgtcgccgcttccgtttccgtctccaaccccaacgtgcaaaccggccccgacgatctcgttgcttccattctctcaaaggtggtgcaaacggatggaggagtattgctgaaggaggaagagcataaagaggtggccgaagtggcccaggaactgcaaaagtattgcgtgagtgagccagtgaaatgccctttaatatttggagagaaggatgtggcatactgttcacggcctgcatcagcaggtggtggcaagaagagtgccattctgctccttttctacaacacaaagcatatggatgtagttgttggagctcctcatagccggggtcccaagccctttcctcctgtaataaacctttggaaggctggggttatcgcctggggtttaaaacaatggcgagattctagaagggtcaaagcttgatatatggaagctcacattagtatctggttatggacttccctagttttgagcctcgattagtttatcaggagtcacattcatattgattgtttccatcatctataaaatccacctattatgttgttggtgtctgtgatccagaagtgggaaggagaaatccctctgagcacaaacagttaaagctggccaggagtttgacccgtggtgtcatagacagagatctgaagccaagctcaaatgagagaaagtccattcagcgaatactaaaatatccaccgacaaggactttgagtggagatgagaggcagctcttgtggaaatttcgattctctttgatgtctgaaaagagggctcttacaaagttcctgcgttgtgttgaatggagtgatgtccaggaagcaaaacaagcattagagttgatgggcaagtgggaaatgattgatgtttgtgatgcactggaacttttgtcgcctgtttttgaaagtgaagaggtccgtgcttatgcagttagtgttcttgaaagagctgatgatgaagaacttcagtgttatttgcttcaattggttcaagctcttcggtttgagcgttctgacaaatctcgcctttctcatttccttgtccagcgtgcattacgcaatattgaattggcaagctttcttcgctggtatgtggctgttgaactttatgatcctgcatatgccaaacgattttactgcacttatgagattctggaggagaatatgatgaagatagcagctggtgttaatggagaggaagatgggtttaaacagtggcagagtttggtacgccagacagaattgactgctcagttgtgttcaatcactagagaagtaaggaatgttcgtggtaatacacagaagaagattgaaaagctgagacaactactttctggtcttcttagtgaacttacctattttgatgagccaatacgatcacctttggcaccaggtgtcctcattgctggaattgtaccttcagagtcatcaatatttaaaagtgcattgcatcctttgcgcctttcttttagaacagcaaatggtggaacatgcaaaatcatatttaaaaagggtgacgatcttcggcaggaccagttggttgttcaaatggtatcactaatggatcgattgcttaagttggaaaatcttgatctgcacctaacaccatacaaggtgctagcaactggacaagatgaaggcatgttggaatttattccatctcgctcattggcacagattttgtcagagaatcgtagcatcataagctatttgcaaaagtttcatcctgatgaccatgggccttttggaattacagccacctgccttgaaacatttataaaaagctgtgctggatactctgttataacatatatacttggtatcggagacaggcatttagacaatctcctccttagaaatgatggaggtcttttccatgttgattttggttttattcttggccgagatcctaagccatttccaccaccaatgaagctttgcaaggaaatggttgaggctatgggtggagctgaaagccaatattatacaaggttcaagtcctattgttgtgaagcatacaacattcttcgcaaatccagtaacctaattttgaatctattttacctaatggcgggttccaatattcctgatatagcttctgatcctgaaaaggggattcttaagcttcaggaaaagtttcggttggacttggatgatgaagccagtatacatttcttccaggatcttatcaatgagagtgtgagtgcattattccctcagatggttgagactatccatcgttgggctcaatattggcggtaaccccaatatttattgggtgttattacaccaagtaattaaccagcatctgatgctgtctttttaggcttcttcgaagcttaaaacgtatgtggttttatcttctcttggaactccacactcagatcccactgcagctgtatgcgcttctaatttctgaactaattatcctgaaggccacttagtgacattgtctatgtaaataaattagttctctttcgctcttctggttacggttgcttcaagactgcagcataacttaaaaaatcgtatcatacacaaactaatggttgtttaagtgaaaccatcctatttcatttttgtaaataactcttgcctggttataatctgtagtttgatatatatgtaaagtaacttttagttatgatgtttggccactttgctggggtaaattatcaaaactgtatctgtaagaactgttgatttatttttatattaataataaattttttattatttttttaaaaaaaaaaaaaaaaaaaaaaaaaaaaaaaa

SEQ ID NO: 13123 - DNA, 204 bp, Glycine max
  Clone ID: PAT_MRT3847_111857C.1
agcaagaaaccagctctcaaggtcgacgctgttccagctgtgcgaacgccatacaagtctgccaagaaaggaggcaagagacaccctcaagacaaaactgaaaagccaaaagacgccaaaaaacagaagataacttaggatgctcagaaacacaaccaagcaaaggggcaaaaaaaaagaaagttgttcagatgatacttctcc

SEQ ID NO: 13124 - DNA, 2830 bp, Glycine max
  Clone ID: PAT_MRT3847_111858C.1
ggcacgagggaagaagaagggtgttgtgtcaggtgtgagcacagagaatagcaccacgcagagagaccaagacgatcatcaattcaacgaaccttaattcatcacaaacaagttccaatgaccggtaacgagtttcgcttcttcttgtcctgcgatatcagtgttcctgtaaccttccgcgttgagcgccttgaaggcaatttgccccttcccaaatcacctgatttagaaaataatgcccccacagataatagaacgacagagttgtttgtggagtgtgcattgtacattgatggtgcaccgtttggccttcctatgagaacaaggttagagtccttaggaccatcatattgttggaacgagctcatcactttgacaactaaatatcgagacttaactgctcagtcacaactcaccttcactgtttgggatctttcgcatggtgaaggattaattggaggagccacaattcttctcttcaacaacaaaaagcagctgaaaactgggaagcaaaagcttaggctttgggcaggaaaagaggcagatggaacattccctactagtacacctggaaaggtccctaggcatgaacgtggggaattggaacgattagaaaagcttgtgaataagtatgaacgaggtcaaattcaacgggtggactggctggatcgcctcacatttaaaactatggagagaatcaaggaacgtgaaagcttgaaaaatggaagttctcatatgtaccttgttgtagacttctgtagttttgagcatcgagttgtttttcaggaatcaggtgcaaatttcttgtttccatcacctatagcctccaccaatgatattgttgttgtctgggatcctgaagtgggaaagataaatccctctgagcacaaacagttaaagctggccaggagtttgacccgtggtgtcatagacagagatctgaagccaagctcaaatgagagaaagtccattcagagaatactaaaatatccaccaacaaggactttgagtggagatgagaggcagctcttgtggaaattccgcttctctttgatgtctgaaaagagggctcttacaaagttcctgcgttgtgttgaatggagtgatgttcaggaagccaaacaagcattagaattgatgggcaagtgggaaatgattgatgtttgtgatgcactggaacttttgtcgcctgtttttgaaagtgaagaggtccgtgcttatgcagttagtgttcttgaaagagctgatgatgaagagcttcagtgttatttgcttcaattggttcaggctcttcggtttgagcgttctgccaaatctcgcctttctcatttccttatccagtgtgctttacgcaatattgaattggcaagctttcttcgctggtatgtggctgttgaactttacgatcctgcatatgccaaacgattttactgcacttatgagattctggaggagaatatgatgaagatagcagctggtgttaatggagaggaagatgggtttaaacagtggcagagcttggtacgccagacagaattgactgctcagttgtgttcaatcactagagaagtaagtaatgttcgtggtaatacacagaagaagattgaaaagcttagacaactactttctggtcttcttagtgaacttacctattttgatgagccaatacgatcacctttggcaccaggtgtcctcattactggaattgtaccttcagagtcatcaatatttaaaagtgcattgcatcctttgcgccttacttttagagcagcaaatggtggaacttgtaaaatcatatttaaaaagggcgacgatattcggcaggaccagttggttgttcaaatggtatcactaatggatcgattgcttaagttagaaaatcttgatctacacctaacaccatacaaggtgctagcaactggacaagatgaaggcatgttggaatttattccatcccgctcattggcacaaattttatccgagaatcgtagcatcataagctatttgcaaaagtttcatcctgatgaccatgggccttttggaattacagccacctgccttgaaacatttataaaaagctgtgctggctactctgttataacatatatacttggtatcggagacaggcacttagacaatctcctccttagaaatgacggaggtcttttccatgttgattttggttttattcttgggcgagatcctaagccatttccaccaccaatgaagctttgcaaggaaatggttgaggctatgggtggagctgaaagccaatattatacaaggttcaagtcctattgttgtgaagcataccacattcttcgcaaatccagtaacctaattttgaatctattttacttaatggcgggttccaatattcctgatatagcttctgatcctgaaaaggggattcttaagcttcaggaaaagtttcggttggacttggatgatgaagccagtatacatttcttccaggatcttatcaatgagagtgtgagtgcattattccctcagatggttgagactatccatcgttgggctcaatattggcggtaaccccaatatttattgggtgttactgcaccaagtaattaaccaggccacttagtgacattggcggcaacaatgacattggcctcaagacagcagcataacttaaaaaatcgttatcatacacagactaatggttgtttggtttaaatcatcctatttcatttttgtaaataactcttacctggtcataatctgcagtttgatatatatgtaaataacttttgctatgatgtttggccagtttacaagggtaaatgatcaaaactgtatctgcacg

SEQ ID NO: 13125 - DNA, 176 bp, Glycine max
  Clone ID: PAT_MRT3847_111859C.1
gagacctcacgtcaagctgagtcactcgctgtgttgatccatatcaatacgcgtattttattatgaatgagtggcaataacagcggccgcactagtagatctaagcttacctctgtgtgcatgccacatctcacctcatccatcctgaccatggcattcaattaactggccgtcct

SEQ ID NO: 13126 - DNA, 1852 bp, Glycine max
  Clone ID: PAT_MRT3847_11185C.1
gtaaatatgaaggatcttttggaagctgtagtcccatttgatatattgttggatcggagaaaacgggctaactatctcagtagtattgggaataatctagagacatgcacgaaaccaaaggttgttcaagatgctgggttagctttggcatcaatgttatgttccgggaatggaaattacattatcaagccgattaaaaagcctctatagtttatatagcaagatgaaacgaaaggatataagcattgataaagtatatgatgcacgtgcattaagagtagttgtgggagacaagaatggaactttacatggtcctgcagttcagtgttgttatagtcttcttgacattgtacacaggctttggactccaatagatggtgaatttgatgactacatcattaatccgaagcctagtggctatcagtccttgcacactgcagtccaaggtcctgacaactcacctttagaagtacaaataaggacacagaggatgcatgagtgtgctgaacaaggacttgctgcacattggctttacaaggaaactggcaatccttttttatccatagacagcatggatgaacctgaaactgaagcatcctcctatttctccaaagatctagaggaaggaaattcttcagatattttattaagtaaatataagtcattgaaggctggacatccagtcctcagagtagaaggaagtcacttacttgctgcaattatcatcagtgtagaaaatgatgaaagagaattgctagttgctgtgagctttgggctagcagcttctgaagcagtagctgacagaagatctttccagattaagcgatgggaagcttatgcacgactgtacaaaaaggtgtctgatgaatggtggtttgaaccggggcatggggattggtttacttgtctagagaagtacacactgtgtcgagatgcaagaccaatttgggcgcctactcccaacattcatccaggttagcttgtggtcggtgctggttttcgcggatgctggggctgttgtatctgctgtgtttgagggcaggcaagtggactggataacatctcggtcaaaatttgacttggttgcatcaacttctgtagaagctggcatcaataacaaggtgaaccttttgagaacaatgctctcttgggaagagcaattgcgctctgaagtaaatttcatgcaagcaaagcatgatgcaaagctttatgatcttcatggttctcttggggaagtggtaattatatgttggcctcatggtgaaattttgaggttaaaggcgggtagcactgctactgatgctgctcaaagagttggtttggagggaaagctggttttgattaatggacagctagtactgcccaacacaaaactcaaagatggcgatgtagttgaagtaagaatttaaatcattctttagaaaaatgtaaataattctttatgggtcgtatgtggttaaagtagatggtatagaaatagtttttattttatttagggacggggattcttggtagaataacgtactttcaaaaattttaaatgtggtggctttaaacttgattccaagaataagttggataaccacatgtgctatcatattttttattgttgtgttggctgtatgtgtggttattactaatttttggtactatggttattcactgtatttggaattttaagcattaaaccactgcactttaaaatcatttgaagctgcaataattttatcaagaatccttggaaagagcggccaagccagggaaaatgctgtgtatctgattattagaaatatttgtatgatacagattaaatttatagcaaaacataggcttaggattcatttccactgta

SEQ ID NO: 13127 - DNA, 840 bp, Glycine max
  Clone ID: PAT_MRT3847_111860C.1
cggattcccgggtcgacccacgcgtccgggttgttgaattcctaattgattgaaaggtcgaaacaatggcgaaccctaaggtctacttcgacatgaccattggaggccaaccggcggggcgcatagtgatggagctgtacgccgacacgactcctcgcaccgctgagaacttccgcgccctctgcaccggcgagaagggcgtgggccgcagcgggaagcccctccactacaagggctccaccttccaccgcgtgattccgaacttcatgtgccagggcggagacttcaccgccggtaacgggaccggtggtgagtccatctacgggtccaagtttgcggacgagaacttcataaagaagcacacgggccccggcattctttcgatggcaaacgccggacctggcacgaacgggtctcagttcttcatctgcaccgttaagacggagtggctcgacgggaagcacgtggttttcggacaggttgtggagggccttgacgtcgtgaaggacatcgagaaggtggggtccagctccggtaagacctccaaacccgtcgttgttgctgactccggtcaactctcctagacacgtaaggtgggtgtggctgatgctagccgcttctcttctctcagtggaatcatgttgagatcttcattctgttttctgattttagtttggtcatcatataaatcatgctactgttaccttaaataaagttaggattaattatctatctattcccctccttaattatttttaatttctgcttaatttaaagttcatttctctcttttatgacactacagcgatcataatgaaattcgaattcaatgtttcattt

SEQ ID NO: 13128 - DNA, 760 bp, Glycine max
  Clone ID: PAT_MRT3847_111861C.1
ctctcatttgctctcttttgttgaattccttgaaagttgcaacgatgccgaaccctaaggtctacttcgacatgaccatcggaggccaaccggccggtcgcatagtgatggagctgtacgccgacacgacccctcgcaccgccgagaatttccgcgccctttgcaccggcgagaagggcgtgggccgcagcggcaagcccctccactacaagggctccgccttccaccgcgtcattcccaacttcatgtgccagggcggtgacttcaccgccggaaacggcaccggtggcgagtccatctacggatcgaagttcgcggacgagaacttcataaagaagcacacgggtcccggcattctatcgatggcgaacgcgggacctggcacgaacgggtctcagttcttcatctgcaccgttaagacggagtggctcgacggaaagcacgtggttttcgggcaggtggtggagggccttgacgtcgtgaaggacatcgagaaggtgggttccagctccggtaagacctccaagcccgttgttgttgctgactccggacaactctcctagacatggtgatccacacggtgttggattattggtgggtatggatgatgactgatgatgctgcttctcttctctcagtggaatcctgttgagatctttatgttttctgattttaatttggagtttgtacgctggactcttctcatcataaaaatcatgctagctactgctaccttaaataaagttagtattaataatcc

SEQ ID NO: 13129 - DNA, 426 bp, Glycine max
  Clone ID: PAT_MRT3847_111862C.1
acctgcattttctctcacttctccttccctctccgccattcccattctatcggatgaacacaacaacaacgcaccaactgcgtttgataccgactgcgacgatgacaataatgcccttcatcaccgcggctccgaacccgaacccgaacccgaactcgaacctgtggatatatttgacaaaactatctgcattcactgcgataacaaacgcgaagaggcggagggagttttaatctgcggcggaaggggctgccccgtcgcggtccacgccacctgcctcggcttcgaacctgaattcgacgattccggtaacttttgctgcccctattgctggtataagcgcgccgtggacacgtgacaacggttgagggagaaggccatgaaggcgaagggagaattgtgacacttttttggacaatgacgtgc

SEQ ID NO: 13130 - DNA, 301 bp, Glycine max
  unsure (1)..(301): unsure at all n locations
  Clone ID: PAT_MRT3847_111863C.1
anacaacgcagaggtagnagacgnatcngncgaggaacaacangaagnnactaaccgacgtnacngnnccacacaacagagcnaacnnaangnanccaaangaaagaaanaagcaccancaanggaancgangaagaggcaccccgagaaagagnncacgnnnanagaggcagagagngnnanngnacacaaagaangnagaannaggagcncanagagcannnnaacanacaagagncanannnncnanagnananangacgaaanaganaganganagcnagaaacacacnaggaannn

SEQ ID NO: 13131 - DNA, 253 bp, Glycine max
  unsure (1)..(253): unsure at all n locations
  Clone ID: PAT_MRT3847_111864C.1
ctgaatgcctgttgcactctctggaggtctggtttgctaaccgnacactgcagcgaaactctgctgagagcaacgcttttaccggatcctgcaccgaactgcgtgcattgcatttttggcctgtaaaaccactctctcaactgaggttgggatgagtacaacttttcaatgaccgagatgcctattacaccgtgctagtctttggcgaactgcctaaccctttagttaaagcctacagctctggatctcagct

SEQ ID NO: 13132 - DNA, 141 bp, Glycine max
  Clone ID: PAT_MRT3847_111865C.1
atgacacggaatacaccgattacggtatagcgctgtttaaactaaatatttgaacgacagagggtgcctgccacaagctaagtatgatgcgcttatctaaatatggaatccttcaaagcgatggcgaaaaccagactctct

SEQ ID NO: 13133 - DNA, 435 bp, Glycine max
  Clone ID: PAT_MRT3847_111866C.1
gcacgagcagcaccgcaccctacaccatccaggccttcctccattttcaaactcgttctgctccatcaccacaatttcccgctcatcacctctgaaccacccttccattgtcaaacttcctctgcaccagtgtcatcattttcaaatttctgcagcacctaatcaccattgtcagcaaagcaaatcaacaaaattattaaaaaacaaaatcaaccagtgtgtctataaagtgagcaagctcaatcagagaaagcgtcgaaaaaaaaaacgagaatgaattatagaaacagagattagagtgaaactaagaaattgagaggaaattgaaaaatcaaagattggagggattgcaccggaaaggagaaggaaaaactcagagacagagttgcaactgatgctacacaatctggtagcagattctgtcaaattgtgatg

SEQ ID NO: 13134 - DNA, 433 bp, Glycine max
  Clone ID: PAT_MRT3847_111867C.1
ggctcgagaattgacccagaagatttatgataaggtcttgccaacacagaaaggtgcggaggactctggagaaataaacacgaatggttctgataaacaggattacattacaacatatcaggccctggacatactcatgcttgtggatgttcgtgaacccgaccaagactatgctattcacattcgggaaacgccaaaaacaccgctaccaaaagacgaagtcactaaaacctagtccactgatgcctttgtgcacgaccatactgatcaaataccacagaaacttacactggatgacgatgattcttacgagatggatattgttatgaacacctgcacaccataaatcgaacttggtcttaagtccactgttttatacgaaccctaacactacacttcaaatgtcaatgctggagattggagcgaataacaa

SEQ ID NO: 13135 - DNA, 434 bp, Glycine max
  Clone ID: PAT_MRT3847_111868C.1
gataaacgccactactccctttagaaattgcctgcggcaaataaacccctcctttgagggtcataattctttgcataaacaaaactgataactaatttaccttcctgtaggtttaaacccaatataaaaaataaccctatccaatttgattcctccaaaaacaatttacaatcaaaatcctttcaaggggaaggaaggggcttgaaggggccccgctaaatacttaggtctctactgacccgccgtgcatagaaggtcctttaaccaactcccacctttaccacacgagatacatttatcattgcatccggcgcagactgtattcccagaacccctccatacatcaggcacttgtgtgcctgtaggccgcttattctttaccaagctctcaagcggtgaaactatctatagaaccctgctgttgcaaaactgtg

SEQ ID NO: 13136 - DNA, 376 bp, Glycine max
  unsure (1)..(376): unsure at all n locations
  Clone ID: PAT_MRT3847_111869C.1
ttttttttttttttttttttttttttttttttttttttttttaaaaacaccccgatttgacaattaatttttttttttttcacacattcaaaaaaaacgggggggggattttaaagccctttttttaaggggccccaattgggttcaccccaacccgaactttttttaaggggacatttttacaaccccattaaacataaaagtttttaaaaggtttggggaacccatccaactttacccaaggggtttaaacccccccccggaaacggagaaaaagggaaagggttgtttccttttggagtgttgannaagggggggcccttccatcctcaagctgttggccacaaaaaaaaaccctttgggggcccgggggaag

SEQ ID NO: 13137 - DNA, 318 bp, Glycine max
  unsure (1)..(318): unsure at all n locations
  Clone ID: PAT_MRT3847_11186C.1
cgaacagctaactaggacagcggcctccctgtgtttgtgtttggaaagatgaaaactaaacctggagtggttaactttaaaaccccttaacaggaagagcgacctcccaattataagaatgtctcaactacggtggaatcaaagggcgaccaccctggtaacaataatgaaaacatgcggtattttcttatcggggggtttgaagagattagccaccaagcccgagagggccccccaagcaatgcgtgtttgcgggggagatattnnngccccggggtggtgaaaaaaaacacaccggcgaacagagcgtcacaacaa

SEQ ID NO: 13138 - DNA, 262 bp, Glycine max
  unsure (1)..(262): unsure at all n locations
  Clone ID: PAT_MRT3847_111870C.1
ggagagagagagagactagtcttgagttttttttttttttttttttttttttttttttgaaaaggttgntgcaataccatgttgtttcaaaagggtgaaatcaagggggttaagaaaaattaaattatcactctgcatattttatacaccaagccgcgtttaatgctaacactcaccttaatcataaagttttttttttttttttgccttttttttgtctgattttttctctttctacggatttccgtgatgagttttattt

SEQ ID NO: 13139 - DNA, 252 bp, Glycine max
  Clone ID: PAT_MRT3847_111871C.1
gtcaagcgcaaggcgatccacattttatagtttcacaggtgaattaccatgccttctatccggtgcatctcccaccatgatggcgccatcacttccaacctcagtactactaatgccttcccttcacttgccgtatctgcctcaaactcggccacaccgcttttctgcacgctaataacagttgcgtgcaacactctgacctctcaaataatcgttccctctaatggcttctaatgcacaagccgattctta

SEQ ID NO: 13140 - DNA, 550 bp, Glycine max
  unsure (1)..(550): unsure at all n locations
  Clone ID: PAT_MRT3847_111872C.1
cctacctagggggccaacatggaactactactacatgctcaaatcaccacgacaactgaagcagtaaccctagtctacctactgtgactcgcccttgtcagggcccttaaaaaaacgaacagtaacaacaaaaagtgcctccttttgaggcgcagcactttttgggccaccatccaagatcttcggtgtaactgaccatctatagcccgagatgctttgttttatacttatggatccctgttcaccaccaaacccggagccaccaaagcagtggacgaaatcgactggaaaaagactggggagggctcaacaactaacaacgctacnttcacccactcgccccatgctgcacggccatgatcctaattgttccatctaccccaagatgctcatggccgcactccgaacccattgactcgagcttaggaaccttatactgcacagagatccgacatgtnagccctggctgaccactgcgacaaaatccactttccctttgatcaacaagcgccggtcattgtccgacatgcgggttggcgcccctaacaat

SEQ ID NO: 13141 - DNA, 303 bp, Glycine max
  Clone ID: PAT_MRT3847_111873C.1
ggggcaaaaaatggggaattttccctttttaatatgaacatgggttaaaaagaaccccagcttcattttgtttaaaaattggggtaattttttcagggtgcctttgtccccggcccccctttgggaaaattctttccctggggttaaaaaatggaggccctccctttttttcctggggcttttaaaaaccgggccaatttaaggtctttggctttttttttacttgggtccggaaaacccttccgggtccccggtagccggaatttttggggaaatcaaccatttttttttttgggcaaaggg

SEQ ID NO: 13142 - DNA, 381 bp, Glycine max
  Clone ID: PAT_MRT3847_111874C.1
cttcaattctttcgttttgttagtgaatatggaaggtggtttggaacgatttaaaggcaccgtttttgtcaagtaatagtggtgagctcagtgaagtcactcgtctcaaatgcgattttttctccaaattgcctgataaagttcggtgtggtctcgatcctgatctctcttttcacattgactactcaaaggcaactggcttaacagaaggggagaaagagtattacgaaaggcaattttccaccctaaggtctttcgaggaggttgattcaactgaatcttccaatgtcattgaggatggctcagtgcacgcggaacaagtgcaatctgacagggcaatgaaaatatccaatttggcaaacgttcttttactcgctttta

SEQ ID NO: 13143 - DNA, 224 bp, Glycine max
  Clone ID: PAT_MRT3847_111875C.1
ggaaacccgacgggggtattataactggcgccctcaaaacacccaaaaaggaattttgggggtgtgaggtgattttgtcttgtccatacctgaatcgaaatttttttgtggggtctatattaagggggcttgcactttaatggggactgctctttgagaacatatgtttggggattacgaatggaagcttagggggaacttatattcggattggggtggccttt

SEQ ID NO: 13144 - DNA, 360 bp, Glycine max
  unsure (1)..(360): unsure at all n locations
  Clone ID: PAT_MRT3847_111876C.1
caggaaagggggggcgcaagcgaaggccgaggagggggaagctcagagggcggngaaaaccgccacctcaaaagcgccgacgaaggaaactagctagccacccaaaacggcaaaaacatcaaggccagctgagggggggaagaagaancagggaatgacaccaagggagaggaacgaggttgttttttttctctaagcngcacacgaaccagggccgcacacaccccgggctagaggcaaacgctcattagcaacataaattagcaaatcttctagttcatcctagcaaagctgacaggaatacaatacacagtcattgaaaaatagaagggcgtcgcaccaagcccttgttttcagccc

SEQ ID NO: 13145 - DNA, 1826 bp, Glycine max
  Clone ID: PAT_MRT3847_111877C.1
ctctcgcacttcgttttcaccttcacctcgctcaagaaagagagtagtaaaaggaagggaaactgaaatatgagcgagaggagtgttgaacgaatcgcgagttcttcccctttgtcttcgcttagcgtcttagtcgctcgcacttcattttcagcttcacctcgcagaagaaagagtgtaaaaagaaacgaagatgaacatgaacgaagagagtgttgaaggaagcgcgaggaggatccaagtgcgcttcgtgacaaagttaggcgagccgtacaaagttccgaccaccgccatcgctatccccgccgacctcgctcgattcggcctctcctcactcgtgaacgcactccttcaatccaatgacgctgatcatcagctggagccgtttgattttttgatcgatggcgagttcgttcggatgtcgctggagcagtttcttctggctaagggaatctctgcggaaaggatattggaaattgagtacacaagggctgtggcaccacggaaggaggaggacccttctttacatgatgattgggtcagtgctgttgatggttcttcttctcggttctttttgacaggatgttatgatggtttagggagggtatggaaaggtgctggattatgtacccatatattggagggacatagtgatgctgtcacttctgttagtatcatcaacccaaaaggtgatcggaaaccattacagtagctactgcttcgaaagaccggacattgaggttatggaagctcaatgcagagggtcctgtaaataatcctatgagggttagggcttacaaaatcttgcgtggtcataaatcttctgtaaattgtgttgcggcgcagacttctggagagatggtttgttcggcttcttgggattgcaccatcaatctatggcaaactaatgactttaatgcggaagatgacctagtgtctaaaaagagaaaaattggagctcaagttgaggagtcccaactagggtagtgagaggctcttcctaccctagttggccatacacagtgtgtgtctgctgtggtttggccacaacaggagtcaatttattctgcatcctgggatcattctattaggaaatgggatgttgagacaggaaaaaacttgacagatttattttgtgggaaggttctcaactgccttgatattggtggggaaggttctgctctgatagctgctgggggttctgaccctgtcattaggatttgggatcctcgtaaaccaggcacttctgctcctgtttttcagttttcttctcatacgtcttggatttcggcttgcaaatggcatgatcagtcttggtttcatttactttctgcatcctatgatgggaaagttatgttgtgggatctgagaactgcgtggcctctttcagtcattgaatcccacagtgataaggtattgtctgctgactggtggaaaagtgacagtgttatcagtggtggagcagactcgaaactttgcatttcgtcagagatccctgtacagtgaggcaaactttaatcatactatcatagtatggtgatttttttgagatggtgggatagaggcagatatttcttaaattgcttcagaatcagatgcaccaaatttggcagtctcgtaaaaattgaaaggcacatattggtttctttaggagcttttaaacttttaaagaagccgaccttgccaacgaacgcacataacataaccacctcgccacctccaaacctaatataaaggcatggatggataatcagatgatataatgattaatgagtgatattttcccaaaaaaaaaaaaaaaagggcggccgccgactagtgagctc

SEQ ID NO: 13146 - DNA, 596 bp, Glycine max
  Clone ID: PAT_MRT3847_111878C.1
agagataaacataaaaaatattgtgttaattgttgtatggataacacatttctacacaaaataagactttgttcacaacacctaaaaaacactagacaattgtgccttggacaaaattggctcaaaaacttgattggttccctacatttaagaaatatctgcctctatcccaccatctcaaaaaaatcaccatactatgatagtatgattaaagtttgcctcactgtacagggatctctgacgaaatgcaaagtttcgagtctgctccaccactgataacactgtcacttttccaccagtcagcagacaatacctgagttaaacaaatgccaattatattattagcaactttggctctccttgggtgtaaaacaaagttgaataggtattcttttatgctatgacatggatagttttataccttatcactgtgggattcaatgactgaaagaggccacgcagttctcagatcccacaacataactttcccatcataggatgcagaaagtaaatgaaaccaagactgatcatgccatttgcaagctgaaacccaagaagtatgagaagcaaactgaaaacaggagcagaagtgcctg

SEQ ID NO: 13147 - DNA, 831 bp, Glycine max
  Clone ID: PAT_MRT3847_111879C.1
catgaatgtgttgattcaatccctgaattaaataagatggtttttgcagttcaggatttggttaagcagtgtgaagatctcaaagtgaagtacaacgaagagatggcaaagagaaagaaactcttcaatgaagttcaagaggctaaagggaacattagggttttctgtcgatgtcgtccattgaataaggctgaaatctcagctggatgcaatacaattgtggattttgatgcagcaaaggaaggttgccttggaattttgacaagtggctccaccaaaaaatctttcagatttgacagagtttatacaccaaaagatgatcaagttgatgtttttgctgatgcatcatcaatggtaatctctgtactggatggctacaatgtttgcatctttgcttatgggcaaacaggaacagggaagacattcaccatggaaggaacacagcagaatagaggagtaaattacaggactcttgagcacttgtttaaagttagtaaggaaaggagtgaaacattttcatatgacatatctgttagtgtgatagaggtttacaatgaacaaatcagagatttattggctacaggacaaacatcaaagaggttggagataaaacaagcttctgaaggatttcatcatgttcctggtgttgtagaagccaggattgataacataaatgaagtgtggaatgtactacaggttggaaataatgctagagcagttggaagtaataacgttaatgagcacagcagtcgatctcactgcctgctttgtgtagcagtaaaggctaaaaatttgttgagtggcgaatctaccaagagcaaactttggctt

SEQ ID NO: 13148 - DNA, 136 bp, Glycine max
  Clone ID: PAT_MRT3847_11187C.1
ctaactagctgctatgtaattttaatttttggagttatttgctgctagctaggggacttattaggaaataattgaacatcaacatgtcatttgaaccttatgatcagaattgaaatatcttgattattttctcagt

SEQ ID NO: 13149 - DNA, 1166 bp, Glycine max
  Clone ID: PAT_MRT3847_111880C.1
agacattgtgaagactgcatcacgtgctaggaagagtgctgcagggtatgatttgacccgcttgatgattggaagtgaaggaacacttggtgttataacagaagtaaccctgcggcttcagaaaattccccagtattcagtggttgcaatgtgcaatttcccttctgtgaaggatgcagcagatgttgctattgccaccatgatgtctggtatacaggtgtcaagggtagagctattggatgaagttcaagtgaaagctatcaatattgctaatgggaagaatttgcctgaatgtccaactttaatgtttgaatttataggaacagaggcatatgcacgtgaacaaacacaaattgttcggaaacttgtttctgagcacaatggctcagattttgtattcgcagaagaacctgaagcaaaaaaagaactttggaaggtaaggaaagaggcactctgggcttgctttgcaatggaaccaaatctggtggcaatgactacagatgtatgtgttcctttatctcaccttggcgatttaatttcaaggtctaaaaaggagctggatgcatcaccactagtttgcacagtaattgcgcatgctggtgatggtaatttccacacggttattttatttgatcctaaccaagaagaacagcggcgggaggcagagagactcaaccagtttatggttcatgctgccttgtcattagaaggaacttgtaccggtgaacatggtgttggaactggaaaaatgaagtatcttgaagaagaactcggagtggaagcattgaggacaatgaaaaaaataaaagcagtcctagatcccaacgatatcatgaatccaggaaagctcatccctccccatgtttgtttctagtagtaccgtcactccaagaagcaagtttgtaataaagcagtcatggataaatttacaaaaccaacgtattgctgtttctaacatcaagccatatctgtagaatacatttttttttatgaaataagggcatgctgctccatgtaatttgttcattgcatgcttcaggccattttaagtttctggcctcgtgtctgaggaagtctatgtaagaagctcagcaataaccctcttttttctggccttgtgttattttgattattaagattttaaaagggctttaattcagttcatt

SEQ ID NO: 13150 - DNA, 393 bp, Glycine max
  Clone ID: PAT_MRT3847_111881C.1
gaatgaattagtagagttgtatgagaagagaaaacaaagtgcacgtgcggcaattattaaagatttgtttgaaacgtttatttggttagcagagcaacacaaaactgttgatcaagtgaggaacagtattaatgaaatgtttactgtgaaagattatgatccaaaagagagtattcgatgttctagcgtacatagagctaaaggtttagaagctgatcgtgtgtggattgtagttacaaaacctctacataacataaagactgattggcaattgaaagaagaacaaaatattgtgtatgtgtcgtggacgagaagtaaaaaagatctttattttgttggtggttcagcagacgaaatgatcctcactgttgaataaaattactaattcgcaga

SEQ ID NO: 13151 - DNA, 250 bp, Glycine max
  Clone ID: PAT_MRT3847_111882C.1
caaaaggggctattcttggtgctaataccatcagcagactgcatttaatcacaccgcaaacagtgaaccacggtcgtcggaaacaactaactcatctccaaagggaagacaggtcggacgaagaacgcaactgatacccttgcgacgaaggattggcatgaaattaatgccccctctgtgtttcaagtaacaaatgttggcgcaacactcgtctcacggatccacggtaccaagattgcgtcctaacgac

SEQ ID NO: 13152 - DNA, 505 bp, Glycine max
  unsure (1)..(505): unsure at all n locations
  Clone ID: PAT_MRT3847_111883C.1
cccatggcttcgatacggacgacggccagctcttatggtcgcctggtgtgtcgcgcgtgccgacggcctgcggtcgtacagtcatacgcgaagccagcagcatggcgggctctgtctaccgaagggcagcaaaagctgctctctgccaacctggaacaggccgatccctcagtgtttgacattatccgcaaggagtagagacgacagaagcacttcatcaatctcatcccctcggagaacttcacgagccaggctgtgttggatgcgctggggagtgtgatgcanaacaaatactcagagggatatcccggggcacgatactacggcggcaatgagtttatcgatgaagcagagatcctctgccagaatcgagcattggagacnattccgggtgcagaaggacacatgnngagtaaaacgtacagccgctgtctggctcgcctgccaatctgtacgcttactcggcggtgctcaacacccacgaccgcattatgggcctcgatct

SEQ ID NO: 13153 - DNA, 456 bp, Glycine max
  Clone ID: PAT_MRT3847_111884C.1
ttttgcagagtataagatctcgcttccacgtttctcattacttgcaaccttcatctgcactggtgaattccaaccagcctgtgggtcaaaactactccaatcccagtactagcttctttcatgtcctcttcaatgctgcagcctttgcattatacattctatcgaccctatctattgataactttgtcatcattttcctgatgactgtccttcttaccgacctttatttttgtatacccaataatgtcaatgttctaattccagatctattgatgatcttcaatgaaattaatgatctgcttgagaatgtttgtaaatttgaatgtcttgaccactagtcattgactctgatgaacaatattgactcatggctactctgatgcaccctgtatctcacagcgattctgttaatcgagcttgctatattctcactcataatgcttcaaactgattatc

SEQ ID NO: 13154 - DNA, 1492 bp, Glycine max
  Clone ID: PAT_MRT3847_111885C.1
aaggattctcctaagagaaatctgaaatccgaccgcatagagtgagacacacacggtcactgcccagattggtccacagaacaaagaacacagacagcagcaaggtcaaaaaaattgtttcgaatggcaaaagaagaggaacaacaacaaccacttcaccgatgcacccaccttacgcttacaccataattctgaacatcttcagcaagagaagaacatgggcgtgtctatttctattggtctacggcacccttttgacttcttcgtggaacttcctcaaatccacgctttcttggtacaatctgcaggttgagtcctccaccacctcggcgtggcctgcactctatgcttcagtgcttctgggcaccgtgtttggggtactttccatggtggcggcgctggtggttatggttcccgcgctggtggtgacgtggatcacgattgtggtgcttctggccttctttgggaagcctaagaggacccttgtggtggaggggaggaagattacgagggagattttcgggtttgtgatgaggactctgctcaaggaagggaattttgtggctgcggtttgtgctgttttggggtactttgctcttgttagaaggaatgggactcaactcaaggtggttgttgttgttggtgaatcgtgagtgatgattggtgtttggagtgttgttggttgttacatgagttggtaaagtgtcttaatttaatctctttttttcgtggggcgcttagcggtgggggtgatttcaaccggcgaaagaagcagctttgcaaaatgttacttactgagatatgtgtagatgcatagctgcctcatagatgccggtgatttggtatttggtaaagtgtcttaatttaatctcttttttgggatactagagtagaggttgatttacattggtgaaaagatggaactatgaaaaatgttacttttacttactgtggtcttgttaggtcacacatagtagagctctggtttatttcactgatattggggtcaatgaagttgttttgaaagttaccaaccaccagattctttactcccaattgttgcaaacatcatggagaaacgccttccatctcatcactttatttgtcctcaattttcttctttgctctactagcccaaatacccctgaaacggagtagctaaattacttggaaaatggggtccaaatcttatttggaaagacatataatatttgaatttggaatttgatgtcttcttgcacatgcccaacccaaccacacttttgttgcagattatctttgattgctacttcttctgcaagcaagcaagacagaccagaaaagattcatttgctccacatggactccaaactttcttttccccttttctttttcaattttggttaaaaaaattgataatcttatctaagtatacctttctacagttctatcaaaaaaaaaaaaaaaaaaaaaaaaaaaaaaaaaaaaaaaaaaaaaaaaaaaaaaaaaaaaa

SEQ ID NO: 13155 - DNA, 409 bp, Glycine max
  Clone ID: PAT_MRT3847_111886C.1
aattcggctcgagggctaattgcagtgaagtaagtggagacagagaggtacaacgaactatgttagaattgcttaatcagcttgatggttttagcagtgatgaccggatcaaggtttggctttaattcttgttatctatatgtgtcttctgatcgacattatataagtatgcttcacagaattttgctttctttgggtaaagcataatagtgcatatatttttaaatcctatgcttaggggctggtccaatagtttaacttctatttattacaacttgagtagagactagatttgtaagttggcaccaaattaactggatttttgttcagttaggctataggttattgaagtgccatttttttcatttcttttcttgtgaattgcaggtgatagcagcatctaaccgtg

SEQ ID NO: 13156 - DNA, 1068 bp, Glycine max
  Clone ID: PAT_MRT3847_111887C.1
ctcgagccgggttcggctcgagaaaaaatccgaccgcatagagtgagacacacacggtcactgcccagattgatccacagaacacagaacacagcaaggtaaaaaaaattcgagctttatttgtctcaaatggcaaaagaagaggagcaacaacaacaacaacaacacccaccttacgcatacaccttaattctgaacatcttcagcaagaggagaacatgggcatgtctatttctggttgtttacggtacccttttggcatcttcatggaacttactcaaatccacgctttcatggtacaatctgcaagttgaatcctccaccacctcggcgtggccggcgctctatgcttcggtgcttctgggtaccgtgttcggggttctgtcgatggtggcggctatggtggttatggttcccgcggtggtggtgacttggatcacgattgtggtgctcttggccttctttgggaagcctaagaggacgcttgtggtggaggggaggaagattactaaggagattttcgggtttgtgatgaggactttgttgaaagaagggaattttgttgctgcggtttgtgctgttttggggtactttgctcttgttagaaggaatgggactcaaggtggtggggttgctgttgttggtgaatcgtgaattattgatatttggttaggttttggagatcgtggttttttgttttttatccacaaatgttacattttttagttttttttagaaatctcagttggagagatttgaacctgcgactgcaacctgtccattcttccttcacccttccgcaaccactggactaaccttatatctcctagatgccggtgatttggtatttggtaaagtgtcttaatttaatctcttttttgggatactagagtagaggttgatttacattggtgaaaagatggaactatgaaaaatgttacttttacttactgagatatgtgtagatgcttagctgcttggtgatgacagggtaaatcccttcttgtgtatgctcttgatgattattcattaatttttactaccacttacaagctggtttgttttccc

SEQ ID NO: 13157 - DNA, 524 bp, Glycine max
  Clone ID: PAT_MRT3847_111888C.1
gttcagatagagagaaataataagtgttaatggagtatgtgatacgtaaaggtgtcctaaattactgtattttttaaaaaaattaactctctggttaagcattaaagtcaagatttaaacttgaggtcaatttatatagtataggtaccaagtggtctatcatcagtatataatagctctaagattctgtgattgttaataggtgccaagtcagaggagccaaagaatgctggagacccattggctcaatttcagaaaggtgctgttcttatggtctgtaggacttgtgggaagaagggtgatcactggacctcaaggtgtccatacaaggatcttgccccgccatctgagggattcgtcgataaacctgcggcggcagacactgtggcagccactgctggtgcaaccaagggagcatatgtgcctactggtatgagggcaggtgctgagaggactactggatctgatatgcggcgcaggaatgatgagaattctgtgagggtaactaacctctctgaggacac

SEQ ID NO: 13158 - DNA, 432 bp, Glycine max
  Clone ID: PAT_MRT3847_111889C.1
atgcaggtattagatctgatgcagagaatcttattgcagaaacttgtgatgctaacataaaccggttcatatcaaacagggcaaggtcaattaacagaaaatctgtggcggaactttttgttgatttcgtagggaagtttgctaagatggattcaatggccgtggagatgggaatctgcccctatactggaaaatgggaacagatagaggacaatatgatttggttgcccaagacttacgcaatatttgtaacaccttgcttatgttctctattttttagtgacattatagttttgttttggggataggttatgcttggttattgcaagaacaatgcttgattccaatgccgtagtgtagtggccaataatactagattctatcatatacatattttctcttgctctgctaattatatttgtatctgacttt

SEQ ID NO: 13159 - DNA, 1104 bp, Glycine max
  Clone ID: PAT_MRT3847_11188C.1
gcttgccaaagtctgcgagtctttggcgccgggtggggggtcgcggtggtcttgttggttgcccgtgctgcgaggtttagctcttgttatctgcgtggtcgcagtcgccgcagggtgtgtgtctgccaggctgccctcggcctcggggaggcaagtaatttacgagtgatgcttttgggaatggttgatgatccacgtgttgtgctcatcaagcttgcagatcgtacttcacaacatgagaacaatttatgctctgccattgcaaaaagctcaagctgttgcagaggagaccttaatcatttggtgttcacttgcttcaagattgggcctatgggcattgaaagctgaactggaggatttatgctttgctgttctgcagcctcaaatatttcaaaagatgcgagctgatctggcttccatgtggagtcctactagcagaacaggaaacccgagaagattatccataaaaggcaacttgatacatttggatgagaacagttcaactgctttctgcaatggatccttgacattcaatgaggatgtaaataggaaggatcttttggaagctgtagtcccatttgatatattgttggatcggagaaaacgggctaactatctcagtagtattgggaggctcgaagagacatgcaaaaaaccaaaggttgttcaagacgctgggctagctttggcaacaatggtaatttgcgaggaagcacttgagcgagaaatgattatatcatcttcttatgttccaggaatggaaattacattatcaagccccttaaaaagcctttatagtttatacagcaagatgaaacgaaaggatgtaagcattgataaagtatatgatgcacgtgcattaagagtagttgtgggagacaagaatggaactttacacggtcctgcagttcggtgttgatatagtcttctcgacattgtacacaggctttggactcccatagatggtgaattagatgattacatcattcatccaaagcctagtggctatgagtccttgcacactgcagcccaaggttctgacaacttaccttagaagtacaaataagacacagaggatgcttgagtgtgctgaacatggacttg

SEQ ID NO: 13160 - DNA, 231 bp, Glycine max
  Clone ID: PAT_MRT3847_111890C.1
cggctcgagataaaaattttcttctttatatccatataaattgcatggagtccaggttatttattcataagaaccaattccattgtttaaaaatcaagaattcttaagtaatttaagttactccatactcatataaaattttcaaaatcagtgcacatactagtactgatcaaccattatatcttttattcagtttaaatctattagaattgaaaaactttaattttccta

SEQ ID NO: 13161 - DNA, 1234 bp, Glycine max
  Clone ID: PAT_MRT3847_111891C.1
gcccacgcgtccgcataaaatgagtatggacatagccgaaaccaatttcatctattccttagttaatttggaacgaataaattaacataccttaaaatatcaagtgtgtttagcttttttcttccataattcattgtgtctttcctccttcactttctcaggatctttgtgagaagaagactagaaaattagtttcaattattgagaattgtttgatgggttgatccaaaaattactttccataccagatttgcagattttgagtctgacagagagcttttcgcacggctcgcctctttgtatgtgtgaagcgactgatgaaatcccaaacatagatagatagatagatcacatatgcacgttgacagttcagaaatgatcatgaagcacgtgtgcaccccaaatttctctctcacagctgcaggatacttttgacagagaagctacctaacaataagcatcaattgttgggagttgttgtgtgttgatgggttgatccacagatcgttacaagattcatccaagtgaagtaacaacaacctattttaccccaagaaaactgatggcgacatactttcatcatggtaactccgaaatccaatcgggtggcgccgacggactccaaactcttgtcctcatgaaccccggctacatccactactccgacgcgccgcagcagcagcagcagcaatcctcactcgccgccggaaacctcgtgtttctcaaccctgccgcggttgccgggggcaacaacaactcgtttaacccccacgcgccgccctctcacacccaacaattcgttggggtccctctccctaattcccaagacctcaaccaccactccatgcacgcgcaccacgacgtctcggccctgcatggcttcctgccgcgcatgcagtacaatccctggaacgcgttcgaccccacctcggcggcgcgtgagactccacgcgcacagcaggggctgtctttggggttggggtcgttccgggagggtcaggccccggccatgtccggcgacgacctgcgcgtgtctggcgggtcaccgtcatcggcttctggggttactaacaatggagcttcgggcattcatagcgtgcctttgagctcaaagtacttgaaggcagcgcatgagcttctagaagagggtgcgaatgtcaacaacgggattggcactgagttgaggaaaaagagtgggggacagaccagggtgattggagaatcatccgcagca

SEQ ID NO: 13162 - DNA, 1616 bp, Glycine max
  Clone ID: PAT_MRT3847_111892C.1
gttcagatagagagaaataataagtgttaatggagtatgtgatacgtaaaggtgtcctaaattactgtatttttgaaaaaaattaactctctggttaagcattaaagtcaagatttaaacttgaggtcaatttatatagtataggtaccaagtggtctatcatcagtatataatagctctaagattctgtgattgttaataccacacgtccaaaaatactagatgcgtcaatcgattgcgtgaattcggggcttatcttggaatactagggtcagtgagtgaaagaatagacgagaagagaatataaccaaaatagaagactaagaacaaacctcgggttctctccgtgtggccgttcagtgacaccgagtgtaaagaagaggagagaaaccgagaaagaagaagaagaaagctagggtttttgcaattgcaacgatggcgcatcaaggagaaccggcgaagctgcgatggggagagctggaggaggacgacggagaggatttggacttcctcctgccgccgcggcaggtgatagggcccgacgagaacgggataaagaaggtgatcgagtacaagttcgacgaggacgggaacaaggtaaagatcaccaccaccacacgcacgcgcaaactcgccaacgcgcgtctcagcaaacgcgccatcgagcgccgctcctggcccaagttcggcgacgccgtacacgaagacgtcggcgcccgcctcaccatggtctccaccgaagagatcctcctcgaacgccccaagcctcttggtgccaagacagaggagccaaagaatgctggagacccattggctcaatttcagaaaggtgctgttctcatggtctgtaggacttgtgggaagaagggtgatcactggacctcaaggtgtccatacaaggatcttgccccgccatctgagggattcatcgataaacctgcggcggcagacactgtggcagccactgctggtgcaaccaagggagcatatgtgcctcctggtatgagggcaggtgctgagaggactactggatctgatatgcggcgcaggaatgatgagaattctgtgagggtaactaacctctctgaggacacgagagagcctgatttgctggagctgttccgtcctttcggtcctgtcagcagagtctatgttgccattgatcagaagactggcatgagcagagggtttggctttgttaactttgtcaacagggaagatgcacaaagagctattaacaaactcaatgggtatggctatgacaatctcatccttagagttgaatgggcaaccccaagggcaaattaaatgttgaatgtttttgcctctttctttaaaacggtattttgaaggtctttctatttttgtagtctgagtcctgtactatctgtttcctttgagatgatttattatttaaaagtatacattcattctagatctcatgttggtcattgataatcaggtatcatctcacctataaagtatcacattttggaagtgaaaatgattgatatttcttagcctaggtgttatgggttatcatttttcttcttcctatgcatgatttgtctcctttgtatcttttgggtgtaaattacatttcctttctgttcccg

SEQ ID NO: 13163 - DNA, 415 bp, Glycine max
  Clone ID: PAT_MRT3847_111893C.1
tcctttttttttttttttttttttaacactttaagctttccttatttttatattctgaccggtaaacaaaagatgaaaaatgaagccaataatttgagctactgacacgaccccttttagaattaaaaacaagaggtgaaaaagaaaattgcattgaattattgcgcgtaatgagaaggcgggaagaacctctgtctttttcttctagagggacaatttgttgccacggttaactatgcaactttgttcacaggggatttaaatgattgtttgacactgctaaagcaaacactattattttattcactattctttgggcaaagaacccatatgcttttgactctgacaccaacactgggtatgtcagccttaactgctgtaagtctcaatcctttgaggacttgggtgagctcag

SEQ ID NO: 13164 - DNA, 264 bp, Glycine max
  Clone ID: PAT_MRT3847_111894C.1
cacaggatgatgttagcccaaggtatgggactatgacaacttaaattaacgcggggggttgcatagaaaattcaaagacatttacaggggaatgctaggggcttcctcggctgagaaaaggaataaaaaaaactaacccaagttcttccttacggggggtaaaacaacctacaaccaggcctcattacgcaacaaaactggggggggggcagagccaaattgggtccccaacaggggatctggttgccaaggttaagaaccaaa

SEQ ID NO: 13165 - DNA, 309 bp, Glycine max
  Clone ID: PAT_MRT3847_111895C.1
tacaagaaccactttacttattggtattaagggcacatttaccttcttaccgtcaaaatattctattctagccattaaaaatttcaaaatttttttgcctaaaaacatactttggtctaacttctaaagcgggttgaattattcaaattaaattatatccatttcacaccaaagtattattcaactacattcagcaaggaaacaattaaatttcccaaactcatcctttccgaagaaagtttcattagatgcaactactgaattcccacccattcaatacttccatcgatactagcttgattattttaa

SEQ ID NO: 13166 - DNA, 311 bp, Glycine max
  Clone ID: PAT_MRT3847_111896C.1
ggaaagacccacccgtccgaaccgtccaaaaaacaacacaaaggcagacttaacttgtctgaacatatattcaacttttggtgcatggtgctctcatttccaacaatcccattttaataatatattaatagaaaaatatccacttaaataaaataatgattaggcattccaaaatgattgtattgaaactaaacatccttatgaagcaccaactacgacttttaaatgtgctacagcaaaagcttgaatacgcaaaattattctaatattaaaaatacatgagggcactttaaacactgatatgagaaaca

SEQ ID NO: 13167 - DNA, 254 bp, Glycine max
  Clone ID: PAT_MRT3847_111897C.1
tttgaccgtggtaacacgtgtaggagtgccgcctgcttgggggggggggggggggggggggggggggggccaataaccctctagaagggaggaaacttatcaaacacaaaataatagacgcaacgtgtggatagcatggcggcatatatactgcaaataatagaaacgcaactgacgcttttgagggcaatctagtggaggatagagacagacagaccactaactgacaggcggcaaaacgcaaacaatgatgc

SEQ ID NO: 13168 - DNA, 404 bp, Glycine max
  Clone ID: PAT_MRT3847_111898C.1
tagggcgacccctttagaggagcttataacgtgcctgccccccttacgaaggttggaatttgggttgaggcaggtggtgtcgagatgcaccatagcgcctcagaggtgcgcatagttgacacattctatgggtctaaccacttgcccgtcctgctagttcttgtgctcaatttcttatagagggatttagttatttgatttctaactgatcgttgctctgtgcccttgaagggtaagatgtgtaacaagactattagttatgatttgagtgaccgcggctacccaggcaatggacatcctgagcattcacattggagatagtattgtcatcgtaccgaatgtgactggaatagggttttccgagctggaagacaatggccttagcagctgttcctttgcattca

SEQ ID NO: 13169 - DNA, 476 bp, Glycine max
  Clone ID: PAT_MRT3847_111899C.1
ttttatttttttttttttttttttttttttttttttttttttctttgggtcttgggtttttttttaaaaaaaaaccgggccccttattttcatttataaaaaaggcaaatataagggatacataaaaaaccccgcttgctaataacacctaggcaactgaacccaacacatgaaatccccacaaagggtaaaacataaaacgtacaaaagcccaaagggaaggacttttattaaatcatggcccttaaaaaaaactaaaaacccccagggggcctgcaaacgatccatctggcattactattaattaagcaaaaaactccttaaaaggcttggccacaaatttagccttttgaccaaattcttgcaaatgcttttaattctcaagggcccgcaaaagcttttccttaaccagctttttaatccttgcaattcaaaagtccctggtaaaattccccctggacatttcaacaaaaggg

SEQ ID NO: 13170 - DNA, 223 bp, Glycine max
  Clone ID: PAT_MRT3847_11189C.1
cacccacggagccacagctgacaaaggcggacggcagggaggccaggacaccccccacggaggaggagaagcaacaggcacaattttttttttttgaggctatgggaatacgaacagacagggatatggaaccaacactgcacctctgagcactgatttagttaacaatggctcgaattgagcgacacgttaagaaacgaggagtgatgatgaaccaagacgg

SEQ ID NO: 13171 - DNA, 964 bp, Glycine max
  Clone ID: PAT_MRT3847_1118C.1
cccacgcgtccgaagctctgcatcatcggaagcgggccggcggcgcacaccgccgccatatacgcggcgcgcgccgagttgaagccggtcctctttgaaggctggatggcgaacggcgtcgctcccggtggccagctcaccaccaccaccgacgtcgagaacttcccgggatttcccgccggcatcctcggcaccgacctcatggaccgctgccgccagcagtcgcaacgcttcggtgccgaggtagtcacggagaccgtcaccgccgtcgacctctcccaacgtccgtttagggtttactccgactccaccaccgtggaggccgaatccgtggtggtcgccaccggcgctgtggcgaaacggcttaatttcgatggcgccggtgacacccctgacgggttctggaaccgcggcatatccgcgtgcgctgtgtgcgacggcgccgccccaatattccgcggcaaaccgctggtggtgatcggcggcggcgattcggcgatggaggaagctaccttcctctccaagtttggctccaaggtgtacataattcataggagggacaagtttagggcttctaaagtcatgcagggaaaggtgatgagtaatcccaaaattgaggtgttgtggaattcagtggtggttggggctcatggggatgataagggtaggattcttggaggggttaaggtgaagaatgtggtgactggggctgtgtctgatttgaaggtttctggattgttctttgcaattgggcatgagcctgccacaaagttcttggatggtcaacttgaattggactctgatgggtacattgtgcccaaacctggcaccacaaagactagtgttgatggagtttttgctgctggtgatgttcaagataaaaagtataggcaagctattacagctgctggcactgggtgtatggcagccttggatgcagaacattacttgcaagggattggtt

SEQ ID NO: 13172 - DNA, 388 bp, Glycine max
  Clone ID: PAT_MRT3847_111900C.1
cggctcgagcggctcgagcggctcgagcggctcgagtctctacattcctccaaattttgtcttcaacttgcacgcgcctcttccactcttcttcttcttcttctctcaactcaacaacagattgatagatagatagatagagtcatgggttcctatctaagaccccatctctccgatgccttgtactgtttctctgatctatcaaggtaacactctctcttagctctctgcaacttctgccttatcctcagagagaaacaaacattcgttgtctactacttttgttctgtctcctaaaaaggtcggaaatttagttgagttttgaggctggtgtttcggagaagaagaaaaaaaatgaaggactttccttcatgctttggtgaaaatg

SEQ ID NO: 13173 - DNA, 483 bp, Glycine max
  Clone ID: PAT_MRT3847_111901C.1
tgcgtgggcggacccgccggaacactgcactttttgtggcgcactgaacaagaatataaaaagataggagtggaccgcccttatgcgtccaatctaatgagcctaaggctctggctgtattcagctttgctgcttttgactatgccaacgtggtgccagctctgccggttaagaactctaccaccactggtgacgaagcagcggcaagacgagagaatcaggcaggaggacggctataacagttcctcttggcttaccattcttgggtccgaagaattagaagcgtttcctgtgcacactggatgggccagactcgacgtactcagacttggcaatccacatctgctggaatgcgctgacagatgccaagatggatcctccaatccaaacactgaacttcttttcaggaggggcgacccctttgaaacttcatgctggtaggagccaaggcggagatctccttgctgatcctgacagcaatgc

SEQ ID NO: 13174 - DNA, 324 bp, Glycine max
  Clone ID: PAT_MRT3847_111902C.1
gaatgtaagatttactacaatttcttgtttgaattggcactctctacaacggaacctaatatggcaagtctttgggatgctcctcggtggttattctaatgagtctctctagctcctgaaggtttgatggttttggggcataaaccttttatattaagtcctgaccagcaagattttgtgctttttctgacacctgcatcgtttgcattaactgcttcctgacactgcttttaaactccaaagaaatacttgtaactaaagcaaccatttctttatacccataattggaacctatgcactgtattccttgacaaatgccaatat

SEQ ID NO: 13175 - DNA, 859 bp, Glycine max
  Clone ID: PAT_MRT3847_111903C.1
ctccctagtagttgaggcacttcatgcattcatacaagatgaatcagagcacaagtgattgctattggtgtctttagtaatatggtgctatccaattggcaaacctcatgagtagtagaagcagcagtcaagagggaaagaaccatggcatatgccttctctcatcagtggagggcctgctctagccaaggcctaggtaattatgaacttggcaaagctagttggagttggagctagaaggatcgttggattgttgcactgcccaattcaattatttttatcagcaggaagcgtccaaatttaaaagacaaatcacagacattcagaatctaaacaggcacatccttggtgaagctcttagctctcttagtctaaaggaattaaagaacctggagagtagactggagaaaggtttaagcagagttagatccagaaagcatggaactttgtttgccgatatcgagttcatgcaaaagcggccgttttcttggtgggtagtccaagacagagctgtcatgttggttgcagaaagaggaagaagaagaagctaatatgaagtatgagagtagaacccagcaaagaatgtgattgatattcatcctttaaactgaagaacaaaaatagagaggatttcatatggatacaaccaatgcaattcactcaatattagatgtatacatgaattatatttgttaggttatcccatgtattgatgtcctttttctttaacgaatattatcttttaaaagatagtatctggaaaggaaaattgtcaagcaaatagttagttgatttgttacagtatgttatcgctgttatgtttggtttgtacgttctgttattgctgttaagtttgaat

SEQ ID NO: 13176 - DNA, 140 bp, Glycine max
  Clone ID: PAT_MRT3847_111904C.1
cccacgcgttcgtccacgcgtacggattttttatggcagtgcaaataaattagtggtcgcgggaggtgcctagacatcctggctctcctctgattaatgaaaaaatattgttttttccttgccatgaaaagactacaaat

SEQ ID NO: 13177 - DNA, 491 bp, Glycine max
  unsure (1)..(491): unsure at all n locations
  Clone ID: PAT_MRT3847_111905C.1
tcgggatatacgggtgcgcagtgttccacacccacccacgcagaagcagaagcgcgtgtaaccctaattagggtttggaagccgatttgagattcacctttcgcgtaatcacagcgctggatccgtaccgtgttcctccgtctacggaagcgccttttgctcggtccttcgctgaacacggaagcatgtacggtccccgagggtatgtcgacgcaccttcatctttctcctttattccttttttcccttcaattttttcttttcccttttcgtaattttctggggtttggtttctgtgtggtgatgcttatgattagaaatcgtgtgtccgtctaaattcgtttgagattaacatttaattagggttgcgtgtaacaaatcggggttgattattggatgaatttatgtttatttttttttaagtttgtgtatctgaataatttggtttgctgagaaaacatggngtatctgtgagcatgcctaattttctt

SEQ ID NO: 13178 - DNA, 831 bp, Glycine max
  Clone ID: PAT_MRT3847_111907C.1
acggctgcgagaagacgacagaagggggaaccgcggggtaagaaattaataaagttaaaggttcaggaacgaacgaaaaggaaatccaaagatggcacattcctcgatcgtcgttactctgagccagaacttgtttaaaaggaacctcacctgtgtaaaaattcacgctcattctccttcttcttctttcggatctcgttctctttctcttccttccttctccttctctcagagaacaacacctctctctctcaccgcctccttctcctctcacaccgccatgggcgagacttccgctcccgccgccgatgccggaatggacgccgtccagcgccgtctcatgttcgaagacgaatgcattttggtggacgagaatgaccgtgtggttggtcatgattccaaatacaattgtcacttgatggaaaagattgaagctgagaatttgctgcatagagctttcagtgtattcctgttcaactctaagtatgagttgcttcttcagcaacgatctgcaaccaaggtaacattccctcttgtgtggacaaacacctgttgcagccatccactgtaccgtgaatctgagcttattgatgagaatgcccttggagtaagaaatgcagctcagaggaagcttttggatgagcttggtattgttgctgaagatgtaccagttgatcagttcaccccattgggtcgcattctttacaaggcaccttctgatggcaaatggggagagcatgaactggactatctgcttttctttgtccgggatgttaacgtgaaccccaatcctgacgaagtggctgatatcaaatatgtgaaccgcgatca

SEQ ID NO: 13179 - DNA, 239 bp, Glycine max
  Clone ID: PAT_MRT3847_111908C.1
gacagcactaacaattatgtagatgatgagtttgacgaacaacatggtgctgctaaaagtgttttagttccttctgttccttgtaggggtcacagctgcacgcctggaactgagcttcttcaaaagtgatcactcacgaagttatgatgcatgacgattagtcatggtcagcgtgtggttcctgcatgtgcagagactgaaggctgcctcaatgcgcctgtgaagatattacgctgcat

SEQ ID NO: 13180 - DNA, 257 bp, Glycine max
  unsure (1)..(257): unsure at all n locations
  Clone ID: PAT_MRT3847_111909C.1
gngggcctggttactctntgcacacccttttttactaaacataccccctttgccttntttgctgattctttttccgtaacattacggaactttacggattatgtaacgatacttgttttctttccgtaatgttgaaaactttacggaatacgcaaccatcccctctttgacttctagaangntacggagctttntggattgcgcaacaatgcttcctntcgactcccganatgncgcganacttcacggattgccta

SEQ ID NO: 13181 - DNA, 263 bp, Glycine max
  Clone ID: PAT_MRT3847_11190C.1
cggattctatctatgctaaattgaagaggacatctttcagtttcttcggttgttctcggagaattcgttggaaatctatatcatctaatgaacaaggaagtcaatcagactatgctgattacacctctcaaaggcccatgatgaagactcaaactctaacttgttcctctaatcgtgaacctcgggtgccatcatttgagtcctacaatggaatgcaggtcgtgacaactttgagaagtagtgaaggacatttgctaagctca

SEQ ID NO: 13182 - DNA, 425 bp, Glycine max
  Clone ID: PAT_MRT3847_111910C.1
ctttttttttttttttttttttttttttttttttttttttttttttttttttttttttttttttttttttttttttttttctttttttttttttcattttaacactacaattactactgtttgtcattgtttaactctttttttttggttttttttaggggggggggggggccccaggaaacacccgaccgatacccggggggacacaaagtttctccaagagggggacaaaaaaaaccggggaaaaaaaaggaaaaaaatgggcccgaaggaaaaattttttcaccgtaaaatgcaacaacacaaggagcccgagactaaaaaagaaaaaaccggggggggcacaaggggggcatacacccaaaaaatgggacaggcccacatgcccctgtaagaaacagaaaaaacgcggagccgctgtctat

SEQ ID NO: 13183 - DNA, 476 bp, Glycine max
  Clone ID: PAT_MRT3847_111911C.1
gaaacgcatggagtggcaagaaaatggaaggacataatggttttaatactttagagtgcctcagagggagattactagctgagagacgtgcttcaagggtagcaaaagaagaagcagaatcattgggcaacaagtttgttgagctggaaaagaagcttaaagaagagataaaactaagagacaaagcagaaagaaagcttaaacttttaaagaagaagcttgaatgtttcaacaatgtgaccaccccatcatggcaaaaataccattcgtctgagaaatgcgaagattcttggatcatccttgtctagtgctgtttctagagattcagaagcaaatgaagcgaagctagttcatacagtaaatccagctttgttagaaaatgaagtccacaaccacaatgtagcagaagaatgtgtacttgttcagacccaaaatagtccattcactaccaaagattgtaattcagacccaagtaa

SEQ ID NO: 13184 - DNA, 543 bp, Glycine max
  unsure (1)..(543): unsure at all n locations
  Clone ID: PAT_MRT3847_111912C.1
gcttgcacgagctagccgaggattttctgtatgtaaccaattttcttgtattaaaatgatgggtccaaagtataatacgaaatagacccactttgactcctagcccatgtttgtcatggcctagatttattccactttaccttgtgatggaaactacctgatttaaaaaaaaaaaaaaaaaaaaaaaaaaaaaaaaaaaaaaaaaaaaaaaaaaaaaaaaaaaaaaaaaaaaaaaaggaaaaaaaaaaaaaaggaanccaaaataaaaaaaacgtgcatacaaaaaaataaaatgggggggggggtttaaaaaaacaaaattttttgccccctgttttgcaacccaaaatttttttttaagggcgccgataaaaaaattattggcccgggattaaaaacctctttcacgagaaaaacttttgtttaaccagccttttccctttggcctacccccctttttttcccctggtttttaaaaaaaaaaagccccctgaagaacccctttaaaaaaagtggccccccctgttggcgaaagggaacccc

SEQ ID NO: 13185 - DNA, 558 bp, Glycine max
  unsure (1)..(558): unsure at all n locations
  Clone ID: PAT_MRT3847_111913C.1
tgcacgcggtgcgtagctcggnatttggctttagggaaagtctgatggtggaatcctttatgtcactgtccccaagcaagtaacacaacagaacaaagaaagtgagactgcgaaagttggaaatggaaaagttgaaagagcagaagagaaagatagccatcagcatggaaatggtgaagttgaaagagcagcagaaaatgatagccatgcacccaatgctgatgaggggaggataggtcccaatcagcatgacaaccatatagagcatgaagtaaaaagacatgaaaatgagcacattggagaatttcctgaacaagtaataaggaattggcatcaagaatccatgttaagaagtgcagtgggggttttgaggaaaaacaaaggaattgtagtaacagctgttatagcattttccttggggttgttcgtatctcacaaattcaacagcacaggtccttgacctgaatccacaaatgtatatcctttcatttcaggtcatttgccttttagatttatgtaaatagaataaactataaagtatcatgcagatattcaaac

SEQ ID NO: 13186 - DNA, 620 bp, Glycine max
  Clone ID: PAT_MRT3847_111914C.1
aagctaagtcgaccaatctccctttttttccgttattgttgcttctcgtgtgaacacgtacactttgcatgacaatctgaaagtgtctgaacttgcttttgaaggtctttgatgtaatccacagccaagtccaacatatcagctgtgttagtttgcttgtccatgtttgggacaagatcctgaagtttccgaactagtagttttttttttttttttttgacaaacgccatgagtatgaactacaataagttccttacacaatatagtcttcgaacaaatggaaaatattaaaaactcaaaacattgtttttgcctcaagaaaataaaacactaattaattggataaattgaacctaggcagagcatacacctcagaatccaagcttggtgcgacgccagtgacggcgcttcgcgttgtacctgatggtgttatcggtcctcatgcggatccagtagggaatgggcctgttctgcctcatcttcttcgccaacttcttcttgattctgaatgtcttgtgcgacggcattttcgattcgtcttctggaggctcgactgcgcaccggtcagcgaaaaccctaataaccaaaccctccccttctgtcgtcttctcgcagccgta

SEQ ID NO: 13187 - DNA, 536 bp, Glycine max
  Clone ID: PAT_MRT3847_111915C.1
ttttgggttcagttattaagttttttttttaaaccaaacgcaaagaattccaaaatacttttaaaaaaaggtgaccaacaccaccattagtctgaactacaataagttccttacacaatatagtcttggaacaaaatgcaaaatattaaaatctccaaagcattgtttttggctcaagaaaataaaacactaattaattggataaacagaaccgaggcaaagcaagcacctcagaatccaagcttggtgcgacgccagtgacggcgcttcgcgttgtacctgatggtgttgtcggtcctcatgcggatccagtaggggataggcctgttctgcctcatcttcttcgccaacttcttcttgattctgaatgtcttgtgcgacggcattttcgctttttcttcgggaggctcgactgcacacgggtgagcgaaaaccctaataaccaaaccctacggaggtgcactaactctccttcttttatacctaaatagtgggttttattgttattccccttctgtcgtcttctcgcagccgta

SEQ ID NO: 13188 - DNA, 375 bp, Glycine max
  Clone ID: PAT_MRT3847_111916C.1
aataaccccacttgaccaccttacgacttaaaaagagggggagaaacttacacgcctgatatccttactccacaccatgggccttcccaatttcctttatccaatctatcatacgaaccaccgaaatattacacgaatgccccatcctgcaacggattccgcatatacaaaccctctggcacttgcctggggaacagaaactgctgccaccataccatctcctcggtgacgcgaaccgaagaaactgcccgttgccttaccaaacctggtaactgtgtgggactctccatgcgcatacagaaaggccttgaagctcaaggagccctcccctaactccaccccgcaaaaacatttttagctcgccctacctttatt

SEQ ID NO: 13189 - DNA, 652 bp, Glycine max
  Clone ID: PAT_MRT3847_111917C.1
gccacgcgtccggcgtatctctttctctctccatttttatttatatatttctctccattatttggtgtgcatgctctagacacacacacaccccaccaccaccaacactgagttttagcagaaggatagagagcagaatgattcaaagaactgtgtcctttcccagtttaaggaaattgcttcttcgggctggttgttctaaatctgcttcgtccaagtgatgacgagtatgctgatgtggactgggacagtcttggatttggactgatgcccactgattatatgtatattactaaatgttgtgagggccaaaattttggacaaggacaactcagtcgttatgggaacattgaactcagtccatcagctggtgtcctaaattatggtcagggtttattcgaaggcacgaaagcatacagaaaagaaaatgggggcttgctactcttccgtccagaagaaaatgccattcgcatgaagactggtgcccaaagaatgtgcatggcatcgccttccattgatcattgttgatgctttgaagcaaactgtcttggctaataagcgttgggttcctccaccgggcaaaggatccttgtaccttaggcctctgctcctaggaactggtccggttttgggtttggctcctgcacctgaa

SEQ ID NO: 13190 - DNA, 311 bp, Glycine max
  unsure (1)..(311): unsure at all n locations
  Clone ID: PAT_MRT3847_111918C.1
gtcgcangcacgcntacgtaagctcggaattcggctcgagnnngnctcnnnanttccnntanaagaatcggngtgggctcaantntntannntcnncnnnnnnnatccatggggnnttngaagcnnnnaacatggtgntaaantcagtatagtgngcnngctgataatggangttgtgactncngnnngcaanttgntnnaagggantncatgggancngatgcaagtcacaagatggnanagagnnccngagatngagtanaattcctcnggttacnccnnatgctagagacgtgttngcagttggtggn

SEQ ID NO: 13191 - DNA, 1417 bp, Glycine max
  Clone ID: PAT_MRT3847_111919C.1
gtgcatatcactttcttagtttctctccattattggctcgagatgctctcgcattcatacctgtttccgacatacacctcaccaccaccactgcgttttaaagttgggcttctcctaccagaaggatagggcacaatgattcaaagaattgtgtactttcccagtttaaggaaattgcttcttcgggctggttctaattctgcttcgtccaagatcggaacgaacaattgctttgcttctcagccctcccctcttcggagtcacagtgatgacgagtatgctgatgtggactgggacagtcttggatttggactgatgaccactgattatatgtacattactaaatgctcagagcctcaaaattttggacaaggacaactcagaatctatgggaacattttccttttgttaatcctcctaatgttaattaactaaaattataaacgcaaactcaaatcctggtttattcgaaggcacgaaagcatacagaaaagaaaatgggggcttgctactcttccgtccagaagaaaatgccattcgcatgaagactggtgcccaaagaatgtgcatggcatcgccttccattgatcattttgttgatgctttgaagcaaactgtcttggctaataagcgttgggttcctccaccgggcaaaggatccttgtaccttaggcctctgctcctaggaactggtccggttttgggtttggctcctgcacctgaatacacattcctcatatttgcttcccctgttcgcaactatttcaaggagggctctgctccactcaacttgtacgtggaggaaaactttgaccatgctcaatgatgcggcaccttgatcgttaaaactcaagccaagaaaagagcattctcgcatgtgctataccttgattcagccacaaagaaaaatctggagcaggtctcttcttgtaacatttttattgccaagggcaaatgcatctcaacacctgctaccaatggaactattctttccggaattactcgaaaaagtgtcattgaaattgctcgtgatcatggctatcaggtacaagagcgtgttgttaacgtggatgaattaattgaggctgatgaagttttctgcacaggaactgcggtcggtgttgctccagtagggagtatcacataccaggataaaaggatggaatatataacaggttctggaaccatttgtcaagagttgaacaatacgatttcaggaattcaaacgggtactattgaagataagaagggatggattgttgaagttgattaacaacgcgtgtttataattgtttattccaatgttattaaacaaattttaaactataatgattgtctatacctaaagtgaatgaaatactgtgttgttcgttatctaaatgcatgttatatatgtaaaatgttatgcacattatat

SEQ ID NO: 13192 - DNA, 564 bp, Glycine max
  unsure (1)..(564): unsure at all n locations
  Clone ID: PAT_MRT3847_11191C.1
cactaggactagctgtcgatctatcgctagcaatgtaccagagtcctgtcactaaagtggtactgtgaagcctcatcgctttgctcaaggttggtaatggtaatattatttgtgctctcgctatttttccgtatcgctgttactatcgcaccaatatcgctcgctgtgatcaccccaaggtaataagttgtattcatattcctcgtcatgatgatctctgcactggttttcacatctgtggtctcggtcatacaagtaacaacggtatctacgtctacctccgcggtggccaacttatctgtcggagctggtgtgtcgcctggtgcggtgctcgcgggtgcaacgctatcaactgtccgcagccaaccaatcgggccggtaaaagtaacgccgccagtacgaccggccagagggctggtcttataacctatgcctgccagcagtacaaacgccgtatgaaatctaaaatacaatggccgccactgggtgttagacttacggccagatgagggaggccaggcagactgctcggctgcgattacagtagagtanacacagtaaggc

SEQ ID NO: 13193 - DNA, 1552 bp, Glycine max
  Clone ID: PAT_MRT3847_111920C.1
ctcctgtctatctcctatctatcttgcgtatctctttctctctccatttttatttatatatttctctccattatttggtgtgcatgctctagacacacacacaccccaccaccaccaacactgagttttagcagaaggatagagagcagaatgattcaaagaactgtgtcctttcccagtttaaggaaattgcttcttcgggctggttgttctaaatctgcttcgtccaagatcggaacttacaattgctttgcttctcagtcctcccctctaccgagccacaaccctagttaccgtgatgacgagtatgctgatgtggactgggacagtcttggatttggactgatgcccactgattatatgtatattactaaatgttgtgagggccaaaattttggacaaggacaactcagtcgttatgggaacattgaactcagtccatcagctggtgtcctaaattatggtcagggtttattcgaaggcacgaaagcatacagaaaagaaaatgggggcttgctactcttccgtccagaagaaaatgccattcgcatgaagactggtgcccaaagaatgtgcatggcatcgccttccattgatcattttgttgatgctttgaagcaaactgtcttggctaataagcgttgggttcctccaccgggcaaaggatccttgtaccttaggcctctgctcctaggaactggtccggttttgggtttggctcctgcacctgaatacacattcctcatatttgcttcccctgttcgcaactatttcaaggagggctctgctccactcaacttgtacgtggaggaaaactttgaccgtgcttctagccgcggcactggaaacgttaaaaccatttccaattatgcaccggtcttgatggcacaaattcaagccaagaaaagaggattttcggatgtgctataccttgattcagacaccaagaaaaatctcgaggaggtctcttcttgtaacatttttattgccaagggcaaatgcatctcaacacctgctactaatggaactattctttccggaattacccgaaaaagtgtcattgaaattgctcgcgatcatggctatcaggtagaagagcgtgctgttgccgtggatgaattgattgaggctgatgaagttttctgcacaggaactgcggtcggtgttgctccagtagggagtatcacataccaggataaaaggatggaatatataacaggttctggaaccatttgtcaagagctgaacaataccatttcaggaattcaaacgggtactattgaagataagaagggatggattgtcgaagttgattaacaacgagtgtttataatttataattgtttattccaatgttattaaaccaattttaaactgtaataatgattgcccatacgaaaaatggcgcatatactgttgttcgttatctaaaagcatgttatatgtgtaaaatgttttttttggatacatatatatgtaaaatgatgtgcacattataaattataatgattatataaagtaaaggacttgcaaatcatattccgagaaaaaa

SEQ ID NO: 13194 - DNA, 1003 bp, Glycine max
  Clone ID: PAT_MRT3847_111921C.1
ctgcgagaacgacagatgggggcaaatacaaacctaaaccaaaacccgtgtctgtgtttgtttccactttgcaaatcagtgtgtacccaggaatctcttgattgagaaagtgtgttagggtaagagttgtgtcgtgtccacgagacactgggagaaagaaagtgtgtgtgagttgttgtaaactgaattttcatttttctttagccatgagcacacttgttcgcaacaccaccctcaccttcagccgcagaaacagatacgagcttcttggtttgcagggcaaagacaagatggtcaagtccatcagctacagacgcagaagggcaaagcaaaggcaaatctttctcacaacctacaagttatcttctttgaatagtaacacttttggggagccgacacaaaagcctaagctgaagctgaagaaggttgctgttaaggttaagaagattgtggcctcggttttgatgttcatgcgagttggttcttttaggtcatgcagttctaggtctcagatttctgccacctcaccaaataggaagaactcttgaggatgttgttctgacgtgggtttaggatggtttataattctctctataatctttggttctttcacactcaggagttttagtgtgtgtttgtgaaagcgaacgcaggcgtttttgtattggaacgcggaatttttccgttttcaaacacatccttattagtatatttatatggttgatgatgaaggatgggaaaggggtatttaatattctgtatataaagcttaatctaatgtttacctttactactttcacaaaagggttttcaaacacattctaatcgcaaagttcaaggttcattgtgacggatcgatggcacatgagttattccaataatgttgacgacacgtccttaaatggtaactacgcattgcggtagtttgacccacttaagcactcaggattctttttttcgttgacttatttgaaaaaaaaagaaattctcttatacagcaaaa

SEQ ID NO: 13195 - DNA, 1766 bp, Glycine max
  Clone ID: PAT_MRT3847_111922C.1
ttcagaacgacgtcgaacctcgcttttcgccgatggccggaaactgcttgccgccggtgaagctcaccggcagcggccgcccggtgctcgaacccaacgaaatcgagtgcttcttcctctccggcgttgaccttctcagcgaagacgaccccagcttccctcacctcaaatctggcctcctcatcctcaccacgcaccgcctactctggctcccggactccgccgcatccgccggcggcaccgccggcgccatccccctcgccgccgtctcccacattttctcccccaagatgtccctgcggaaggtgttcgcctcgccgcgggtccggttccaggtgtcactgtcgccggagggaagggtctccgcggcgggttcgcgatcggtggtggcgacggcggtggtgagagggaagggggattgcgacgcgtttttggcgaagtttacggagaattgccgcgccagggcgtggcaggaggcggagagtgggtccagttcggggtcgaattcggcagtgatggcggcaacagcgacatcatcatcgtcgggcgggatttattcgagcgacggaacggtgaggatggtgggagtgtctgggatactgaggaaggagcaggaaatgtgggagagtactgataggagcttgcaggaggcttttcaggatttgaatgctctcatgagcaaggctaaagagatggtgatgctagcagagaaaatgaggctaaaacttttgtctggctcaaattctcaaaccaatgcaactaatgatgaggagatgggttcgaaggaagaaatgcaagattggttattgagtgttggtattatatcccctgttacgaaagagtctgcgggtgctttgtatcatcaacaactttctcgtcagttggcagattttgttaaagttccacttgagaaagctgggggaattatcaatcttattgatatatattgtctcttcaaccgtgctcgtggcacagaattgatctcacctgatgatttgttgcaagcatgttctctgtgggagaagtttgatgtccaagtggttctgcgcaagtttgatagtggagtcatggtaatacagacgaagtcccacagtgatgaggaggttttcaataaagtcaagatgcttgttttgaaacctgacgcccttcgagctggaataagtgctagtgatgctgcaaggacactaggggttgctccagcaatggcaaaggagcatctcttgtctgcagagagcaaaggtttactatgcagagatatcagccctgatggatttcgcttttatattaacttgtttgtggaaattgaccgagattatatgtatttagtgaaagatcagggaatttatgcctcgtgggtacaggctaacgatactcatgcttgagagtcccaagcatgtttaattcaaggtatgcataaattttaaattgataaagcgatgataagcaggaagggaaaaatgtacacacacacgcatacagttttactgtgcttcaatcaatgtgagattttcattgtagaggacacttcacataatcattctgtagaaggattataaatacttgaaaagactcgaagcaaaacttatatgtatcatgtcatatcattccaaaagctattgttactcttagcctagctttccatacatgatgtatgatgatgttgaggattactctgatatccatcccccttttttattatgataccaatactcaacgtgagttcttaaaaaaaaaaaaaaaaaaaaaagggcggccgccgactagga

SEQ ID NO: 13196 - DNA, 1086 bp, Glycine max
  Clone ID: PAT_MRT3847_111923C.1
cggttcgtcgctaacatagtaaagaaatagagatagaaaaaaaaaaacaaaactaggcaaaacttcaacccccctagcctaaatcaaaagccgtgtctgtgtttgcgtttgttttcactttgcaaatcactgtgttccaaggagtctgttggttgattgaagggtatgcgtgaattattataaactttccggtgtttgagttcaattttgtgtccgtgtgcgtgaatctccattttttacagccatgagcacgcttgtacgaaacgccaccctcaccttcagccgcagaaacagatacgagcttcttggtctgcaaggcaaagacaagatggtcaagtccatcagctacagacgcagaagggcaaagcaaagacaaatctttctcacaacctacaaactatcttctttgaacagcaatacttttgttgagccacaaaagcctaagctgaagctgaagaaggttgctgttaaggtcaagaagattgtcacctcggttttgatgttcatgcgagttggttctttcaggtcctgcggttctaggtctcagatttcttccacctcaccaaataggaagaacttttgaggatgttgttctgtcatgggtttaggatgatttatttataattccaaccttgcctatgctcttcttctcaatctttggttctttcactctaggatttaattaagaagattaataagcaaggggttttagtgtgtgtttgtgatagcgtaaaggcgatgcaatggagaagcaaccccagtttggcgttttcgtattggaacgcaaaatttctccgttcaacgtggtttcaaagtgttttcaaacacattcttactagtatatttacatggttgatgatgaaggatggtaaaggggtatcaaatattctgtatataaagcttaatctaatgtctacttgactacttttcccccttaattgctaggatttttcttttagctaaataatttgccctgtttcaactttctttttattcgtgactgtctcaagtttcatttgatttcactgagtatatttatccttctattccattacccaaaaaaaaaaaaaaaaaaaaaaaaaggat

SEQ ID NO: 13197 - DNA, 547 bp, Glycine max
  Clone ID: PAT_MRT3847_111924C.1
gtgatgccactgccagattgctgagttgcgtccggttgagttgagaagcctctcacaccaaaccaaaccttattcaattctctctctctctctctcatatcgagaatccaacagcaacatggcggaatcgtttgagcttccgaatcggttagcaatccttcctttcaggaacaaagtccttttgcctggcgccatcatccgaattcgctgcacttcccccatcagtgtaaagttggtggaacaagaactttggcagcgagaagagaaggggttgattggcatcttaccagtacgtgatgctgctgctgaaattcagcccgcgggtccagttatatctcacggcaaaggtaccgattctctagaccaaaactcaaaagttcaaggtggttcatcagattctcaaaagcttgatgtgaaaaatcagcatgatgttgttcattggcataacaggggggtagctgctcgagcactacacttatcaaagggagtggagacacctagtgggagagtcacatatattgttgttcttgaaggtctgtgcaaattt

SEQ ID NO: 13198 - DNA, 477 bp, Glycine max
  Clone ID: PAT_MRT3847_111925C.1
aatgtttgcaattttattatgaatttatctttgttggactagactaggagttatctacgattcaattgataaaacctattctctgtacatatatagtggtaatattcgacagaataattcatctgattatgtgtttttatctgtacattgtatgcagaggtagaatgtagggtaatagaagaattttgttctcattttctttgttaaagtgaggaagcaaagctcaccagtaaactaagctttcatgccactcgatttgaataaggattgattgtttgaaagtcaacataaatgacctgtgattatgcatgaaatgataaaatgatcatttgcagaaggttcatatggactgattgatgagtctgaagcaagtatcattcagatttcagtttaattattctaatttagttcctctgggagagaacttctgtcatgggacaaatgctgtgcctgtcatgaaagtaacgatgctaatat

SEQ ID NO: 13199 - DNA, 323 bp, Glycine max
  Clone ID: PAT_MRT3847_111926C.1
ttagtatccgtcaacacgggtagccgtaccactaaaacctcgacaacataagaacaacagtgccttgtttgcaggaatgagtcagaaccttgcaacaatctagcgaacaaagtgggaagggacagaaggaagctataggagcgggacacagactcaccgaatcaaccactacaacactatgagaggatgagatggacactctacgaggtgctatgggacttcatgagagatctagaactatcaagtacattgctcagcacggtgaaggtcgataggactccgcaggtggaatagcgggactcaaaccaaactgcatgagctgc

SEQ ID NO: 13200 - DNA, 433 bp, Glycine max
  unsure (1)..(433): unsure at all n locations
  Clone ID: PAT_MRT3847_111928C.1
ggatagtctaatactggtctgnngtggatgttgcagtcaatcaaagggttgggtgctgggactagagatctgagtcttgagggaatcggaagtctccgtaatagtaggatgctcaagaatgcaacattttgcatgccattganggaaggtattgtacactggggtgtggcaactgcacttggttcatnctctccacttcatgtccgcagcatatcaaggacaatgcttgagtgatgcgagatgaagaggcttaggagtctgacanttgtgcaataaggcatctgtatagctcctggcagcattgattgctcaannaatgctgagaatagaagggttgaagttgttggtggaagaaaaatataagaagtggtgaaatgggaagggtcggttacaaattgccatggcaagacaaggtattgagaaatttaagtgg

SEQ ID NO: 13201 - DNA, 241 bp, Glycine max
  Clone ID: PAT_MRT3847_111929C.1
agagctcgacctagagaacaggttgtacccagatggctgtttctttcacccattgggcctggcctcacacccacagatgaatgcctcccttcaattggccagaaatcaactcacagcccgttttgccatggtgggcttatgggctttgtactacaatcctgcgccacctgctaggagcccgctcaacaactgggcctcccacttgagtgaaccaatacacacaatcttcatggacaccttt

SEQ ID NO: 13202 - DNA, 229 bp, Glycine max
  Clone ID: PAT_MRT3847_11192C.1
gccacgcttgcgaacaggcttgccagattgttccaggagctatctgctcgatactttagggtggccgcccagctggaaacccaatacaaacaaccagctcattacggagcataccgggtagaaatatgcccctcgaaagactatagccgcgactatgatgtgcgaaaccaccctccgtttttggatgccctggtaccaacttgtgcacaagaccccgggactaaggcag

SEQ ID NO: 13203 - DNA, 262 bp, Glycine max
  Clone ID: PAT_MRT3847_111930C.1
ccggctcgacccacacgttccgaaaacctttaccactgacgaattcccaggatcttcacctatattaatactgtgcaacacgcggcaagttaatcagtactccctctaccagacctggctatgttcactacctatacataaccctatgccaccgtcaatttattcacacttcactgacttcttgacacatagcttctgagtcatcgtcgtgatctaagaagaccggttgcttatacattggacgctttatgagatgctcagc

SEQ ID NO: 13204 - DNA, 352 bp, Glycine max
  Clone ID: PAT_MRT3847_111931C.1
gtcaggggagagacagattatattcccagagttaaacctccatggaagttattcccatattgcacctccagaggggatagtggcagtacttaattataaacatagacttatttgcaggaaagatatttaagtctattcatccttcagttcatcatcagggcttgtctccaaagctattcaagggtctacataaaagaaattagccttatgttgaaccttacatgaactcagaggaagaacttaacctaccccgagttgctgcacttggaaattttgggtcatcttaggaacttggtaaaaggaaggcgcgccctactttgacagggtttaaactaccttttagacttgcccc

SEQ ID NO: 13205 - DNA, 1236 bp, Glycine max
  unsure (1)..(1236): unsure at all n locations
  Clone ID: PAT_MRT3847_111932C.1
ttcctctagagcggccgctttttttttttttttttttttttttttttgcccctcttttgaataatagtaataaaataataataaaggttctctgttgtcctcataaataaaaaaggtaaatgaatgaaaacaaaaaataaataaaaaaaatcaaagggtttcttttttgaaggatgacagggagactcaagactttacaagtacaataattacaacacaatcgttaaatcaagcccggcaactgatacaagctattgaataaaacctataggaactgaaacgaagcaagctagttgaaaaatgacaagttgacaatctgagcaacttcccacgaggccaactacaaatccctcaaaataggccaaccctttttaataatatcgttgatcttggcatcaatttgcttttggatatttggagggcaaagctcggccacatatccattcaattttgttgccaggctagacctctcaagctcctctgcaggaaggttcccaattaactgaagaaggatggtattttgcttgagttcaaatttctggtgctctggctctgcagggtaaaatgttccaagttgcagaatttgagtagtcacaatgctgcttcttgacctggtttgttcctgttctttgctgacagcagccattcttgattcttcggttccattaacaaaaataatagatctgtactgattacccacatcaggaccttggccatacacttgcctaggatcatgacttgaccaaaagacatccaggagttccctaaagctaatcagctgtgggtcatactcgaccttgacggactcggcgtggtcaccgaggcttcgatattcggggttgggtttggatccgccggcgtagccgacggtggtgcgaacgacgccgggcaagcagccgaacaccgcttcggatctccagaagctgccgagggcgaagacggcgacatgcaggcggtgttggtctcccgggtcgagggcgggttgggcgatccgatccgggaacctgatgcagagagcattgtcgacgagtatgaggacgatcaacactgagaaatgatgataatggttatggttcctctctggaactgccatttagccaccaagctgcgggacacaagttgtcgtttttaggaggtgtacgtgccaatggccgaaggcgccacccccaccccacctctagtcggatctagcactagcggacgcgtgggtcgccccgggaattnccggcaccggta

SEQ ID NO: 13206 - DNA, 1445 bp, Glycine max
  Clone ID: PAT_MRT3847_111933C.1
cttaaattagttttttttgattactgtacgctaggtactctgtccctttaatctctctctctctctcatgtttcattctttctcttctcttgtcgagttctcattgccctcttctgttcaataataataacttaataaaagaaaaaaacagtaattgaaaattgaatcgggaagaatcatcatcatcgtcgtcacgcttcccaatcaaacccaccacccatctgaatcaatccagggatccccttcttctgggtgggatagcttgattctgatgcaaggacaaaggaggactattggatcatttccagcaattgtaagtatgatgcaagggcccagttctagtggcactgatatgagtcatcagtcttccttgaatcatgtgcaaaatgcagtagatttccggttgtcagattacaggggatcttctggtgagactgcatgtttacgtggcactggtcataatgttcagagcttcaatggctggagtactggtgaatctagttctagactgaatctgatcaaccaagtcaatgatgaaggtctaaaatcagaacatgggctgtcttcttcgtataatgctgctactgaggatggtctcaggtctgaggaaagacaattcgaaccaaataatgtaatttttcctgttagttcaaatactaatctacatggcaatcaatctagagtccacccttcctttttgcaagcttacagttctactcgtattgaaatgcatgacaggcacagagaaatgcgccttgatgtcgacaacatgtcttatgaggagttgttggcattggaggagcgtataggagacgtgagcactggattgagtgaggacatcattattaagttgatgaaacaacgaatttacgtgtctgtcatgacagactcttctattgatttggaaccttgctgtatctgtcaggatgaatttgctgatggagagaatgttggatcactggattgtgggcatgagttccatagtggctgcatcaagcagtggctaatgcagaagaacctctgccctatttgcaaaacaaccgccttagctacttgatagggagaacctctatcctcttaagctggttctacctatagcttcttttattttttaaactttatgaacttctttgaactggacctctcatttgtcatgattggggacgataacatgtcccctaaaaagaagtaaacaaaaaacattggtgggtgaactataactattgtagagtttcatttatacagttgtaatggatgattacatgtggtttagataagctataagcacttggatattattaaatttcattataaatctaaggttggtggctgatgagacttgagaggattatatagattgcatgaggaatgctgctggattgtgggaagggcaaaacttgtatgccaacattactagtggaatagatagagaaaaaaaagggggg

SEQ ID NO: 13207 - DNA, 331 bp, Glycine max
  Clone ID: PAT_MRT3847_111934C.1
agatgtcagtacagcagagaaaggtccagatgcgggaatagtagagacaggctgacattacgatacagctgccataatccgaaaaaaatgatacggctgtcaaaagggttcaaactgacattgctgtgcattcaacatcaaaaggtatcgatgatgtcaccctacttcaagttaatggcccttcgattataaattccggtactggaaaaaccatgcctttaccggctttatcgcccttacaacaaatccccgttccgcaaccaacattatgaccaaaaggtgcattccaaattcccttcccaaaatttgctcacccggatattgcaatggg

SEQ ID NO: 13208 - DNA, 434 bp, Glycine max
  unsure (1)..(434): unsure at all n locations
  Clone ID: PAT_MRT3847_111935C.1
gcacgagtgttgcagctgcttgtgcttccaagttttttattataaaggatacacacgcacacagacacagttcctatgcagatctagatccatgtacgcacggagggtgganatccanaatccgtaattaacgtntcaaannnttttggancaaaaaaaggggggggggggnnttccaaggcccattccccaaaaaaattgggagcctttggaggaaaaatggagggggaacaacttttacccgggggtgcccccaagggagagggggctttaaaagaaaaaaaagtgggggtaaccccctggaagatttttttaaaaattttttaaaaaagaggggggggggtttttttttgtggcaacanaaaaaaaaacaaatttttttttttttttaaccccccccccgcgggggggggctctttgttaaaaaaaaaaaa

SEQ ID NO: 13209 - DNA, 509 bp, Glycine max
  Clone ID: PAT_MRT3847_111936C.1
ccacgcgtccgggcgcgacatccagagcgccggcggcggcggcggcggccgtcagccctccatgggcgagatgacgctggaggacttcctctcccgcgccggcgtcgccgtcgatgccgccccgcattggatgcaccagtacccgcagcagcagcagcagtacgcgctgccgcggcccctgccgcttcccggcccggctctggacgccgcgtaccacggcgaccggcccggtgttttcctctcgcactcgcaggtggccgggcggaagcgcgccgccacggcggccgtggccggggacggcgtcgtggagaggacggtggagcggcggcagaagcgcatgatcaagaaccgcgagtccgcggcgaggtcccgggccaggaagcaggcgtacaccaacgagctggagaacaaggtggcccggctggaggaggagaacaagcgtctcattgagctcaaggtgctgaaaccactggagccactggagccgccaccggcggagcagaacaaga

SEQ ID NO: 13210 - DNA, 298 bp, Glycine max
  Clone ID: PAT_MRT3847_111937C.1
ggcaccagcctcctccatggctctctcttccccatccttgactggcattgtcgtgaagctgggcccattctcccccgtcttcgtgagggtctgcttgagtacgaccgtctccaagcacgcctcctccttatgtctatagtactgtccatatctcgttgtgtacttgtgcccattctctggctagcccacttcctacctctctggcgatgtttctggtgactacagctggcacactgctgcgctctttcgctacccactaaccttctctagaaactgtgagctcgaagtgatccactcc

SEQ ID NO: 13211 - DNA, 236 bp, Glycine max
  Clone ID: PAT_MRT3847_111938C.1
gatttattttttttttttattttttttttttttttttttttttttgccccacacttggattacgtttgtctttgaacaaattttcaaacttataaaatacaggaaccctgtgggggcttatccaaattaaaaaacatgaaccctgtttgttttaaaaggaaatagaaaatacttgggtttaacagtttatttgaaactcggaggtgcgaagctcaacctaaattccgcctcgagcc

SEQ ID NO: 13212 - DNA, 753 bp, Glycine max
  unsure (1)..(753): unsure at all n locations
  Clone ID: PAT_MRT3847_111939C.1
aaactacgaatatatatagaccgaaaaatctacaaagattaaagtaaatgcacacatgttttgttatccagtgcgccaaaaaaactgggaaagaaagaccgaagtttcgcaaattactggaaattatatcaaatgagtgttaattatttttttaaaaagaaaagaagggttcactttcagcaaattttaccttggatccttttccttcatcaggtgaattcaccttcatgatactatttagtcagatcactagctactctgcaaaaaaagaaggcatcatgcatactgcaactatcaacaacgcttatcatgaaacaaactaaagatataaggattggcgagcattgttttccattgccagaatccaaaacatttatttacttgcgtcttctattgtcttttacgcgtttccaattccataatgcaattatcagaaatgagaacctcaagaaatctgataatgtcaagtgacagacccctccacaaactttaacaaatgagaacaaccatttgaggaaaagagaactacaatatgtaaccattttagcctgcaacctttattgcccccaattcatcaatttttgagctctaatgctgccgtttttttgtgtaaccacacagttaacgtcatcatcgcctccatgcgtccttttcttctcatgtggtttctttgaaatttaagcactagaatcatgatgcctnnnttnnnntttctttttctccttttcttnnnntttgnnnngatctttttga

SEQ ID NO: 13213 - DNA, 669 bp, Glycine max
  Clone ID: PAT_MRT3847_11193C.1
cggacgcgtgggagcgaatctgggagcgtcggaattggcatctagggaagttggattttgcaatcttaagaacaatttaagggctttgaatgatagagttagttttggtaggaataatatacggtgggagaaggctgggattagcttcactttgagggctcttcagactgaacccgttagagaggagaagaagccttctgggattggaacaagatccaaaatggtgagttttgtgttttgtttttcatgtactatggggggaaattgggaattgttattttgtgtttgattctgaaggaaacggttaattaaataattaattgataatagtttttatgattggtttgacttgaagtttgtatcttttagtttgaaattacatgaaaatatcaagggtgtctgagttatttagttaaattcttcatttacaaagttggggtaaataatgaagtcaaccattttgagaattttaatatatttatggggtggtaaataattttgccttgaatttgtcatctggtaaatttgagtaattatccgtagtagatttttatttggagcggtggttgggatgatttttggcaaaataacccctggatgtggatattttgactgggaaaattttccttgataatggataacctattcattcagttaaagggagcaatt

SEQ ID NO: 13214 - DNA, 106 bp, Glycine max
  Clone ID: PAT_MRT3847_111940C.1
gacatatgtgactgcgccacatgcggatgtcactttctgatctctgcgctattggactgtcgagaagatgccatgcacgatgcgactattttcggcctgctatcta

SEQ ID NO: 13215 - DNA, 171 bp, Glycine max
  Clone ID: PAT_MRT3847_111941C.1
tatagacaggtccacgaaccttgtccgattcaagggttcaactatggttgctgcactagagcacattattgagcccatgaagacctttgacaagctggtacaggctgtgagttaatgatgtgtacatgattgtacgtatcttaactaggccattggaacttgtacgagacc

SEQ ID NO: 13216 - DNA, 383 bp, Glycine max
  Clone ID: PAT_MRT3847_111942C.1
cttttgttttcaattcaatgcttgatccttatcggttttctattgcattggtacctcgctttgttatcgatattgctgctggtgctgctgctgtgtccctagagtattgtcccaattgtgttggcgctgaatcccagcttatataggcactgttattatagctggtgtgaaatcatttcaacattttctggaagaagactctcagactttgagtcatatttaatactttaagatggggttatacgaccatccacatgttgtgcagagggggtttaatcttttcagcgaccctgtttatagtcctggatactacagcgacataatgcaacatgattccggcgatgtctataatggacattactaccctaaccattatgatactg

SEQ ID NO: 13217 - DNA, 263 bp, Glycine max
  Clone ID: PAT_MRT3847_111943C.1
atttcgtttccaaaaaggtcttaacttcgaactctaaggtcacaaaagttaagaaagaagacaatgacgacgacgacttccccatcgggagaaggacctccaactccaaggaagtgaagaaaaagaagaacgtaataataaaggaggaagagaataagaataataagaagaagaaagataaaaaggtttatgatttacctggccagaaacgagatccacctgaggagaaagaccctcttaggattttctacgagactttattc

SEQ ID NO: 13218 - DNA, 470 bp, Glycine max
  Clone ID: PAT_MRT3847_111944C.1
ggctcgagaaacgaagcccttttctctctctcttcaatttcacccttttagcatttgtacattcctttcccttccttgaatcgttcttaattgcgagaggggatatcggagaagttgattggcctcccattaattgtaagtaccagttttttttttttttaaagattcttgtttatgttttggaggaatacatatgaatatgattcgatttttaaatgaactaatgaattgaaagagagagagaattcaaatttcttttctgggcctttgttgcattatttccaagctttttcctggtttgaaatggttctgctattgttcgtcaattttgttagggtttatgaacaatttcgggttatgatttttaatattgatcatgaaatttgatttgttttcactccaattttataacccttttcagaatgctcaatgttttctggaattctgtttttgaaaaaaaaaaaatgatt

SEQ ID NO: 13219 - DNA, 469 bp, Glycine max
  Clone ID: PAT_MRT3847_111945C.1
gctgatatgataatgctgcctcctgggtggctgagtgaactcatatgaattggtcattattgctgcctggttcttaaagaaggccacatcatacaggcaggaaaatatgatgatcttttacaagccggaacagattttaaaactctagtttcagctcaccatgaagcaatagaggctatggatattcctaatcactcagaagattcagatgaaaatgtacccttggatgacactattatgaccagtaagacatccatttcttctgcaaatgatattgagagtttggctaaggaagttcaggagggatcatcagatcagaaagtaattaaggagaagaagaaagcaaaacgctcgagaaaaaaacagcttgttcaggaagaggagagggttagaggtagagtcagcatgaaagtgtacttgtcatacatggctgcagcatacaaaggtgtattggattcactcataatca

SEQ ID NO: 13220 - DNA, 1277 bp, Glycine max
  Clone ID: PAT_MRT3847_111946C.1
tgcgccgggtgtgttcacagcgcggtcagtgttgggaggtggatcgcccgtggtagcagccccaccccatccatgaatgataataagggtacggaagaaaggtctcaacaagaaaccaggagaaaagatggggaacacggcaatttccctatctctctctgtctctatatctgtatttctgaattttgggaatagaaaaaccctaagcaaagcaaagcggtaaggatggggaacacggagaagctgatgaaccagatcatggaattgaaattcacttcgaaatcgctgcagcgtcaatcgcgtaagtgcgagaaggaggagaaatcggagaagctgaaggtgaagaaggcgatcgagaaaggcaacatggacggcgctcgaatctacgcggagaacgcgatccgtaagcgcacggagcagatgaactacctccgcctggcctcgcgcctcgacgccgtggtcgcccgcctcgacacgcaggcgaagatgacgacgatcagcaagtcgatgggcaacatcgtgaaatcgctggagtcatcgctggccacggggaacctccagaagatgtcggagaccatggactcgttcgagaagcagttcgtgaacatggaggtccaggccgagttcatggagagcgccatggccggatccacctccctctccactcccgaaggagaggtcaacagcctcatgcagcaggttgccgacgactacggcctcgaggtctccgtcggcctcccgcagcccgccgctcacgccgtccctgccaaggaggccgacaaggtcgacgaggacgacttgtctcgccgccttgccgaactcaaggcccgaggttaatttatctgtaataatactatcatcatgtttctcgattctcgttgctgatgcagtggaatattatatatatatatatatatatatatatatattgtgtatatttaactgaattcagttggcacttgttatatgggctcccccttttaggggtttatggccttctcttcgtgttagtgttagtgtcattgtgtgaatacttaatacattaattgaatgcttatatttgtcttttcacttaaaaaaaaaaaaaaaaaaacggtgaaagggatgttttggaacaatggattggggtttggcttgcaagaatgatagaggatgtgttgttgggctccttggcataaaagatggggccgaaccagagacatttctaagccatttccagatttcagagtcctttgaagaaagtaaaggaaggatactttctttaagtaaccccggga

SEQ ID NO: 13221 - DNA, 410 bp, Glycine max
  Clone ID: PAT_MRT3847_111947C.1
ggctcgaggggctggagcaatcctctatactacagataactatatatagaaccatcattttgaacaccaggaaggctctcttcttctctcttcttttaccaaggatctcgagagtcattattaatccacagctcatgtgcttccggggggcatacgggttcacgattgaggtccgagagtgagctcctttatcaaggagcatcatgatgctcctagggtacctgagtcagggtcaccctactacacgaacaactctcgttatcactctttgattggtgctagcaacactagtgatcgtgtccacttacacacatgccatctgtttgtctgcgacggccgaactgaatcctataaagcctatgcactcacgtcttgtcacgattgccacgcagcatgaagcttctacatca

SEQ ID NO: 13222 - DNA, 1526 bp, Glycine max
  Clone ID: PAT_MRT3847_111948C.1
ctacagccgtacaccgtccgcagtgagtataaagaggagcagtttcggtctcactcagtaaacaatgggcgacttcacggttgcgttaaaccctcccaaaaccttccgcgccgatattctcctatccaccaccaacaaccgcacttccccggcggcgcgtggctttcaaaccgtactcgcgttcaaaccaccgcgcgcttttcgaggaatccgcgcttcggtgatgccaagagagggtcaacaagcgtctctcggagacgcccttgtcaacactccgcgccgaagcgacttcgttgaggccatcagaagaaccgccgcactctccagctgcctctcagaaacgagcctccacgccaccgttcccggcctcgagtccaaaacccgcggcaaagttcgagatatatacgacgctggggattacctcgttttggtgaccactgatcggcagagtgcgtttgatcggattcttgctttcattcctttcaaaggtcagattctctatctgacgagtttgtggtgatttgaaagaactacgcatatcgtctctaatgcggttgtattggctccagataacaatgttacaatagctaggaaatgttcagttttcccagttgagtttgttgctagagggtttgtcactggaagtactgatacatctctatggacagtctacaataaaggcgttcggaactattgtggaaatgtcattccagatggaatggtaaaaaatcagaagttgcctaaaaatatactcactccaacaaccaaggctgcagatcatgatgttcctatcactccagatgagattatagacaggggactgatgactcgagctgattatgtagaagttagtgaaaaagcattatccttgtttgaatagggacaacaagtgaaggtggagcatggcctcatattggtagatactaagtatgagtttgggaaggcaaatgatggttcaattatgttgattgatgaggtccatactcctgattcaagtagatattggatagccaattcttacctggagcgctttcaaaatggtcttgagcctgaaaatattgacaaggagtttttgaggctgtggtttataagtcactgcaacccttatgaagatgaggtccttcctgatgctcctgaagatcttgtctgtgaattagcctggcgatacattttcttgtatgagactataacaaaatcaaagtttgaggtgccatcgactgaggagcctatacatgaccgaattacacgaaatgttgcatctgcactgtcatccctaaagtagcctgggaaattagggccgtgctgtaattctgtattttaatctttgtataaactatatcaaaaacttaaattaatggagaacttctccaagcaattttttatttttccaaagtataacataaagcagaaaggcaaaacaacagattcagaaatttgacaccttgtccttgtgattccttcttttttttttttttttttaagaataaagagctgtttctggaagcagacccctaaaaaaaaaaaaa

SEQ ID NO: 13223 - DNA, 593 bp, Glycine max
  Clone ID: PAT_MRT3847_111949C.1
tttggagcatgcccccatatgggtaccccctaagtattagtttgggaaggcaaatgatggttcaattatgttgattgatgaggtccatactcctgattcaagtagatattggattgccaattcttacttggagcgctttcaaaatggtcttgagcctgaaaatattgacaaggagttcttgaggctgtggtttaaaagtcactgcaatccatatgaagatgaggtccttcctgatgctcctgaagatcttgtctgtgaattagcctggcgttacattttcttgtatgagactataacaaaatcaaagtttgaggtgcccttgaccgaggagcctatacatgaccgaatttcacgaaatgttgcatctgcactgtcatccttaaagtagcctgggaattatagggcactgttgtaattctgtattttaatatcttaatataaactatatcaaaaacttaaattaatggagaacttctccaagcaagtttttatttttcctaagtataacttaaagcagaaaggcaaaacaacagacagttttcagaaatttgacatgtgattttttttaagaataaagagctgtttttggaagc

SEQ ID NO: 13224 - DNA, 188 bp, Glycine max
  Clone ID: PAT_MRT3847_11194C.1
gataaaccgaacagcactaacgcggatgatgtctttaaccttcgggttcaatatcaatgagaccctgcgtgcacctgtacgagaccttcggggcgaaatggatggtaaccaactacacaaaccggcaatgtccttgaaggttactcatgcaagagcccaccatgagtcacggtggacatactactaga

SEQ ID NO: 13225 - DNA, 233 bp, Glycine max
  Clone ID: PAT_MRT3847_111950C.1
actctttcttattaacgaaggattattttttttaaggcccttgtgatcactgaatgtaacagcatatgagattaaacagaaattgtagggtgagggctccacaccttaagatctatggtaaagcttgagtcctaaaccaccacccttacaatttttacaccgacatctatggtgtaccatacagatttcacatggaccttgttttgtgcactccttcggtgtaaaggacgacg

SEQ ID NO: 13226 - DNA, 266 bp, Glycine max
  Clone ID: PAT_MRT3847_111951C.1
ggctgctcaaccttttctttgtttctctcacttggtgggtctctctctaaaagctcaggactcagattgtgccctttttgacaaacctctgctctttgattccagggaatgtttagatgcagttgcaaatggatactctatttatttatttgtgggaatgatttactgtcttgtaatgcaatgtggggtttaagggctgattttggctttgtctgtgtgattcttattcagttggcttctcagaagtgggttagtgaaagttttta

SEQ ID NO: 13227 - DNA, 763 bp, Glycine max
  unsure (1)..(763): unsure at all n locations
  Clone ID: PAT_MRT3847_111952C.1
acggctgcgagaagacgacagaagggggagagaaattgcaagacataaccattggaagagaataatggagttactgggtttacttgtgttgttattgggtagtagcatcatggcaaatggtgcagtttctgaagtttcttggagagaaatcagcaatatcaatagtgaagggccttaccttggtatagtggtgccaaattcctttgagcttggtcctcttcttcgttcatctagctttgtgcctcataacaagtttccttactttgattttgccggaaaacattttcgcattggtgtattggaaaagaaaagggttattgttgttatgtgcggattgggaatgctaaatgcaggtctttccacccaattgctgcttaccttatttaatgtgaatggagttctccattacggaattgcagggaatgcaaatcctaaactccagattggagatgttactattcctcaatattgggcccacacagggctttggcattggcaggtactatgttggataatatattaatctttatttgctttttctgacatttccatcctctctatatacagtaacttgggacaacaaaggaagttgaaattaacttttttttctctatacacatgctcttatataantttcgatctagaattatatgaaaaagaagaaatttatatccattttaatggtacatgattttaaaaaccaatcactatatatatgcaattaggtgtaaagaccattatactatnnttcagcccctaccta

SEQ ID NO: 13228 - DNA, 479 bp, Glycine max
  Clone ID: PAT_MRT3847_111953C.1
atattgatatgtatatatttttttgtccgtcatgaaccgccatccgccattaacaacattgtgtgtcaccctttgttagatatcactctgctctcttccctaatatttatgttctatgtatgaattgtaaagttggtcactaagctttccattcaaaattggaacaaactagttgcagttctaagcaaacactaaaggctaaatttttgcactacaatttataactctggctcatatgattgaagagaaattctatcatcattaatcaagttgttcaattggagagaaatcctaatctttttcttttttcctctttgccaatggcaccattcacacaaagaaaatttaggaaaaaaataaatattgcatagtaaaagaaaaagagaggttgcagtttacctaaggcgttgttgtatcactcaaattatccccagaatcatcattgttcaatgaaacatctgaggcttcttcgtcttgat

SEQ ID NO: 13229 - DNA, 460 bp, Glycine max
  Clone ID: PAT_MRT3847_111954C.1
tttttaccccacattaaaggatttttttttttgtcttttttttgattgggagccaaaccaggatgcttaatctgctaaaaaacttcaccctaaaaattaaggctgctcttatcaaatgacgccccaaactccaaccatggtgcataaatggtgggctgaggagccctaatttggcctatggattcaaacgcgttcccctcttttcggagaagccatggagccactatgctgcttctgaaatttcttaaggccttgataacattatctgccagggtagcccaccttaatagggtggttatcaaaacccaacaacaccacgatgatgttctgatgtttccattgaggggcgagcatttacgcaaaatctacagattatggagcctgaattcgctgaatacttgtaaacactgttcgtggttggctcaaagacatacttgagcactgattccttgggggaaag

SEQ ID NO: 13230 - DNA, 149 bp, Glycine max
  Clone ID: PAT_MRT3847_111955C.1
aggttctggctagctttgcgagctactgttatttatttggttagacatgcctcaaatccaaatcaacaatttaagatcaacatttccaatttcaattaccaaattttgtcttatgcattcaatttgtaaaaccaataccaatttgccac

SEQ ID NO: 13231 - DNA, 530 bp, Glycine max
  Clone ID: PAT_MRT3847_111956C.1
ggggaggaaaaccaacaaacttgaataaaagttcacaaaaaaaaaatgggggaaaatatccaggttttagccggaacccgatctcaaaaaagctaatcccagcaaaaatgggtttgcaacaactattatagggggggactacaaacggaaaacttttaaagggcatcacttttgggcttccttttcgggttaagaagcctttttaagtcgggcaccatgagggggtttgtttgggcgttcaaaaaaaagctgggaaaaagctttaaaggccttcatggcatcgggaacctttacaagttaaacagggggcttctccctcacaaaaggcaaaaaagccccctggacttggggggcatttgcaagcccctcgggaggaaaaacaccagccttaaccttgggggcccgtttggggaacacaaccaattgggccttggatgttttcagcctctgcacattagctgggaaactttccaaaaaacggttcttgcgacgatgaacaacagcaatacctatggtgggggcaagctttt

SEQ ID NO: 13232 - DNA, 256 bp, Glycine max
  Clone ID: PAT_MRT3847_111957C.1
ctatcacctcctgctacgtctccgtggtgtcatgcacatattcagtaagaccctgaccggcgagactatatccctagaagtcgatagcgtccacaccatcgacaacttcaaggctaagatccacgacaatgatggtatcccccaagaccaacagatgctgatcttcacctgctagcatctcgaagacagacatactgctgctgacttcaacatgcagaatgattcagctctacacttgctaaacatccctcgtggt

SEQ ID NO: 13233 - DNA, 277 bp, Glycine max
  unsure (1)..(277): unsure at all n locations
  Clone ID: PAT_MRT3847_111958C.1
cgcangcttaacagagcaccatctatactttatacngtggtattgtgctactggttaattcntttcttggaataattggagancatacataaaatttcgaaaatcatgaattttaaatagagggaaaagtaatctgactcgctgtaaatnataatggtatggccagcnagaagatagtttcttctcctgaaattatattgaacaataacaagtgttggccaaacaaagatcatgttaaaaatatggtttgtcattgnnaggtctggatcctgcctaa

SEQ ID NO: 13234 - DNA, 1064 bp, Glycine max
  Clone ID: PAT_MRT3847_111959C.1
taaattcggctcgaggagagagataattgttgttattgttgttaaaaagcttcattaaagtgccttcaattctcctcctctttcaacgcccctttctcaactcaatccaattttcttctgcttcccttcgaatccgagatccgcttccaatctcattaatgggttcattttatcttggtactttttaatgggttatttctcaatgcaaacaatttattcctcaagggtgttctgttttgtcagatcctaggttttgctacatttcttcacagcccaacaatttataaaccaggcgaagcataagaatgggtgatgtgatgggtcctgacttgataagtgatcttcctcaaagcattatagagagcattctggtacagcttccaattagagatgctgtgagaactagcattttgtcaagtaaatggaggtataaatgggcttcaattactcaacttgtgtttgatgacaaatgtgtgccttttagtaatgatagggaggctgttgagaagagtgttgtcaagttcatcaccagggtgctgtttcttcaccaaggaccaattcataagttccaaatcacgaattcgaagctgcagagttgtcctgaaattgatcagtggattctcttcctttcgaggaatgatatcaaggagttggttatggaattgggagaaggggagttttttagaataccttcaagccttttcaattgtgggaagttgacccggttggacctatcgcggtgcgagttcgatccgccacatagttttaaggggtttgtgtgcttaaggagcctcaacctccatcaagttttgatatcccctgatgcaattgagagcctcatttctagatgtcctctcttggagagtttgtcactttcttactttgataatttggctcttactatctgtgccccgaatcttaagtacttgtatcttgaaggtgaattcaaggatatatgtcttgaagataccccacttttggttgaaataaccattgctatgtatatgactgatgacattgctgagcactttgagcaaatctcaaactgcaattttgtcaagttt

SEQ ID NO: 13235 - DNA, 2578 bp, Glycine max
  Clone ID: PAT_MRT3847_11195C.1
ctttctcctcgaagccaaactccaactctctgaccccagaaacgcgctctccaactggaaccaccgcgatgccaccccatgcaactggaccgccgtcacgtgcgacgccggaggcggcgtcgccaccctcgacctctgcgatctccaactctccggccccgtccccgccgccgccctctgccgcctcccctccctctcctccctcaacctctccaacaatcccctcttccctcagcaaaatctcaaccctgaaaacgcttcgcctcgcttacaacaccttcgaccccggtcccattcccaacgatctcggaaatctcaaaaatctcgaggagctctggctcgcaggttgcaaccttgtgggccccatcccaccctctttaggaaagttaagtaatcttttgaaccttgacttgtcgcagaacaacctcgttggatacatacccgaacaactcgtatcgggtttgcgcaacattgtacaaatcgaactctacgaaaactctctctccggcgcgttgccacgcgccgcgtttacaaacctcgccaacttagaaagattcgatgcctccacgaacgagttgactgggacgattccagaagagttgtgtgggttgaagaaactcgggtcgttgaatttgtacgaaaataagctcgagggttctttgccggagactatagtgaaatcgttgaacttgtacgagttgaagctgttcaacaactcgctcactgggtcgttgccgagtgggttgggtaaaaactcgaagttgcagtctctcgacgtttcttataaccgattctccggcgagattccggcgagattgtgcgacgggggagcgttggaggagctgattctgatatacaattcgttttccgggaggatcccggagactctcgaggaatgcaagagtttgaggagggttcggcttgggaacaataacttttctggcgttgtgcctgaagggttatggggtttgccccatttgtatttgttggagcttgtttataattctctttctgggtcgatttccaattcgatttccggggcttggaacttgtcaatgttgttaatttccgggaataagttttctgggtcgattcctgagggggttggggaattgggtaatcttgaaaagtttgtagctaataataatagtcttactggtcggattccgaaaagtgtgtttaggttgagtcagttggataggcttgttctcggagacaatcagcttttcggagaaattcctgttggagttggtggttgtaagaagctcaatgagcttgatttggcgaataataggttaggtgggagtattcctaaggagttaggggacctgcctgtgcttaattatcttgatctttcagggaatcagttctctggtgagattccaattgagctgcagaagttgaagcctgatttgttgaatttgtcgaacaatcagctttctggggtgattcctcctctttatgctaatgagaattatagaaagagttttcttgggaaggtttacaaagttgcgctgagtaatggcgagttggtggcagttaagaaattgtggagagcaactaagatgggaaatgaatctgttgattctgagaaggacggttttgaagttgaggttgaaacattgggaaagattcggcacaagaatattgtgagattatggtgttgctgcaacagtaaagacagcaagctcttggtttatgagtacatgccgaatggaagtcttgctgatttgttgcacaatagcaagaaaagcttgttggattggcccaccagatacaaaattgctattgatgctgccgaggggctctcatatttgcatcatgattgtgttccctccattgttcatagggatgtcaaatctagcaatatcttgctagatgatgaatttggagcaaaagttgccgattttggagttgccaaaatttttaagggagccaaccaaggggcggagtccatgtctgtgattgccggatcttatggttatatcgcaccagaatatgcttatacacttcgggtgaatgaaaagagtgacatttatagctttggtgtggtcattttggagttggtaactgggaagctccctcttgacccagagtatggagaaaatgatctagtaaaatgggttcagtccacattagatcagaaaggactggatgaggtgattgatcccactttggatattcaatttagggaagaaatcagtaaggtactcagcgtggggcttcattgcactaactctcttcctataacccgcccttcaatgcgtggtgtggttaaaaagctgaaggaagtaactgaacttccaaaatccttaagtggaaaactctcttctccttattttcaggaagaggcttcggatattgatcatgagggaagcttagtttgagctagatgctgaaaatcataacagtcagcttcaattttcacttcagctttggtacttaaaatgttagtttttgcataggtaatagtaattgaagcagcaattgtaacaaaatagcaagaaactttccaatttcaatcgtgtctaatgaaattcacaatagaatatattatgttctactttgcattaaactc

SEQ ID NO: 13236 - DNA, 979 bp, Glycine max
  Clone ID: PAT_MRT3847_111960C.1
ggctcgaataagatttaccgctatgctttccacaatactgttaccacttgttctatgtcttactctccttgtgcttttcttgttcttcatccgcaatctcagaaccttcaagaacccaccccttcctccaggtcctaaaggccttccaataataggaaatttacatcaatttgataattccattctttacctgcagctatggcaactctcaaagaaatatggccctatattttctcttcaattaggtttaaggccagccatagttatttcctctcctaaattagccaaagaggtactgaaaaaccatgacctagagtttagtggacgacctaaactacttggccaacagaaattgtcctataatgggtcagagattgcattttccccatacaatgaatattggagacaaatgagaaaaatttgtgttgtccatatctttagctccaagcgtgtctctagcttttcatctataagaaattgtgaggtgaagcaaatgataaaaaaaatatctgggcatgcctcttcttcgggtgttacaaacttgaatgagttactcatgtctctctcaagtactataatcactataatatgttagagttgcttttgggagaagaaggaagtgaaaagagtaggttccatgtgttgctcaatgagcttcaggccatgatgagtactttctttgtttcagactatattccattcacgggttggattgataaactcaaaggattgcatgcacgacttgaacgaaatttcaaggagttcgataagttctaccaagaagtcattgatgagcacatggatcccaatagacaacaaatggaggaacatgatatggttgatgtcttgcttcaattgaagaatgatcgttctctttcaattgatctcacttacgatcacatcaaaggggtcctcatggacatactggtagcagggacagatacaactgcagccacatcagtttgggctatgactgccc

SEQ ID NO: 13237 - DNA, 501 bp, Glycine max
  unsure (1)..(501): unsure at all n locations
  Clone ID: PAT_MRT3847_111961C.1
ctttatctgtcatacaatattacctgttgaatcgttttcctgttccttatgctctcttccttactcttgtggctgcaattgcagcattcctaggacagtatctcattgacaagcttgttaatatcttccaaagggcttctttaattatttttgtcttggccttcacaagtcgacttagttcaattcccacgcgtccggtcggcatatcaaacatgatcttgaagattcaaaggaatgaatacatgggatttgataatttttgcaggaatgatacatagagcttttcaagtatctttttatttgcacacattttctgtttgttgtttgccaccaccaaaccacctgagaggggatgatatgttttgtttttatttcaaatgtcaaaaagaaagtttgtgctaattgaagcattttttggatacatatgctaatagaagcattaaatcttgtatgtccaaaanaaaaaaaaaaaaatagaacaaaattgacattaacaaaaac

SEQ ID NO: 13238 - DNA, 555 bp, Glycine max
  Clone ID: PAT_MRT3847_111962C.1
ctcaagtcaaataacaaacactttatccaaaaacaaaaatgccaagaacaaatgatttaacctcagtgattcttggttcaagtcgatcaagtttcgtcaatacaatttgtaaatttgtccgagatgttgatgaaatgaatgagactgtcatgattccatctctattgactgatttaaataacaattcatctacacaaccatcaaccgatttgcctgaatgtttcgatctacaaacacttcatcaattacttaatcgtctaaaagatgaattaacaatagctcgatttgaagatgatcaaagtaaatcttgcaactttacctctgccaataatattttatctatcaataactgtaataataatattaacaacaattccaacaacaccaacaacaacaatagaaacaacaaccagattaatgtaaattcaaatgtatcaacaacaggaggaacaccattaaggatagctgaaggtgatcttagcggattgagcaagaaattgtcctcttcatgcaaatgttcagattcagatgatggtttctcttcattaaacagct

SEQ ID NO: 13239 - DNA, 105 bp, Glycine max
  Clone ID: PAT_MRT3847_111963C.1
agaaattttacatgcagagcagttgtagaaactttcatgtattttagttgaaacaccaaagaagtgctcttcaagaatacagggaccaatcaaattttcactttt

SEQ ID NO: 13240 - DNA, 336 bp, Glycine max
  Clone ID: PAT_MRT3847_111964C.1
ctttttcctgtcgacagtcaatgcatagagctcgtgcagatctagagcagatgcaaactgtgtcatactgagaagcttagtgacatacagtgtcagcctgagtcacagctttagttcataactgatgcctggcgacaaataattgaatgtacaacagtgctgaaatggtcatatgcatatgggttctatttgccggatcatgagcatgcaatcaagcagttctttgagtacttaccaagtgactcagaatctggtctggcgagacttcatcaatgcgcagaagaggaactacagccattcttaactgctgatgattcatctagagaatttaatgac

SEQ ID NO: 13241 - DNA, 471 bp, Glycine max
  Clone ID: PAT_MRT3847_111965C.1
gagcggccgccctccacgctctttaaagacaagattttaactgtgccctcagggcgccagaacaacagagggcgaggcggtgaagaagaaaaagacaagaaggaacacgaaagagcctgcaacgaagaagaagcatagggtgaatagtgacagcacgccatcctatgcacccgagccctcaaaatcccattatacagagcaagtcggttcgctggcacttcacgttcttctggagatccatttccgcactcgctgctggataaagacacccagtattgccacccctgttctgcgctggaaaaacccaactattgccttctacgaacgtcaccatcacattagccgcaaatttcactggctccctagtcctcgtcatgtcccggtgctgctcctctgaatatatgcaagagcgaagaatttgtttgttggagcgggaagaactggaaattgggggaaattggaaaggcgggg

SEQ ID NO: 13242 - DNA, 242 bp, Glycine max
  Clone ID: PAT_MRT3847_111966C.1
gccctattatttaagggggttttgcttaatgcacttaagacaaattatgtgaacattacacggttctttaggccaccaaatcatgattcacgtaacaaatactaggatacggacaacctgcaagaacaaggtcacaagacttggaacctcacggatctatcaacataatgaaattgcaaacattctccatgaatcatgacactatgtgggcttgtctgatgcaaaaaccctgatttccccat

SEQ ID NO: 13243 - DNA, 183 bp, Glycine max
  Clone ID: PAT_MRT3847_111967C.1
gacttgtatatttacctgtgaagtttcatcattttcttgttttgttcataattggcatgagctgctgcattgaacctagaagtgagtctctggctctctccaacgagaaatcatatgtaatgtaattcttgcacacccattaaatatgagaaagaagtatacatcaaataaattaatttttga

SEQ ID NO: 13244 - DNA, 462 bp, Glycine max
  Clone ID: PAT_MRT3847_111968C.1
gagatggctagaaccacgctaaatgataacttaacccctaagcacttctaggctgaagtaatgaatattgtatgctatcttcagaacaaaatttatataagacccatcttgaaaaggactccctatgaattatggaagggacgaaaacccaacatatcatatttttatccttttaggtgtaagtgtttcattataaacacaaaggataatctaggaaaaattgactcaaaaagtgactgtggaatatttattgcatactctaaaactttctaaggcattcagagtgtacaactccggaactttagttattgaagaagctatccatataagatttggcaaaaataagcctaataaagaattattagagctagatgagtcttttgcagatttacggctggatgataacataacaatttccagctcatccagataggaatcagagatattcacatctactcaaca

SEQ ID NO: 13245 - DNA, 168 bp, Glycine max
  Clone ID: PAT_MRT3847_111969C.1
tagaagagctatgacatcacatcgtccttaacctcggatttcggttcgggtaaaaaggcaaaaaaccgtccaaaacctggtgggttttcagtggaaatcataacggttactagtggaacaggcatggaaccagttatatggtgccttggatggcctggcctggggggg

SEQ ID NO: 13246 - DNA, 3193 bp, Glycine max
  Clone ID: PAT_MRT3847_11196C.1
tcggctcgaggctgtttctgcttctctctctaccccccactctctctctaaaccaagacggcctcttcctcctccaagccaaactccaactctccgacccccaaaacgccctctccgactggaaccaccgcgacgccaccccatgcaactggaccgccgtcacgtgcgacgccgcaaccggaggcgtcgccactctcgacttctccaacctccaactctccggccccgtccccgccaccaccctctgccgcctccctcgctcgcctccctcaacttttcctacaacaacctcaacgccaccctccccgccgccgcgttctccgcctgcgccgccctcctccacctcgacctttcccagaacctcctctccggcgccatccccgccaccctccccgactccctcgtcacccttgacctctcctgcaacaacttctccggcgatattccggcgagcttcggccagctccggcaactccaatctctctcccttgtcagtaacctcctcgccggaaccctcccctcttccctcggcaatatttcaaccctcaaaatacttcgcctcgcttacaacaccttcgacgccggtcccattccgaaagagttcggaaacctcaaaaatctcgaggagctctggctcgcaggttgcagccttgtgggccccattccaccctctttaggaaggttaagtaatcttttgaacctcgacctgtcgcagaacaacctcgtcggagacatacccgaacaactcgtatcgggtttgcgcaacattgtacaaatcgaactctacgaaaactctctctccggcgcgttgccacgcgccgcgtttacaaacctcgccaacttagaaagattcgatgcctccacgaacgagttgactgggacgattccagaagagttgtgtgggttgaagaaactcgggtcgttgaatttgtacgaaaataagctcgagggttctttgccggagactatagtgaaatcgttgaacttgtacgagttgaagctgttcaacaactcgctcactgggtcgttgccgagtgggttgggtaaaaactcgaagttgcagtctctcgacgtttcttataaccgattctccggcgagattccggcgagattgtgcgacgggggagcgttggaggagctgattctgatatacaattcgttttccgggaggatcccggagactctcgaggaatgcaagagtttgaggagggttcggcttgggaacaataacttttctggcgttgtgcctgaagggttatggggtttgccccatttgtatttgttggagcttgtttataattctctttctgggtcgatttccaattcgatttccggggcttggaacttgtcaatgttgttaatttccgggaataagttttctgggtcgattcctgagggggttggggaattgggtaatcttgaaaagtttgtagctaataataatagtcttactggtcggattccgaaaagtgtgtttaggttgagtcagttggataggcttgttctcggagacaatcagcttttcggagaaattcctgttggagttggtggttgtaagaagctcaatgagcttgatttggcgaataataggttaggtgggagtattcctaaggagttaggggacctgcctgtgcttaattatcttgatctttcagggaatcagttctctggtgagattccaattgagctgcagaagttgaagcctgatttgttgaatttgtcgaacaatcagctttctggggtgattcctcctctttatgctaatgagaattatagaaagagttttcttgggaatcctggtttatgcaaggctctctctggattgtgtccaagcttgggtggtgagagtgagggtaagagcagaaagtatgcgtggattttccggttcatatttgtgcttgctgggattgtgttaattgttggggtggcttggttttacttcaaattccgggacttcaagaagatgaaaaaggggtttcacttttcaaagtggaggtcgtttcataagctgggttttagtgagtttgagattattaaattgctgagtgaggataatgtaatagggagtggagcatctgggaaggtttacaaagttgcgctgagtaatggcgagttggtggcagttaagaaattgtggagagcaactaagatgggaaatgaatctgttgattctgagaaggacggttttgaagttgaggttgaaacattgggaaagattcggcacaagaatattgtgagattatggtgttgctgcaacagtaaagacagcaagctcttggtttatgagtacatgccgaatggaagtcttgctgatttgttgcacaatagcaagaaaagcttgttggattggcccaccagatacaaaattgctattgatgctgccgaggggctctcatatttgcatcatgattgtgttccctccattgttcatagggatgtcaaatctagcaatatcttgctagatgatgaatttggagcaaaagttgccgattttggagttgccaaaatttttaagggagccaaccaaggggcggagtccatgtctgtgattgccggatcttatggttatatcgcaccagaatatgcttatacacttcgggtgaatgaaaagagtgacatttatagcttatcggctggagttttggagttggtaactgggaagctccctcttgacccagagtatggagaaaatgatctagtaaaatgggttcagtccacattagatcagaaaggactggatgaggtgattgatcccactttggatattcaatttagggaagaaatcagtaaggtactcagcgtggggcttcattgcactaactctcttcctataacccgcccttcaatgcgtggtgtggttaaaaagctgaaggaagtaactgaacttccaaaatccttaagtggaaaactctcttctccttattttcaggaagaggcttcggatattgatcatgagggaagcttagtttgagctagatgctgaaaatcataacagtcagcttcaattttcacttcagctttggtacttaaaatgttagtttttgcataggtaatagtaattgaagcagcaattgtaacaaaatagcaagaaactttccaatttcaatcgtgtctaatgaaattcacaatagaatatattatgttctactttgcattaaactcaagaaattgtaatatgccaatctttatccgt

SEQ ID NO: 13247 - DNA, 535 bp, Glycine max
  Clone ID: PAT_MRT3847_111970C.1
ctcagtttgcagccctttggtgtatatggttggaaagaaatgctagaattttcactggttgatggtcttcttttgagctcatttgggattgagtatatattttcgctttcttgtggtgttctgctaatggtcttttcagaggagtgtctttgtttgatcgttagagagatcgacatgttttgttacatgtctttgctttttctttttttcttttctttttccttttaccttctcttttatctactttccccttgagggtttcttatccttcaattttgcgtcctgctcttaataaattctgtttataaaaaaaaaaagtcaatactatgtcctgtcaaatgagccaacataaaataaattggtgaataaaatagagataggaatttgttcttgtgttggcatctagtctttgaaagttattaagagatgccaaatggaaagcatgttggcattgtggttatgtctacaaatgatgattcactaatcatcttgtagatttaactgtttattcttgactgattttaagtgagttatg

SEQ ID NO: 13248 - DNA, 510 bp, Glycine max
  Clone ID: PAT_MRT3847_111971C.1
ccgggatagttcttccgtcgctgcgcctcaagtgctcgtttgtaaaaatactcatcactggtgaatgatagcacatatctagttggctgaccgaaaccatgcatagttactacggagcacaatgtggagccatgagacagatccaatcaagcttgtccctgcatggcatcgaagatacatacaacggaactcatccgattacaatggttgcgcgagctcccggaattgagtgtgtgcaagcgccatgggtcctatgagggtgctgaataacagaccgaaaggacagcaccagaggttgtgttagcccataccgaatggatcatatctatacttaccaagactgttctagccattccatactatagagcgagtaggtcgcaataggggtagataacccccacgcggccttattatggatggccgcaccagcattatatgattgggagttacatcacaacaggcgatgattatgatgatgattatcgccataactgactacatactcgtggg

SEQ ID NO: 13249 - DNA, 217 bp, Glycine max
  Clone ID: PAT_MRT3847_111972C.1
gcagacactcatgagatagatgacagaactctagacagagcatcaccaagatcagcatacgtgagcccttgtccagtttttggcgggaggggttcttcacttcttgaggatcgcatcggcttcttttacatttgttttggataaaacattttgctgatagtgaatttttactttctcttgttttcctctcttttcgacattttcttcctcttcttct

SEQ ID NO: 13250 - DNA, 419 bp, Glycine max
  Clone ID: PAT_MRT3847_111973C.1
aaaaataacacacacttcacacttctttacaacaattaaaagagggggggaaatttttaaataggcagagcttactcaacaagagggtcatgcctaattccctttattgaattaaacaaacgaccaacggaaagaaaacacaaattccaaatcatgcaaaggattccgaattttcaaaaaatctggcagtagcctgtggaacaaaaaaagctggcttaagagttttaccagcattttcaaaatcttgaaaaattcccaaaagaatatcaaaaactgtaaactgttggggattgccattaaggaaactcaaatgccttaaagtttgatttgcccactcaaaactccaactttcaaaaccatttttaggaccccttccctttattgggaaaatcaattcccagaaatggggttttgatttt

SEQ ID NO: 13251 - DNA, 2663 bp, Glycine max
  Clone ID: PAT_MRT3847_111974C.1
ggcagtgatgtcagttttgaagtgaatggtttaaatgtcgttgctcataaattggttctagaagcacgttctcctgttttcagggcccctcttttcagtccaaagaaagatcatactatccattgtataaaagctgatgacatgaaggctccagttttgaaggtttgaatgtgtgctcttttggcttaaggtatttgttttgtgcttgtgatgcagttggaaaatgttttggttaccagctcaatttggaccactatctacacagtccttcatgatttaggaagacctgttccttattttttccattgtcttaatttcttaggacaatgatgcaactgtgaagatttttgaagtagaacggtagctacgactctgtttttgccagaatagtaccattgtttccaacttaaatcagtctgtctgaaatttgttgcaaggcctgaaaatctcagagctgtgatgcaaactgatggttttgagtacttgaaggaaagttgcccatctgttttgactgagcttttggagtatgtggctagatttactgagcattcggacttcttgtgcaagcataggaatgaattgatacttgatggcagcgacgtaaatggaaggcgggtgaagcaaaggctatagtgctaaagtgcaaacactgacaagttctctgtacaaccctctactccttgttgcatttaaaaatttccgtgagagccacagatagagggagatgataagcatttataggattagtggcaatttctaattttttttagcttcatgtctaggagatgtaaatgtagtttgttttttatgctgttgcaggtctgtctggcgtaggtttctgtgataactttgctcttaaaacatttgtcttaaaaaagaaagtattgaccactgctttgtctatttttttggcattgcttcatgttatatattgggactcactacctgacatgcaagagcttactgggttgagctcaaaatgggctactaccttgatggctcagcatctgctagcagcagctgatcggtatggcttggagagacttaggcttatgtgtgaagcaagtctctgtgatgatgttgcaataaacacggtcgctacgactctagctttggcagaacagcaccattgtttccaactgaaagcagtctgtctaaaatttgttgcaaggcctgaaaatctcagaggtgtgttttattgtttgaactttattttcatgaacatgcattaaacaaaatgtgcaatattaggagataattgggatgttgaaaggtcttacactctgtttggtaaaaaggaatgggtgagaaatagagagaatgaagaggaaataggcgaagaaatgggggatttctcttgtttggtagggtagtaatgggagaagactgaaataagaaggtgtgagaagactgaaataaaaaggtgtgaggctcacacctttttatctcctcactgaattgtgcggtgtgtggaaatgcaaggggggggagacgcatgtcacgcaaattgttttgtttccttggcggtttgaatttctagcattttttttcctggctgtttgaaacccccacaaattgagcattaactggcagtcttatatgtcacgcagtcagggtttaaaactgctagaaacgtataaaaatcaatttaaaaaatgcataattgatcttcactaatcatggtagaatatgaataaaaaaacgatcaacaaagaaatttttattattttttcaatttctttattccttatttcttctctatttctcctaaaacaagcacccctaaatccattctatttctcatctatttttgtcttccctagttctcaactatttttttccttcttaccaaacacactcttaaagttagtatctaattatcattgaatgttaaattcattgccgacacaaaggtttgttgtttcggtttggttcattttgaatgcaatatcttctgtggttcaggttggcttttttttaagaaaaaaaaatccatttttatatgactttcaatattgtttttaatatgtcgacctacaaaatatagcaaaatttaataaccaattgagtcatgataaacccttgaaaatgacatttacataaccaaaaagtaatggagtagtaaaagacaacattacaaacttcttatttaaaaaagtgtattatagataattcatagtcatacttttgatgtcctaaactcgggctgaagtattatgttccctttgtttctacagctgtgatgcaaactgatggttttgagtacttgaaggaaagttgcccatctgttttgactgaacttttggagtatgtggctagatttactgagcattcggacttcttgtgcaagcataggaatgaagtgatacttgatggcagtgacgtaaatggaaggcgggtgaagcaaagactatagtgcgaacactgacaagtttctctgtacaaccctctgctccttgttgcatttaaaaatttctgtgagagccatagatagagggagatgctaagcatttataggattagtggcaatttctaattttcttagcttacttcatgtctaggagatgtaaatgtagtttgttttgatgctgttgcaggtctgtctgtgataactttgctcgtaaaacatttgtcttaaaaaagaaagtattgatcactaaaaa

SEQ ID NO: 13252 - DNA, 309 bp, Glycine max
  Clone ID: PAT_MRT3847_111975C.1
gatagcatatcatgaggcgttcgcaacttgcacactcaattttctcactcaagcgtcgttcaaggctcgtacaaatgaagcggttcgcaagtctacgggtgggaacgatcctaggaagcacatcaccaccatggctggagtaaactctgtatctacgaccgattgagtcaagacgactcatcactatcttcttgcaactgttgctcttcgagagatcatgggctaccaaaatagcacagagcttcggatgcgcaagctcgactttcagcgtcctgttcgtgagatcgcgcaagaagtcaggactgattt

SEQ ID NO: 13253 - DNA, 584 bp, Glycine max
  Clone ID: PAT_MRT3847_111976C.1
aatgactaggactactgcgatcttcgtagaatgtccaggtccgtcatacaggaaaattaaatatgatttgcggctgggccgcagactggaaaatgtaataacgaaagcaggacatgaaagcgtgatgcggtctgaaggttaacgctaacataacttacattgcctactactgagcctgttggcagtagttagaagtataaactggtaaaaggggtgtagtccagggttagtaacctgaaccttagaaaacagcacagccatccacaaataactccagtggtaccatcgactgcccagttgcccggccaaaggccaccgtttggggcactacaccttccgcaagcacgatgtagtgtgaaaccagccaagtggcgaggtcgccccgcaatgaccgttcccagtcggtggttggtcttggccaacgtgtgcctgcctacgagggatacggtggccccccttaaggctactgctaactgggaagttggtaaaacgaaccaataaggggaaaaagcgctagaaggaggcaaatagtgaagtaatgaagtaatgagctagatatatcaagatcgcttactgctatataa

SEQ ID NO: 13254 - DNA, 571 bp, Glycine max
  Clone ID: PAT_MRT3847_111977C.1
gcttgatcctctgagcggccgccctttttttttttttttttttttttttttttttttttttttttttttttttttttttttttttttttttttttttttttttggggggccaaatttaagtggggggggggttaatttttttaccctgggccaaggttttttgttgccccccctgggaaaaaaaaaatttttgggggcccctgtttaagcagttcccaaccaaactcacgttggaaaaatggggtttaagggttaacaagggggggggtttccctcccagaaggtatttcccccccaaaaaaaccctcccaaaaaaaaaccctcctttttgggaaaaaaccgttttcaccccaaacggggggggtttttttcccggaaattggtttttccccaacgacaacaaaaaaggtttaggcttccccgccttgaacgacggaaaaaacccccgaaccctgtggttgttaaaatcaaccgttttaagcccactttgggattccactcccttaaaaggggcctcaaaattcggaattttggtaaaggatagggccaatgggtgcaacgagggaagctc

SEQ ID NO: 13255 - DNA, 559 bp, Glycine max
  Clone ID: PAT_MRT3847_111978C.1
aacaagtgactgtcccaactttgctagctgtttgttacaaaaatatctaacaccatggtttttttttctcatacgtaagaatcgaagacacaggcatgacatgagaggatttataacaattcacgctatctatattgaattgatctctggtacacaccatggttaacattattcaccaaattcaattcacatgcccctagccaacatttcatggaaccttctatcagactcttgcttctccaacttgaacttctcgtggcaattcgctatgaacatttcagccaacatatcaatctcgttcatctcatttccacaagcctttttatcatcatcatcatcttgaaccttctcttcaagccactgtaggtatcccgcaagctgagaatcatcatcatggcaatcctcatacaaatattgttcatcatgatgatggatcatgtcaccagcttttggcaacccttcaaagacacgagcgggaacagggataacatgagaagattttgaggagcaccagttgtagtggagcctgaacgagccaaagatgattttcttagtcatc

SEQ ID NO: 13256 - DNA, 227 bp, Glycine max
  Clone ID: PAT_MRT3847_111979C.1
cttcttgctgagactccagcaacgagaacgagtcattcttttgctgcaccggcgcttcttcttccggcgttcctgcctcttcttcctcttggtgttcctacttcttcgttcgtgggctccttttgttggttcttcatttgcgttctttctattcgcattgtttttttttttttaatgattattatttgaatgattgttgtttgaataatggcacgttgaatgattgg

SEQ ID NO: 13257 - DNA, 1285 bp, Glycine max
  Clone ID: PAT_MRT3847_11197C.1
cacgcgtccgctctcgtggaaatcttgtcatgggttccggtgaaggatctcctgcggttcaggtgcgtcgccaagtggctgcgagccctcatctccgatcctacattcgtcaaactgcatcttctccacatgtcctccagaaacgcacacatcctactaacgttttacgacaaacactaccctggagacaagtattccgcaccccgcaggtactgcgccccctgctctgtgcacgctttactccacaacccatcttccaccatcgagggtttccgccccttcgacataaacgtttacagagtcttgggtgtctgcaacggcttggtttgcttgctcgtttcgtaccgctatagtcatagtgactttgatgaattctgggtccggttttggaaccccgcaacgagggtcatatccgacgattcgccgcgcgtatatctccataatgatcgccccaggcgatacaagcgatacatgtttgggtttgggtatgatgagtggagtgacacataccaagcagttgttttggataataataaaccacagaatttggaggttagagttcactgcatgggtcacactggttggaagagcactttaacaacaacttgtcctgcttttcccattctgagtcaagatggagcgtctgtgaggggcacggttaactggttggcacttcccaattcgagttctgattaccaatgggaaactgttactatcgatgacttagtcattttttcgtatgatctgaagaatgagtcatacagatacttgttgatgcctgatggccttttagaagtccctcattattcgcctgaacttgtggtcttgaagggttgcctctgtctttctcatcgtcacgggggaaatcattttggtttttggctaatgaaggagtttggagttgaaaaatcttggactcgcttcctaaatataagttacgaccaacttcatattcatggcggctttctggatcatccggtgatcttgtgcatgtctgaagatgatggtgtcgtgctcctggagaatggaggacacggaaaatttattctgtataacaagagagacaatacaatagaatgttatggagaattggacaaaggcagatttcagtttttgtcttatgattatgctcaaagctttgttatgccatattgaaactaagcttccctgcatctgcttattatttgagtttatgttgaattatgtaagtggtttctgaaccttgccatttgatgtgtggacaggacagagagtttgaatagttttggtggttccttagtttaaa

SEQ ID NO: 13258 - DNA, 208 bp, Glycine max
  Clone ID: PAT_MRT3847_111980C.1
actttatgggttatcgttattcattgtgcattatgcaatgggcaccacagcaactctattctgaaccattgtgagcaccttcttcatgaggaagcaacctatgactaccaatagcctaaagacatttcccaacgctctttttggtctgaaatgtggaccaagtggtcgtgtaacttgcattgtctcttacaaagtgaagctcataacc

SEQ ID NO: 13259 - DNA, 1719 bp, Glycine max
  Clone ID: PAT_MRT3847_111981C.1
gtaccgcccgcggtccggtccgaacctcccgggagcccaattcaatggagaaacctcacgtagcagtggttccaagtcctggcttcacccatctggttccaattcttgagttctccaaacgccttcttcatctccacccagagtttcacatcacttgtttcattccctcagttgggtcatccccgacttcctccaaagcatacgttcaaacccttccaccaaccataacttccattttccttcccccaatcacccttgaccatgtgtcagatccctcagtccttgcactccaaattgaactctcagtgaatctctctctaccctacataagggaagaattgaagtctttatgttcaagagccaaggttgtagctttggttgtggatgtttttgctaatggagcattgaactttgccaaggaactcaacctcctgtcttacatatacctccctcaatccgctatgttactctctttgtacttctactcaacaaaacttgatgagatactttcttctgagtctagggagctacaaaaacctatagatattcctggttgtgtacctattcacaacaaagatctccctctcccttttcatgatctatctggcctaggttacaaggggtttcttgaacggtccaagagatttcatgttcctgatggtgtcttcatgaacaccttccttgaattggagtcaggggctataagagctttggaggaacatgtcaaagggaagccaaagctttaccctgttggacccatcattcagatggagtcaattggtcatgaaaatggggtagagtgtttaacatggttggataagcaagaaccaaattctgtgttgtatgtgtcatttggaagtggtggcacactttctcaagagcaattcaatgaactagcctttgggttggaactgagtggtaaaaaatttctttgggttgtgagggcccctagcggtgtggtaagtgctggttacctttgtgctgaaactaaggaccctctagagtttttgccacatgggtttttggagagaacaaagaaacaaggtttggttgttccttcttgggcaccacagattcaagtgctgggtcatagtgcaactggggggttcctatctcactgtggttggaactcagtgcttgaaagtgttgtgcagggtgtgccagtgatcacatggcccctctttgctgagcagagcttgaatgcagctatgatagctgatgatttaaaagtggcactgaggccaaaagttaatgaaagtggattggttgaaagagaagaaattgctaaggttgttagaggcttgatgggagacaaggaaagcttggaaattaggaaaagaatgggactattgaagattgctgctgctaatgccataaaagaagatggatcatccacaaagactctgtcagagatggctacaagtttaagagggttttagcatatcataaagtcatacaagtttgaggtacttatgaacattcttcttgtattagtcatttgaataaatttctagcaaccatgaaatgcttctgattctgttgtatctgttaatcgagattgggatatcactagttttagtgaaatttaattaaagcaatgcttatattgctacaggctatcaaaagatattgctgcgaaagtcaaatcgagcatgagcataaccctttcaagcgaatgcttcgattcttgctggaaaagaaatgctttctttctaaaaa

SEQ ID NO: 13260 - DNA, 447 bp, Glycine max
  Clone ID: PAT_MRT3847_111982C.1
cggaaaaaccgggccggaccacacccttccaattggaaccacccctaattggggttggccctccaaagtccgccccatataaggaaatgcggcgaagaactgtaatggcagggggaactaatgaaaatctccttccgaagtttgggaccaaaaccaacctaacaccaaaaagggactattatagttccggggtgctactacttgaaatagtaagtggtcgaaaaccttcacagtcgttgtattaaatcggatgtctaaaactatttaaatggctacccccttttttgcaatgtaattgttttaattaacttttgaactctaaaaaaatatcttccttttctaataaaatccctagggttattccattttaaaaagtttaggacttctttttttttcctcaccaattttttccctatttttcctcttaaatatttaataaatttattt

SEQ ID NO: 13261 - DNA, 487 bp, Glycine max
  Clone ID: PAT_MRT3847_111983C.1
ggcacatttgtcaaagaagactttgcttttacatgtgccactcattttcaagcaccaaaagtgaaaacctgagttgattgtggggagggctctttggtgctgaacagttgatcgacaaaatatcatctttgtttgtgttacatcgtgataatttaaatcaaggcaaagtcatttgagtatattctgtggaacaacataggtaaatgcataatatcaaatcaaggaggtttcttagtgttaatttatgtactatatattgtagtcaatgtgatgttccgatttgtatattacttgtgaaactagccgatgttattgcattttcattaaataaactggaagttctgggatcttataaacaagggattacttattgctgttacctttgggcttctgtattttaattttaataaattgataattttacttaatcttgctgattgtttgtgtcagtaaacacacaaacacactggtattctttgttatgtct

SEQ ID NO: 13262 - DNA, 519 bp, Glycine max
  Clone ID: PAT_MRT3847_111984C.1
actagggcaagttcccttactatactacttgcccttactgcactgaaggacttgggctaagaaaggaccgagtgatgcaggatgatctcatggagtacagggacacttggagagtatatgatgatgacttgatgagttgttaatagatgttatggcttacaacaaagggatagtttgtcttttcttcttcccccattttctagtgtcttaattttctgtgttaaaagacatttagggattgtgattaggatttttctttataatggtacacactgtaactgtagtttactctggtattgcaccatttaatagtccacatacacatacccagtccatgtttgaattgcttgctttatgcttcctgtttgagtctagtctttattttgaacaaggaacaacaaaaatgcacaagtatttcatatgaattatataatttgtttttctgctatgagctatattcttatttggcatatgcatgagctcctttgaagtaaaaaagtgttaaaaatactttacttc

SEQ ID NO: 13263 - DNA, 233 bp, Glycine max
  Clone ID: PAT_MRT3847_111985C.1
ctctgttctctcttttgttctgtttcgcgtattgtcttcatacaggaccttgaacaatgaagattgcaaagggcaagggcgcagcaagggcctcataagaatcactgaagctcgttgatgaccgaaagtttggaaagcggaaggtttccggtaagcctggtagaagtagtgcaccaaagaaggagaagatggccaagaaagactccaacaagcctaaactaccacccagtgtt

SEQ ID NO: 13264 - DNA, 272 bp, Glycine max
  Clone ID: PAT_MRT3847_111986C.1
gatatggttgctaatactcttacgccaactcgtgctgttccacaggctactgccagatctccggaaaatgcggagtcctctgcatggtctagaattcgcggtgcctgacgctcgggcgtttgtcgaatgcaataaaggcaataaggcatgaccctcctgtacgcgaatgctctgcctattcagaaaattcccacaccggtactaattgtcacaatgatgcgggaagtgtgtgtgatttcaaacaaaagtgtaaaactaatgcctcattcggt

SEQ ID NO: 13265 - DNA, 463 bp, Glycine max
  Clone ID: PAT_MRT3847_111987C.1
aattcggctcgaggtttgttgtagtgcatcttctttaatgtaaatttcactctttttttattacaaaatatttgttgttaatggattttagtttttgtcagcgagaaaagattagaatgttatttatgtagtactggcagtactactatgttgtgtaagtgtttttcttaaatgggtttgtgtttttttcctcagcagttgaattgaagttgaagccatgagatgaatcacttatctcttgacaccgaagattattctctgtcaagcttgctggagcttgcagccaacaacgatgtttcgggtttcaaaagactaatcgagtgcgatccttccttcatagacgaggttgggttgtggtatatccgtcacaaagagtcaaagaagatggtcaatgagcaaagaactcctttgatggttgctgctacctatggcagcattgatgtcatgaagctgattctttctc

SEQ ID NO: 13266 - DNA, 410 bp, Glycine max
  Clone ID: PAT_MRT3847_111988C.1
ggctgctcagccagtatgactagtgaacttcagtatttctactcacaaatcttataatatattggattgactataggtttcaactaagattacacagtggattaattatatggcctgcatcatggacacatcagaactgttatttggttagtgttatgtgactataagatataaagaattacttttcaaagatgaaaatgtgttatcgtttttttaattggaaatcacattaagaaagaaagtttgaatgaaaggtttaggtcattactttactaaaagtataataacatcagcaatccataaccctttctgatatgaagcaagaatacaggtacctcatattcctcaaattcaaaaccttcaatcaccacaatacttggaatgtggctaggagggggtcggagcaaacc

SEQ ID NO: 13267 - DNA, 218 bp, Glycine max
  Clone ID: PAT_MRT3847_111989C.1
ttttgggtatctgcacccaccctgcaacaaaagagctagtgtagtgactaccactgttcagtgatagtccggcacagaacatgagaggggcgacccaccaagtgtggtggaagtcaaaaatttgccactaccagtgaaacccctagatgaagaaaatgtctctaagtctaacacgacactggcgcggaatggcctgattgtgttgatgagtgaggaac

SEQ ID NO: 13268 - DNA, 707 bp, Glycine max
  unsure (1)..(707): unsure at all n locations
  Clone ID: PAT_MRT3847_11198C.1
tgagaatgaaatcccgaagacatcttatacatttcctcatctagatcatcatataagaaagcattatgaacatccatatgatgtagttcacatttttttagttgctgaaatactactagtaaggatagtatgtgcatacaatcaggaagaccatgtcatatttgttgaatttagagctgaggaagatgagtggatcaataccaaaacgtcagtactccaacctgaaaattggaggcccagtcctgtgcttccaggtctattaaggctgaatttcctcgctgaagtgttgtcacagtacatcacagtatcaacaatttcaattggattttaggataggagagaccaagcaatttactatgatgctcacattcgtttccaggaaagagttcgcttgaggagactttgccacagatcaatcttaggcgtatttgggatcaattcttcttgacattcaaggtgagctttcaaacagtcagcaaacgacctgggtgcaagcaactagcacttgacattgagaatcgtgctcgttcatccacatttcatagctgaaacatgtaaagccctttccctgtccagtgtccacttaagttttggtggggagtgacatatcaatctggacttttgcccttcagattgttgaatagccgcgggtcacttgggcaaatagttccaaaaataccagntccttgaacagcttctgatttcat

SEQ ID NO: 13269 - DNA, 329 bp, Glycine max
  Clone ID: PAT_MRT3847_111990C.1
ggtatcatcactattaaaatcctcatcatcctcatcatcttcatcttcctcgttatcaatatcttcatcatctgaaatatgagcttcttcttttgcattcccatcataagaaaacctgacctgcgagtaagaacctttgcttgcagcaggctgcaacaaattagatctgtctgatgtaaatggagcagcagccttggcctccatctcttgaattacatgctccaaagcctccctatcagtgaattctttaccggggtgctttattaaattccggtaacgctcaaaattaacaaactcttctaactttttcttttcttcaaactttttcg

SEQ ID NO: 13270 - DNA, 324 bp, Glycine max
  Clone ID: PAT_MRT3847_111991C.1
caaaaatggaacactacatattgaaagttgacatggatttttttttgtaacataacaaaaaaaccccggaaatttttttttctaaaaaaaatgtaatagggggaaacgacaaacccccacatttaaacacacatgggtaaatgcggggcgacaacagttgaaaagaacccatttctggtaacatcggccgctagatgatgggggggactttaaattttgtgcgagaaacgggctccctagaacagaggacgccttgagtcttaggggaaccttaaatctattgttaccaaaattctgagaagaacatggttttatgaagaaaaa

SEQ ID NO: 13271 - DNA, 513 bp, Glycine max
  Clone ID: PAT_MRT3847_111992C.1
gccggtacccccttaagtgcaatagaatatatccttgatggtgagccatttttactcccttttgcttgcctacttttcttttcattatacaataagaacattagtgatttatgacatgggttcccagtatgctttacatggaccaatgccagccgactctgtacttagtttagaatagaaaagttaccaaagctgtcagttaactaagagttctgttatttgtttgcattattttttaataaaagagtatattattaaggttgtcatcacagacttacagtttactttaaaattaaaatcaaggggctaatttcttgtttcaaaactttagtgctaaaataatgaacaaattagaggagtaaaacttatttttcttgatctttatttttatttactttaattactcacacgagaaatgcatgggcattttttacctcattaaggaagtaaaagagagtaaaacaatctctttcacaatatatttgagatctattgaatatttgagttacttgt

SEQ ID NO: 13272 - DNA, 343 bp, Glycine max
  Clone ID: PAT_MRT3847_111993C.1
gcagctctcaaccccatttctgaacgggcatggccatggcttcagccttctctggaaacccaattcggcggggactcaaacccactgggccccgccgagtttgctggcttaaatcaatgccatgaaaaccatgccgggaaaagtggtgtgctccaccaaccaccagaccgtggcagtggaggtggtgcggctggcccctcacccaaagtacaagaagcgcgtgaggaagaagaagaagttccaggcccacgatcccgattaccaattcaatggcggcgacatctgccagcttcagaagaacaagcccataaacaagaacaagggctttcttggacttcccgtt

SEQ ID NO: 13273 - DNA, 781 bp, Glycine max
  Clone ID: PAT_MRT3847_111994C.1
gaaactaaattacgtatctgtattagaggcattaggtgatatgaataaaggaatgcaatgtaagaaataatataggtagtcacttgcctctcaaatctcaatattctgccgtttgttctcaacctgtgtggctgtcacaattaccattggctctgaccatgaagtgttaccgcatttgaagaaaagaactgtttgcagctcacttgctgagacagagtgagtttcttcagaatgtattacaaaatttcaggcattctatttgtacaaccttatacagagtaaaaaaatatatcaatgggaagcccctttccaccaattccattccagggcaaaataacctatcaattttgttaagctctattcagttcctgcattaacatagagtatgtctcaggatgtaaacgacagccattcttctccattagattcagcaattctgagcattgatcaacatatccagccttagctaagccatcaatcagaactttccaagccacttcatcataattatacccacatcgtagtaaactacaaaaaacagcttcagccttctctttgttcatttgttcaaacagaccacaaataagaagcttataggattctagatgtgctaaatgactacactccatcatagaatctaccaatgtcactgcttccccaaacattcccaacttgcaacaactacttagaagagaattatgaataatttcagagggagagattcccccttccctcatatgatggtacaaaactgaggctacatttcagcgtcccactttgc

SEQ ID NO: 13274 - DNA, 607 bp, Glycine max
  Clone ID: PAT_MRT3847_111995C.1
gggcttggcgccgctggtagtcttggcctgcgtcatgaccgtgtcgccgtcgtccgcggaagccgacgacgcgcccgagccgcggcgcgacttgggctccagctgctgcaccttgaacgtcagcacgctgtcggccgccgcgccggcgccggcggcggcgacgtcgatggtgacgagcgcgttgttctgcagctcgcccgagataagcatgcgcgacagctgcgtgacaatgtgcttctccaggtagcggcgcagcgggcgcgcgccgtagtacgggtcgtacgcctgcgacaggatgaactgcgccgccgcgtccgtgagcttgaccgagacgtcgcggtccttgaggcggtccgacagcttgaccagctgcagccgcacgatgttgcccagctcgctcgacgagagcggcgcgaagacgacaatgtcgtcgaggcggttgaggaactccgggcggaagtgcttcttgacctcgaccatgaccttgtccttgacgccgggggccatggcgcccgtcttctggtcgatgcccttgagcaggtgctcggcgccaatgttgctcgtcatgatgatcaccgtgttggtgaagtcgacggtgcggcccttg

SEQ ID NO: 13275 - DNA, 261 bp, Glycine max
  unsure (1)..(261): unsure at all n locations
  Clone ID: PAT_MRT3847_111996C.1
attttaatcaatccatagcgtttgattagcttctttattatattattatattattatatgttttaaatatttgttaattttctggttttttttttttaatttgtccacttcacatttttctctctttgcgagatacaaggggtggagaaaaacaggcgctcccatatatacgttaaggcattgtacagaggtaaacatatatatttgtaagtcaatcaaattaaggtttcattttcatcnnaaaaaaaaaaaaaaaaaaaa

SEQ ID NO: 13276 - DNA, 243 bp, Glycine max
  Clone ID: PAT_MRT3847_111997C.1
attttgtatacagtgacatttactttgtgcaaggtgtgatgtcacaatcttattgcctagctatatatgagctccttcattttatgtctagataattaatttctaaacttggtcctaagttcatagcatgactatgtaatgtgaatgatagcattatatatgtaattaatatacgttttaagtaagttttaaggtgtacttggttgacgaaaataatatgaaacaaaattattgactcaagtc

SEQ ID NO: 13277 - DNA, 1641 bp, Glycine max
  Clone ID: PAT_MRT3847_111998C.1
atgtgcaagcaccccattgcaccgttccattttttcttgttttttttcttatattcgcttcttcagattaatcatgctgcagaggctagccgttatcaattctacacaaaagattcttccaaatttatgctgatataaataaaacgccggagtcctcctcctccagaaattaatttggaagacttgccattagatccaggaaaacgaattaaaatttcagcatgtcatcctaatgatcaagataagatatggagagcatatttacaaagaggaccatgccaacctacttaacataatttttcccaaagaaaaattggaaactctttaagaagattttgtccttcttggtttaatgaatttggcaactggttggagtatagcatagaaaaagatgttgcatttttcttgtgttgttatctttttaggcatgattttggaaagcaatcaggtggtgatacatttgtgatagaacgattaacaaattgaaataagaaagaaagactttcatctcatgttggaggtcctaatagtgctcataacattgcttggaggaagtgtcaagatttaatgaatcaaaatcaacatattgaagttgctatatctaaacaatctgaacaagttcatgacttgtatcgaaggcgtttgacagcgtcaattgattgtattcgttttctattaaaactaagattaactttccgtggtcatgatgaatcaaccaactctgctaaccaaggtaatttcctggaacttcttaaatttcttgctgaacacaatgaatcaataaatcatattgtctcggaaaatgctcccaaaaatcatcaattaattgctccaaaagtccaaaaagatattgttaatgttgctacattggaaaccactaatgctattattactgatcttggagatgaattatttgttatcattgttgatgaagcacgtgacatatcaaacaaggagcaaatggctattgctttgcgttatgttaacaaaaatgggagtattgttgagtgtttttttggtatgattcatgttaaagatactacaactttatcattgaaaatggcaattgatgaattgttttgtaaacatgggcttagtatatcaagaattcgtgaacaaggttatgatggtgctagcaacatgcaaggggaatttcgtggtctcaaaagtttgatcttaaaggagaattcatttgctttttatgtacattgttttgctcataagttacaactcacattagttgctattgcaaaaaatcacattcaagttacctctctttttaatttggtgtccactttattaaatgttgttgggagatcttgcaaacgacgtgacatgcttcgtgaaaaacaaataaattatgttagagaggcattgggaaaaggagaaattcctaatggataaggtttgaatcaagaaactagtcttaaacgagctcttgatactcgttggggttcacattatgcaactttgatcaatttgacattgatgtattcttctataattgatgtttttgaaattataaaagaagatggatcaaatgcaaatcaaagagctgaagcaaatggtcttttacatttgctagaggattatgattttggtacttatgtctttatcttcatatgcataatgataattatt

SEQ ID NO: 13278 - DNA, 310 bp, Glycine max
  Clone ID: PAT_MRT3847_111999C.1
gtacacagccgccgtagataaggacatagccccactcctattccttgacatcaccgagttgaccattattggctacaacagacagagtgacacctacatccccggtcacaccgaatgtgacggcgttggcattttgggcatcgctcgtgccttcggtggcatgatcttcatccttgttcactgcactgccggaatctctgggggacacatcaaccctgcggtgacattcgggttgttccttggacgcaaggtgtctttggtgagggcgttgatgtacttgatatcacactgagccgcggcgatctgcggt

SEQ ID NO: 13279 - DNA, 275 bp, Glycine max
  Clone ID: PAT_MRT3847_11199C.1
atagaaaataaaatctgggattatacttatgaattagagcggacacttgtaattgaccccaatatgatgagcccaatgaggggcaaataaaagagagcaggcctgacaaagatgctgtggacgtagctcaggaagtgagccgagaaacagcatgagggccagtcacagttgggttaagttgcccccacaaattgagaagtgacgcatttacagaaaattttgggggctcaggcttaggtagaggggagctgaatactttttatgctggatgaaca

SEQ ID NO: 13280 - DNA, 387 bp, Glycine max
  Clone ID: PAT_MRT3847_1119C.1
ccacgcgtccgatgatctttacccacaacgttcaagggcgtggtggagctggcttattccgggcttactcatgactagcgcccacagtattcctgtactgacagctgccgaagcgaccaactccccgagaggataggagttatcaacatggccatgcattgaaatcaatcctgaaagctgaatactgaattctggaccgcttgagaagagctttttcatttctacctaaccctcccactctaattcttaatgaatagatcgactatggaattcatccggatgcgctgaggctactttgcatatttgaccgtttatcagactcatctgacgaaagctctctttcgcatagtcagagaggtgagtaccactattggcatgaatctatca

SEQ ID NO: 13281 - DNA, 397 bp, Glycine max
  Clone ID: PAT_MRT3847_111C.1
tattctgctcgagccatcctccaccacatctccttctcttacaatctctaccacatatcctcatcatgagtgacgaagtctacgagggtgccattggcatcgatcttggcacaacctactcttgcgttgccaactacgagggcaccaatgtcgagatcattgccaacgagcagggtagcttcaccactccctccttcgtctccttcatgagcgaggagcgtctcatcggtgaggccgctaagaaccaggccgctatgaacccggagaatactgtcttcgatgtcaagcgtttgattggtcgccgatttgaggatgagactgtgaagaaggatatccaatcgtggcccttcaaggtcgtcgaccagggcggaaaccccttcgtcgaggtcgagtactt

SEQ ID NO: 13282 - DNA, 495 bp, Glycine max
  Clone ID: PAT_MRT3847_112000C.1
cgaaaaaacagcacctgaagtcgtcgccgtcgctgtccatcagtactgtgcgtcgtcctcgtgtgcgacgctgctgtttggcgtcgtcgtgctgctgttcgcgtgcaggtgtcgtgtgtgtcgccttcgccgtcgctgccgttcgtcgtcgtgctgctggtcgcgctggagactgctctgttcgtgctctgttctgttcgtgcttgctgttgtgtgctgtacttttgcaagagaaactcgggtagggttgggtcgggtcagccagacacctgtcgcgcaaaatttcaaaaaaaaaaaagtgctattccgccattaccgtaattccgcaatgaccgtcatggtgctgccatacgcaacccgcaacgccacagctatttggtggcatttttccgaaaatccgcgatgccataccgccataactgcttcttaataacactgatatcaacgaagtatccatgtttcagctgaaataaatgttttgctgtattacagatg

SEQ ID NO: 13283 - DNA, 380 bp, Glycine max
  Clone ID: PAT_MRT3847_112001C.1
catcagactaggaattcggcccgaccatcattcaaaaggattgattgggtcctcaaaggaacaagcgtttttaacaaacatcaacagttcaaaacattttggtgcatgttagtggacaaaatcacaaccacattcctgggaattgcccttcccccttgaggtgtgtggacctaataacgggctaaaaaaaaggagttctccagtgggcacatcaaactctctggtttttgaaattccttattgacaaccccaaaaaaaataaagcttgtgatatactcttggcgaatctctcaaaatttttgaaattagctggtaataatcttataacacctttttctgtttcgcatgctactgccagatcttctaaagatgcgaaattc

SEQ ID NO: 13284 - DNA, 242 bp, Glycine max
  Clone ID: PAT_MRT3847_112002C.1
gacggtcaagtcaatttcttctcctctctctcactcgtacggttacggttttctcacttcatcactctctgtgtcgctccgtttcaatggctcaggatgacgctcaaacactgccggtcagataatgccgctgctgctgctatcgtgtcgtttgtctctttgaagccgcagctcctcgtccaatctcccaaagcctacgacaccattcggttcttcaaggctgcctttggctctgatgaagt

SEQ ID NO: 13285 - DNA, 678 bp, Glycine max
  Clone ID: PAT_MRT3847_112003C.1
ccacgcgtccgggatagaagaacaatttcaatagccaaacgaagaagaaagagaacacaacacaacactgactcagctacatggcttcactcttcgatctgaataatcaccgcttctgaactcctttttctatccgcgaaatccgcaggttccgtatcgttttatagctggagctccgcggaagccctaggttgcttgcggcgctgctatttggctgccgcgtgttcgatctgcgggcggtgggaccttgcgaaacggcgtcgtgtggttcagctctgtgaaccctaggttttgtttttttatttttgttggatctggaggttgggattcgcgtgtgcggcggcgactgcgggcttggtggtgaaccctaggtattgttttttaagtggctgcccatgctattgggttggttttgatgccgcctgaaccattgccttgggatcgaaaggacttcttcaaggagaggaagcacgagaggtccgagtcgcttggttctgtcgccagatggagggattcctcgcaccaccgcgacttcaaccgctggggatccgccgagtttcgcagaccgccaggtcatggtaagcaggggtggctggcaccctgttttccgaggaaccttggtcattgggtatgcgatttctcggtccagcagtgacaagatgcttgaagatgatagtc

SEQ ID NO: 13286 - DNA, 226 bp, Glycine max
  unsure (1)..(226): unsure at all n locations
  Clone ID: PAT_MRT3847_112004C.1
cagtgtggctgaattctcagctgatcctggctttgctgaaagggctgcaaagttttcttgctttggcagcaggagtttcaatgataggagtgtccaattgggggtgaacaatgctgaattggctcaaagatctgcaccagcaatggaacatggtgggaagttgcctanantcttaagtantccattgctcaaaacacttggatctcaaatgggtgcccaagagaac

SEQ ID NO: 13287 - DNA, 2109 bp, Glycine max
  Clone ID: PAT_MRT3847_112005C.1
ggcttgtgacaaaatgacacaggagaatttgagccatcctaagcaagcagcatgagtcacagatttcattctctctccaactgataagaaacgtagttccatgtgggctcttagggtctactcacataacactaaactcgtcgagtgtgttccttctttcctcttcaaagttgcgagcctagaaaaaagaccctttccattctcctccttttcttcctcctccactggctgcacctcgctgccgtgtctctgcctagcgtgaaattggcctcatttcccatctgggtcctgtgaattgcgattggaaccgcgttttccccgcttctgggcttggctcagaagtagtcagaatgatgtctgtcacaggcaaaagcattgattttgctggcaaaaacttggtctcttgtggctgctcttccaatgcttcttcgtttgataggtacactgtgaggaactatgccaagctgaatagtaataattctaaagggtgtggcagagatcatggggctcgtaaattggtttgttgtaagaagaggagcactcattgtcgggtttcttctatgaagactgcacagcctacggtgaatggggggactcatgcatttgaaggccttaccacaggattggacttgaagggttattcagaagaccccatttcccctgctaggctttttgaagtggttgccgatgatctgctaactctcaataaaaatcttcagtcgattgtaggagcagaaaatccagttttgatgtctgcagctgagcagatttttagtgctggtggaaagaggatgagaccagctttggtgttcttggtgtcaagggcgactgcagagttacttggcttgaaggaacttactgcaaagcatcgacgtttagcagagataattgaaatgattcatactgcaagtttgatacatgatgatgtactagatgagagtgaccttcgacgagggaagaaaactgttcatcaaatgtttggaacaagagttgcagtgctggctggagacttcatgtttgcacagtcatcatggtatctagccaaccttgaaaatattcaagtcattaaactcatcagtcaggtgataaaagattttgcaagtggggaaataaagcaggcttcaagcttgtttgattgtgatgtacaacttgacgagtatctaattaagagctattacaagacagcatccttgattgctgccagcacaaaaggagccgcgatctttagtggtgctgacagcagcgtgactgagaaaatgtacgaatatggaaggaatcttggtctatccttccaagttgtggatgacatattggatttcactcaatcagccgagcaactgggaaagcctgctggcagtgaccttgccaagggcaacctgactgcaccagtaatttttgcactggagaaagaaccgaaattgagggatatcatcgagtctgaattcagtgaggttggttcccttgaggaagccatcaatttggtcaagagttgtgggggcattgaaagagcacaagagttagcaaaagagaaagccgatcttgcaattcaaagtctccaatgcctacctcagagtgtatttcgtttagcccttgaagatatggtggcatataaccttcaacggattgcataagcttgtgcatgctgatgacacattgttaaagaaaaaacacaaaaagattcttttggtcctaatatagggatgagagagccttgaactttttgtcatttcaagaatttcaagcaaatctacacttgtgctacttttggggtacttttatagtcattgaagggcaaagcaagcgcgcattctcatcatttaatatatttgcagcttcctgcaaagtacaagaacataatatattccattattgtatcaatacaagtctgcagtatattctttccccccattcttcctttctgggatcttgaaaacagtaaaataaaaaatgataattgatgtttcttttttttttttttctgtttctttttcttctgtattttctgagggtagtataaaatttggcttgtaaactcaatctcgtcttggccttgctcattcattgtcatactttattctatcttatcattgcaaaagattttcaattttt

SEQ ID NO: 13288 - DNA, 251 bp, Glycine max
  Clone ID: PAT_MRT3847_112006C.1
cttcgaaaattccaacaaacgggggcaagaaaagggggggatctttatccgggccctgttataatggatgcatacaataaagatgatatatttgcttcgatagtgatgcacatgtccgtcaccaagatacacacctggctggacgaccactgtaacatgtctaacatgggtgttgcattatacaaaaaagaacctaatggtggctatgatggtgcctcctgatctggttgcaaacaaactttatgcaaggc

SEQ ID NO: 13289 - DNA, 570 bp, Glycine max
  Clone ID: PAT_MRT3847_112007C.1
tgaggttggttcgcttgacgaggccatcaatttggtcaagagttgtgggggggactcatgcaattgaaggccttaccacaggattggacttgaagggttattcagaagcccccatttccccagctaggttttttgaagcggttgccgatgatttgctaactctcaataaaaatcttcagtcgattgttggagcagaaaatcctgttttgatgtctgcagctgagcagatttttagtgctggtgggaagaggatgagaccagctctggtgttcttggtgtcaagggcgactgcagagttacttggcttgaaagaacttactgtaaagcatcgacgtttagcaaagataattgaaatgattcatactgcaagcttgatacatgatgatgtactagatgagagtgaccttcgacgagggaagaaaactgttcatcaaatgtttggaacaagagttgcagtgctggctggagacttcatgtttgcacagtcatcatggtgtctagccaaccttgaaaatattgaagtcattaaacttatcagccagagggtgaagagatgcataattccatttt

SEQ ID NO: 13290 - DNA, 364 bp, Glycine max
  Clone ID: PAT_MRT3847_112008C.1
cgagaagacgacagaagggcaatacaaaagtttttttggcatttcagaaaagaacacgaaaatacccgaaggggagggcaaaagggtcattttaaatctttttcagacccctgactcgctcaggctagcctttggctcgcctgggccaccaagataacttcatggtgaagtaaccagctcgcctaagtgagtagtcatgaccccaaatgctttgtttttctataaataagcatgaggtggggctaagagggaggttcagaagtctagaggtccagcattgagaaaaaagaaaagaaaacaagaaggaagaagagaaaaagaagcttaatcgtcgttgaatcgtgactgcaatcgatttctacac

SEQ ID NO: 13291 - DNA, 397 bp, Glycine max
  Clone ID: PAT_MRT3847_112009C.1
ggcatataaccttcaacggattgcataagcttgtgcatgctgatgacacattgttaaagaaaaaacacaaaaaggctctctcatccctatattaggaccaaaagaatctttttgtcctaatatagggatgagagagccttgaactttttgtcatttcaagaatttcaagcaaatctacacttgtgctacttttggggtacttttatagtcattgaagggcaaagcaagcgcgcattctcatcatttaatatatttgcagcttcctgcaaagtacaagaacataatatattccattattgtatcaatacaagtctgcagtatattctttccccccattcttcctttctgggatcttgaaaacagtaaaataaaaaatgataattgatgtttctttttt

SEQ ID NO: 13292 - DNA, 899 bp, Glycine max
  Clone ID: PAT_MRT3847_11200C.1
ttttttgttcagccaaaatataatatattcattaaaggggaccagaggtactaatcaaacagattttagaatacaattgatttaagttgcaaaatcacatgttccagtataaactcaattaagaaaaataggatcaaccttaataccaccatcttattgccaattcatttttttattgtttttggggggcgggggggttgcaaaagcacacaaatacaaatagttgtacacagacagacataactcagagcacttgtaaaggacttacatttacctcaacccaagacaacaacaaaaaaaaagttcctaggtttttttgtataagaaatttacccccaatcaggaaggcttcctaactcagagtgcttctaaaggatttacatttacctcaacccaaggagacaagtaggggcttaaaccaggaaattgtcaaatgcaaaaaccttgtcttgctcattcaaccaaccccttggggttaaagtttttagaagtctaaaccaaagatttcatcagaaatagtaaccccaaacccaaaagacgcatcaatgaatattagagtattattttggtaaatacacaagacaaaatattgtggcatgtgcagttaagtggttgtctagtgcatttctttatcaccggacatatagcagatgggtttttgtttactattttacttttatagattgggcagccctaaaaaaggaaagcaaccaaaaaattagaaagtgagtcaaatttggagaacaatgttccccaaactagttcttggtttaggcatcctattacccaagtaggaataaagatcaatgcaagtaagacactggatatcatatatgtcatacaaaagccaagttcagataattaactcatgaatgagacacaataattcttccttttta

SEQ ID NO: 13293 - DNA, 456 bp, Glycine max
  Clone ID: PAT_MRT3847_112010C.1
cttatcgacacatacgtaaagaaagccataacaagaataaatacaaaccaatcgccggcacatattataaaaacttacatcattaatctctgctggtcaagaactatagacattatcgggggaaaaaaaggcattgattcagggtaaccaaaactgacgattttcccccgatactcagaaatatggagcaacatacgattaccgcaacaaagtcaagcggagcgacaaaggggaaggagattgtttctcttccaggttgccctgcgagatggacgatttttggggtagaaatgcactctgccaggtaaacccctattgcttttcccgacgaaagtggggccacccagtgccccgcgtttatggacgggtttgcgaagccatctgtttcttgattcatttgttacagcaggtgggtgcaacccccaccagaatgacctcaagatatttgaaagggga

SEQ ID NO: 13294 - DNA, 313 bp, Glycine max
  unsure (1)..(313): unsure at all n locations
  Clone ID: PAT_MRT3847_112011C.1
acgtcgcatgcacgcgtacgtaagctcggaattcggctcgaggtgtgtatgtgtgtgtgtgtggcagtnnttatctnaggncattcantaagacgcnttgtcagtntcgtgtgangaaagtgtttgacaacgaggncccacttaaatgacncatgcagnacttacctctactccagctgcagccangagcnaccggatgggctccattctncccctgccatcgnagtagtganngactggctccccggcatngcagcaattgcntgagntcatngntatnaagccgactagtgagctcgtcgacccgngaatt

SEQ ID NO: 13295 - DNA, 242 bp, Glycine max
  Clone ID: PAT_MRT3847_112012C.1
ataatttttaatttgcgttaattcatgaacgataacccgggggaagaccgcccccaagaatataggccgacttacagaccagacaatacaaccttggcccacattagggggaggccacacgcatcccaggtaacgattcctccaataaaaaaaaaccctcttacacccctaaaaggtcacaaaaagataatctgcctaatcatatataattgtcgggcacaatcgaccgttgaacacatcct

SEQ ID NO: 13296 - DNA, 548 bp, Glycine max
  Clone ID: PAT_MRT3847_112013C.1
cccgcgtccgcacaggagtggcatctcaagctttggactttctctacttttcttcttctttatgtgtatcgtatcgtatgcgtaaagaacagatggcgactatggtgctggcgtgacacaagccgaagactaagatcgtgtgcactctggggtcctgttggtgctctgtaccaatgatcgaaacccttctgcgggcgggcatgagcgtggcttgctttgactactttcatgggtcccacgagtaccagccgttttcccacaggagactccgctctggcatggaaagcaccgttattctatgcgccggggtgcgtggcaccaggggacgcccatccagatctgtttttaccatactcggccgttcttgcaaagactagtgctgtaatgaaaaggaactcggcgaatatgttgaacctgggaatcacgtttatgtagtaactgctgctgatgatgaggctacaggcgttgatgtgatagacgagcggtatgtgtagatcttaatatctgatacaccaaatgagcatatcctggtctttgcagatgaaggt

SEQ ID NO: 13297 - DNA, 607 bp, Glycine max
  Clone ID: PAT_MRT3847_112014C.1
tgtcccaagaatgatatcaatgagataggaagtctgtttatcataccgtgcaggagtaacattccgccatggacagcaataggcacatatatagatgcctcatatcctccaccatttttgccaccagtagtaagtagaataataacgtgaattagttgtgcaagtgaataatctacacttgttgtcgctgcccactggccaacaatattgaaccagccagtaatccaggaagcaaaaggtgcccatctgggcccagcaagcttggcgctccaatagtaaagcccaccagaagttggataagatgaacaaatctcagccattgagagtgcaacgatcatggtgaaaccagaagctatgaaccaaccatacacgaacgaaacagggccaccatagttcaacccagtgttgtaaagagtggtcactccggtgagcactgatataatagaaaacgaaaacgcgaaattcgaaatcaccgaaagatgacgattgagttcttgtttgtaaccgagttgtcgaagacgggcatggccagaatcaagtggaacgtatcccacgtcagatgagactgttttgcttttaccagatcccatgaatattgatgaaccaa

SEQ ID NO: 13298 - DNA, 430 bp, Glycine max
  Clone ID: PAT_MRT3847_112015C.1
aaaccaaaccaaaattcacaaattatcatttaaataaccggccaaaaaattattgggggtaaagctcactggccactgagttggactttttttggccgagcccactcagccgaataattgcccaaaaaaaaaccaaaaaaaagggtttaaaaaaaccaaaacttgcccccgggttaacaacaatatttttaaaaaaccccaaacttaaattccgttttaaaaacagggttaaacccccccattggttaaaaaagaaggcctattttaaaaaattaacaaaaaaaaaactttttttttcggaaaatatcaaaacaaaacccccatttttattacaaaacgggaccaaaattacttacaaaactatggtttggcccgcctttatataacaccccttttttatggaccccccccgggggcattcatttggggg

SEQ ID NO: 13299 - DNA, 112 bp, Glycine max
  Clone ID: PAT_MRT3847_112016C.1
ggctcgagcgcaaacactgcttgaatttgtttatattgtcttcgagacgcaagataagtactgcgatgattgtcgtgaccctttgattaataaaagaggtacgactacgatt

SEQ ID NO: 13300 - DNA, 1073 bp, Glycine max
  Clone ID: PAT_MRT3847_112017C.1
tccatgcgtccgagaaacatggtggaagaaatagacacccccttcagatttacgcgcccgctggtccattcgcaactacgatgctgtgagcttcagactctgaagagagagagagtcgtcggttgagtcttcactctctctctaacccgcattgtgttcggttgtgttctgtttcagtttcagatcgcggttcgtggttcatgaagtgaagttgtttcagattctaactgttctattccctggctaggaatcatgggcttgttctgaggtctgattagcttgttaattgggttggagaggagaaaacattgagttaaaaagagaagagagaaatgggagctattgctggagaagagctgctgaaatgggagaagatgcaaggagtgagtagtcgcgaagagaagattctggtgtcaataagactgaggcctctgaatgagaaggaaattgctgctaatgaatcagcagactgggaatgcattaatgatactaccatcttgtaccggaacacactgcgtgagggttccacatttccaagcgcctacacatttgacagagtatttcggggtgattgtgtcacgaggcaggtatatgaggaaggagccaaagaagttgctctttcagttgtcagtggaattaactcaagtatttttgcatatgggcaaacaagtagtggaaagacatacacgatggttggaataactgaatacgctgttgcagatatttttgactatatagagaggcatgaagaaagagcatttatattgaagttctcagcaattgaaatttacaatgaagttgttagagacctcctcagcactgacaacaacactccacttagactacgtgatgatcctgagaaagggcccattttagagaaactcacagaggagactctacgggactgggagcatttaaaagagcttctagccttcagtgaagctcagagacaggtgggagagacatacctaaatgaaaagagttctagatctcaccaaatcatcagattgacaatggagagttctgccagggaattcctgggcaaaggcaactcagccaccctaatagctagt

SEQ ID NO: 13301 - DNA, 1390 bp, Glycine max
  Clone ID: PAT_MRT3847_112018C.1
gggagaagagggtggtggagaagtgagaagggttagggttgtttttgatgatgatgatgagaaggtgcagaggatgaggaagggggtgttgcagaagctgcacatgacttttgggggttctgatgaggacaattatgcttttgggttggaccgcgtgaccgacacagagatgttctttcttgcttccatgtacttctcttttccccgggggcttgggggtccaggtaagtgttttgcttctgggaagcatttgtgggtttcggatgtgttgaaatctagttttgattactgtgtgaggtctttcttggccaaatctgctgggattcagactgttgttttagtgcctactgattttggggtggtggagatggggtctgtgaggatggttggtgagagttttgagttgttgcaggctgtgaaatctgtgttttctgcacaggcatcatcattattagtcccccacatggttaagccaattgcaccgttggatttggtgagggaaaagagagatgggagtgagagtgcaaatgctcttttatctggtttggcaattggggataagaataagaatattaacaaccacagtaataacagggtagagggagttggtgttccaaagatttttgggcaggatttgaattgttccactcaatttagggaaaaactggctgtgaggaaaatggaggagaggccaaggccgtggggaggtcatccccccaaggttaatagtattggctttccgaacggtgttcagggttctagttggggggctggtcaagttgtgaggcatcttggtcctcctgaaatgcttgctcctaggttggccagctccggcacattgccaaagctggccaatggtgcgaggcatgactttgtgcataacaactttgagcagcaacggcctgtacagatgcaaattgatttctcaggagccacttcgagggcagcttctgggagatcaataattgcggagtctgagatttctgatattgaggcgacgtgcaaggaggagagagttagtgttgccgatgacaggaggccgaggaagcgtaagaggaatgccggctaatggaagggaggaacccctcaatcatgtggaggctgataggcaaaggcgggagaagctgaaccagcgattctatgcattgcgagctgttgtaccaatttctctaagatggatacatcgctgttgagagatgctattgcaccatagagaatctaaaagtaaagtagtgggcatttagagacgtagaataatagcttctattaaccctctagggcagccagtttatgtttgtctataatatacacagtttatcataagaagtattattcctgctatgtcaattattttgtttagtttaaccattctatcattttaccttgaaaa

SEQ ID NO: 13302 - DNA, 148 bp, Glycine max
  Clone ID: PAT_MRT3847_112019C.1
cccacccttccgcgaccccttggccccaagcgccgcccttttttttttttttttgtttgaaggaaatcataatccatatatctcctttaacataattccggggctgaatgggaccttcctggtttaactggtataaggaaaaggaggg

SEQ ID NO: 13303 - DNA, 405 bp, Glycine max
  Clone ID: PAT_MRT3847_11201C.1
aacccaaagttggccaccaaatatttgctatgattttattgcatcataccttggccagaaaccatgaggcctggcacaatgggaaaagaacttttaacaagattttaggaatgttatcaacgaatttttcctgcatatcaatggaacatagtatccctcctttttaagaaaaagtctgagaatcctagactactatgactttgacatacccattaaaaattgattgaaacctttactttttttgaattttacacattacaaattttttttatgaatcctacgattacatttttttttggcttttctattggatcaggaaaagggatagggttttcttgtcaatcgattcattgcacattattagatagacaggtgtttttttaaccagtattgcatgcccaaaag

SEQ ID NO: 13304 - DNA, 146 bp, Glycine max
  Clone ID: PAT_MRT3847_112020C.1
aagtggtaaatttccctttaaaaactttattattaaactgattggggttacccatttaccataaaaatataatgccgagaagttctactcgccgataggggacaaacattgttgcaagcctctctgaatatcttttaattacctac

SEQ ID NO: 13305 - DNA, 687 bp, Glycine max
  Clone ID: PAT_MRT3847_112021C.1
cgctctcaatggcttgcttctctttaaacctctcagctcttcacatgttcagaccatgcgtatatattcctcaaatcgttgcaaatccattgcagcatcagaatcgtaaaatcaagatcttagcttgccaagctaatcaaaatcttgaccaatcgtccacaacggaaaaatctgttgctgagcttggcaatagcaaaggaacaagttccccaaatggtgttccccctaaattcccaagcaaggatttcaagaagaaaattgccattgtttcctttttaggagctctgggacttttattatcttcaaggcttcacttctttggtgttcctatgaaggatcactgtgctcatgcattaccatccaaagaggctcggcccaatgggaagttcactgtggtggagtttaatgcagattggtgtgaagtatgtggggaattagctcctgatgtgtacgaagtagagtagcagtataacaccaccgagtgtgtgtgaatcaactgacctgacttaacaagtggtctcgagttgaactcctaagtatgcagttgtattaaatatttgaaagaaaagtttaaccttctataataattcaatccgacttaaacaagattgtttcgactgaaggattacatgtgatttagaaaaaagagtaacagtataataatggctactattgctgtagacaacc

SEQ ID NO: 13306 - DNA, 516 bp, Glycine max
  Clone ID: PAT_MRT3847_112022C.1
ctgatatctggtttaatatttactcacaccattgcgttgggcttgttgggttctcacttacaagagtgatgatcgcttggttcacaccaccttacgacgtgctgttaaaaccactctgctgcatcatgaccagggtaagaggatcgctgtctatatttagggaaatgaatgctctaatggaagcctctattgtcatatattactatggccaatgaactccatctgaactgtagatatctcagcatttgacacaatcatctgaaaatcttgaacatgactattcatgcatggtattttcaacgtgagcgaacgatgtcttgctcagcacactagtgctctgtcccaatgaaagcatctaaattgggagatcgcacggtcatagctgggaaaaaggagggttccatataaatgatgacgagtcttggtgccaatttagctgcactgcctgaagtttaaagcagtcacagagggaattctactccctaatcttctttatgggctactacctatgctaca

SEQ ID NO: 13307 - DNA, 1203 bp, Glycine max
  Clone ID: PAT_MRT3847_112023C.1
tttttgtatataattaaactcatatttccattctcactttatatattttctttagaaagaggtgcaatatggctacatccattagaatcccaaggacaaacaaaataaacagggataacaaggaacaagaaaacaccaaaactcgctccatactaaaggaatgtatgaaaagggattgaaaagagggggaggggatactggaagctacattctttaaccactctcttgtcttgcactgtcacgggtttagcagttctttgaacagtcttcagatgcttgagttgatccattcacttctaccagcttctccttttgtcctgcttcatctgtagtagctgattcattcttcaaggctccatcatgagacttgggcaacataactgtcccatttgttgttaaatcattggacttgctagcctgtttcggaagctgttgttccatagattttctttcctgaatcatcttttcacgagtctcatagaacccaaaatcatccaaaatgcatgttttgcttgaatgctgcttgaaaattttgagaatttgaatacccttctcaaacttaacctcctgggtgtccctgctgttagtaacaggtttgttttcattgttttctagtgttatgggcctcttcacactgtatgtggcttcctttatgttatgccacttcacttcattgaaaaatttccacctgtcctgctataactaccaagattgcttttgaaatgtgatggaaggagaaagtggaaagagtcatatgctgaggtgaagaaatacggatatcgctgggtatataaagaggatatagaagggccatcaaatccgttgtctaggaagcgcaaatttggggaaattgaagaaaatgaaggaaaaagaaagaaaggaataatcaagtggtctaggaaaagcaaatttgggcaaatttggggaaaaggaaggaataatgtgagcagaagggagaaaagatgatgcaaggtcctcccaggaaaagacaaaaaagttgaatgttagggtgtagaatcatcatttcttctctcattttattcatttcagtcctccttcactcatcccaacaattcacaagtgccatcaagggaactcatgcaaattttttaataagcttggtgccgtaaaatcagctttgtattcactattactttgttatttttattcaattcacatttgattgaaacccacgcgaacacg

SEQ ID NO: 13308 - DNA, 308 bp, Glycine max
  unsure (1)..(308): unsure at all n locations
  Clone ID: PAT_MRT3847_112024C.1
tttcgggtgatgcggnanacagacacaaancccgaagactcgccctgactatagccangctccaaaccacactncccgcnanccgaccgggacaggaacaagaacngagcangagggacancnggcacccncactnaaagaagcaancgangcaacaaacaaggagagagcccacggacaancganggaggcngcggcccngaaaacaaaagagaanagagaaaagncggacaacggcagggaaggaccccgaaanaggagngncaaaaacgaaaagacaccaaagcaaaggccannnnggcagccgg

SEQ ID NO: 13309 - DNA, 705 bp, Glycine max
  unsure (1)..(705): unsure at all n locations
  Clone ID: PAT_MRT3847_112025C.1
gtgagatgtccctccacgactatgctagggttcctctcttccttttgcgcagaagggctttagagctttaatagctacagttttgtgtggattttcaccccaaggccttgtacggaggaggaggattggcttcttcaattccctgtggaggggtacctagaggaagaagaagggagtagtgaagcatggttggttggaaagcttttgacacagggctcctttaatagcaaagcgttcatgagtaccatgacacaaatttggaaggtcaggaagggaatggagattcgtgaggttgggaagaacatgttcactttctgttttttggagagacgagataaagaccagatcctcagaggttaccagtggagctttgagtggaaactgattgtgctcaacgagttggaaaaggaagtcaatccgaaagaggttagtctaactcatagtctattctggatttagatccatgaactgccgttggggattccaaatagagaagatggcatggcgattgggctactccattggaaaattcattatgtgggataaaggggaagatagcagaaggggcctgtgtttgagacttagggtgcagattgacataacgaaaccnctcagatgaagcatgatgattcaggtgggtgattaaggggctcgtagaatattcctgaaatatgacagattggggaatttgtgcttcatgtgtgg

SEQ ID NO: 13310 - DNA, 405 bp, Glycine max
  Clone ID: PAT_MRT3847_112026C.1
cacttagatgccaacaacgacagcaagatcttcgccgatgagctcaacagcgcagtccaaacgacgcttggatctgtcgtcttgccggaggagcttcgctgtgtcatggaccacctcgaaattgaccgcgacggcctcatcaacctcttgccaccgtgagtgtttgtgaagttctagatctcatgggttgcttggcgttgttgtttgggtggaggtgcgcacaacaatgcggtgttctcatccaaggcatttttctgttactggagaagcaacaatgtttgaaagggataacttttaatataccataatgaaataaaattaaaatttaatggccaaaaaatgatattaactaaaagaaagaaagagccataaaatactttgattaaataaaaccgtgaagagcta

SEQ ID NO: 13311 - DNA, 460 bp, Glycine max
  unsure (1)..(460): unsure at all n locations
  Clone ID: PAT_MRT3847_112027C.1
ttcctcaatgatctctttcccagctggtaccacttgtaaccgggccgggggcggcatgggtgcttcattcactggccttaagttcatgggtggcgttcccacaggaagaacgagagttacattaccttcattgctgcaaccggtggagagtgccatgcatgccagggttgccaaccagtggcaaaaagaagattgaaactctttcctaccttggcagaacttgatgaagcaacatttgccaaaggaagtagataccttccttagaanggatggattccttgctttgaatttcgatttgaacaccgttcttgtgcccggaaccaacangtcaccaagatactacgatggacgctacttgaccatgtggaaactggctatgtttggttgcactgattcttctcaagtgttaaaagaacttaaaaaggtaaaactcataccccaaagcttcattcctataatg

SEQ ID NO: 13312 - DNA, 584 bp, Glycine max
  Clone ID: PAT_MRT3847_112028C.1
ggtgtcgctgaaactgcagaagcgcctctccgcaagcgtgctcaagtgcggcagaggaaaggtttggcttgaccccaatgaagtcaacgaaatctccatggccaattctcggcaaaacatcaggaagttggttaaggatgggtttatcatcaggaagccaaccaagattcactcccgctcacgtgctcgtaggatgaaggaggcaaagaggaagggccgccactccggttatggtaaacgtaagggtacaagggaggcaaggcttcccaccaagatactctggatgagaaggatgcgtgtgctcagacggttgcttcgtaagtacagggaaaggaaaggtcctgttgacaagtcatttacagcacccagtgcccctgctgccacagtgccccagtctgcccaagcgccaaagaaatcgaagaagtgagcagcatatcctggaattcaaaggaccttgaatctttaatagctctgcaaaatctttagtctgctaaagtagttgtgacgaatctctttttgttggtttagactttgtagtgtgcatgtataagaacttcatatcttgaatacttttaattatatat

SEQ ID NO: 13313 - DNA, 316 bp, Glycine max
  Clone ID: PAT_MRT3847_112029C.1
ggatccatcagtcgtgctacgactgcaagacaacgagaggttgggatttgctgagcacttagcgtccatggttaacaaatctgcaattgtacttaatccctcttagtctcaaaaaatcctaagctctcgtcatctcgtaaactgcagtgttcgctcagtaaaagaaagacgtagcgaacgcttttgccaattccagcagcatcagtttcgcttcagacaattcgcgcgtcaatggcttcatctgccatcacatacgccgagacttaccattttctgttcactacgtgtggttccgtaagatctatagaacacccgt

SEQ ID NO: 13314 - DNA, 567 bp, Glycine max
  Clone ID: PAT_MRT3847_11202C.1
atcccaaatcacagaagatcacaaaatcccttcgagactacatcttcaggatcaaaatccaccaacgctcacaaatcaaattaccctccaagaaatggatcctcgccgcctgcaaacatcctaggactccttctctcgacatagacaacatgaaaaacaacaacgtcaaagacgacgaagccatgttagcggacatcgaccgtttcctctttgaaaatttcaagtccctattcctcgatgaccgtgaagaacccgacaacaacattaaccgcagagcagaaatgtctcccaaactggaccccatccgctttgactcttctagaaggttcttcacggacgcaaccaccgaagaggggtccagctccgccatgtcggaaagcgagaccgccgaggagtcgacggttgttccgggaaattgtgtggtggtgctggccaactcagggaaccccagcgaggatttccagcgatccatggagggcgtggtggaagcgagattaaggaattgtgaaaaggtggattgggacttcatgcaagagcttttgttttgtcacatgaacctcaaccaga

SEQ ID NO: 13315 - DNA, 799 bp, Glycine max
  Clone ID: PAT_MRT3847_112030C.1
aaaaaaaagggggccccccccttttttttttttttttttttttttttttttttttttttttttttttttttgtttttttttccgcaactacgtgaatcttaataccaaaaaacagtaaacaccgacaaacaaaatatataattaaaagtattcaagatatgaagttcttatacatgcacactacaaagtctaaaccaacaaaaagagattcgtcacaactactttagcagactaaagattttgcagagctattaaagattcaaggtcctttgaattccaggatatgctgctcacttcttcgatttctttggcgcttgggcagactggggcactgtggcagcaggggcactgggtgctgtaaatgacttgtcaacaggaccttgggctaagcgctcctccctccgagcaattttcctttccctgctagccttgttctttgattccctgtacttacgaagcaaccgtctgagcacacgcatccttctcatccagagtatctgggtgggaagccttgcctcccttgtaccctttagtttaccataaccggagtggcggcccttcctctttgcctccttcatcctacgagcacgtgagcgggagtgaatcttggttggcttcctgatgataaacccatccttaaccaacttcctgatgttttgccgagaattggccatggagatttcgttgacttcattggggtcaagccaaacctttcctctgccgcacttgagcacgcttgcggagaggcgcttctgcagtttcagcgacaccatttttcccttattctggtgccgaattc

SEQ ID NO: 13316 - DNA, 505 bp, Glycine max
  Clone ID: PAT_MRT3847_112031C.1
gtgccagagtagccgtgcaccgggacaacgcaaccgtgaacctcgttgaaacttgtagggccagcagaaccggaggcgagtagccaagccatgcctaagtgtagtggggctgaccctggtgaacaggtgtaacccgcaacggcaacccattaaaggtgatgggttgcgtcggcctatgcaactaaaccccgatggcacaaggctacaaaaactactaggtgggagggccaaatactgggataagcgccaaatgtatacctgatattagacgggtacataggtgttcgtgaaactgttgctgggtggccagcaggagctggggtgcagggtgccaggctgccagtgtgagcaagggccgccgccaaggaatgcctggtgagcccttaggcaaggctaccaaatttaccagcttggcgggtggcagaccataccaacgccagagggtaagaagatagcacaacaggtggttcggtgttgttcccgaaaccaacattagcagccgcta

SEQ ID NO: 13317 - DNA, 1571 bp, Glycine max
  Clone ID: PAT_MRT3847_112032C.1
aaaacccggaaaaaagggggccaaaaaaagaaagggcaaaaaattgaaaaatacggggggataagggcgttgccaaagtaaaaggtacccctggggggatacccccccccccccggggtttatggggcgtgtaaagggggggtcccatttaccatccaggggggccaatttttggaaaggggtataggggggggctttttggtttttaaccaaatggggaaaaggggaagttgttcaaagggaaataatttggggaaaccaagggttttcccaaaccgggattttttaaaaacgggccaaggaattgtaatttgggggcccttaaaaaaaaataagttgttgccaggccgggggagtaaagtttggttctttaaaaaggccccccccttttttttttggatttttgtgtatttaattttttgttttttttaaaatgtccccccttttttttttttttttttttttttttttttttttttttttttttttttttttttttttttttttttttttttccgcaactagatgaatcttaataccaaaaatcagtaaacaccaacaaacaaaatatataatttaaaatatgcaagatatgaagttcttatacatccaaaacttacaaagtctaaaccaacaaaaagagattcgtcacaactactttagcagactaaagattttgccagagctattaaagactccacgtcctttgaattccaggatatgctactcacttcttgaatttctttggcgcttgggtagactggggtgctgtggcagctggggcactgggtgcagtagatgtcttgtcaataggaccttgggctaagcgctcctccctccgagcaagtttcctttccctgctagccttgttctttgcacgcttagcctcaaactgatcagacaaagtcttctctcttgccttctcagccttggacttgtgaatgctctccatcaagactctcttgttcttgaaaacattacctttcaccttcatgtacatatcatggtacatgtgcttgtcaattttctttgattccctgtacttacgaagcaaccgcctgagcacacgcatccttctcatccaaagtatcttggtgggaagcctcgcctcccttgtaccctttctcttaccataaccagagtgccggcccttcttctttgcctccttcatcctacgagcacgcgagcgtgagtgaatcttggttggcttcctgatgataaacccatccttaaccaacttcctgatgttttgccgagaattggccatggagatttcgttgacttcattggggtcaagccacacctttcctctgccacacttgagcacgcttgcggccagccgcttctgcagtttcagcgacaccattttttccccttatttctcaacgatactgcactgggaggaagaaaaaatatgagcacgttggctgtggttatgaacccaacatctagtgttccttcaagcacaaacaccacctcggtggcacgtgggtgcgtgtgaggtgggttgatgccacctggggcatagtcaatgcgtgataaagacacgccaagggtgtgagtccggaatt

SEQ ID NO: 13318 - DNA, 293 bp, Glycine max
  Clone ID: PAT_MRT3847_112033C.1
atcaaagcaagctcggtaaagaaaccatatttcttgtactagatataacttcacacttgtcccacaagatcgcccacctgctgctcaagacttcttacctgcttcactctacctgacgaaccaacgtgtataacttcctagtaacccccgacccgaagtgcacgtccacacctatcctgatggccaaactaattaagctgcccatgttgcacctcactaaccttgacgtagtaatacacttacaccaattaacgacagaataagataaaattattacgcctcaccgcgttaac

SEQ ID NO: 13319 - DNA, 226 bp, Glycine max
  Clone ID: PAT_MRT3847_112034C.1
aaggatgtgcccacataagttcagcgagggggatcttgttttgaagaaagtatcgcatgttcaaaaagatcatcgagggaaatgagccccgaactatataggaccttttgtggtaaagaaggctttctcgggtggagcactgttactcatgaacacggatgatgaagagctgccttcgcctatgaattttgatgttgtcaagccatactatgcatgttactggggg

SEQ ID NO: 13320 - DNA, 380 bp, Glycine max
  Clone ID: PAT_MRT3847_112035C.1
gccaattttgtggttactatggttccaacataaccaaaagccattttttttttccatgtggggggcccgaagttttgtttgggggtttaacggcctgggtgactttggtcccgccaccgaacccataaaaccctaattaactttttcccaattaaaagccaccaaatggtccttccttttggccctttccgcccttgtaatttgcaactatggttctgaaatgccttaatggttggccatcttggagattcccggggcagctgtttttccaatggacaggggtggttaacttaaagctgttcgaaaggtgcttgctcttatagccagggaattggttgctggctataaaccctaccaccatttttttttggggtttaagt

SEQ ID NO: 13321 - DNA, 496 bp, Glycine max
  Clone ID: PAT_MRT3847_112036C.1
cccggggggaccccgtctccctgcgtggcgagagagacagaaggggggcgctatcaacacattaaaaagagtatatgatgtatctgcggtgggagtacgggaacatttctatgggggaatagggggtgtccaagtgcatgcgcaagtgcttattacttcttggggtgtgattacgctcttattggggtcagccattctaattatgcgagatgtgcgaaccattgccgctttgggggagaatttctttgagtatgtggttgagttcattggagacgtgagcgagactgaaatgggggggagaatgtgcgggcgggcggtgcttttgtggggaacttggggtggtgttggttggggggtggtgatggggggggggggctggttggggccttggggggatggtgggggtgaggctgggggggggagggtgcgcggggggtcgcggggtcggtgtgggggtggctgggggggggggtgggggggtgggggtgggggtggg

SEQ ID NO: 13322 - DNA, 269 bp, Glycine max
  Clone ID: PAT_MRT3847_112037C.1
acctcggcactcggttcgacacaattctctaacagagatctttttctgctccttgaagaaagaagggcctttgcttgattttggagatgtctcctgctctcagatctcatcaacctcaacctctccgataccaccgacaaggtgatcgcagcgtacatatggatcggcggatcacgaatggacccgaggagctaagcaaggactctcccaggaccagttagcgacccttcagagcttcccaagtggaactatgatggttccagcacagg

SEQ ID NO: 13323 - DNA, 285 bp, Glycine max
  unsure (1)..(285): unsure at all n locations
  Clone ID: PAT_MRT3847_112038C.1
gtcttattctcagaatctttcatagagtcgttggaggctataactaatganntttctttangatccaaagggtgncaagttggaaactttttccctgaaaaatgatggggttntcagaattagagganctactgctttctcagtggcaccnagaatctggaaaacagcaaccatgttctgtatcgaaagatggaatgnccccgttgagactgatgtacctttcccctggngnattatccggngcttntggaacaaaggncttccgntatgcnagggtntgggggg

SEQ ID NO: 13324 - DNA, 377 bp, Glycine max
  Clone ID: PAT_MRT3847_112039C.1
aaacaagccttaaaagaatttttttttctcacccaataaatccaagaaattctgcaaactgaaaaaggggttttttactaaagcaaacttaaacaaaaacaacttccccttatttggcatctaccggggtaaaacaggaacaaaagccgctttttgatagaacacacctttgttttatattgaacattttgcacaggggtttatttttcacagcttttggaacttaaaatacttgcaaaggttttggaaataccaaactttttttttctcccttttttttggagatgacaaaggggcccgatcatgaaacaataatccacccccttggaattgaatcttgttttggggtgggaacgaggcccccctttttttatttt

SEQ ID NO: 13325 - DNA, 507 bp, Glycine max
  Clone ID: PAT_MRT3847_11203C.1
cccacgcgtccggtacttttaagaggatataggctaacatggaaacactcacactactgggggctatgaatggatgcatgaacattgcatgatactgcacagatgccgtgaatacacactatccttagatgaaattgctgagtgccgggcgggcatgctttatttttaaaaggaagttctgatgtctcatggcagatataaaggaggtgcttgttatcttgcaagtgaagcagtacagccataggggtataggacgggtactaataaagatgaggcatgttattgttgccctggcacatacaatcacttgaacacactacgtggtgccaagaatgcatgagtgatatttgttgtgagagagagggcatgaactatggtgctacccttgggtgagttggatggcttgaataggacatacgctgttattggaatgaacggggatctggctctttggaatactgtgtgagtataatactcgatttcttttctaaaccatctcaactaagg

SEQ ID NO: 13326 - DNA, 571 bp, Glycine max
  unsure (1)..(571): unsure at all n locations
  Clone ID: PAT_MRT3847_112040C.1
tcctgatcgtacaatagtcaataggtacaaacataccctacatacagacacgccagaagccacaagctaccctgtttaccctccctttccctctaaactctacacccaaagagacgtttccatatagtattcatcattcctgtcccattgctgcatcctcaaacttcacaaatcaatcacggtactacttgagtacctaatgtgaacttttccattagtgatcggcatggattgaattttggaaaaatcaaactaaaatcaaatcaaatcaaatcaaaccactaaaagggttaacatatcnnnagcaaaactagtttggtagcagcgaaattgatgaagatggaagtttctgccttcagcatatataacccgttgttgcttcctcctttcaaggtagtagccagaagggctacatcagccacatgatataggtgacatttatttcaagctgtaacattgcatttccacaaataacattctcagaaattataaataagaaagttgcgactttaatattcttnngaatattttttaaaattcaaattgttaaatttaaaagcaaattagaaag

SEQ ID NO: 13327 - DNA, 137 bp, Glycine max
  Clone ID: PAT_MRT3847_112041C.1
gatccttaacgaagacaaggaccccttataacactgacttagaagagtagccgaaatacttaccagtttagcacgatgtagaagtaagatgcagggctagagaccatccacaatagctagaggcgtcactaccccca

SEQ ID NO: 13328 - DNA, 499 bp, Glycine max
  Clone ID: PAT_MRT3847_112042C.1
tttatttactcgacaatatttacactgatttaacatgctaaatgcatgtccataacacttattgatggtatatgctactcaatttcatttgttattattggcagccgcacggagcttcttaatttgctttgcgcttcctgcctccaacatcaggacttgcttccttcgggttctcatttttagcatccaagggcttcacttcggtaacgacagcagtaggaacatcttcctcctcgataactgcaagaacaggaaaagaaaactcctcctcgaaattgatgtcagcaatatccagtgtgggacgaatctcttcaattatgggagttggaggtggagcaggggggaaattctgcatttcaagtggaggaggagggtggccaggaggctggttggtgttgagattgcatgccatatagtgatgaagtataatgactacttgaaagtggtattgaaagtagtatgagatagagtaaatgtttgtttgcctcggacgcgtggg

SEQ ID NO: 13329 - DNA, 165 bp, Glycine max
  Clone ID: PAT_MRT3847_112043C.1
attataaactgtccaactaatcagtacctcagctcgtactgttagcacgtgggggataatattttgggctgggaatagctatcgatactgacaatggcctagctgatatctgtgtgtgtttataaccaaccgataggcgccggggtttaaagtttaaacgcttct

SEQ ID NO: 13330 - DNA, 345 bp, Glycine max
  Clone ID: PAT_MRT3847_112044C.1
acttttctgtctttttcttctttctgactctctttgttgtatctcttacaatgtcaaacttgcattacatgttcatcttgtttgcagttcttcttgggcaaagccccagtagaatacattgccataccaagggaattagaccaagactttgtgcaggtaaagggttattgaccaacataactagagtgctgtattctgaacagcaattcatgaaatgggcgaacattgttggttccctcaaacactcagtttttaacgtaagtcaaaataaggttgtggatttttacactttgcacgtagataaggagcctggagctggagattttaccttaattcaagaagcca

SEQ ID NO: 13331 - DNA, 478 bp, Glycine max
  Clone ID: PAT_MRT3847_112045C.1
gataatgaaagagaagaagagccagacacagatgaagttgatgatgatgacttgttccctgaaagtagtttgatgccgactgagaatgatcttctgtgctggttacttccatcctcacctgtcttgtctttgtagcttctcatgacagaattggagggctgatgatatctgtccctatgaatttggccatatgaatgtttctttgccacttgaacatgcttgtttaaattttccctggccttggaaaccgatccttcatccgcaacttttgttgaaggttgcattaatttcatatgagcaaccagattttccaaaccaagacttgagataagcccttgaagccttcaactttgaacctagtgaagactgcttcagtttcttggtccatgacttcttctggttttcagcagcaaatccacttgtatctgttggacagtcaaagttgtaatactcttcagggtttagttccctacttact

SEQ ID NO: 13332 - DNA, 145 bp, Glycine max
  Clone ID: PAT_MRT3847_112046C.1
ctcgagcgcttggaaacgtctcttctgcagaagaagccgatgcttgaactgtgtgtgtagaatatgcaggagatcctgtttatattcttgcaaactttattaaacattctcttaaaataataatatattaaaactgtctgtttct

SEQ ID NO: 13333 - DNA, 228 bp, Glycine max
  Clone ID: PAT_MRT3847_112047C.1
agatcgcgagcggccgcccttttttttttttttaattttatttatttaattttcgaatctttttacattcgtcttaacctaaaatggtaacctttatatcactacgtacacgtacgcacatacaacatacatgcatgtttacatataaatatacaaaagttgcgtttttttgctggtgtcccggccagttctaggcgagattataaataattcttgaacgcttggcgg

SEQ ID NO: 13334 - DNA, 856 bp, Glycine max
  Clone ID: PAT_MRT3847_112048C.1
ttttaagttaaagagctgaatggtgaattgttatacatgaatgagtaatgtattttcttctttcccgacgctttcctcatttttcttgtaggaaaattttgcctatttgactctgtagcaatgtaagttgcttaggcttggtccagcataaaactgctttacaagaaatcaatgtcattttcttgattttcaagaacaatagaggcaagagcaagtctatatgctgtagatcctaaattcctaacaagtacgtatatttccctcctcttcttcataggcatctccttccactgttcctttctcaaatgagatagtaaaacagcctcacaaaagccctctgctactaaacttttgcttccttgaacagaagctgttgggacaaagccaataggccaccggtgagacttgctagcgattgaatcatttggtatttgcattccccatttaccagaggaatgttctttgaagtataatcgcatagcagattgagacatttgaagtccctctttttttttctcacaacttgaagtccataaagatatatcagaaggatatggtgcacaaataactgcaccctcttcaaaacatccttccttgaagggacgaagatgaactcttacaaaacatagcttatggtcataaatgtcagagcttctatgccttggatcaagctttagttcaccattaataaacttagagattctagcctttccatctgctgcataaggaaacaataacaattgaccagttttggtttcgttgaggaaagtagtcagcatacaacctgtcctcactacagttccatcaaacgaattactcccggagtcagaattaaaaatttcaaagtttccatggc

SEQ ID NO: 13335 - DNA, 410 bp, Glycine max
  unsure (1)..(410): unsure at all n locations
  Clone ID: PAT_MRT3847_112049C.1
ggggcacgcagggggaaggaaaananccccgcacagaaggacaacaccgaccgagggagaggaggaggaagggaggcgaggcgaaaaaccaaacagaacataaccgaagcaagcnagcaaggggggggcccacaaaggcngaaaaagaaaagaaagggggaggggaggggaagnaacgcanaaccgaaacgcgcaacagagacacgggaaaacncggcancanagcaagggcccgacccaggggaccctgcctcagcactctaggcaaaccccgagcttgagagctgacaggagcaccgcctataataacagtaagtcagtggcggcgaggtatcagaaatagatgaaacagcgggataaattgataatgactgaactgatcaaaggactagctgacgctggtgcaatga

SEQ ID NO: 13336 - DNA, 326 bp, Glycine max
  Clone ID: PAT_MRT3847_11204C.1
acagcctcatttacggttattttgttttccctaggaaaaaaaggcgattgttaattgcatccgtgaagcctgacttccaaaggcattaaccatgaccccggataagctctgaatttcaccggcaggaaagacacaaactaattgaggccacccccaaaaacaatgaaaactggccaaatactgaggttttgactcgcccctgcccctaaccatagcgtgctctatggctaccaccaaaacatctcctaaaagtgctaccgggcgaaatcctccctggaaaaatccctaccctcgacaaaccataccgatggcccctgatggcagcc

SEQ ID NO: 13337 - DNA, 564 bp, Glycine max
  Clone ID: PAT_MRT3847_112050C.1
taagtagaatatgagaatatgaattatgaacagtgctacaaggcaacaagtgcatggtggtaatgctgaagaatggttatattgtacttttcttaaacttgatatgaagaatgggttgtcatttgtgaatctgcaggggcaactgcagctattcactttgttataggacatgacatgcgaaccaatgctaccagctgttaccctcagcaccaaaaggggtcacagatagcagtttacttgtactctcccaaagttcacgtgctaatttggcgtttcgcgaaagtggtgaagggttgagggtcctacctttacccccaaaaaagtaagctcctgatgttcctggtggagctagagcagcatcaataatagagtcaaccccacactcaggggattgcaacagctgtagacgtttcaacacatataatgctaaccaagataggattgctggaacttcttgcatgagctttgtctgcacaactccaggatctgcaacagtgacaaatatctggtgagattttcccattaggcaaagctgtcgatggagctcataccagaaaagaatga

SEQ ID NO: 13338 - DNA, 722 bp, Glycine max
  Clone ID: PAT_MRT3847_112051C.1
tttttcgtagtgaattagttagcacattaattaagtacaatatcagaaaatgaattatgaagtatgaacaatgctacaaggcaacaagtgtatggtggtaatgctaaaagatatcatgattgctggccatcactaagtgaaggtacatgaatgattatagtgtactttctttaaacaactcttacactataaacctcagaacttcatatgaagaatgggttgtcatttgtcaatctacacgggcaacagcacttattcactttgttatgcgacgtgacatgcgaaccaatgctaccagctgttaccctcagcaccaaaaggggttacagatagcagtttacttgtactctcccaaagttcacgtgctaatttggcatttcgcgaaagtgttgaagggttgatagtcctaccattacccccaaaaaagtaagctcctgatgttcctggtggagctagagcagcatcaacaatagagtcaaccccacactcaggggattgcaacagccgtagacgcttcaacacatagattgctaaccaagataggattgctggaatttctcgcatgaggtttgtctgcacaactccaggatccgcaacagtgacaaatatctggtgagattttcccattaggcaaagctgtcggtggggctcataagaaaagagatgaggcataattttagatactcatagatgtgaacccatggatattggattgatctaaa

SEQ ID NO: 13339 - DNA, 287 bp, Glycine max
  Clone ID: PAT_MRT3847_112052C.1
acgaggagtggaaagagctctgttgccaagagtgaaggaactcatcccgtttgggctggagatgccatcactttgaaggtgaagaatcaagaattcgctaaacttaaggtcaaggataaggacacccttcgtcctgatagcagactcggaactgccgaaattcctttggctgaagttgtctcacaaggaagagttagcaaatggattcctattaccaagagaggtaccgttactggtgaagtcctcgtcgaaatggaattcattcctgctactgttggcatctaagt

SEQ ID NO: 13340 - DNA, 222 bp, Glycine max
  Clone ID: PAT_MRT3847_112053C.1
aaacacccttgcataccacgccgagattgattgcatcagcgagcgtaagagcacctagggacggatgttagggtaacaagaacatcttgcaggcatgagagctcacctgtagcaaggctgttgcacggtgaacggaacggaatgctgctgaacgttgacggtgcgtatgaacatcatgcaagcgatggtcactacaagtgcgcaaaccacacctgttcaagt

SEQ ID NO: 13341 - DNA, 260 bp, Glycine max
  Clone ID: PAT_MRT3847_112054C.1
tcacggcttgagaagacgacagatgggggggggaagaatttgcttacttaactttgtgctcaaatcgttatctctttttttcctttctttttccaaaattcctattgtggtggtaaaaaagtggtgaggctacaaatagagtttttgtggggtaagagggaagagggagggaaaatagcttgggtgaaatggaataggatttgttggcctaaggaggaagaagggttgggtgtaaaagatatccatctcttcaatttagc

SEQ ID NO: 13342 - DNA, 645 bp, Glycine max
  unsure (1)..(645): unsure at all n locations
  Clone ID: PAT_MRT3847_112055C.1
aattcggcaccagatgcgccggtgtttgaagtgcatgaggtggatgatgaggttttgcccttgttgactctagaggatctcaaggatatggggattagtgctgttgggtcaaggagaaaaatgtacaccgcaattcagaagcttggaaagggcttctcctgagctgagcgagctgagcttgttttttggtgatgctgccagaggccggatgtagattctcagctttagagaattaatcagatgcgtgtgtctgagctgaactgagttttagtatgttcttccgtgactcttttttgtttagggttggaaacattaggacctcacatgttattatttgagaaacaaacatccttcttgaaatccagtccaagtatatataacttcttgagttgttgtgtttcgtagataacttggaagggcaatgccaaggaaaaatagacatggtataacttgtttggaaagttttttnctcaaaagaaaaggggcatgctggtttatttcctcattctggctattggaaatatggcaactataaaatcttctgggtcttgtggcgaaatattgtgtacaccttgtttacacaagctgtgtagggctacaacagccagcatttatgtgtcaattactttggtggggtaccttttt

SEQ ID NO: 13343 - DNA, 1165 bp, Glycine max
  Clone ID: PAT_MRT3847_112056C.1
ggtgaaaataaagaaaacttcaaaccagtttagactataatcattcctgattaggtacagcccaaaggttgaaactcaaagcattttgaaataacttttgagcgagctatattcagatacacttccacaaatcaagtggaaccactaattctaaattttctttctgaagatggtatacaaaaaaatatacaagacatggatgccctacaagaacacaaggtcccttctttacaccttacccctggtcgagacagcttaaatacaggagataaggaaaagagaataaaaaatgataaatcgacaacaatattcagcacaagggggaagaattccttagaaaagttacacaggatcacaggcaatgccaaggagttttggctaaaagttacgtgcactcctggaaggaattgactgggaatttacagcccccctaggagcacttgctcgccgtgccctatgatcatgttccttgctaatccgcattgcggcaacctccttttccatagaagcaacttccctacgcatttttctggcctcaacttccatagccttgctcaatgtatcaaccttctttgccaacatctctattgcatcatccttatctttaagagtctggtctttttcatgacaagccttcctcagagatataacctctttttgcaacatgtcatacagcattcctgaaacatagtcttcattttctgatttagattttttgactggagtaccatttgcactctcctcgtgtgtagtaattgtttcactggtgatggtctgaatgttggagtttcttggcatgttatctagcccattggcatctggagtgggcctccctctcgccaaggcgcgcctaccgccagcgagtggcctcgccgtgcgcttggcatcttcctgcttcgccttcgccccgtttgctccttccgtccctggtcgcgtcagggcggtttcccgacattgatatccattggaagaagatgcagagagactctcagctccaccaaaagactgtctccgcgaaggcccagtggcaatgtttcttccatctgatacagtgaatttggaattaccattagatgtcttaaccctttcctccaaaactttgaagcgcaattgatatttttccttcatttgtgcctctgcctttgcagtgcgctcagctatagcc

SEQ ID NO: 13344 - DNA, 326 bp, Glycine max
  unsure (1)..(326): unsure at all n locations
  Clone ID: PAT_MRT3847_112057C.1
cgtcgcatgcacgcgtacgtaagctcggaattcggctcgaggtntcctttnnggntggggaatcacaattggtgctggtttggnttcttatcccattgacactgttcgannacgantcangatganttctggagangctgtgnngtacnanagctctttgcatgcnttccaancaatcgtcgnaantnacggtgccaagtcactcttnaaaggtgctggtgcgnncatattgcgtnntgttncaggtgctggtgtgcttnctggttgtgacaagntgcagctnntttgtttggnnngaaatatggatctngcggcggctanaaagn

SEQ ID NO: 13345 - DNA, 243 bp, Glycine max
  unsure (1)..(243): unsure at all n locations
  Clone ID: PAT_MRT3847_112058C.1
ctccctctctgtgttatagatttcttgaaatantgatttagcctaggattatagtttatgtgtatttacatgagggaaaataaggagacaggatttggagtccatctcgttgganagcnacctagatanatcagggntcagaattcctgttctaaactgangacaactctntagatgntatcttncttnacctcactnnaacatangggtngnccacctatttgaagagcatcccacgtntnc

SEQ ID NO: 13346 - DNA, 398 bp, Glycine max
  Clone ID: PAT_MRT3847_112059C.1
tttttttttttttttttttttttttttttttttttttttttttttttttttttttttttttttttaaaccaatcaaatttttgacgggatcattggaaaaaaaagaaccaaaactaaatcccaaatttgggcctttgggggtgaaaatcccaaattactttagtcaaccactgaagcccgttctaaaatggtaaaaagggaaagggtcaacccctattttcataccagttccaaaaaaagggggcttccaggggaaaaaattaccagggaaccggaaacttgttgggaatttaatttgaataggttaaccataaaatcccggagattgccaaaataaaaagggtcccactggtattttggcgccctaagtttgaagcctttcataaggggccacttgc

SEQ ID NO: 13347 - DNA, 161 bp, Glycine max
  Clone ID: PAT_MRT3847_11205C.1
acaaacattaaaacatgttgcacgaggatttatataaccactaatcgatctccaagtctcaacagacacaaacataatgcaaacctaattgaagagccatatctatcaaattttaaacttagacaattagaactagtatacccaaatctgattattcccac

SEQ ID NO: 13348 - DNA, 774 bp, Glycine max
  Clone ID: PAT_MRT3847_112060C.1
cggaatcccggtcgacccagcgtccgtattttctgaactgaagagaaagaagagatacaaaatgaagagagtcaagattttcattttaataactctagctctgacatttgtggcatttgtgccaaagatagagagccagatcatgccaccacttattccttttccaccaccatctcttcatccactttgtttatcccaactagcactagtaagctatgcttgtgcaatgttgcctccaaccacaacactaccaccttcaccactcacaccaccaccctctccttcatcccctggtgatgatgagggacacgggaatgaccaaagccagggtcaccaccaaacttctcaagaagaaaactgttgccggtgggctagggaaatggacaaccaatgtgtgtgtgaattcctacttctattgcctcccttccttactagacctttgcatcagtactcaatcagcattggagaatcgtgtaatgtcacttactcgtgcggtgggccaatatgattgacaaacttacgttttgatgccatgaaagtttggtagtggaaaagaatccaatcttgtgttcggttttaaggttgaagttatggttatcgtttctgattcgttgtgccatcgggtgttagaaacaaagtgtgccgtagcactctaaaaaaaaagtcgaaaaagaaaaaagcgaattgtaggcttgtagcacggtgaaaacagaaagtattcatataattatatttacctgaatttatatttaatgtgaatggaaaagttctaat

SEQ ID NO: 13349 - DNA, 816 bp, Glycine max
  Clone ID: PAT_MRT3847_112061C.1
ggctcgagcacaactatttctcaaatattcattttgtcaccaatcacatctcatttttctaaattcttgtttacacactctcattaatttattacattccatattgtaattaattcttcgtacgtatccatgaagagacagagagatttcaaggggtttgagagcatagatttggcaaattgtctaatgatgctctctcatccccaacaaaatgagaaactacttcaaaaaaaaattgaggctgtggaatttgagtgcaagacatgcaaccgcaaattctcttcctttcaagcattgggtggccatagggctagccacaaaaggtcgaaacttgagggagatcatgaactcaaagcacatgctatatctctaagtttggcaaacaaacccaaaatgcacgagtgttccatttgtggacaagaattctcattgggacaagcacttgggggtcacatgagaaggcacagaacaaccatccacgaagatttttcttcaataaaacaggttattacacaaatgcctgttttgaaaagatcgaatagcacgagggtggttacgtgcttggacttgaacctaacaccgcttgagaacgacttgaagttgttgtttggaaagatggcaccgaatgctggtgcctttgcctgattctttattgttatcagttttgtgatcaacgctgatttgtatttagttttttttttttctttttcggggtgagaatttgtatttagttagtagtcctgtttttgaagtcttgtagtgtattctttaattttttttaacgtgagaattggtttttattttcttcacaatcaa

SEQ ID NO: 13350 - DNA, 617 bp, Glycine max
  Clone ID: PAT_MRT3847_112062C.1
gatgaactaatttgttttatcttttagattcggggaaagatttcctgttactttacaaggctgcaggcaaatcctactgagcaaacattaacttgatcaatttcaaacaaaccaactaattaaagtctctaacctcagtttctggccatcaaataaactctagcctttacaacagagccatttcgaaacttaaacccgggactaactgagaaaccaacaaccgttccaggtggcaccctcccgccagcaaatttgaccacagtctccatgtaacgagggtgaaactcagctccactacttgcctcaaacttacttggcagaggatcaaacgagaacgctagcaaatgaagcaaccacactccctttgccacccccaaaaactctttgtaaaaccgagtccttggatggttcccctcagagactagactgtgctgcaccaaatcaccaaacagtgactcctccattttggggtgcacaaccgaaaggtacttgttggagcagaatttgccaaaatggcacgttggtaaaactccgaggagctcagaagggtccgtggacttcatgtcgtggtattggctgaagcaatcgcggcgaaactgagcagggttgaggaggga

SEQ ID NO: 13351 - DNA, 420 bp, Glycine max
  Clone ID: PAT_MRT3847_112063C.1
gtttaggtttagttgcattaaaacgtagtcattaaacttaaggcttaagccatggcaggggcatactttgtgcatatatctcaggccattctcgcacgtgctgtgtaccttcatggctcatctacatgggacagagtattactcttctttccatcattatctggccataagtgacattctacatgcaaagcagcagctgccacgatctcacgtaaaaggggtgctggtccatccaccaacggtgtacaagccgctgcggctgagacacttgatcaaaccaccgaggattctatggaggagaaatacgtcaacaccatttggcttgtggacattgatgcatgtgataaggccaacagtggtcaccctgttgtaccaatggggtgtgctacaatggggcacattgtctacgaagagataatg

SEQ ID NO: 13352 - DNA, 384 bp, Glycine max
  Clone ID: PAT_MRT3847_112064C.1
cggatacccgtcccaacctttaacacctcatcaaaccgagccctcaagctgcaagactgcggagacctaatcctctctgaccccaacggactcgttatatggcagaacttcgattaccccaccgacacgttgctccccggcatgaatataactcgcttcaactctctaacctaccgtcgaacccaaaccgacccgactccaggactctactctgtgcggctatagccaccgatcttgggctaattctaactcgtctttaacgacaccgatttgttactggtccaccggaaaactggaccgacggaacatgcctcaacatccacgaaatgtccatcccttacttatacagctgccactgtctctaccctttctcccccgccgcgg

SEQ ID NO: 13353 - DNA, 296 bp, Glycine max
  Clone ID: PAT_MRT3847_112065C.1
tttaaggcatgcccccgaaacccagtatatatattacctatccaaacaaatcattcaatctttgcatgtacctagctagctgactgctcaataccgaatataaaaataccccttcgccaactcagctagaatcccagaattagaccacttcagagcacgtaaatccgaatttccgcagagccactaacttaagccagttcgcatctctatacatggagcaagttatcacacatgcattgtacatttctttcgtttttaatttttcgcaccctcctgatgctattgcttctggtaag

SEQ ID NO: 13354 - DNA, 1226 bp, Glycine max
  unsure (1)..(1226): unsure at all n locations
  Clone ID: PAT_MRT3847_112066C.1
gtgaaatatgaaaaagctgttgatcctcaatatcttccgacacagtctgatgttcagaaggttcttaatggctctatgaacagctttaggatttataatgtttatccaagatatttccgtgtcactggttcaggtgatgttagacctttggaagaggataatgctcttagtgctgatctcattttgaatcgcgagcaatttgagtggtgggccttccgagattttaatccatcaaatttgagtggactttgtggaggtttgacgggcaatttttgacaagtgaagtttcaagaatcaattatttaggatatagactttatcgtgctctgccattcctttatgaattaagatgacttcttgactggtcatgcacaactacgtccctcaccgtgtatgactggctaaagcaagaggacgaatttgcaaggttgaaccttgtcaaatgtgcagattgatagcgatctgcgaggatatatatgctgctagagctgagggtgagcttggaatcgaagaggtcctttactggactctagtgaagatataccggtccccgcacatgctgcttgagtacacaaaacctgattagaattttcagtgtaccattttctggtcactaacagctaaccaggttcagtgctcacgtatgatttgactgacattgaacgatgttggagtcaggagcaatacaatgcaagttgatgcctgcatgataagattaatattgcaacatttttggtgcggtattcattatgcggttatgaaacatttctctgaacagattggggagcacggcatcgtgattcttgactgttatcatacataacattgatgctaatgattattttgggggaaatcatgtatacaatgtacaatacagtcaatgccagaattataggaaagcaaacttgtatagttaaccaaaatatgaaaaagctgttgatcctcaatatcttccaacacggtctgatgttcagaaggttcttaatggctctatgaacagctttagtatttataatgtttatccaagatatttccgtgtcactggttcaggcgatgttagacctttggaagaggataatgctgttagtgctgatctcattataaatcgtgagcaacttgagtggtggggccttccgagatactaatccatcaaanttgagtagactttgtggaggtttgacgggacctatggcaatcatagtatctgaggagacaccaccgcagga

SEQ ID NO: 13355 - DNA, 360 bp, Glycine max
  unsure (1)..(360): unsure at all n locations
  Clone ID: PAT_MRT3847_112067C.1
ttccattctctctgtgtataatccctacctctcccttcaagatggcagattntttcgtcaagacactcancgggcaatgaccnatcacccttgaggtgggaaagctctggacaccatcggacaaacggtcaagggccaagattccagggacaaaggaagnnaatncccccccgggaccaagcaancgtctnatttttcggncgggaaaagcaactttgaagggacgggccggtaaccctttnnatggattannaacanttccagnaagggagttgtaactcctttcnaccntnggtccnttccggttntccggtnggtggggcattgcaagaattctttncgttaaagnancccttccac

SEQ ID NO: 13356 - DNA, 299 bp, Glycine max
  Clone ID: PAT_MRT3847_112068C.1
ctcgagccgaggacccaaagcgtctcttcgaaggaaacgcgctcattcgccgtctggtgcgtgtcggtgtgctcgatgagtcccgcatgaagcttgattacgtcttggccctcaaggtcgaggatttcttggagcgtcgcctgcagacctgtgtctacaagctcggtcttgccaagtccatccaccacgcccgtgtcctgatccgccagcgtcacatccgtgtcggcaagcagatcgtcaacgtcccatccttcatcgtccgtcttgactcgcagaagcacattgacttttccctcacc

SEQ ID NO: 13357 - DNA, 191 bp, Glycine max
  Clone ID: PAT_MRT3847_112069C.1
caaccatctggaaaacgttacataatggaaattgatccaagtagccaccacccaatggccaataaatcataatgtacagaggcaaaaaagaccataccatactaaattaaaatttccacaaccaccacaaaaaccagggtatggctcagagccctgatcagcagataaagcccttagctcaattaatatga

SEQ ID NO: 13358 - DNA, 323 bp, Glycine max
  Clone ID: PAT_MRT3847_11206C.1
ccttataaaattgtgggggttttgttttttttcgtgattggggaaagatatttcaatgggaacccggtttcccaatgggagacaaatggccggtgggaataaccatgctaaaactactaacaaacaaaattagtaacagaactagggagttcagaccaaaaggtcacccgagagaaagcccacaaaccccaaaaggaccaaaacaacatggcaagctcaaagttcagacatcgggagggggaaccctccccaagctgaagactcaccaagggaaacagaagccagcggaggccggcgccggggggggggcctttgtgcctatt

SEQ ID NO: 13359 - DNA, 477 bp, Glycine max
  Clone ID: PAT_MRT3847_112070C.1
aaactaattggcttcaacttgtgactttcagagctccacatgagtacttgtcaacttaaagatttgagcccgtctcttcaatatgctaattttaaagtactcaaaaacctttatcttttttatgatgaattttactctgagttgcataaatggctattcaatcttagttgcggacggctcaaatccccccttacccctaaaaccctctcatcaaacagtacagcgccgagtactggatcacaggcgacctcatcacccctccccagcaccgcgccaattcctttaccaaacgcgtcctggacccgcttctcgccgacgtcgttttcgtccccttcttcgccacgctcagcgccaacaaaggcgccttcagaaagaagcacgggaacgacgattacaagcggcagaggcaggtcatggacgccgttaaatccacccaagtctggaaccgctccggcggacgtgaccacgtgtttgtgc

SEQ ID NO: 13360 - DNA, 159 bp, Glycine max
  Clone ID: PAT_MRT3847_112071C.1
gcctaacctgctaccagggaaaatgacaagaggggaaactcgtgtatcaagggctaccatcgcgccactaaaaggggacatgtgaaagtaccttgactcaaaaggcagctaatgcacccttcctccccatgtaatacgccaacggcctctacgataccc

SEQ ID NO: 13361 - DNA, 525 bp, Glycine max
  Clone ID: PAT_MRT3847_112072C.1
aaaaccaaaatcaattttttttaatttgcataaacgttacatcacatgaaaggggaaagtccaacaagaaaggggggacctaaagctcaaatgaagggctttattatcagttggctcttaaaacttttattttaaaattctaagctttttggaaaattccatccctcccaaactagaaaaggccccacaagcaacttgaaaatttgaaaatccagagagcttacccaaaggctcattttggttctgagttttttcccttccaccaacagggataaacatgggggtgtcaaaaggggaaacaagctgggatttttcagggggttcgggtttttttggcaatatgaactccaccacaatccccttcccatttggagacaatggtttgggacaattcctcaaaaattctatgcatttttcgcctgaccaattggggcatacacccttcagttttatggcggccccctggggaacttttgaaacatattgcctccaaatgcttaatccctggaggggggggggcatttt

SEQ ID NO: 13362 - DNA, 615 bp, Glycine max
  Clone ID: PAT_MRT3847_112073C.1
tttttgtctgtcttggtctattggcaaatacgtgcaagagtaatatacgcaagtagaaggaacacggcaagaatttgtgggattcaatttagtggctatgggtcaacaatattcaagctcgttttcccgtggctatgctggtgtgacatttttcgaccaacaatattggactgcatctgtaacaggatatttactttccaatttttctttaggtcttgctaatcaatgttgttagagtaatgattaaggaactaaaaggagaaagtatttaatgtgaaaaacatataagagcataaaaaaaaagttatggacaacataattttatgcatttcaataaaatttctccttttagttttttaaccaatgtcttaaagacagtgattaccatttgcctttttcttttcctttcttagagtaggaaaacgggtagagattagggaagtaaaatttagactaattttgtaaaaaaagaagttgatcttagtttagctattggttatttggggttacaaatatacacataatgtaacgcgggctttcctaggatgtagtcatgtaggtgttgactctgattttgttttttttttgtaatgattaatcacaagttataatccc

SEQ ID NO: 13363 - DNA, 293 bp, Glycine max
  Clone ID: PAT_MRT3847_112074C.1
aaaaaaaaaaattaggggctgcctttgtttgtgaaattccctttgcagttcctttaaacaaggccccgttcccctccccacatttagttttttgcccctttacccccacccagggtgtttttggggaaaaaaactgaagggggtggtcgaattaaaaaggaaaagattcaaggggggatttcgaactcccaggctaagtccctcttttcttctattatgccactcccagcttcccttgtgggcttttctgggaagagacccaaattttactcctgggccattttgggtttggg

SEQ ID NO: 13364 - DNA, 467 bp, Glycine max
  Clone ID: PAT_MRT3847_112075C.1
cttgatctatatctaggagtcgaagcattatttcatcgattctctcccttgtctttctctgtgcgagaccagatgatggacacgacggcgaagcgaaacactgtctttgcgccaatcgcggcgttgatgatggtggagctatctgcggcgagagtggtggtggagggtcaggataactaggacgtgttgactctggtgatgcacatgcacgggaagaagtactgtgacaaaggacgggaatgcatgggctggtcattttactgatgtcacctcactattactgagtattaccagacctaccagatcgagaatctcttgttcaagcggaactcgttgagggcgcacgccggtggattgtgggactaccactcggtgatcgccggtgtcttgctgttagagccgcaagggttgcgctccaccgggtaccatacgatgcagatgatggagattgcggtgttcctcggaca

SEQ ID NO: 13365 - DNA, 1145 bp, Glycine max
  Clone ID: PAT_MRT3847_112076C.1
ctcgagccgattcggctggctgcgagaagacgacagaaggggactcagcctaattaataaaaggggaagtttttgcatagtgttgagttttgtcgcagcattccatacgaggccgaagggaagagtttttgttgggtttgggaggctaagtagggtttgcgttgagaaagagagagatgggaagagaaaaggagacaacaaaggtagcttacacagtggagcagcttgtagccttcaatccatacaatcccgatattcttccagatctcgaaaactatgtcaacgaccaggtttcgtcgcaaacttacagcctggacgcgaatctctgccttcttcgcctctaccagtttgaaccagagaaaatgagttcccagattgtggcccgcatattggtcaaggctctcatggcaatgccggcgccagatttcagcctttgtctctttttgattccagaacgcgtgaattttgatttttttttagttttttttttatgaatcttagcaaatggaggagcaattcaagactttgattgtcctgtctcactatttggaggtaagcatcagctttggttgctagaggacttagcagacatttgaaattagaaattaatgtatgcctcttcagacaggaagatttcggcagttttgggatgaaaccgcaaaaagtcgtcacatagttgaagctgtgccaggatttgagcaggcaatccaagggtatgcaatccatgtcctttccttgacttaccaaaggattcctagaactgtgcttgctgaggccattaacatagaaggtttatccttggacaaattccttgaaaatcaaatggccaacaatggttgggttattgagaagagccaaggtagggctcaacttattgtcctccctagaaatgaatttaatgacccagctttgaagaaaaatgccgcagacagtgtaccattggagcacattactcgcataataaaaaattttagttgatttttctatggtagactgccaattttgtttcctgaaggagatcatgcaaatattatatcagttggagcaacatcttcccttccccttggatgcttcaatttgagaattagtggacagctattgtagtttaaaaaaaaaaaaaaaaaaaaaaaaaaaaaggaagaaag

SEQ ID NO: 13366 - DNA, 1363 bp, Glycine max
  Clone ID: PAT_MRT3847_112077C.1
gtagggttttgcagagtgtcgcgtttgtcgcattccatacgaggccgaagcgaagagtgtttgtagggtttgcgttgcgcatcgtttgagagagagagatgggaagagaaaaagagacaacaaaggtagcttacgcagtggagcagcttgtagccttcaatcgatacaatcccgatattcttccagatctcgaaaactatgtcaacgaccaggtttcgtcgcaaacttatagcctggacgcgaatctctgccttcttcgcctctaccagtttgaacctgagaaaatgagttcccagattgtggcccgcatattggtcaaggctctcatggcaatgccggcgccagatttcagcctttgtctctttttgattccagaacgcgtggtaatttgtgttgctttcattcacacataactagatgtttgaatagttttgtcacccatgtctgttatgcgtgtttgaataattacctgcaagtttatgaattttactcaacttgaatgtgaactgtattatgggatttgtgatgacaatacaaattcaagtataccaagttctgcaggtaaaatattgagtgtaattattgaattagtaaataagggaagggatatcgataaaaattctagagaagcattagatatattgattttttcggctcctgcacatgcaatccacaaaattagtcaaccagttcgtctattatcccccttattattgattcagattactaattttttagttttatcaatttaagttgttagatcctttcagtttatgttattctttttatgaatcttagcaaatggaggagcagttcaagactttgatatttgataaaactaataaaactaaagaatctcacaacttaaggttttgtggaattttgattttttttttagtttttttttttatgaatcttagcaaatggaggagcaattcaagactttgattgttctgtctcactatttggaggtaagcatcagctttggttgctagaggacttagcagacatttgaaattagaaattaatgtatgcctcttcagacaggaagatttcggcagttctgggatgaagccgcaaaaagtcgtcacatagttgaagctgtgccaggatttgagcaggcaatccaagggtatgcaatccatgtcctttccttgacttaccaaaggattcctagaactgtgcttgctgaagtatgtttgttttgtccatttgaagcattgattcattacttagtggaatattgtttcatctccagctaaaccaaaatccagtgcatttattccctaattcctagttgaactcatgtttgaatgtgactcatacattaagaataaaacacttctagactcaccagtttaat

SEQ ID NO: 13367 - DNA, 1219 bp, Glycine max
  Clone ID: PAT_MRT3847_112078C.1
cggtcgtcccgttcggcctaagtggggttttgcagagtgtcgcgtttgtcgcattccatacgaggccgaagcgaagagtgtttgtagggtttgcgttgcataccattcgaggccgaagggaagagtttttgttgggtttgggaggctaagtagggtttgcgttgagaaagagagagatgggaagagaaaaggagacaacaaaggtagcttacacagtggagcagcttgtagccttcaatccatacaatcccgatattcttccagatctcgaaaactatgtcaacgaccaggtttcgtcgcaaacttacagcctggacgcgaatctctgccttcttcgcctctaccagtttgaaccagagaaaatgagttcccagattgtggcccgcatattggtcaaggctctcatggcaatgccggcgccagatttcagcctttgtctctttttgattccagaacgcgtgcaaatggaggagcagttcaagactttgattgtcctgtctcactatttggagacaggaagatttcggcagttctgggatgaagcagcaaaaagtcgtcatatagttgaagctgtgccaggatttgagcaggcaatccaagggtatgcaatccatgtcctttccttgacttaccaaaggattcctagaactgtgcttgctgaggctattaacatagaaggtttatccttggacaaattcattgaacatcaagtagccaacagtggttgggttgttgagaaaagccaaggcaggggtcaactcgttgtcctccctagaactgaatttaatgacccagctttgaagaaaaatgctgcagacagtgtaccattggagcacattactcgcatcttccctattcttagttgatttttctatggtagactgccaattttctatcctgaaggagattatgcggatattatatcagttggagcaacaccttcccttccccttggatgcttcaatttgagaattagtggacagctattgtagtttactcatgttttgcatacctgtctgaaaattaatttgctttgctatgctttattattcgttgaacaaatggcctgttctctatgctgcaatacaaagttggaataaggagtagagaaaggttcacttgtatgcatatggtatgttactggggcaaaattgaactcgaaacttatgtcaactaatctcatggatgttggtggctaaattctaaaaaaaaaaaaaaa

SEQ ID NO: 13368 - DNA, 1562 bp, Glycine max
  Clone ID: PAT_MRT3847_112079C.1
tatcaaatccaaacttttattttaattgattaaatcaacatatattacacttaattacttggctaattagaaccaaagtacatgtcccataaccctttataataatcacactgtgggttcataggttcatgcatgacactgccttacaaggagacaaaaagaaaaggaagctatataagcacacatatggtatatatattatatgtagcacctatacatatagttgacttggtctatgttatcgaatcaatcttttcaaagcacatttcagacagacattaacatacattacattaattagattgacttggtgacatgcatgtgtgaatgatcatcaaattgttattcactccatggtgtacacatgaaacttggaaaaatcaaaatctaaaaatattcaatctgatcaaaatacattacatggttaaagattacgaaagggtaactaaagcaattggctttcatcaaagtggaagtcctcggtgctgcagaaatgaggagagaatatcccaaaatccatgtccaaacttctcgagccagtgcatgaatacacagaatctgcattttcaggtgctattttcaaacctgcaggcttgtcattggatagttcaaaatccttcaaatcagaccacaggttagcatctgtgagatcacttggatcagtctcatcgttgggatattcttgtattacaatttggctttgtgatccaatgatggaataatgttcatttggcacatttgcgtcaggaccaagaaatgagtcccaagtttcagaatgtgtcaccatttgtggagccttgagggtgtctttgcatgtgtgaaagccaatgtacgtaatggtgtacatatcaggattctcttgtatccgttgcacttgtttggttgctcggcaaccttgttcaaacttcctagtgcacctgaagtaactcctgggaaattgagaatttaggatttccttttgtccgtactttctccatgcatgattatcatcagtagtttgggcaactatggtccatgtctgttcagtcttccttcttttataggaccctctccgatcctttgatcccttcttactctcagttgaaccctcagacctcggatcaatgctttccacctgcgaggcatcttctccggaaattacaagattctgagcaacctcgttcatgatcatgaccacttgttgaatcctcggaagaagaagtcaacacagagagagtttcagcgaaagatctcagcacattggccacaagttccttagcagaaacagacccatcagggccaataggcttctgaagcagaaacttcaactgagtagcatagtctcgaccctgaacaagttctctaatgacccttttcctctttgctgctgaggaacttcttgggaagagaatactcattgttattcggtctctacttggtggctgtaaggatctgtttctgtagtgtgttaggattgttaataacttgttatatatttttttttcttggaaattttggtttggctttggattagagagagaaaagaaggaaaggggtggggttttgcgaggaaagagagatac

SEQ ID NO: 13369 - DNA, 340 bp, Glycine max
  Clone ID: PAT_MRT3847_11207C.1
attctttttcacatttttttatgttgactccaaccgcaacataaacatcattatttgttaccaaagggcacaaaaaggtaaaggggcacaaaatgaggaggccctttacgcgtataatatcatttgggggacttccaaaaattccctcgttaaaaggtggtggcctccaaaagatccggacgggaaaaatacaccccaaccatggcggggggcacgaccacacatgtgcaattgcgatggctattgaatagaaacaacctcacccaattgtgataacccataagaggttgatctgatccgaaatgcaaacgtccactaccttcattagcaatttcccaaa

SEQ ID NO: 13370 - DNA, 622 bp, Glycine max
  Clone ID: PAT_MRT3847_112080C.1
ggcgagtggagaaatttccgttcgtttactaatacgatagcagaactgtgcgcgttgtggaattgcattggttttggggcacaaagcgtgaagagagagagatggagggttcagacgaaggagtagagagggttgtggattcgaaggacttgcagcaacagagcaaagctttcgacaagctcacagaccgcgtcgaggatcgccaactcgattcttcacgagtccaagaggccatggcatcaattgctgcatcttctgaagctgactggcaagccatgcgtaagagggagaaagaattagctgctgttaagataaatgctgctgatgttgacataattgcaaatgaactagagctggataaaaaggtggctgaaaggaccttgcgtgagcataaaggtgatgcagtagctgcaatcaggcacttgcttcgctagagttgtgggaatggaagtgtcgatgttttacaaaatgatatttatctcagtcatctgaataccatgacctaatttgctctgaaatcttatagctatacgttccatgtactgaaacacgtgtttaaatgtttacataattactatattcttacctcctttcttgctagctagcaaaaaaaaaaaaaaaa

SEQ ID NO: 13371 - DNA, 708 bp, Glycine max
  Clone ID: PAT_MRT3847_112081C.1
ccggacaaatctccgagcttgttttctatcctgctgttgatcccttggattctacatcacgtatgccttccactatattaaaacaaaacggatcactacgaaactgctcgtgcgtgaacaagataagagtcttaagaacttatctgaactatcctagcatatcattgctattttgggaatggatgagctcagtgaagatgataaattgactgttgcccgtgcccgtaagatcatgcaatttttagggaggcctttccatgttgctgaagtcttcactggtgccacaggaaaatatgtggaggtgaaagagagccgtaacagactccacggggagttggatggaacatacgatgacacttcgagcagacgtttaacatggttggcggcattgaggaggccattgcaaaggccgagaaaattgctaaggaatctgcagcgtcttaatcacacacagccctgttctcattttaatccctttttttttggtaattgctaaatgtaatactttaggaactcttggcaatgccaaccacacaaagatttccatcttatggagatgaacagtgtacgaggggataacctattgtccatagcaatgttgaacactgtgagatgaactacggtcaatgtctgtggccaaactgcccccctgtttttaagatggcgtatttaataaggggaaaaggggcaagaagatgtacatttttt

SEQ ID NO: 13372 - DNA, 321 bp, Glycine max
  Clone ID: PAT_MRT3847_112082C.1
tcacgcacaccaaacagcatgaagcttcttgatagagatttgacacctccatatgtaggtgatttccttatggaggtgggtgcctttagagatgcctgacatggccttgttttgcttgctccaaatggaaatggaactcgccttgctcaggcacacagaatccgcttttgattttcacaaaggtccatcaaaatttaccttcataaggatggatgggaaaccttttaaccaacccttcccatttgacaatattccacttttggtggaaatttttttccatggccagtttaacatgctcgccactcatgattccaagtccaa

SEQ ID NO: 13373 - DNA, 118 bp, Glycine max
  Clone ID: PAT_MRT3847_112083C.1
gttacgatataagctctgaaggcgttatatcttctccagtcaccagtatatagatgaatgatatcaatgctagagatgcttgccctctcttaacaaaaagaagctatgcctgtcgacc

SEQ ID NO: 13374 - DNA, 556 bp, Glycine max
  unsure (1)..(556): unsure at all n locations
  Clone ID: PAT_MRT3847_112084C.1
tgacattgtgctccttcaatattagtaggatgtttcttggtttcaccatcgactttgttatatcaacaataattgtcttctcatccttagtcaatcgcccagcgtatggatgttcaactaaagacttggccaattcatgattatgaatcccacagatcaacttcatcatccaaccttgccctccaatcactggtttcccacgaagcttgaagggacaaccatatttcctactcccaatggctcttataacannnnctttgttcctacacttatactgaccattcctttcacaaccaattaacacaaatgaacttcttcctctactaccagtatgtgtgtctgacctcataatgactgcagcaaatccgttttcatgggcaaccgatcgagnctattgcaaaacataatctcgggtaccaaagacctgnnaagtattaaaagcatatgaacaatcaacatgtggttcattcacacctcattcttgttcattttcctaatccatatcaacttcttgagacattgtattatcatacgtccattgatcttcattcatctt

SEQ ID NO: 13375 - DNA, 260 bp, Glycine max
  Clone ID: PAT_MRT3847_112085C.1
tataacataaaaaaaaaaaaaaaaaaaaaaaaaaaaaaaaaaaaaaaaaaaaaaaaaaagggcggaacaaaaaaataaaaaagcgggcggccgccggaatatggatcccggaccggccgcctggtggcgtcccggcctttccctttggggggtcctattttcccttggcgtaagtctggtcgtggctggccccctgtgttggaattgtgctccgttctcggttccacacggcttccggacccggatccctacagcgttac

SEQ ID NO: 13376 - DNA, 1043 bp, Glycine max
  Clone ID: PAT_MRT3847_112086C.1
accactccaattcttctacttaactagcataaaaatcacgtttgcaattctgcgtgttctttccccacccttcattatacgtacatattcatccacccaccctctagctaccaataaaattgttcactttcactaattaattttatagtatggaaattgaagagcaaacgatgaaaatgatgatgaagtcgtcgtctaggttcagacgtatctgtgttttctgtggcaccagccctggcaagaaccccagctaccaactcgctgccatccaactcgccaaacaacttgtggagaggaacatcgacttggtttatggaggagggagcattgggttgataggtttaatctcacaagttgtgtttgatggtggacgccacgtgttaggggtgattccaacaactcttatgccaagagagataacgggggaaagtgtcggagaagtgagagcagtgtcaggcatgcaccaacgcaaggcagaaatggcgagacaagccgatgcatttattgcgctgccaggtggatatggcaccctggaagaactgcttgaagtgatcacctgggctcaactaggaatccacgataaacccgtggggttgttgaacgtggatgggtactacaactcgttgctgtcatcccacgcgtccgctgtagacgaaggtttcattacacccgctgcccgtcacattattgtctctgcccaaactgcccaagatctcatgtgcaagcttgaggaatatgtcccgaagcactgtggcgtggcaccaaagcaaagttgggagatgaaccaacagttataaaaaagttaacactgcaaattaccaaattcagatacttgtcgttaaccaagtcgaatctacatattttctctaccccattagaaaatagctttctcaatacaaatcaagccttttttggctgacactgtgtaattgcggatcagaatctgatctgtatgatcaaagaacgtaacactagaaaacttccatcattaattgttggcgcccactagattctgtgttatatagtaaagcttgcttcagtgc

SEQ ID NO: 13377 - DNA, 262 bp, Glycine max
  unsure (1)..(262): unsure at all n locations
  Clone ID: PAT_MRT3847_112087C.1
ggctcgagctggtgcatggtgcgaccacactgtttaaggtttccagggagcacagaggcaggggcagggctgggaggtcataggctgcaatattgtacagatctaccagttactgggatgagtacgtttggggaggggccccggnggttcttttgttacggaagaacattgtaccttaaatttgctacggcttctgagctggtcaagcatgctggagccttctggggaggccctgattattgagaactcagacgggataaca

SEQ ID NO: 13378 - DNA, 655 bp, Glycine max
  Clone ID: PAT_MRT3847_112088C.1
ttttttttttttttttttttttttttttttttttttttttatttttttttttttttttttttttttttttttttttttttttttttttttttttttttttaaaaaaaaaaaaaaaaaaaaaaaaaaaaaaggggggggcatgaacttaaaaagggtttcataaaaaaaaaaaaaaaatttgggggccaaaaaaaaaaactgggcccctaaagggaaaaacccctcaaaaaaaagggaaaaaagcccccccccccaaaaaaaaaaaaaaaaaaaaaaacttaaaactttaaaacaaggaaacagaaaagccaaccgcaggtgggaaaaggccccttgttttcaaaaaaaaaaaaattaggggcaaaaatttccaaaaaaaaggggggggaaaaaaaaataattgggaacgggtcccaattttaatgaaggggccccatttaacaaaaaaaccagttgggcccaaaaaacgagcgggcccaaataaataatttaaaaaaaaaaggggggccccaaaaaaccattccttaaaaaacatctttgtaaatatttggaaaaaggcccccccggggaaggggcgaaaatttggcgcccccccccttaaaagggggaaaaaaggggggcccccaaaaaaaggcgccaaaaaagcctgggcggg

SEQ ID NO: 13379 - DNA, 414 bp, Glycine max
  Clone ID: PAT_MRT3847_112089C.1
gggggagcttcatagccaaaaaaacaccccttttacataacaaattggccacaaatataattttttttccactttgccccagggaatcaaccggttgaaaataaaccgaagacttatttaagacgaaaaactcaaacttaaaatccacactttttttttcagtatttcccaccttggttttaccccgggggaaagaaacaaaaaaaagctgctctgccccaaagtagatctaaattttcaagacgggaggcgaccaaccaagtggtttaaaagaaagaaaaaagaaaaaaggcggggagataaacccggccaaaaaccaaaagaataagcatcttagggagaaaccctaaaacccaaaaaaccctaggagtaaagcctggtgggagctaaccactgcaaacaaaacccaatgaa

SEQ ID NO: 13380 - DNA, 287 bp, Glycine max
  Clone ID: PAT_MRT3847_11208C.1
gcatactttaacttctatagttttctcctttagagggtcgtcttcagttttagaggtttacttctcccttgcctttgactcattggactagtgcagaggctttaagtagtttaaaatgggcttttgcttttctaggtcattaacgttttttatttagtttctttagccaatagtggctgagtttcgcacttgattttcaatattttatagtaagaaatgacaaactgctttgtttcatttcataaacaaactctgcatttagataactattaaaggttgttaagatg

SEQ ID NO: 13381 - DNA, 480 bp, Glycine max
  unsure (1)..(480): unsure at all n locations
  Clone ID: PAT_MRT3847_112090C.1
acttaaagtatatgtcctgaaatctgattggatttttacattacttgctcaaaaatcaaagcaacaaatggccgactacaggtgccgtgagcgttgtctaacacattactcatgaacttacttatttcagtatgaaaaattttgaatcttaaaataaagagagctcggccataaataaaggggtaattgtcacataatgcgaaatagttgcacttgccatgagttagcctttgtgacgagttaaccgcactcattcttacccatccgctgcggaagactagagaggtttaattctctgagcacaatattctgcacagatgaatatggtcctagattcccacaattcactgcacatgtagggattactacgctcaacgcatcctgtgtgccgggtgctttttttccctcgttgtcgtaaagcttagtcctggncctccactgcacaagtaccctgggagagaaccgctaatgcctcacaac

SEQ ID NO: 13382 - DNA, 260 bp, Glycine max
  Clone ID: PAT_MRT3847_112091C.1
ttgtgacagcgaattcagttaataaagatgagtttgaggaacaacagggtgatgctaaaggtgtgtttgatgcttcttttacttgtgggggatacagctgcactcatgaaactgagcttgttcaaaagtgatcattcatcaagttatgatgatgatgagtattcaaaaccatgctgtgatctctgcatgtgcccacactaaatgcctactcaatgcagctgtgataatattaggctgaattcatgccactcagattagta

SEQ ID NO: 13383 - DNA, 269 bp, Glycine max
  unsure (1)..(269): unsure at all n locations
  Clone ID: PAT_MRT3847_112092C.1
gtaatgcaaaccctggttgatccaaaacgtccctgaccnctaccctgatcttctcaaagangagaaggaagctgataaagttgcngacaaactacaaagtacgggnatatctggagctggtgatggagctgcttcctcagcaccgaagcaagangaggtgaagcntcttcctggtgggncgatcccagacannggataagccngaggtntnttnttgagnnggtcctactnacaagcgcanagtggatcacnangtganggacgncccc

SEQ ID NO: 13384 - DNA, 257 bp, Glycine max
  Clone ID: PAT_MRT3847_112093C.1
gaaacacataagtgagactcacacgcaaaacgatgcatgcattagtgattaaccttagaatcatatatgtttcatatagtgtgcctgcacaaattgacccactaaaataatgttcatctatgtactcattatcttatcctatgcgatcactccttgcacaccctataatccaaagttacagcacttctaggaagatccataatgaagatgctgcttatgacataaaacagagtgaacttcttgaagtgaaggccatg

SEQ ID NO: 13385 - DNA, 361 bp, Glycine max
  Clone ID: PAT_MRT3847_112094C.1
gaccctacgtacagatgactcatcattttcttctgggagcaactaaatggttctgacctgatggcaaatcagaacaaaacattagctctagcttcagtccaacaacataaacacattattcagactcttcactccatttttttttataaaagttggccaagaataatatgcatctcttgcttccttttcgcttttatactcactttttggtagttgagtcttcaagatgcattcttcctgagatattcagcttcgacatctcacgtatcactgtgattggttttgtctaatgtgattgctgctccaccagcagcttttctagacacagctaattcttgccagatgctaacgtcacagtata

SEQ ID NO: 13386 - DNA, 667 bp, Glycine max
  Clone ID: PAT_MRT3847_112095C.1
ccacgcgtccgcaatcactcaatcaccgtccttagtcgttgcttctttccttccaaccccacacgtcttcccttctcttgctacttgctatgctcatcttcaaaactcagccttactcatactcatgctgagccaaaacccaaacccaaccaccatggacatgattcctgggaagatccgaaaacgaggctgttcctcctcggcctcctcctcctcctccgtgctccacaactaccgcttcaagaggactattctcgtcggaaagaggggcggatccagtacgcccgtgcccacgtggaagctcatgagctcgagatctccgctccgggcattggcctcccccaaatacccgccgtcgcagaccggtaacaagccccgccaagctccggtctccgccaggaagctcgccgcaacgctctgggagatgaacgagattccttcgcccagccccagcgtcaggtccaagaaggaactcagaaccagagaaagagttcccaggtccatgcgttctggttctttgcctccccatttgtccgatccatcacatagtccagtttccgagagattggatcgatctggaacctgggagtcgcccgaaaaaagaactccgcctttttctcacagggctagggatcactggaacaccatggttggcccttgaattctc

SEQ ID NO: 13387 - DNA, 426 bp, Glycine max
  Clone ID: PAT_MRT3847_112096C.1
ggaatcgttttttttattttttgattggtctaagatattgtttatatttttttttatatcacaaaggtggtggtaaaaacataatgatttgttacagaaagggagtggaaagcgatgggaaaacaaaaaaaatttttccatatggtggatgaaaggaggtggggcccgagctgggctttcggctaggaaaaaaaaccctttattgtgtggtgggcggacacaaagggtagggccagttgataaattttgctcgaaaagacgggcaaaaacgaggggcattgtgaagatatctgcccaccgccctagagtaaaaggaagaagccctttataaaggaaaacccacattgcccctcaaagagaggtgaggaaacagcaggaagggcccccccccacatcttgatattaactgaggggggggaaaaatgg

SEQ ID NO: 13388 - DNA, 525 bp, Glycine max
  Clone ID: PAT_MRT3847_112097C.1
atcaaaattatttattaatacaactttgattcaaaatcaagtctaacaaatcgggctcattcaaaataaattttacaaatacatattcaaacatgcatttaatgagataactgggtaacccaacaacacattaggcccagggagcattcagtacttttcccaaaaacgaaaatgcccactcaatcttcttttctttctatccctatctaattgggtaaaacttcaatagtctcatgtatgtctggatttgcacggtatagcacagcatgaatcaagtccgcgcgaattaaccattattctcctgattgattactacaatttaagactttaagtaactagcaagggaagcactaataattacaaccagagtattgtatatgtcctatgtgtgaaatagacctaatgcagcgacagggtatcacactatcaccaccacaataaaatatttcacttgtgcagcgaaatggtaaacaactgttaagaatatcacactgtcaataggcaattgcaatatacaaggaaaca

SEQ ID NO: 13389 - DNA, 380 bp, Glycine max
  unsure (1)..(380): unsure at all n locations
  Clone ID: PAT_MRT3847_112098C.1
gtcagaggcaaggtgtgagcgtcattctagtaacattcactcttatttttgctgctagtttccttctgttcgaaagtttcaggtcaatttgatttgcaggtccacaaagctgttgatgcttgcaagaatgttcttagaggattgcatagcaacaaaattacggagagggagttggacagggttagttattgaaatgctcaacttgtttttacattacaatttagtgagcagcacttttagacagtttttctcctatacgtaaaagagaaatctagaaacccaaaaacacacaaagaaaaaaaaaaaanggggcggccgtgttaaaggatcgaggggggcgtgccggggtatagaacccaagaactcttgcatggggactc

SEQ ID NO: 13390 - DNA, 368 bp, Glycine max
  unsure (1)..(368): unsure at all n locations
  Clone ID: PAT_MRT3847_112099C.1
gcattatccatgtcttattaaaccctaattatgatctgtcaaactcaaagtttgatcttattttgccgatcgagcctctatctgggggggggggggattttcattctaagtttcnactccaccgaacattatacaacatgatctttcttccgttagatgtcagatggtctcgtgtctaaagactctaatcatagtaattaacaccagattcactgtgtaatttacaatttattgttaaaataatcactttaagagtatatattttatatgtctattcgatattctatctgattgaatgaagtcaaagttataaataacggattgcaattgctaccacataagtagcatgtagcatttttcatgaattt

SEQ ID NO: 13391 - DNA, 792 bp, Glycine max
  Clone ID: PAT_MRT3847_11209C.1
caaaacaagtcctgcattggtgttgagtagcagaaaagaattcttgcataaatggtttcatcttttcttcatttgaacaaccagcattactgccaaacaccaagcgtggtccatatttgtaccaggtttttaacatgacatagttagcaagtttgattgaagagatttttaggtcctgggcctacaagattttagtatggtcttttttcatgtttctaatgcttgaagcattattgcttaccttgggaaacacagcgttcctgccatttgtaagttttcctatatatacgattccttttattaactgtaaacctggccttacggggttcaaataggcagtatcccttttaagtgacctttgcaacccaagtgttacttgcttatttgatgctctctgtaccttctatctcattgcaatgcctgtcttggagtcaccaaagcttaaattctacttcttaatttaaaactaaaggcatagagtctaacctagcgagacacaatgaattttgtgattttttttccccacttgccccaaattccaaatattttatcattagctggaacttgagttgttttccatggcagaatgttgatattgtcaatattccgtatacatttctgtaaagagcaaatcactaaaacagaactatcaggtgatgaaaatgtccagaattttgaagaaatagatagctatcaccagtgggttcatctaccttggttttagttcacattaaaagaaccatggaaattccactgagactcttggcatgctgtcctgtgtagatgcaactg

SEQ ID NO: 13392 - DNA, 452 bp, Glycine max
  Clone ID: PAT_MRT3847_1120C.1
ttttttttttttttttttttttttttttttttttttttttttttttttttttttttttttttttttttttgacccaaacggggatttaattatataaaacaagaaatatgaaagtgggctcacataatatccacacaaggtaaacaattggaaaaacattttaaaccggggaatggccaaatttttatttccaagggtaaatttttatagggggagacaaaaaaggggaaagggggaaattttattgtggggccatttggaaagcccccaaaaaaaccttaggggggtggcccccactcaactgggggttcccattaaacacgtaatagggaccccccgaaaagttccccagaaaaattatgagcccccccccaaccaaaggtaatacctgggcccaaattcaagcttattcacccgggtagggaaaaatataacttttttattggggcccc

SEQ ID NO: 13393 - DNA, 324 bp, Glycine max
  unsure (1)..(324): unsure at all n locations
  Clone ID: PAT_MRT3847_112100C.1
aagctcggaccncggcccgatgaaaaagcgagggacggttacttgacacgaagcaaggnacgagcaagaggggagaattgaaaaacagtccccgcggnggccacgaaaaacngatgcgcgaaaggacgcaccaggcggcgggctggcgcccaaggacggcaaccctgcaagaaagaagtgcggagagacgaaagtggaaacccttcgggaaaaccgcacagagctgtgagcaacagcaaacagaatgagatgctcatcagaaacagcgatgaaaaagcactgcgccaggctaaagctccaagtgagaacagacaatcctgcaaa

SEQ ID NO: 13394 - DNA, 2042 bp, Glycine max
  Clone ID: PAT_MRT3847_112101C.1
gaatgcagacgctgatgtattttcacattaatttcttttccctcgttgattgtctgaaaccgtggacactcgaaaggtcatatcgcattcacatgtataagtactaaatataagtaatatatatatatatatatatatatatatatatatataaagcaaaaatgcgaaaaattgtgaaatgaaatgaaagtatgaaaccttctctctctctttctttctctccctagaaaagataaatcatctgacacagggacacagtctctttctcctccttaaaaaacacccaaaaacaatggcggttctgtcttcattcgctcaagcatagaaagagaaaagcaacagtagcacgaccatagtcgccgccgaaactgctacccattttcccttatggctgcttagaaaaaaagaaaaaaagaacagacccggtttttttttaagaaaaaaaaattctaaaggtgtgtatcacactgttttcttgtcacctccgtgaaaaaggaacaagtacctacgtttgtaaccgtggtcgttttccgttgcaacgtttgcttcggttttttgtactgtggagtgagtgcttgtgctgattcccaagtcccattttgcgcttttttcccggctttgcttgagatccggttaccctttgggatttgtagctcctttcgctgagatctgtttcgttttggagtttcttcgcttgtttggtttttcacgttgttgccaaaaaaatgttggtgatatagaaaaaggggttaaaagaaggtgctggagcgtgttacttgctattggtggttcaagcgttgttgtatgatgaagtgttgggttgaagatttgaactttgggtggtggtgtgggttgacgagggtaggaagcgaatgaaaggtaggagtagaacaattgtgttttgtagtgaaactggtattggttgaggattaaaaaaggtgggaattttcagagtttcttagcgtttctcgttgatggttgagggaatttggcatctggggtgtttgagttttgttttgattcatttgggttttggttggtgaagggggggttaaaggtaaaaaaagaatgctattgtggaggaaggaggaagggaagaaagggattgttgtttggtttggggtgaaggttgggggaattttgttgctgctaaattgttctacttaagagttttgcttcaatcattgatttcggggctgggttttaaggtttgaaattgctgaaagtttactgaaatgaaactttcttcacctggttttagtcctccaccccaggaaggagaaaagcgagttctagattcagaactttggcatgcttgtgctggtcctcttgtttctttaccagctgttggaagccgagtggtatactttccgcaaggtcacagtgaacaggttgctgtgtctaccaacagggaagtggatggccatatacctaactatccaagcttaccaccgcagcttatttgtcaacttcataatctgactatgcatgcagatactgagacagatgaagtatatgctcagatgaccttgcaacctcttaatcctcaagagcagaagggagcataccttccagctgagttgggcactccgagtaaacagccaacaaactacttctgcaaaattttgacagccagtgacactagcactcatgggggattctctgttcctcgcagggcagctgaaaaagtttttcctccattggacttttcacaacagcctccttgtcaagagttaattgctagggatttgcatggtaatgagtggaaatttagacatatcttccgtggccagcccaaaaggcatctacttacaacaggatggagtgtgtttgtgagtgctaaaagacttgttgccggtgattcagtgcttgttatctggaatgaaaagaatcaattgcttcttggaattcggcgtgctaatcgaccttaacctgtgattgcctcatcagtgttggcaaagtgatagcattgcactggggccttcttgctgcttgaagctcattgccagtttcaactaaattttcgttttacccttctttta

SEQ ID NO: 13395 - DNA, 1692 bp, Glycine max
  Clone ID: PAT_MRT3847_112102C.1
taaaagttgatgcacatttcatttttcatcttaactgcaaaactcaagggaaatcctctttctcttcttctctgattttataagtgaattaaaatggtctcagattcttgcccccctcttaaggaacctgaatcagataaaaaatgggaggaaaagggtccccctcgcaatgccaaatggtggtactcaacttttcacgctgtgacagccatgattggtgcaggtgttctcagccttccctatgccatggcatatctaggatgggtgccagggaccttgattttgttgatgtcttggtgcctgactttaaattcaatgtggcaaatgatccaactccatgagtgtgtcccgggaaccaggtttgatcgttacattgatcttggaagacatgcttttggaccaaagctagggccatggattgtgctgccccagcaactgattgtccaagttgggtgtgatattgtttacatggtcactggtgggaagtgcctgaagaagttcatggagattgcatgcaccaattgcacacaaatcaaacagtcctattggattctcatttttggtggcatccatttctttctttcccagcttcccaatttcaattctgttgccggggtttctctagcagctgctgtgatgtcactgagctattcaactatatcctgggtggcttgtttggctagaggtcgtgttgagaatgttagctatgcatacaagaaaaccacttctactgacttaatgttcagaattttcaatgcacttggtcaaatttcatttgcatttgctggccatgcagtggcccttgaaattcaggccacaattccatcaacccctgagaagccctcaaagataccaatgtggaaaggtgctattggtgcctatgtcatcaatgctatatgctatttcccagttgcacttgtaggatattgggcctttggaagagatgttgaggataatgtgcttatggaatttgaaagacctgcatggcttattgcctcagctaacttgatggtgttcattcatgttgttggtagctaccaggtttatgctatgcctgtttttgacttgattgagagcatgatggtcaaaagatttaagttccctccaggagtagcacttagacttgttgctagatctgcttatgtagcttttacattattcgttggggtcacattccctttctttggtgatctgcttgggttctttggtggatttggttttgctcctacttcatactttcttcctagtataatgtggctgataatcaagaagccaaaaagattcagcaccaactggttcatcaattggatttcaatatacattggagtgtgcattatgttggcatctacaattggtggcttaaggaatattgccactgatgcttctacttataagttttacacctaaactattttatattattgcaaaaatatgtagcatgagcaattaatctagttaattagactggagttggtgaatgtctagttgataatgtcctttgttcctataagcaactagccttttagtcttctttctctccttttattttatcttagtgagatgttaatttattaatagaacaaatagttttaattggcttcatagtggtttataatttacattatcttaagcaagtggtgaagaggtttaattttcatatatgtggatagaaaaacatatgttaagaaaagt

SEQ ID NO: 13396 - DNA, 518 bp, Glycine max
  Clone ID: PAT_MRT3847_112103C.1
catactctaagatcttagttatgctcttatatttgtttgctctatctccatattcttctgtgttgtctggactggtgaaataaataaatagtgtaggttttttttttcaaggtatatgatattatgattatattcccaagaagtggcattcctagaatgccatgatcagtaaagttattcttgacttgagtaaaaaaaaaacatgttttgtttgcatttaatattttctaaatgtttttcaaaattcaaatgatgggagtaagaatgtgatagaaacaagtgtgagtggatgttaatagtcggattataacattacttccatccccatttccaatgtcatgcatgagaaagcaacacctcatcatcttattaaaatttaagcaagacatgaaaatgtcagttccctggaaatgcatattgccaacaatatttcaagctcatacattttcttttttcttgtaatttttatttccacttcatcaggtgggctaattgcatgcacatagcttctaacatta

SEQ ID NO: 13397 - DNA, 308 bp, Glycine max
  Clone ID: PAT_MRT3847_112104C.1
ccacgcgtccgtacggctgcgagaagacgacagaaggggatgaagacgacgacgactactacgaatattacagggagagactatgctgagggtggtgctgtgggttcaaagcatatcatatatgagaagaagagccttaaagcattgttgaagcttggactgtatcctgttactggtgtttgtaggatcacaatcatgataacataaaatattcttttattcatttcaaaacccaatgttttcaagaggccaaattctgtgaccctatgtcatatttggggaggggacgtttcatgtcttgaattttt

SEQ ID NO: 13398 - DNA, 560 bp, Glycine max
  Clone ID: PAT_MRT3847_112105C.1
atcagggtagtgaagaacacaagaatttgtcaagactgtcacacagcagcaaagtacatctccttggctcgaaaccgcgagattttcctcagagatggtggtcgttttcaccatttcatgaatggagaatgctcctgtaatgatcgttggtaacaagatagccaaagcctgaagcattttcctgcaggctattattgtgctctagtcttgtatatcaacagagggagtgtcttcatgaagggaactttgtaataatttaaggaatgactaagttacttggggaatcatagaataccctttttgcaagtggcaatcttcacctgaaatagtttaccttttttgcaagtcacagtatgaaggagttagaatagatacgttacatgggagccagcatcaccaacaacgtggcttagctctcactttaaggtgttgcacgctatctgaagaaaaatatcatgcaagttactaaactgtggtgcaaaatgtgccttgtgctgcttctgcaacaagttcttgtacttccaggttttaccattgacaagagtggcatctgttggctt

SEQ ID NO: 13399 - DNA, 443 bp, Glycine max
  Clone ID: PAT_MRT3847_112106C.1
ggggggaaaaaacgttaaacttaccattcatataggggggggattataaaagggggggaaaaattctttcccccggtaaccaataaaaaaataaaattttgaggggggggaggggggcaaattagggggggggccccaaagtttcaaagcccacccttcgaaaaacaagggtggccaacttggtaaatttccccctatcatttgcccgggaatttgggcttggctttgagggcctcaagggcagcaaaaaccggggggacccccctttggaggaacttgacccctttttttcgggggtcgaccaaccatcctggatcgctttgatttgcccccaaaaaacccaggcaaggaaaacccttaactgtttgaacggcaacgatgctgtctgatatgttatccaaaaccccgccaatactatatggggcccttaccccattggaaaa

SEQ ID NO: 13400 - DNA, 281 bp, Glycine max
  Clone ID: PAT_MRT3847_112107C.1
gaattttcatattgccaaactatcctaactttttacacatgacatggccctcaagggcactgtaaccattacttcttgaactagtgctctctcctacatattcaatttacttaccatacacactaatcaaatggatactcccactgctcctctaactgttcaaacccctacttactacctactgaatcgaccctgcttcatgtcaccgatcgtccatcttagcgcatactcattaattaacacgttcgatcacactaagtcagctcataattccggattaa

SEQ ID NO: 13401 - DNA, 1114 bp, Glycine max
  Clone ID: PAT_MRT3847_112108C.1
tttcatacgcaaagacctcaatattgagtaatcacgatgttcaagagaatatggtgagatagatatacattacagggtatcacacaaatctgaaagaaatttgtcaaacattctatgattcagaacgctgatatgagactcgaatcagggacttgtaatgtgtgctcagctgcttgttcatcttgcatgcatcctaaccgagctctcatggggtcaaaggctgaagaattctctgatgaaaactgtcgcttaggggaggttaatcagtattgtgatgagagtgatagatcttctcttgggagcagagcttgtgaaaggttgaagcatggtgtcagtgaaaccagtcacaagcctagtgtttcttccactcatgattctctatctgaaaatgctgagaacagtcaagccttatcagagaagtatcaggattccaagtgtttagaaagtcttgatgatagcacttcttgtattagtaggaccagtaatgctaatttagcgagcagttgccatcagataaatacagacagaataaatatatcttgtagttcaacttcagttagtcacttagtggcagaaggatctggaaatgggccaactgttgacatatctagtttgtcagaatgttgtatggaaaatgttgattcatcattgaccaaagagagagtacctattattgttcctggtgaaaaatctctggcagataaggaaaacctaaataatggtacagccaaggtttcaattgaaatatgtccaaagtcagaagaagatactgaaaataatgttgatgttgcggaagatgatgatcataaatattcagcccatgatggattgcatgagaaggttgaggagctgattaaatcatctggaagggctgaacctcaatcagaagatgagagtgatgaatcagatgttgttgagcatgatgtaaaagtatgtgacatctgtggagatgctggtcgtgaggatctacttgccatatgtagtaggtgcagtgatggtgcagagcacatctattgcatgcgggaaatgcttgagaaggtccctgaaggggactggttatgtgaagaatgcaagtgtgcagaggagactgcaaatcgaaagctagatattgaag

SEQ ID NO: 13402 - DNA, 213 bp, Glycine max
  Clone ID: PAT_MRT3847_112109C.1
cccaaaaaaaagatggaaggatggatttcatatagatttttggccgaaaatccaacaaagttccaagacaacatttgcaaaaaaagcaacaaagccccgacaagggcggggaaggtgatccccccccggtacctttttacacccttctttaggaggaacccaacacccgaatggcctgccaaaaaaattaaattttttttaacaaaaaaacaa

SEQ ID NO: 13403 - DNA, 487 bp, Glycine max
  Clone ID: PAT_MRT3847_11210C.1
gttgttttttttttatttaggtaatattttcctccatttaagattgcatctcattaactaaaataactagtgtatagtatggaacataattacaaatacatgacaatctacaaattctgagccaaaagttacaagtctgtattccggattgtgcagcattctataaatcttttaaaaggagaaggttttgttgtctcttctacaagaaagaactcatttgttcaaatctctgagctttctctagttgaccattgtgtgtaagtaatcgcaccataatagcgaagtgttccttaaatgcttcaattttatatctaggcattgaattgaagattctacaagcatcatcaacaaatccagctttgtcacatatagatagaatggcttcaaaggtaaagtggtttggagaatatctcatttgatcaaaaaggttaactgcatcttgatacaattcattatatccataggccctaataagagcagtccatgt

SEQ ID NO: 13404 - DNA, 682 bp, Glycine max
  unsure (1)..(682): unsure at all n locations
  Clone ID: PAT_MRT3847_112110C.1
aaattgtggtagtgcaaataggttcaatatggtgaagaagccaaaaaagtggcctataactagtgatgatttatcacaagtagagtgccatggtagtctcattgagaagaataggattgaatcagatgtagggggaagccctagaagaagacactctatcagtggatcaaactactcagaggaagaggtttctttgagtaagagaagacagtcagattgttttgtgtgttcaaaagaaatggaaaaggaatcagtgccattgtctgttcaacaatctggtttggagattgtccaaagaccacaatattttagcaattgccaagaagctaacaagcttttggtttcttcagatgtcgagaaaagagccctacgcattcctaatccacctccaaggccttcatgttctatatctatcaagacaaaacaagaaacttcagctcaagttccactgcctccacctncaccttctcccccacctcctatgaattttgcatcaagaagtaacatggcatcggtgaaacgagcgccacaagtggtggaattgtaccattcacttatgaagagagactcaagaaaggattcttcaaatggaggactctctgatgcaccagatgtttctgatgttcgtagcagcatgattggagaaattgagaaccgttcatcgcatttgcttgctataaag

SEQ ID NO: 13405 - DNA, 590 bp, Glycine max
  Clone ID: PAT_MRT3847_112111C.1
acgcgtccgcaccaatgaagtctcccatgcatgacttgggataagtcgtaaaagcatgtaagatagggtttataaaaagtctctgttccctttccctccttttagaagactcccaatcaaggggaaggctaaccagaagttttaccttccctttccctcccaaatccctcatccaaacatgcccctggtgttctgacatcttcaatatgaagtttacttctctaattcacaatttatacaacatcagatgttcttggaaaggggtattgtgccattatggttgttgggcaattttaaatggagtgtgtcttattaatttatatatatttgagacaaatatttataaaaaggacggatgtaatttcaaattttatgcattcattgggctgaagttataaaaagtaaatttaataataaagatgtctatttgaacaaaagatattagaaacaaggaggataagatttcatcccaagagataagttaaaatcattttaatctgaactgacttatatgctttggatgtatcatacatgtcttgatttcaacagtgatacaagttttcttttgtctcctttcttaccttcctgtt

SEQ ID NO: 13406 - DNA, 439 bp, Glycine max
  Clone ID: PAT_MRT3847_112112C.1
ggctcgaggcggactagacgggcagaaagggaataacggtgaacgccttcatgatcgactacgggttcgacgccacatgcgcgaactgtgtgtagctcaccgcacagaacccctcctcggaccaggagaacaaggaccgctacaagctgaacgcgacgctgggccgccacgagttcggcactacctacctccactctggcctggggaccgaggaggaactctcgggcaaacaaggctcaagaaatacgctctttacggagatcgacatccttgatctattggagggaggaggtgattattcgcaccttgccttaaccagctaacatcactaactggactgacacttgctttgattgcgatgacagtgatcttgcaatcgacctttgggagggtcgacaggtcttggaccggattgtggcgcgagggcactacaggggac

SEQ ID NO: 13407 - DNA, 412 bp, Glycine max
  Clone ID: PAT_MRT3847_112113C.1
ccggggcaaggccccccccattgcaggggaaagattaatattcagcaaataaagaaaatatggttccactacaagtttataggggttttatttgggccattgttaaatcccagttttcccttactgaaaaaaaaattttttttgttgataaaaacgaaaaaaaaagggctttaatggggcagggggttggaggcattgtttgcggcctgccggtgtcccggtttaatcagcatggatgggcaaccatgtgggttttaatggcgtttatgcaaaaataaaaaattcactaacatttttatttaaaaaaaattttttttataacccttgaacgggccaaaaaaaaaggaaaattttaattgccctccactgttgtaaattgggttggggggaaatgcggttcaagctcaaccca

SEQ ID NO: 13408 - DNA, 1876 bp, Glycine max
  Clone ID: PAT_MRT3847_112114C.1
tacggctgcgagaagacgacagaagggggatttcccgctctgaaaaccctaactaccactgagactaagttgagctgagaagagaagctgggagcgaatggggcagaagcagcgttcgagttccgatgccgacaacgaagtcaagaaacgacgccgtgttggtttctcaggcgttgattctggagttgaggccaaagactgcatcacaatctatctagtttcaagcaaggaggaattcgatgctccagagagttttgtcattcatcctgtggatctgaatagcttttttgatgatgatgggaaaatttatggctatgagggtttgaagattaccatctgggttagcagcatatcattttatgcatatgctgatattacattccagagttcatctgatcgaggcaaaggggtcacagatctgaaatctgctcttcagacaattttcgctgagactcttgttgatagcaaggatgaattccttcagaaatatttggcagataatgactttgtcagaacaaacatctcaaacggctgcggaagacgacagaagggaatggagaagctttgaagcacaaagctttccaggggaacatttctgattataatccacatacagattcatctacttctactgttgaggttgtccgtttggtggcaggcaacatgactactggacaactttacagtcatctaatacccctcacactacttctcgttgatggtagcaggcctattgatgtatctgattcacagtgggagctgtatgttttgtgtcagaagaaaactgatccgcactgagggatccaatgtaggttgattggttttactgctgtttatcgattttatcactatcctgatgattccagattacggcacgtctagatactggtattacctccttacaagcacaagtgttatggtcgattccttctacaggtgctaattgaaggtgctatatctgaaaatgtttttgacttcacgcaagaagactaattaaatcacgcaactcatgtacgtacttgtgttgactcagttcgcatgcttcagttttacccaattcagaatatagtaacttaagctgtttcacttgttaagcaagtacagttggcggctgacgccatgggtactggacaactttacactcatataatacccctcgatgttaggaaaagttggaaaattaacaagcagcagtttttccagtgttgggaggttttgatctacattggccttaatcctgttgacaagaacacggagaactttgttagtattattttgaaccgtgttaagtatgatatcttagggaaagattctgggacgtctgggaagcagcttattgaagtaccaagtgatgttgatcaggagatgtcatttgtcatgttcagatcagaagccaacgaagctagtagtgtgcaaatggatgacaatcaggctaatcaagaagagcaactccagaggttagttcaggaaagggtgaaagaaattcagttgattgcggaaaaggtaaccctgcatcttgggagctcaggggtggtggttaattagatttgtccttataaagatggcatgggatgacaaggtcatgcatctatgatattgtgtgattgttttctcgtggacctattaagagtttgtttttctggacaaacactcggtagtgtatttgggttcttcttctaggatatattttaagattctcttatagtattctgtgaaggaaccagtgatctattaagctgtaattaactgagattaaccacaacaaagttgattgagtgacattcagttgttattgtccattctaaaaaaaaaaaaaaaaaaaaaaaaaaaacgtacacaagtatgatacatccaagaaatatgtgggttctggttt

SEQ ID NO: 13409 - DNA, 569 bp, Glycine max
  Clone ID: PAT_MRT3847_112115C.1
cggtccggaaatcccggtcgaccacgcgtccggtttgaggcgcaaatatcgtatagagcaccagcgtcacaggacctctaggccaatccctacagccttttgattgcagacactaatgaaatcgacactgtgctcactgcattctgtcagatactatctatcaacaatctcccctctctgtacggattttgcataaaccacctcactatgacggctctctatcattgcagtctaagctattacgagccgacaccatctcagtgccttcgaccccctcctgcgctttccatcgcacacctcgcacggcttcgatttgccttcaacccgacctcagagttcgccccaaaacgcattctttctctccacgcacatgctggctcccctcgaggcggcgccgacggagagtcgagttgatgacagtggcgtcctggcccttgatgcatataacacggtctttggttcggcctgacgatggggtcgtgcgtcgggctgatcgggcgatcacggtcctgtggcggcgcagatgccgtgtgagcctggtgccttctccctcgttcgctctcgtgggc

SEQ ID NO: 13410 - DNA, 671 bp, Glycine max
  Clone ID: PAT_MRT3847_112116C.1
tttactagatgacgaggatgcgtgtagaactaccattccatagtccatgaagagcctcttacttctatgatagcatggaaactgatgacgcagatgaccatgaccaaaaggagatgataatgaacacttatggccacaatgaaaagcaactgttacctccaatctacaatcctctccacagcaagcgacaacgcatccatcatattattagaaaatatgatattacagagtatatgaattgaaaaatatatgaaccagcacattaactcaagaaaatactcattgtgcagcttatgaagcaccaaagcctctctgactaatgaaccacaagtggcatctaagagcacacctgtaacaacatatagaccacattgtggcaaaatcaaattgatcgattagagggacagaccaatagaggacgagtgtcatacaaactgtcaagccctcaacacgcaaatagatctgttgcagtcaccggtggacacactttatagctgtacagatgtacattgtgcatacaccccgatcttcaagagatgatcagcgtaaatgagacaacgttctctatcggaatggttaccgtgccagaaccacggcttctaataaacgatccaaatcacctagtgacagatcagcacccttagcgattacagccctttgcacagagtgag

SEQ ID NO: 13411 - DNA, 563 bp, Glycine max
  Clone ID: PAT_MRT3847_112117C.1
tttagtagcatatagatctgattctgttcgatgacgattcataccgatccatctgctacatacagatgcaaaaactgccaaaaccctgttgctttccgcgctgaactactttccaaaaactatctggcaaaaactgggcgagcatttatgttctctcatgcaaggaacatcgttttggggccaaaacaagagagaagtctcatgactggtgtgtacactattgctggtatcttttgcagcaactgtggtgaggaattgggatggaagtacctacaagcttatgaggcaagacagaagttcaaggaaggaaagttcataattgaaacggcaaagattgccaaggactactactagcttgtatattgaaggctacaaacactaattaaggtgttgagttgataagtttctcaataaatatttgtatgagaaaaaagatagagagataaaataaattaagtttcacacaagaatatttttttttaaaaaaaaaaaaaaggaagggactaggactaaacaatgtggagaacatgataaaggagtcctaactaaaaaaaaaaccatgg

SEQ ID NO: 13412 - DNA, 182 bp, Glycine max
  unsure (1)..(182): unsure at all n locations
  Clone ID: PAT_MRT3847_112118C.1
caggacgccccatgcgcggcgaacggaagcggcgaaggcgggacgagcgcccgggaagcaggcgggcgcacagagcacgcagaggcaggagagccctcgcactatccaaagagggacgggagcgatcaagccggcagcacccagcgcangacaaacctacggttcccaggcacgacgcgggg

SEQ ID NO: 13413 - DNA, 744 bp, Glycine max
  Clone ID: PAT_MRT3847_112119C.1
ccagtttgtccttctactttcacctctccttcaatcctttcattctcaatttccttctttgaaactttcacaccatctcacgcacttcgcaaagttccagagccttccaccccaaaactgaggcgttaaggaaacggggagtgaagagacctaagcatatctatccatggtttcaccatattctctcctttattgttttttgtttttgttttaactcacaggtgtcggtaatggtagagtatggtggttacagtggcgtcggagccgaggcggacggtcatcttcgatattagtagcggctacttcagccttcaaaatccatttgatttacaggacattcatataacgaaaatataaaaaattataaatgcagaaaatacttgcggtaagcgattatcttttctttctgcatcatacacacaaaatttttttgccttggcctaaacaataaattaaattaaaagaagtatcactgatcagtattaagctccttgttctatcacttatgatattgatatgggacacttgtctggttgctattactcttttcccgaaaaacaagggacagtgttacgtgatcctttctaattaaggttatccaactgcattttgatcccattgcttatcaagccacggaaaatacaagctttctatgaacgaacacacacacacacacacacaacacataatggggagacgtttgaaattataaaaaaaaaaaaggaagtcacgatcaattttatt

SEQ ID NO: 13414 - DNA, 188 bp, Glycine max
  Clone ID: PAT_MRT3847_11211C.1
caatttgtttttcttgcacgccaaacattgcactgccctaaaaggtgtgtgagctctacttctatcatttcctccacgaaggccatctcattcactttttttcccaatattatttcgaatccctttctctatccaatctcaaattatacagaacagcctgggtctggcacacacagtttacccatatc

SEQ ID NO: 13415 - DNA, 658 bp, Glycine max
  unsure (1)..(658): unsure at all n locations
  Clone ID: PAT_MRT3847_112120C.1
tacggctgcgaaaaccgacagaaggggacagcagagcaaattaactacacattcctctgttttggctcccctgttaaaccaaaaaacttccaatggcaccccatgcatcttcttttgctcttgttcttgtcatttttctctttgttgaaatgcacttccacggtgccactgctgactatggcggctggcagggtggtcatgctaccttctatggtggtggtgatgcttctggcacaatgggaggtgcatgtggctatgggaatttgtacagtcagggatatggaaccaacactgcagctctgagcactgctttgttcaacaatggcttgagttgtggggcatgttatgaaatgaaggtgtgatgatgatccaagatggtgcaagcctggcaccattgttgtcactgctacaaacttctgtcctccaaactttgctttggccaacaataatggtggttggtgcaaccctcctctgcaacactttgatatggcagaaccagccttccttcaaattgctcagtatagagctggaattgtgcctgtggcatttagaagagtgccctgtgtgaaaaaggggggaataaggttcacaattaatggccactcttacttncaacctgttntgatcaccaacgtcgcgggtgcaggggatgtccatg

SEQ ID NO: 13416 - DNA, 288 bp, Glycine max
  Clone ID: PAT_MRT3847_112121C.1
gacgggcattcccgtttatttgataggggtattccaaatccacaagttagtatatgcgaagaataacattgatgaatgaaggagaacatcagactttagaatatatattcgttcataagtccaagttatatctatttaacgacccatttctcaagtgatcgctttatgccctcttcaaaaggggtaagcacaaggaaacccatcaacttcatagcagtagtatccaaatgacagtctttagggcgcggagcgccctggggagtgctagtgtctggcttaatatgatcg

SEQ ID NO: 13417 - DNA, 483 bp, Glycine max
  Clone ID: PAT_MRT3847_112122C.1
tgggctgattgatgtgcatgtggtcgtgagaagatgatcagaggggtcatcctctccccccatatcaagcccccaccctaggagaggacatgtgagcgagaacgcgtgaaatggcgccggaacccgcgactcggcgagttacgaacgtcagaagagacggctgtaataatagagccgtctcccccgacggcaccgaggagggcggtactagagtactgctctcccaccttctaagcctcctttacgaaaccgacgaatacgacaacgaataagtaccggacggaccgtaagacagagctaactcgtccaaaagaccgctaggcgacacaaacgaggaagcggacagctacaattggacgtcggactgcacgggaaacgacacggacctcctgagaggagcttctctaggtatcacggacaaacctaaaacggcacccgagataaaactagttgaagaacgcccctatccgcagtacttcccgg

SEQ ID NO: 13418 - DNA, 516 bp, Glycine max
  Clone ID: PAT_MRT3847_112123C.1
aggttaatgatggatattaagctttgattattttattttgtgtgaaattaatttattaattacaaccaatgtattgatttatgaatgcactaaactggatctcaataactggggggaggaaaattattattcttaggcccatggggaaggttttttaaactcaaccaccaaggggggggggttacccacccttaacaaattttttcctttattataaagcctgggggcttttatccccaaataagttatcctctggaggtggtgaacggattaaaatcttatagctccggagggaacccttttgggaattttaaactaaccttttagaatttctttaaactcaaaaaaaacagcggttccttaacatagaccattctcaataggccaccaaagaggagtggggacacaccggggaaccacttaaggttatgaaatgaaatcgtgaatgaaaggccttttccaagaaagaggacgtgctttggttttataggagttgccttattttcctaattgggc

SEQ ID NO: 13419 - DNA, 395 bp, Glycine max
  unsure (1)..(395): unsure at all n locations
  Clone ID: PAT_MRT3847_112124C.1
gggagaggagtcgccgccatgtccgcgcatctgcaatggatggtcgttcggaactgctccagtttcttgatcaagaggaataagcagacgtacagcacggagcccaataatctgaaggcccgaaactccttccgctacaacgggctaattcaccgcaagacggtcggagtggagcctgcggctgatggcaaaggggtcgtggtggttatgaaacgcagatccggtcagcgaaaacctgccacttcctacgtgaggaccaccatcaacaagaatgctcgggctaccctcagcagcatcaggcacatgatccgaaaaaacaagtaccgcctgatctgcgtatggcggccatccgnagagccagtgccatccttcgaagccagaagcctgtggtngtg

SEQ ID NO: 13420 - DNA, 223 bp, Glycine max
  Clone ID: PAT_MRT3847_112125C.1
caattcccaattcgaccgacgcgtcacgccacccgtcacgcactgcgtacacgacagcagacaacaggacggggatcgtacactcataaatcaggtacatgggccatgatactacgacctggatctagccaaacgacacacacagctactcataactagattagcgctcaagttctactgttgaataggctgttggtaggcctttcgaatatcacacaatcag

SEQ ID NO: 13421 - DNA, 644 bp, Glycine max
  unsure (1)..(644): unsure at all n locations
  Clone ID: PAT_MRT3847_112126C.1
ggaatactaacaatagatacatttttaacatatttttaattctttcttattagttaaaatatatttagaatcacaaaattatgtgagtcacacttcaagtttaattaaccctatttataacttaagtttttcataaatttcaatcaatgattaaaatatttaataaactctactcatgattttgattttccataaattttaaacgtaggttaaaaatgtagtagaaaaagtattttaaaaaatgtgttactaggacgcattcctttaatggagatgatatatattaggcagattcacttattattatttattttagagaaatgttaggaagtctttgacatactattttgaacacacttttattgatagaaatttattgaaaatgataaaatttatatatgagtctcacatcatattgaattattctcatctctccttatatttttagttttcaatcaattttgaccaattaaaaattagtgtgtttgagtatgtttgtagtacttctatttattttatgcaactttcatatggntcacatgttcatacttcacttgatttaacatataaacttatagggagatataaggtggattggatggtcaagcgagaaagaaagaggagnaaagatctcatgctcaatc

SEQ ID NO: 13422 - DNA, 311 bp, Glycine max
  Clone ID: PAT_MRT3847_112127C.1
gggtgcaatgggggaaatatgcttctttgtattctcaaactggtatgatcgatcttacacttcacatagggcaagaaaaacgcaggggcatagccaatggaagaaaagcgccaattaaaaaaaaaactcaatcacagatggaggtaaactaagaacactgaaaaaagcctacaaaaaaacaagctcttaaaacaagattgtactgaaaaaaagatgcgcacgactcccagggggatcaccataggaacttttggcccgggaggctcgcaatagggatattcgaccttccttgtcgagggagatttcttcaa

SEQ ID NO: 13423 - DNA, 802 bp, Glycine max
  Clone ID: PAT_MRT3847_112128C.1
cccacgcgtccgcccacgcgtccgcccacgcgattccggaacactgcttgtgctgcttttgtccttttgccacgcttaagatcacccaagagagaacctaagacacacaacacaacacaaacacacagagttagaggagaaatcatcatggcatcagcagcatctgggtttgtgttgtcacttaatgttgcagctgccaccacaaactcaagggtggtcatgttcaacacaaagaacaacgcttctaggcttgttgtaagggcttcagatgagcctgcagcggcggcacccgccaccgccacacccccagctgaagctgaagctaaaccaaagccaccacctattggccccaagagaggtgctaaggtgaagattcttaggaaggaatcttactggtacaaaggcactggttcagtggttgctgttgatcaggaccccaacactcgctaccctgttgtggttcgattcaacaaagtcaactatgccaatgtatcaacaaacaactatgctttggatgagatcgtggaagtggaatgagtctaatttatttgtaattttgattcttgtcatgctatcgcagttactagcctaaggtttttttatgtcaaaaacaaaaaagaatttgtatcatattctctctgttatctacccccttgatttctattctctatgaactatatcctgtgtgcagttgctcataatcttattcttcgactaaagacatcttattttattcaaatcagttattaggcaagtagtttctttgttactaaaatatataaaataaaacacatgataaaaa

SEQ ID NO: 13424 - DNA, 895 bp, Glycine max
  Clone ID: PAT_MRT3847_112129C.1
ctttggatgagattgtggaagtggaatgagtctaatttatttgtaattttgattctggtcagtgctatcgcagttactagcctaaggtttttttatgtcaaaaacaaaaaagaatttgtatcatattctctctgttatctacccccttgatttctattttctatgaaaaaaaaaaaaaaaaaaaaaaaaaaaaaaaaaaaaaaaaaaaaaaaaaaaagaaaaacaaattaaaaagaaaaaaagataaaaaaacaaaacacaaagagagagaaaaaggaagaagtcatcatggcttcagcagcatctgggtttgtgctgtctcttaatgttgcagcttccaccacaaactcaagggtggtcttgttcaacacaaagaacaacgcttctagacttcttgtgagggcttcagatgagcctgcagcggcggcacctgccaccgccacacccccagctgaagctgaagccaaaccaaaaccaccaccaattggtcccaagagaggtgctaaggtgaagattcttaggaaggaatcctactggtacaaaggcactggttcagtggttgctgttgatcaggaccccaacactcgctaccctgttgtggtccgattcaacaaagtcaactatgccaatgtatcaacaaacaactatgctttggatgagatcgtggaagtggaatgagtccaatttatttgtaattttgatacttgtcatgctatcgcagttactagcctaaggatttttcatgtcacaaaaaaagaatctgtatattctctctcttatctacctctttgatctctattctatatgaactacgttctgtgtgcacttgctcataatctttgactaccccgcgtcttgttttattgatttcagttactaggcatgttgctagagt

SEQ ID NO: 13425 - DNA, 432 bp, Glycine max
  Clone ID: PAT_MRT3847_11212C.1
ggaaagggaagaagacaacttaataggaagaccacgatcaagccaaggatattctagaagttggcctcaccacaccttcctcacacgtagtcgttgaggcatcgaatgttggtttatctcaagtactgctttataggtcttctcatcccaccagaaaactactttcacaatcggacaggacatcactattccaggtaaggaatgagagtcctactcaattgtatgatgtaaatattttatagaaaagttattttaatttcttatctaagtatcttaagtattattttgaatagtgaaatgattgtatgaccgagtatgattggaagaatgttgccaacacaatacatgcatattataacctaaatttaaaatgggtctaaaatcttaaccggaaaaaaaaaaaaaaaaaaaaaaaaaaaaaaaaaaaaaaaa

SEQ ID NO: 13426 - DNA, 261 bp, Glycine max
  unsure (1)..(261): unsure at all n locations
  Clone ID: PAT_MRT3847_112130C.1
caatttctcaaccttatgttctgaagatcattttaccataagtatgttagttcccaggtgattcacacaccaactaatacagtatgcctcttcttctctctcacttgaccactccctggaaatcacccccttatcaaaagtgctaacctttttcctttctaccactgtgacagatttcccccacatcattattcttactatatttgtggtntgctnggggcatncttcatactctcctctttaaccctacaatacttctct

SEQ ID NO: 13427 - DNA, 733 bp, Glycine max
  unsure (1)..(733): unsure at all n locations
  Clone ID: PAT_MRT3847_112131C.1
gtcccagctggaaccagcatgggaagatatgaatttatggtatcaagttcagaggcagaccaaagtattgacaataatgaagcaaaaaggtctatcaagcaaatatctgcctcaattgagtgcctctggtaggatcatacacccaggccattgtcgccggcccagctctggtggaaattgtgaccacccttggtgtgggacccctattcttgtgaccagtccagttggtgaaacagtagctgaaatggtacgcacagggcaatttggttcagatgaagctatcagatgttgccatgattgcttatcagcgctttcaactgttgcttctgctggaattcggcatggagacatcaggccagagaatgtgatctgtgtaaagtctggtgtgaggcacccttattttgttctaattggatggggccatgccattcttgaagatagggatcgccctgccatgaatcttcatttctcatctacttatgcacttcaggaaggaaagctatgctccgcttcagatgcggaaagcctagtttatatgctttattattcatgtggtgggttntccctgatctaaattcagtagagggagcgctacagtggagagagacatcttggtcaacgagattaattcagcagaaagcttggtgatatcttcactgtgctgaaagcttttgctgattatgttgacagtctctgtgggacaccatatcccatggactatgacatatggctg

SEQ ID NO: 13428 - DNA, 249 bp, Glycine max
  Clone ID: PAT_MRT3847_112132C.1
ggctcgtggccagctctggtcttgcctctggtttttatgaggtttttgttcatattcgctcaacctcagtggtatctcgacctctccaaactgctgatctatgtcgttgcctcgggctgtaagagaacatgcctcgctgttattcgatacttttggcgaacagtggtgtggcaaatccgcgccgctaacttggtttctgcatttgaatctttccgaaaccaataatcactccaatttcctttacctgaa

SEQ ID NO: 13429 - DNA, 373 bp, Glycine max
  Clone ID: PAT_MRT3847_112133C.1
aaagaacctgtggttggtcctcgattggggaatctgaacttttacgtcaaagggctgttgctcaaacagtaggaacgagagaagcaccatattcgaaaggactcacaccggctatgaaaaagactatatcctgactgtgtcaagtcaccacgacaggaatgacacaaaatggagtaccaataataaccaatacgcagtgaagtcgctagacaaataaagttggccgaagctgattatgatacagaacaacaggcgtccttatatctgcatacgctgactgaaactgcttgtagatgaccgacgttccattaactacaaccaatcagccaaacagatttcttgttcacatcaggaaccgatctctttggagcgt

SEQ ID NO: 13430 - DNA, 771 bp, Glycine max
  Clone ID: PAT_MRT3847_112134C.1
cggggaatcaaaaagaggagaattgttgatcataggatgtgaccctgttatgagtaagtttaacaaagcagctgaagttcgaaaggctgaggaaggaagctagcctctacccatagaattgttgttcttaccactcctactcgaagaggagaggattggtcagcagctttaatctcgtgccctgaattcgagtataatggtcagaagttcttaggaccttgttcaccaaaagatttagcggcttatgagagacgattgatgcaagatcccattttcatgctgggaagacctaaagagatgccagcgcactggaaggagtataatgtttacattgatgatgtaagcgagtcacgttctgattatgagaaggtggttaagtgggagggagctgttcccactctccgtaaggtgttagagtggtttcttggtcgatatggatctcataaaagaccagttccggaagaaaagaaaaatgagcctgaggtgcctcaaaaggttcagcaattgcctttaggggtagtgccagctgtagttcctcagtggccggcagaagagaaaaaatctgctccaattgtggtgtcgccaccaccatctaagcctaagggggttatgaaggtgaagcggcaaccggctcctcctgttgaaaaggagatttcggttcaaggggaggtgactcttgatgagtacggctggtaaatcaagttatagttagtcattttattatattaaactgcttccgacaggatgagcaatggcgggtctgacatatga

SEQ ID NO: 13431 - DNA, 1422 bp, Glycine max
  Clone ID: PAT_MRT3847_112135C.1
cccacgcgtccgtacggctgcgagaaacgacagaagggggtccgcacttaaaaaaaacgatctccaacggtcatgaacggcggcgctgaggcctccgtcaatcacaggcgcagacaccaagcagcttccgctaacggcgttaagatagcaaacggggccatggcgaagccgtcctcgacgctctgctacgacgcctcgttcatgaaatggaccgtggcggatgctgtccacgtggcgacgcatcattggatgccgtgcttattcgcattagggcttctcttcttcatggccgtggaatacacgctcctcatggttccgccgtcgtcgccgcctttcgatctgggcttcattgccacgcgttccctccacgcactcctcgagtcatcgccgaatctcaacacgctcttcgccgggctcaatacggtgtttgtggggatgcaaacgagttatatcttatggacgtggctgattgaaggacgccccagagccacgatttcagcattgttcatgttcacatgccgtggaattttagggtactccacccagctcccattgcctcagggatttttgggctcgggtgtggatttcccagttgggaacgtgtcgtttttcttgtttttttcggggcatgttgcgggttcagtgattgcttccttggacatgaggaggatgcagaggtgggaactggcttggacttttgatgtgctcaatgttttgcaagctgtgaggttgctgggtacaagaggacattacactattgatttggccgtaggggttggtgctggaattctctttgattctttagctggcaagtacgaagatagcaaaaggaatgctgctctatccacaacccacagagcacaatttgattgcgtcaacaatgtggatatagctaaaaaaattaacaaatgatcatggaaaagtacacatggaggtgtaaaagtaaaagagtgagagggcaagggtttgaatcgtaaaaaaaataaggtcaaagagtgatacatcatattattaggatttaggacaagtcttaaatcttaattaccgcgtaattttaaatttgatttatttcactactttttgtaacctgttattatagtatagagttttttttccctactagtggagtctgagttggaattcacttgccaattgctatgatcccatgattgattgctctaggtgggtgttgttcccactttgtggacgacagtgtgttaaaggaggttgattttaacatcaaattttaagattttacttttagttgattcatagtcattggagaactttgattgtattaaattttgatttgattttaatttgaatacagtggttattgacttgccaattgctatgatcccatgattgattgctctaggtgggtgttgttcccccaattattttttcaaggaggatggttct

SEQ ID NO: 13432 - DNA, 1779 bp, Glycine max
  Clone ID: PAT_MRT3847_112136C.1
cacggcgtccgttaagcttgggttctcccaccaccacacacaccaaacccacctccacactccaccctcactcactctcgggtcaatgacccagtcccggaagcccagaaagcccaacccgcaagcccgcgaagcccaagagagcccttcttcttcattctccagcagcggcatgaaactcatcgtccccctccagggcgtggtgcagggcggcggagggcttctcctcgggaccctcgtcccctgcacgctcttctacttcctccagctctacctcaaacgacgccgttccaacttctcccctccctccccctcttcttccgaatccaccctcccccgcacctcctcccgctccaatttgtcgacgcgtggctccatttcccgcgtccgcgtctccaagctcgccacgtcgatttccaaacccgacgagtcactctattacgtagggttggagagggtctcgcgagatccctacgatgcattggagaatcccaatgggattattcagttgggcttgtcggataacaagctgtgcttggatttgataggggaatgggtggcgcggaacttggaaggttccatcagtggtggtgttggtttgggaatcaatgggattgtgccgtatcagtcgtttgatggggtgatggaattgaaaatggctttgtcagattttatgcatcaggtgatggggggatcagtgaaatttgacccatctaacatggtactaacagctggggcaactcctgcaattgagatattgtccttctgtttggcagaccatggaaatgcattccttgtccctacaccatattatcctggctttgacagagatgtaaggtggcgtcctggggtagacctaatacctgttcactgtcgcagtactgacaatttcgatttaaatatcactgctcttgaacaagcatttagtcaagcaagaaaacgaggagtcaaagttcgtggaattctaatttccaacccttcaaatcctgttggcaatatgatgacacaagacatgctttacagtcttctagactttgctgaagagaaaaatattcatatcattgctgatgaagtatttgcaggctccacatatggaagtgagaagtttgtgagcgtagctgaaattcttgattcagattatatagacaagagccgggtccatataatatatggtctatcaaaagacctttcgcttgctggctttagagtcggggttatatgttcattcaatgagagtgttttggctgctgccaagaagttgagtagattttcctctatatccgctccgacccagaggttagttacttcaatgctttcagataaaagatttattcgggagtactttgaaaccaaccagaaaagaatacgacaagtgcacgatgaatttgtgggttgtttaagtaaactaggaatcaagtgtgccaagagcagtgctggtatgtactgttgggttgatatgagtggattaatccgaccttatagtgagaaaggagaaattgaattatgggagaagtttttgagtgttgctaagatcaatataactcctgggtcagcctgtcattgcatagaaccaggatggtttaggatttgttttaccactataacattagaggagatccctttggttattgatcgaattaggagagttgttgaaagttgtaatttttctagttgaagttccattgtttcattgacatttacagatgcctgatgttgcagtcagaagctgctgtttagaaattttggaaaggaatgtatacatccctagttatcaggttc

SEQ ID NO: 13433 - DNA, 1270 bp, Glycine max
  Clone ID: PAT_MRT3847_112137C.1
tcgtagggcgctttgtctgttataatcaacgcgctcctcacgagtgaatttctggttcggaaggatctgattgttagggtttggtatggggagaggtaagatcgtgataaggaggatcgacaattccacgagcaggcaagtgacgttctcgaagcgaaggaacggtttgctgaagaaggcgaaggagcttgcgatcttgtgcgatgctgaagtcggagttatgatcttctccagcaccggaaaactctacgatttcgccagctccagcatgaaatcagtaatggaccgatacagcaaatcaaaagaagaaccttgtcaacttgggagttcagcctctgaaattaagttttggcaaagggaggcagcaatgttaaggcaacaattacacaatttgcaagaaagtcaccgcaggaaaatgatgggggaagaactgtcaggcttgacagtcaaagaattacaaaatttggagaaccaattagaaattagccttcatggtgtccgaatgaaaaaggatcaacttttaatgggtgaaatacaagagctaaatcgaaagggaaacctcatacaccaagaaaatgtggaactgtataagaaggtctatggaacacaagatgataacgaaacaaacagagattctgttctcacaaatggtctaggcataggagaggatttgcaagtgcctgtgaatctccagctaagccagccacagcaacaacactacaaggaaccttcaggaactacaaaattgggattgcaattgcattgatccatttacaggatgtgtgtttcacaattgctatcaagaaaaatggactcagatttaaacctcaatgtcttcgtataaatgtggcatatagaccacagactaattggcttaaagattttaatttgaaattattagaaaaagtaaaagcaaccctagcatgtatgtaagaaacaatgaagcatcttatgagaaactaagactcaaatcaaggaagaaattcttcaacccgcactacttgattattcactcatcgatctgtttttctttctcttttcgtcaattttgcctttcgaaatttgtgctatcgatgttgaatgctgtttgtgttgtgtttgttcatacccgcgcattattacttcgtttccgaagatattagacacaacctttgcacttgatgattgcatataatatttgaaaatccattcctatagtgaattacctgaaccgattaacgaaagcacttggttaggttagggacccttctgtcgtcttctcgcagccgta

SEQ ID NO: 13434 - DNA, 559 bp, Glycine max
  unsure (1)..(559): unsure at all n locations
  Clone ID: PAT_MRT3847_112138C.1
tngnnggcaaagcatttttttcaccccaaatcaaacgcccccaagaaacgttgggatacacgtaaaaatccgtccctttntaaggggaaccctcattttaaaaaacctttttttgttttatttcttccggggttttttttccctcctactttagggcttccccatccttttacttggttgatcaactggccccccccttgcccccgggtaactctgcttttangctgctgctttccccctttgggggccctgtttggccccttggcctgccnggtgtcgcggggaangaaagccgcttttttgccctccccnnggaacctttctctgcttttgccttttctggggctcctggcctttgggccctggcctgggcttttgccgtttgntttgcccccttgtcgcttggctccgctggtncgcttcccgggctctcgggcttcctcaccgttttcccggctttggggtgcctccggaaccggcctgagggggcactgcccccgcttttgggggcctcggtcctccccccgctggccctgggggttgggcttcccttttttgg

SEQ ID NO: 13435 - DNA, 152 bp, Glycine max
  Clone ID: PAT_MRT3847_112139C.1
gacttatagagagattgatgaagaaatcagcatgtgttcaatagcatctgggtttgtgctgactcttaatgttgcatcttccaccacaaactcactggttgtcttgttcaacacaaataacaactcttatatacttctcgtgagggcttcat

SEQ ID NO: 13436 - DNA, 1520 bp, Glycine max
  Clone ID: PAT_MRT3847_11213C.1
ctttaatattagaatctcataaatgctttttttgttttttcttttaatgttgagaattgagattagattttaagatggcgtgcatacatttttgttcctttgctctcttcattttccattcgtagacgccaagaaccctaacagtgcaaaacccagaagctgaaatctttggggcatgaggttttgcatgtgttcatttatgggatttgggtaatttatccccttttctggtttgactttatttgagctgaaacaaaggagaatgcaatggacttggataatttgtgaggatatttaacatagtgtacattcactacattgtgttcctgtaattattttcatcagttggtgttgtgatggatggtgataatggtcttaacatacgtaattggggttactatgaacccgccacgtcgttcaagagccacctggggctgcaactgatgtcatccatgccggaaaaacctctaattggagggcgcaatgctgcggttttagcaggcactaatggagcatttcaccatagggacattggtggtatgccccaagctacataccctatggaatacatgagggatgcatggattagtcagagagacaaatatatgaatatgatacctacaaatcataactatggtggtattccggagacatcttcagcacatcaaattcaaatgattcaagctccggaattgccaaaggaagaaaagccagtggaagaagcacctgtcgtcgagaaggcaaacggaactcgtaagaaaagacaggggcccaaggttcccaaatctcccaaggctaagaagccaaagagggggcctcgtgcgccaaaggatgagaatgctccctcagttcaacgtgcaagggttccaaagaaaactactgaaattgtaataaacggaattgatatggatatttctagtattccagttcctgtttgttcatgcactggagtgccccaacagtgttataaatggggctctggcggttggcagtctgcatgttgcacgacagggatgtcagtgtatcctttgcctatgagtaccaagcggcgtggtgctaggatagctggaaggaaaatgagtataggagcatttaagaaagtgttagagaaacttgcagctgagggttataacttttctaatccgattgatttgaggacttattgggcaaaacatggcaccaacaagtttgtcaccattaggtaggtctattctattgtcaactggcttcatgttcctttctgcctgtttgtcatgtatatatttatttgtgtatttggcctgagactgaggctttttagattgtttgtagtacaacaattttcaaagtcacaagacatttcctgttctcctctaactcttcctatgttgtatcttcacttctttggatttagttcttgggaattcaatcatttggttaaatggttggttctgatagggaactagcggatggcattttgttttattaatatttagaagtaaaattttatccattcatgaaactactggtgtttgaacatt

SEQ ID NO: 13437 - DNA, 232 bp, Glycine max
  Clone ID: PAT_MRT3847_112140C.1
cttttgtgtttgtgcaagcaccagatggggcctcggatgagtcaacagtgccataattgttatgaggcgaagcgatagatagggccgttaacctaacgctatagacgaacatagaaaggcccagacagagacatctgttggacgtgaacaattaccatatactcagtattaaattttaacgaacttgatggagtatgaggggttaaaaaaggcacatattgaaagaggtgct

SEQ ID NO: 13438 - DNA, 346 bp, Glycine max
  Clone ID: PAT_MRT3847_112141C.1
aagcttaaaatatacagtttttgggagataagaaaaggctccctcaacaaaaaaagttcttacagtgctaaggtcttcataaacagacaattgtcaactgggaaagaaccttccaaataacccattatttaagaactgccaaggctaaatgcgtttacataaagggggtctttttaaatatccttttaacaattttcctatgtttcaaggaaacttgtgaataaggattagtcaatgatttattatggactggctgatccaacctactctgctggagtcaaggctgttacattggcccgaatgcgagtgcccagaacaaaactgtgaacaagaactgaatgctgat

SEQ ID NO: 13439 - DNA, 254 bp, Glycine max
  Clone ID: PAT_MRT3847_112142C.1
ctcgagccggtaatcatgggggttcatcctacgaggaaacagactctatagctctatttattgggccaaaaacccatgcctctggccattcatcatccaatcatgacacaattttgcaggttgatattgcaccaacaatagctttacttttgggtgtgccaattccaaaaaataatatgggggtttggatcccccaaatggttgactctctgacagatgaccaaaatttgagggcactgcagttgaactcatgg

SEQ ID NO: 13440 - DNA, 655 bp, Glycine max
  unsure (1)..(655): unsure at all n locations
  Clone ID: PAT_MRT3847_112143C.1
ttaatataaaatcatacactccaaagtccaaacagtacacggactaaagcatgagagataattttttcacccaaaagcattatttcgcttccaaaatggatgagtttgactccagagtacagacacaatgagggagtgcgcgtgactaattgtcagaaagtcgctaacagtgctaaagttgcaagagacttttggtgtcttggataaagagaagagatataatattaaaggataaatttatatatttttgtgagatttatattttaattcaaaagcttcttaagcgtcaaacatactccagcaaatgtttgctgcaatactctcgccaaccaatttatttttttaggttagaggagggttgtagacaaaaaccgtcaagttcttcagcaaccccaaaataccaaaaaaatagcatcatcaataaaaaatatatagttaaatgagtgtgattgtacctagtattttttaatagatttttaagatgtttatatannntaaaagataaacgtaattaaatttagcattagttacatgtatgtgatgacaacattttaatgggttaacaatgtttttacttaaaaagtttctaaactttgaattttgattctgagttctgacttttaaaatgaatatttttcatggttgatttttttta

SEQ ID NO: 13441 - DNA, 326 bp, Glycine max
  Clone ID: PAT_MRT3847_112144C.1
acccacgcgtccggccacgcgttcgcccacgcgttctcaattataagctgattttttatcaactgaatggggatgactcaaaggtgttgtgagcgatacaaccggtgcatcagaagcatgtcctgcgcgtcttagttcagagactctacctgacaatactatcaagatatcgggattcctacacaacagaggacaagctcactgggtctgtctctaaactaccgcttaatatagggaatgccctgatccaaatacgttcacttttgcttgtggagcctgagccgcaggcaactgtgactcccttcacgctctacgatttatcgcct

SEQ ID NO: 13442 - DNA, 1353 bp, Glycine max
  Clone ID: PAT_MRT3847_112145C.1
gtaaaatggttttcttaagataagttcttaagataaggttatatgatttcatattcaaacgttttggggaggaactacactattggtacttgtgtaacagtgtaaaagggcttatgcatatctatccccttggggagcctttgacactttttcaataatgagagagtaatcaacttttgtctaggacatttttatggaatttctacattctttgaaaagcttttatagatgatctggtttttgttagtaattcaatgctcttttaatcttgtattttgtctgatgtgacttgtgaaatgttggctgtgttattgatgaaatttgtcttgatcaaagtgtgctgaatgaatgaactaaataaccctttgttttctctgcaggatgcctgttgttaaaagggagatgcaaacgaaacgcaggagagacagacagagaagagaatggacgctattgattctgtgttcgatccgctcagggaattcgccaaggacagcgtcaggctcgtcaagcgatgccacaagcccgatcgcaaagaattctccaaggttcatatgcgtaccccaatcgattttcgtagggagggggttcgtaggttaattggtttcgttgatattgaattcgaatgtttaatagcatagccgaatctcattagaatgaagggcatagctctgcctcatcaattcagggttatcaatcaaaatgaggggtacagagagtactgcctttagttagagtcgtcaatgagattcatcggattcttcgtgaatttcatttttgatttactttaatatcttcatagtcgtttctgttttggttgaagggaaatacatattgcttcaaatttcattttgtcaagaaaaaatgtatttgacctgagttcccacatcaataaatcattttatgcccccaatcttagttctgttttcatttttgttttttattatatctggaagcgttactttagatgtaaaattttatttatcctttgttagaccttgacacattgttttgatttaggataaggaggaaaaaacgaaaggtccaaccctgaaacttgatttgattctatgttgactttgctttcgaatttatttctcaccgcgccttaccacggcgtcgatgacatcaattgcttcttccccttcttcgtcatgcttcttcttcaaccttccatacccctatgaatttattttgatggctgtttattggcctttgcagaataacgttttgtttcaaaaagcaagaataaaataaatggtgattatcaattgtgcgactgggtatatgatgtgtctcatcacatatagatttaatgggggggggtatctagggggggggtcgcactcctttgca

SEQ ID NO: 13443 - DNA, 434 bp, Glycine max
  Clone ID: PAT_MRT3847_112146C.1
ggcgaacatgtattgtacatgataagcacaggtaatttttgatgctgctccacggaatggtcctcacaatccgtattaccgtatgccactgtttactgaactgtcatccacctttctaggttcaattattcaaggcatactgtgattattgcctaaaatgtgaatttacgcccatggggactttgaagtgaaatgataccactctctgggcatattctttacaaaccatagcgctggagggatttattttatatctttgaccaaaggaaaaggaatttgggttcaaacactctaggaataaaacactatggtgaatggttgttttcttatggaatctctttcgacaaaaaatattaagcatttaaaagaagaagggcttccattaaaggctgcgccagatttagtatcaaaggatatgggtgagcttctaaaga

SEQ ID NO: 13444 - DNA, 614 bp, Glycine max
  unsure (1)..(614): unsure at all n locations
  Clone ID: PAT_MRT3847_112147C.1
tttcttcncgtccacgcgtaaacaaaatccatcatcaacaccaccgctaccaccatcaatttcttctcatgggtggttggctttattggtatttgggcattttaattcacacacttcaattctcgtgttcagtcagaaccgtccatggcttgatcccacaatccccaatccaatgcagcagttcaggctgcaccctccgcaactcctacggcgcgtggggcgaccgaaaagactgttctgccctcaacgtgacatacccaacaaccgaagaacagctccgttcggcagtgtcctacgccgtcagaaacaacctcaaagtcaaggttgttaccagattctcccacaccattcccaaattatcatgcccacatgaaaataacaacaacaatattaatagcagcaccgccaccttgctgatcagcacggagaagtacgactcccgcatcgagatcgacgctgccagaatgaccgctacggtcgatgcgggtgtcggacttcgccaattgatcaacgcggtggaggaagctgggttcagcttggtggctgcgccgtattggaagggtgtcactgttgcggngcttattagcactggtgcacatggcagctcttggtgg

SEQ ID NO: 13445 - DNA, 382 bp, Glycine max
  Clone ID: PAT_MRT3847_112148C.1
cttgacacatcagcggtaggctcttgcattttatagaactcagctagccttgatggaggagaatatatatcaagggattttctccctcaattacgtgacgcaagtcacttcagcaaacattcttagatgctttcctaaagaagccaattcaagaaaaatgaagcccctccaacttgttcatacttggcattgaagagaggaagggaattaaacttccattgttgattgcaagatactattttaacttgccatggaattagtatgaatatataagtgatccattatgactaattattcatagggcacatgcatgcagtcacaaggtcgctattcctgattgaattagtatgaataataacctgcatctttatcatttccttac

SEQ ID NO: 13446 - DNA, 1264 bp, Glycine max
  Clone ID: PAT_MRT3847_112149C.1
cccacgcgtccgcccacgcgtccgcccacgcgtccgcccacgcgtccgcccacgcgtccgcggctgcgagaagacgacagaagggtacggctgcgagagacgacagaaggggacacacactctgtcacgcacccaccattctactacactcctctctctcactctcactctctgctccgtgatagctgtaccacgtttttctctccatctcgaaacaccatctctgcctcagtcccaacccatcaccattctcatggctgctctagctctagcacttcttcttctggctttcaccggcacttcaagtgctacatggtgcgtttgcaaggatggaagcgacgcgatcctgcagaaaaccttggactatgcttgtggagctggtgctgactgtaaccctcttcacctaaacgggccttgttttcagcccaacaccgtcagggcccactgtaactacgccgtgaacagctacttccaaaagaagggtcaagctcaagggtcctgcgagtttgcgggaacagccactgttactgcatctgaccccagctctagcggtacttgtgtctacccttctagcgtcagcgctgcaggcactggtacaactccagtgactaccacaccaacaatgggcactactcctacaactggaactccatcaacaagcaccgggcacgggcaccggcaccgccacaggcaccactccatacagcacaacacctggagtattaggaggcattggcagtggcatgggaccttcaggatccggcatgaatgacgaaagtcacggtggcattggacttgtacacagcagtagtttcttctcgatggcgctcttctctgccttcatgatgatgctctgctggggttgagaatgaaaataaatggggcttggcctgggtatatggtgcaaaatgccgtatgtcactgtattaatgtgaatgttattttctaggtgctgaacttgggacgttagtttttggggttcttataatatttttctccaccttccactagctattgggtttttgattaattaattggaattcggttacaatttggctccaacttgttcttaatcttaagctcctactctgtacaaagaagtgcataacgctgtcaattagatggatggacctggtgacaccaatgctatgtaatttttaacgtaactataaaccgttaattttgtgctttcaatgaatagaaatcatgcccaattgtttcggaatagaaatcatgcccaattgtttcaaaaaaaaaaaaaaaa

SEQ ID NO: 13447 - DNA, 696 bp, Glycine max
  Clone ID: PAT_MRT3847_11214C.1
ccacgcgtccgggcgtgcagaccactgtctccccttttgctctcttcattttccattcgtagacgccaagaaccctaacaggagaatgcagtggacctggataatttgtgaggatatttaacatcgtgtacattgtgctcctttaattattttcatcagttggtgttgtgatggatggtgataatggtcttaacatacgtaattggggttactatgaacccgctacgtcgtttaagagccacctggggctgcagctgatgtcatccttgccggaaaaacctttaattggagggcgcaatgctgtggttttagctggcactgatggggcatttcaccatagggacattggtggtatgccccaagctacataccctatcgaatacatgagggatacatggattagtcagagagacaaatatatgaatatgatacctacaaaccataattatggtggtattccggagacatcttcagcacatcaaattcaaatgattcaagcaccggaattgccaaaggaagaaaagccagtggaagaagcacctgtcgtcaagaaggcaaatggaactcgtaagaaaagacaggggcccaaggttcccaaatctcccaaggctaagaagccaaagagggtgcctcgtgcgccaaaggatgagaatgctcctgcagttcaacgtgcaagggttccgaagaaaactactg

SEQ ID NO: 13448 - DNA, 749 bp, Glycine max
  Clone ID: PAT_MRT3847_112150C.1
taagttgatattggattcattgagaactcccactgtcgtggaagtgcagggggacaagttaaggaggtgcaatgagtggatgaagtggcttccctccgcccagcttcgggccaactctggttcaatatcccctagcggatcaagttctaataacctagcagctgattttgaaaagatcacagtggatgaagctatttcacataaagttaacactgagcctaccacaaatgaagatgctgcaggagagtcctcaactcagtcccaagtcccaaatgatgctactgtgagcagcaattaaaactcaactcagtttatcttcctcatcccaaaatacttggcccattctagtttttggccctgtgcgactcttgattttgaaagggtttttttggaggggatggtaggataggttgattcctttctacggtgactgagatcgattttggtagcaattgaatcaaatagggaaataaataagaattctttggaattattatggcctaaaaagataaagaaagttaacgagaaacaagaaatctagaattttgatggaggtgaattgagttttgggttttgtatagtttttttttgctgcggatgatttattctttattttctggtggcttatggtggtatgtgtgggtaaagtatttgttatgaattgaattgaattgaattgagcacttgagttcgcttgtgccaagttgccctgccattttaacaaattaggccttgatgtttgctctgtc

SEQ ID NO: 13449 - DNA, 260 bp, Glycine max
  unsure (1)..(260): unsure at all n locations
  Clone ID: PAT_MRT3847_112151C.1
gtgttggtttttttttttttttttttttttttttgggggggggggaaacttgaaacttttttaaattacatttggcccctttggtctacggtttcctaccaatttttggcctcccangcccagtgattatggcctttggcttaatactctttccgtggggggggcttggtttccttaacctctgctgggggtcacccccttccggcctaagattttcagctgggggaagcatagcgcccccccctttttgcggctcggat

SEQ ID NO: 13450 - DNA, 166 bp, Glycine max
  Clone ID: PAT_MRT3847_112152C.1
gaattgattaaacacctaaatttcataaaatatgacatggaatcacatgttgggtatcgtgtctgcatccactatttgtagcgagacgaataccctaactttaacatctatataccttaattcacctgactaaactgtattctggctcatcaaaacagataactct

SEQ ID NO: 13451 - DNA, 382 bp, Glycine max
  Clone ID: PAT_MRT3847_112153C.1
acacgcgtccgccacaccgtccgttgtgacctcttgaatcttaagaaccaaaagggggcttcccttccaccaaagtgggcacctgcaggcaaccagccacaaaacattttttgcaaaactttaaccgccggggcaccaacccctcatgggggatttttttggccttgccggccagttgaaaaagggtttcctccatgggatttttttaaaaagcctcctgttcaaaaattaattgcagggaatttgctgtggattgaagggaaattcaaacttattttccggggccagcccaaagggcatttacttacaaccggatggagggtctttgtaagggctaaaaaacttgttgctggggattctgggctgttaatctggaatgaaa

SEQ ID NO: 13452 - DNA, 335 bp, Glycine max
  Clone ID: PAT_MRT3847_112154C.1
gaagaggttgagtgtcaaacaatctttttataaattgtaggaaaacaattgattgtcatgttactaaagccttattatgttttttgaaacacagtgggaggacttttgaatgcaacatgtgggaatgctacagagctcatcatagcaatttttgctcttagcaataacaaaattgcagtggtaaagtattctttgctgggttccataatttctaaccttcttctggttcttggaacctctctattctgttgtggcattgcaaacattagaaaggagcaaaaatatgatagaagacaggcagatataaacttgcttatgctgtttgtggcattgct

SEQ ID NO: 13453 - DNA, 416 bp, Glycine max
  Clone ID: PAT_MRT3847_112155C.1
aaccatgaacaccactaataataaaatctgttataacaaaattgtacatgtataccacttagttggttatttagttttgcaattgtgcagtagctctatatgttcaagctttcactataaatattgtactaaagtatgtggtgctaagccatattcacaaattgtgtactaaaaaacatattatgaatgacttaaactagggtcaccaactgaaataagatttatgcatgaacaaaccatttcaacataatcaactctctcaggtgaataatcagtatgatatgaagtccttcatcctcttaaaatccaacatctttcagcacaattcctaatcagagctagatgcataacacaacaaacctcattcatttcatgtgccagatccttcaaggtatccaatccctctgatatgatat

SEQ ID NO: 13454 - DNA, 478 bp, Glycine max
  Clone ID: PAT_MRT3847_112156C.1
ggctcgagttcgactcttactcctttctccgcatagctgcgtattccgaatcgaaaggtgacggttgtaagtaacaatggtggacaaggccaagggtctgaaggaggaggttgtcactctagagtacaccattaacctccacatacgcttgcatggctgcacatttaacaagaacgctactaaagcaattaaggagataaggatgtctgctcacactgcgatggtgacgaatgatgtaagagtggatgtgaaactcaacaaggctgtgttgatcctgaggatccggttcgtccccaggaggatcacggttcgcattgttcgcaagaggaacgaccattatgatgcaacggaagagctctattcccttgatactgtcgtcgagatccccgaggaggagctgaaatgttgtggaaccaacgttatcgatgatgcacattgactatgtgtaggctatatatcaagtcttcttatacttgat

SEQ ID NO: 13455 - DNA, 357 bp, Glycine max
  Clone ID: PAT_MRT3847_112157C.1
cccacgcgtccggaggatcagaaaaggcaagagcggggggaagaatgcagatcttcatgaaaaccttagcagagaagaccatgactctcaaggtcactagcaaggacgccattgccattgtcaaggccattattcatgacaaagaaggtataactgcggatcaaaaagaatatgactatggctgaacagcaactagaaagatggaatggacctgcgtgccgatctcaacttatattattgaatgaaacattaaacttgatcctattgctctttggtgtgatcgatcagccttccctcatggctatggctcgcagatcctctcagagacaagatgatttgccgcacatgcatgctcgt

SEQ ID NO: 13456 - DNA, 240 bp, Glycine max
  Clone ID: PAT_MRT3847_112158C.1
gtttccatgatctattactctgctgcttcatattcgccttcattgtcactggtttgatgacccatcatcatggagcttcttctacagcactatcttggattagtactttgcttcaaggatccatgcgagaccgtccagcggcacatctcacattcatctacaaatcgccatccatggcgttcactccttcgtgttgaccgaatgcttcgcatgctcatgtgttttacgatgttaggttca

SEQ ID NO: 13457 - DNA, 1191 bp, Glycine max
  Clone ID: PAT_MRT3847_112159C.1
tagaaatagaaatcggattgagatttcaatttgtcaacagaaaaacctaatggatcgaattgagatttcaatttgtcaacagaaaaacctaatgtctcatcgagactctgattccaagcgtcgcaacgttcaaattcgatcgagaaccaagtcccaagagatataaaagggatgataaacaagaaagagaaagggacaggaacacagcaacctcgaatggaggagatcagggaaacccaccacatcattttacgcgtgaacccttcgatgctgctcccaagaaatcgaattcaaatgatcatcatgagcagcagcccaaacattcgtctcaaccaccgagatctcgctcttatcaccagcatgatgaacggggtagtactgggcaggttggtcgaagcaatggtcaaagggaagctggtggaaaagtctttactcagagtaaagagaataatgaaagtcaaagtagagagcaaagagatgagaaatcaccggtgaaactggatgacagtttacagaaaagagatggtttcactgcaagaaaagatgatccacctactatgaggaaaagacgtgcatttagggagaagaagatccctgcggattcagcagatgctaatccagcttcgatagtggaagtaaagccaagccatactgaccatcctccggaaaggaatgaaaggaaggatgaaagaagcagcaatcctcatcatctggatagacctgagaagcaaaatgcagagggcagagcacccaataagattgaagctagaagggatggtttttcatcaagagcaaggtatgggggcagtggaggcaataacaattacaggggaagagataaaattaatggaaggcaaggttatcgtcctattaagatgcgaatggagaagtggaaacatgatttgtatcaagaggttaacaaggatcctattccaaagaatgaggatgaccagattgcaaagttagaagcactattggcttcataatatcaaacaaaagcaagtatttgataagcctttttatttattttaaaaaaatcaactcgtggcttgtcggacaatttcaagagatgatttttacttcatttaccaattttgtgatttattttcctctctggtttacattttttaagttttatggcatgagttaaacagttacccaatttgttcattatgttatcaagttattact

SEQ ID NO: 13458 - DNA, 1415 bp, Glycine max
  unsure (1)..(1415): unsure at all n locations
  Clone ID: PAT_MRT3847_11215C.1
cccgcgtccgggcgtgcagacatttttgttcctttgctctcttcattttccattcgtagacgccaagaaccctaacagatacactcacagcagagacgcctagagccgtaacaggtgaatgcagtggacctgtaataatttgtgaggaatatttaacatcgtgtacattgtgttcttttaattattttcatcaggtggtgttgtgatggatggtgataatggtgttaacatacgtaatggaggttgcgctgatgccgctacgtcgatcagttgccgttgtggtggatggtgttaatggccttaacatacgtaattggggttactatgaacccgccacgtcgtttaagagccacctggggctgcaactgatgtcatccatgccggaaaaacctctaattggagggcgcaatgctgcggttttagctggtactaatggggcatttcaccatagggacattggtggtatgccccaagctacataccctatggaatacatgagggatgcgtggattagtcagagagacaaatatatgaatatgatacctacaaaccataatttatggtggtattccggagacatcttcagcacatcaaattcaaatgattcaagcaccagaattgccaaaggaagaaaagccagtggaagaagcacctgtcatcgagaaggaaaatggaactcggaagaaaagacagagttccaaggttcccaaatctcccaaggctaagaagccaaagagggggcctcgtgcgccaaaggatgagagtgctcctgcagttcaacgtgcaaggattccgaagaaaactactgaaattgtaataaatgggattgatatggatatttctagcattccgattccggtttgttcttgcaccggggcacctcaacagtgttataaatggggatctggtggttggcagtctgcatgttgcactacaggcatgtcggtatatcctttgcctatgagtacgaagcgacgtggtgctaggatagctggaaggaaaatgagtataggagcatttaagaaagtgttagagaaactcgcagccgagggttataacttttctaatccgattgatttgaggacttattgggcaaaacatggcaccaacaagtttgtcactatcaggtagatctcctctatggtcatctggcctgttatgtcttttagcctttttgtgatgtatatacatgtgtatttggccagagacagacttcttagctggtttgtagtacaacaattttcaaagtcattagacatcttgttttctcttctaactctttagtatctttactttgttggatttagtacatggaaattcatcttttggttggttggttcagattgggaactacctgatggaggcatcttgttttattaatatttagtaggaaaatttaattggttcgcgnncct

SEQ ID NO: 13459 - DNA, 1066 bp, Glycine max
  Clone ID: PAT_MRT3847_112160C.1
cggctgcgagaagacgacagaagggggtgtgcagaaagagccgagttaagaagagtctttggtggagggaagaagggttgaagcaccttgcactgcaaaagaaaaaaacaagaagaaaaacacagcaatggagggtgggaacaacagcagcatcaacagcaaccctgaggagttggcggtggggtgcttgctttcgatcaggacaacgttgggcgacgaattcgaaggccaggtcgtgaccttcgatcgcccctccaacatcctcgtactccaggagccttccaaacctagccctcgtcgaaaccttaggttgctcaaagccaattacatcaaagacttcacctttcttggccatgcccaagaccctcttgatcccaacacctgcttccttgacctcaccgctctccaacaaagggaagatgttgctgtcagacaagcggaggctgatgctgagaggattggggttggtgttaccagcgaggcacagagcatctttgatgctttgtccaaaacgcttccagtccgctgggacaagacagtcatagttgtgatgaatgaggtgcgtgtcagcagtccatatcactctgaatctgttgttggaggtactcctgctgcaaatgatcgggtgaagaaagtgcttgagtttgagaggaagaggttgcaacttcgcagttctggtggtcagtaaagttttgcattcacatccttttatggtcatgaagcacctccaaggaggaagtgtgatgggtatgttgcttttaacaaaaccctaaagagggttttccaaggcatatttctgacttcagatatcttttgattatctgctgtcttgagctctcaagttctgtcttgcttatggagttcatttgaggtacttcctccggattcttcataaaagtgaatgctgaaccatatgattgatctatttcacttggaacccaaataggtgactgggtttatataatttgttggtttgctattgggaagtttaaccaattacaaagagctaacatgaggtcaaactgactctaatttgttccttatataataatgcaaatgctttggg

SEQ ID NO: 13460 - DNA, 1372 bp, Glycine max
  Clone ID: PAT_MRT3847_112161C.1
acggctgcccagttaagaagagtcttgggttgaaggaagaagggtaaactaggagtaggagggaagaagggttgaaggaagaaaaaaagaaaaacacagaaatggagggtgggaacaacagcagcagtaacaacaaccctgatgagttggcggtggggtgcttgctttcgatcaggacaacgttgggcgacgaattcgaaggccaggtcgtcaccttcgatcgcccctccaacattctcgtactccaggagccttccaaacctagccctcgtcgaaatcttaggttgctcaaagccaattacatcaaagacttcacctttctcggccatgcccaagaccctcttgatcccaacacctgcttccttgacctcaccgctctccaacaaagggaagatgttgctgttagacaagcggaggctgatgctgagaggattggggttggtgttaccagcgaggcacagagcatctttgatgctttgtccaaaacgcttccagtccgctgggacaagacagtcatagttgtgatgaatgaggtgcgtgtcagcagtccttatcactctgaatctgttgttggaggtactcctgctgcaaatgaccgggtgaagaaagtgcttgactttgagaggaagaggttgcaacttcgcagttctggtggtcagtaaagtttcgtattcacatccttttatggtcaggaaaagcacttccaaggaggaaacatgatgggtattaacaaaatcctatacaagagggttttccaaggcatattcctgacttcagatatcttttgattatctgttgtcttgagctctcaagttatgtcttgcttatggagttcatttgaggtacttcctccggattcttcaaaagagtgaatgctgaagcatgtgatttatgatgtgtttcacttggaagccgaataggtgactgggtttatataatttgttggtttgctattgggaagtttaaccaattacaatgagctagcatgaagtcaaactgactctaatttgttccttatataataaagcaaatgctttggataaatcaaactaacaaaataaaatgaggcttgctagcgttgtttatttgttatttctaaaaatttgtggtgtaattgatttgttttattaggctgtcccctctttgataaggtttaagtattgttgttttttgaattatagtcctcttttggatagatctctggtaaaatttgattgcattttggggagaaaggggaaagcatggaagagacaagacttgaggagtactttcttggagggggagggatacaaatagtatgctcaagatagtcctgtaatagagaccaatcaaataacaatacttccgagttcttgacttcttttactgcact

SEQ ID NO: 13461 - DNA, 354 bp, Glycine max
  Clone ID: PAT_MRT3847_112162C.1
acgagattaaaaagtgaaaaaacatgtattatacctcagaatacaatccatccaaatttagattggcaaatctatctacttgtgctcatttattttcttttattttttgattgatgaggtggatggatctaactctgcctcctcccttttacgagaaattacagtcttggccaattaccacgtgatgcattattaactccttttcataaattaaaaattgattatactaataatttatgacaacataattctgaactatacaataatttttttcccttttactgtttttccactaaaactgaaattggtttggcaatctttagtttttggttgatatggtttaatttgtagatg

SEQ ID NO: 13462 - DNA, 586 bp, Glycine max
  Clone ID: PAT_MRT3847_112163C.1
attcctctctctgcggctgcactgcagaatactcttctttcttccaatgtctaccatctgttctctctgaatagagaaaatgtcactcgtaccaacctgtttgctcatacacatgtcccgtcctctctgcacgatgccaatccgcgaaactgctagactccaacaccagcctgtttacactcggccccttctgaagatactcttattgcacacccttgtctctgcctaaactgtggtgatacgacacatcgtgcgcgtagctgcctccccatgccacactccgccgtcgaaccttcctattgccgctactgtccctatggatgctgctgctggggaaggtgctggcgccgctccagctgctctagagagtctcacgggagatctggagatacgagagagcatgatcgatatgagatgtcacatgggttcaccagggagcgatatctcttggtacctgggaaagtttgatgtgccactacgtttaagggtgactctggacatggaaacgatgataattgtgctgatcataaatacatgtgtacgacttgatcatgagtcgcatatgaacgtcggaatgtgctatgta

SEQ ID NO: 13463 - DNA, 294 bp, Glycine max
  unsure (1)..(294): unsure at all n locations
  Clone ID: PAT_MRT3847_112164C.1
gtcgtgtctactgtgacccttgccgtgctgggtttgagacctcagcggcgagctacattgctggtgctgagattagggtgcgatgcaagagcagggttggcaacgaggttgtgtacacgaagaaggggtacaccgactcaagcgggncatacacaatgtacgtgcgaggaggatcacgcagatcaggtgtgcgcggggaggcgtgggggcagccctcacccggaatgcagggaggtcagcccacgccgcggaggagccgtggggattctcacccgctacaacggaattgcctcc

SEQ ID NO: 13464 - DNA, 352 bp, Glycine max
  Clone ID: PAT_MRT3847_112165C.1
tcacttcctaaatagcgagcggacgctctctctctattattttacaacctttttcgcacctttgcgctcaattcaattgaattagtctaattgtaacaagtatggattcacaagtttgtgagacattgaccttcaaatagagtgatcaagggttgaaaatcataggcggtccacggatgacatcatttatcgataagccatcaccatctgatcaaagtggaaaggattgaattggacacaatgtttaagtcccttcaggcagaaattagaggaaccgagatgggtgattatccaggatcatgccccatatggtccgcaatattgatcagtgttccaattatggaagactgtg

SEQ ID NO: 13465 - DNA, 754 bp, Glycine max
  unsure (1)..(754): unsure at all n locations
  Clone ID: PAT_MRT3847_112166C.1
ccacgcgtccggcgaagtgaagagagagtgagtatcgtttgaacaatggagttcagtttcgacgagaaggacttcgcgtcgtgctgcggaagcaccaaattcgcgaaggaaatggcttcggcctctcctttccgttcgttccaggacgctgtttctgtcgcgaagggcgtttggttcaacagcgttgatgtcaacggttggcttcaggccttctccgcgcaccctcagatcggtcaaacccacgctccctctgtcgcctctgaagccagtgctcagggtattaggaaatggattctctgcaataaaatgtgagttgtcttaatgttcatccgagggttgcaattgtgcgatagtgtgaacgtgttaaatccctgactacaggaaatctgggtctgggacattaagttagctgtggagtttgtcagttcagttgagttattcctcctatcttgttcctgtttttaactatctgggttgcttttatgtttctaagctactaacaggtaatggaaattatagtgaaatagcaattctgtgttgcttctcatttctaatgtcatatttataaggaaatacagataatggaaaggctgttgccaatcattggccagctgcaatcagcactaataacagaatntattggctatttgttataacagaatacgtatatgatgcaatggagataacataattcatatatgattcagggggaggagatattctgtttctttggcactatcctgagttgggatac

SEQ ID NO: 13466 - DNA, 412 bp, Glycine max
  Clone ID: PAT_MRT3847_112167C.1
tcataactcacatagctagttgtttaaaggctgagagacgaaagacgccaacggcttactttccagttgttgacatggggaatctcaacaccgcatagagacccgcagccatgggcattataaaagatgcctgtgagaactggagtttctttgaatcggtgaaccatggtatatccatcgagctcatggacacattggacaagctcacaaaagagcattacacgaagactatggagcaaaggctcaaagaaacggtgaccagcataagccttgagtcagttcactcagaagtctatgacttggactgagatagctccttattactgcgccatcttccactctacaacgtatcagacaacgcatatctctatcaagattactcgaggacgatgctagcacttgctctgagact

SEQ ID NO: 13467 - DNA, 386 bp, Glycine max
  Clone ID: PAT_MRT3847_112168C.1
cccaacttgtaagttactccatctaacgcaccgctttgaccctttcttcccgtcgccggttgccggcataacatgttttgacggcgcatgaattccatcgaatcatgcggcgcttccgtaccagagatccggtcgttctccgcactttcagatgattctgtctctgaagccggaaatcagataacgagaaattccttattttctggtattgccggaatttcaaatctttggtcctgattcttttgcaattggtgccataactctatttgttgtatctctcttttttatgagggtatggttttccagttgatgtaccaaatgggtgtatgtccagtgaagggatgattatttagtataaggggattacagattttaattggaagtca

SEQ ID NO: 13468 - DNA, 157 bp, Glycine max
  Clone ID: PAT_MRT3847_112169C.1
acaattacatacacagatatatcaccataaactcacgcacttcatctcaaggtcacctcaataacttctggcctcacttacacaaaacacttcccttacgagcccgcgaaatcataatcacacatccactatacgattcacagtttattaacctcat

SEQ ID NO: 13469 - DNA, 383 bp, Glycine max
  Clone ID: PAT_MRT3847_11216C.1
aatcaaaaatgcaaattaaggaaagatttcacctaatatatgaaagtttgaaaacattttctttgtagtatcaaccccctttcatgatcctttgcaatgatccattgcacccgatgtaaaatgatgtctcccgataaggatcaaagtggtgatgacacttagtggttctaaagctttcttaatgaaaatcacaatgtaaaatataaaaggaaaaatgtcacacatgaattcctttgaaaaactcccttttataacctaagaacagatataatcgattgtcccctagagatagtcgattaaattgttctttgcatcccttgggtttcttttatgaataaatagtcaattttgaaattctgataccaggggacagatgtcgtaca

SEQ ID NO: 13470 - DNA, 449 bp, Glycine max
  Clone ID: PAT_MRT3847_112170C.1
tccacctgctgccttctaagaggcaattgatcttcactgttagggccatgcaatcagaaaagacaacctatcaagtgattcaaccaatcaacggcgatcccttcattggaagcctggaaacctcagttacatacagtcccttgattgcatggaacttatcgagccttcccggatacaggaccgcagcgagccgattactaagagggatcgaagtgggcctggctcatgggtaccttctggtgggcccattcatgaaggccggacctctgaggaacaccgagatcgcctggcaagcaggctttgtcgccgttggagggctcgtggtgatctctaccctttgcctcacgatctatgggatttcatcttttaacgaatgagaccgatgcactgccatcgcactgaccttgactgtccggacgaaggatcccgatcagctgcaaactgctgat

SEQ ID NO: 13471 - DNA, 269 bp, Glycine max
  Clone ID: PAT_MRT3847_112171C.1
agaccttcattaaacattgaaatggtaaaaataattcaggttatgcattggttaaaagctttcccacattagaatttataactgacgtgcaaccttgaccgttttggctaaattttgggatgagaacggattcttacattcttcaggatgaaaaagcttagactggttatgggatcacgttttctttagccctcttttttggggggccaagctccaacttagtatggtcccaaaacatgtttttttgtgcaatgcggcttgggtttttc

SEQ ID NO: 13472 - DNA, 379 bp, Glycine max
  unsure (1)..(379): unsure at all n locations
  Clone ID: PAT_MRT3847_112172C.1
cgggnctggatttccggggcggaccacacccgtccggggatgggagcctttgacgggggtttgcttttcatgcccaaaggtttcatcaaaggctgaagagtatccgaaaaagaaccttgctgtaaagaaggcacttaaagccagccaatccgggccaccggataggttatttgggtaagctttataagcatccatccttttttggctcggcttaggcgcttttttggcaaggaggaggttaccttaaaaacccccctgaagccttgcgccgctaatccaccaatcgataagccattgattggccggtttgagggggagatccttagcccgcaatttttccacccccaggtcaaacaaagggataaggtttcggaccttt

SEQ ID NO: 13473 - DNA, 1955 bp, Glycine max
  Clone ID: PAT_MRT3847_112173C.1
aaactcctgataaaaattctgcctctattccaataataatgaagttctttttgacccttgcacgggttagaggaggtgctgagatgctttattgttctggcttcttgtcatctttaagagtgctatttgctgaatccggtgaggatttcttgagaattggtagtgagaatctgggcagctcatgtgagaagtttgtaataccgttttttatttggggtcttggattagctgtggttactgctatggttaaatccttgggagacaattcttctggcaccgctattgtggacagcatgataccgtactttttttcagagaaagctcgtcttatttttaattctctaaatgccccagactttccttctgatgatcatgacaagaaaagacctcgggcacagagggcatggatttctttagccactcttaaagaaactgaacatactttgatgctcatgtgtgagcttgcaaaacattggaattcatggattaaggccataagaaatgtggatagaaagcttagagagaagtgtatccatcttttagccttcattagcaggggatctcaacgccttggtgaattgtcaagcagaaatgcccctcttttatgcccacctactgtgaaagaggattttgaaatttgcttaaaaccttcttatgtcaatagcaaaaatgggtggtttgctctttcaccacttggatgtgtgccaaaaccgaagatctcttctttctcaactgcattatctacctatggtcaagcaactgagagtagtgatcctgctccaaaaacaggcttctctgatactgttgccttgcaggtatatagaatagcatttctccttttaaagtttctctgtttacaaactgagtgtgctgctaaaagggctgaggaagttgggtttgttgatcttgcacattttcccgagcttccaatgccagaaatcttgcatggactacagggtcaagctattttcattactacagagctctgtgaagccaacaaactgaaggtctcccaagaaacacaggatgtttgcaacttattgttgcaaatttgtggcataagacctgtatgaggatttttcaaaggaagccaaatctttatttaatgcattggagggtcatgcttttctaaaagcatctcgcaactccctaaaacagatgatatcgtgtgtctatcccggattgctgcagggagagaatttcatataagatttgatgtagacaaaagagcacattattaattgtacagaatttcatagtgccaattgtcagtcttctttcactatgtagctaggagaaaaggttatcaacatggggataatacataggccgtgtgttgcatgattttcggtagtaaatgaattctttgtgcggccacgcaccgtgcctcggtgatggtgattgtgccaatgctgtcttggtttcgcttgatcaggacctgttctaaaggttgacaagtttgacacaattttgcaagggatgtcaaatacttgattttaaccatagttcgaaatttgtggtaaatggactatcatcatgtaagtgaaatcgtaatttacttatcatattgaatatcatggctcaacagatttactttatacatctttatattaatttaggtctcctcttctctaggcgttaaacgaccttaaatatagccaaagcttattggtctgcaatttaattggcttttaaagaattctggaaaatactgtataaacaggcctatttccacaattttgggtactgaactgacatggtgggtgcaatcgtaacttgaaatggtgattatcacttcattcggtattgccaggcatgatgaggggttccttattctagtgcagaatttcactatgtgccaatataaaatagaataattgataccataaagaaagagagaaaagtatatggagctatcataaatagtcttttacaaataggaattttgtatttaa

SEQ ID NO: 13474 - DNA, 241 bp, Glycine max
  Clone ID: PAT_MRT3847_112174C.1
cagttccactctggaggttgtgatgaatagtgatgaggtgctgatgttggtggcttagagagagttgaaattgcattttcttgacaggtggagaagattacaggctacaacttctgaagcaagaggcttgtagaagaagtcctcattcattcctccttcatcgatgaactcaaggcacttgcaagaaacgccctcgatgaaggaggagtgaaggcttcttccagaagtcacttgattcgga

SEQ ID NO: 13475 - DNA, 444 bp, Glycine max
  Clone ID: PAT_MRT3847_112175C.1
gtttgttttgagctttcaatgtaagagtcagatccttgaaagaaatctccattaaaggccttttccttttttcagtgtttgtagccattttaattacccccgagaaggtaagcttcttgttttcttgttgctcagccttctctttttcaagttgagaatatgcatacttaaaaatttggctatgagtatgtggttgttttccctttggcgcatttgctctaacacctgtatctctggtttctatttctgtatgaaggtggtcattaatatctggatcattttcaatttcatgtattatctgcataagaccattaggttcttttcccttttcctttggcgccagagatgaacttgcaaccatgcttgaagttgtaggtcctgaatgtgacaacaattcaatatctgcttcagaagttgcttgattcaaaattttaactttttcca

SEQ ID NO: 13476 - DNA, 286 bp, Glycine max
  unsure (1)..(286): unsure at all n locations
  Clone ID: PAT_MRT3847_112176C.1
ttatganaaaaaaaacaaggtgatatncttgtaatnatgaaaaaatagaaanaaaaaaggngataangtttagttaaaccgcttgncgnncgtagagtacgagccattcagtattnngattgtngattcttacaanatacaactgcatgtttgggattggatncattgaattcacctgaaaaggtcttggtgtgctcaannatcgatncngangngattaagangatntncnttacanggttnnggnacctttaggttgnagagcttcaagccaaggtgangactt

SEQ ID NO: 13477 - DNA, 610 bp, Glycine max
  Clone ID: PAT_MRT3847_112177C.1
cctcatttgactgttgacagtgagttgcatctttctgatgcacttcttctctggcttgaaagtaacactgaaaatttggagaggccaagcaaatccgaagagaactgctatgaagttttgaaacaaattcgtgtaggccttttgcctttgtggtttgctctaggaaaaagaaactctttctattttagacagctggctgaggaaagccttgattcaattttccgactcctaaatattgctcctatgggttcaatagatacttttgagtatagcgacttgcatcatctcaggattaggctgacagaatattcaaagaaagtggacctttctggttgcccgcaaatagcatctacagtacttcttctgtcactcatccctcaatcatatttaacagatcccatggaaaagaatattataaaacagttctttattaattgtggacatcctataagagataaatctgtgttcccactagaactgtcagaaacctttacctttgaagcagttcaggaggtggatatctctaagtgtcgaaatttgattattgagcatgctgttgattgcttctgcaagttctttccttctttaagaatattgaaagcagcacatc

SEQ ID NO: 13478 - DNA, 252 bp, Glycine max
  Clone ID: PAT_MRT3847_112178C.1
gcgagaagacgacagaagggggcacaagtgagtttgttgatcgagataactagaaacagtgtgatgaaaatgaaggtccttgttttcttcgttgctacaattttggtagcatggcaataccatgcgtacgatatgtcccctcttcgaatgaacactggctttgagggccgtaatccgggagttaaatgcgcaaattggatggcttctgttggagcatgacacatccttgggtttgataccattcctgaagag

SEQ ID NO: 13479 - DNA, 585 bp, Glycine max
  Clone ID: PAT_MRT3847_112179C.1
tttttttttgttcatttacttctttagccgctacttctatatagatatttggggccctatgttggtatcttacaactcttccatatgaagtttagcaactttctgttaacttgaacctgcctgtccatggaatttgcacaccgactaatgatgatttatgcatatcatctttggaagctgtcagtaaagcataaacctaatgataatcatacacaaaaatagctatggcctatatcaacaagtgcgaaccatgaaaggagggtgttctatgcctaaagaacacacatccatggaggccatacaccccatgtttgcatatgaaaaggaaatacacttctcccacaagcttttttttgaaagagagcagttctccctttgacccgagcatatttttctactgactgatacaggcgaatttgtcctaaaaatatatttttagcaacataccttctctgtttttacaaaacaatcattttctcccttctcttggggtgacgatcttttttttactgtggagtgatttcaaaactccctcaccatggaataaaaaaaaaggtcccatggtgaatctttttttttctcccc

SEQ ID NO: 13480 - DNA, 230 bp, Glycine max
  Clone ID: PAT_MRT3847_11217C.1
aacgaaacgacgacagaatggagattttatacagaagtaatcgatttcagtcacatagaattcacacaaaataaatgtggcaaaaacacagagaaaaaaaaacaacaaagagcggtcgctctaaaagatccaagctgacgtaggcgtgcatgcgaagtcataactcttcaacattgtgacctaaagtcaattcactgggcgtccttttacaacgtcatgagtgggaaaac

SEQ ID NO: 13481 - DNA, 349 bp, Glycine max
  Clone ID: PAT_MRT3847_112180C.1
cccacgcttacacaaagaaaaaaaatccttttacttcttttctctttcataatttaaatctttattaaaaaagcaaaatttaaaaatgatttacccatcaattcaattaaaatcctatccttcttcaaaaaaaaaaaaaaaaaataaaataaaaaaaaaaaaaaaaattacaatcattataaataatccaaacttacaaacacttacattcaacataatacctattatataaatacacctaaaatcaattcactatcacactatttacaactactatacttataaaaccctttcattacccaactaaatctcctaccaacacatcccctattatacatctaactaaata

SEQ ID NO: 13482 - DNA, 2242 bp, Glycine max
  Clone ID: PAT_MRT3847_112181C.1
cttcaacctcacgattccaactcattacacctcggcgcacgttagccaacacctctctctcagtccccccaacacagtgacactccgaaatccctgatgcgaatccccaaatccaattcaacctctccctaatccctccctcactcctccatcatcatcatcatcttcgagcttgcaagcagcaagctccatcaacaacacttccgattctaaaatttcccaatcctcactcacaatcacaatgatggaggaccaccctctctctgcgcccaaagacgaaatggaaaacctcgtactccacgacggcgcggacgacaacggcaacggcaacgatggcgccggtgcaaaatcaccgttctcctccaattaccgcagcgccatgtccacgctctccgaatctcaccaccaccctctctctccaccgatcctcgccactcccgccgactccgatcccctcctctccccaaaccctggctcccccgactcctcttcttacatcgaccctccctcctacgccgacgccgttttcacacccttcgatgacgacactaacgacgtcgagtcttctccgtcttcgccaatttccctctctcgatctccgtcttcgagttcggagtatctaaagataaccgtttcgaaccctgtcaaggagcaagaaacatcgaattcgattgttcctggtagcaacagttacgtgacctacttggtcaccacgaagacgaacattccggaattcggcgcctccggcgccgatttcgcggtccggcggcggttccgtgacgtggtgacgctctctgatcggctcgcagaggcgtaccgcgggtttttcatcccgccgcggccggacaagagcgtggtggagagccaggtgatgcagaagcaggagttcgtggagcagaggagaatggcgctggagaagtacctgcggcggctggcgacgcatccggtgatcaggaagagcgacgagttcagggtgtttttgcaggtgcaggggaggctgccgctgccggcaaccaccgacgtggcgtcgagggtgctcgacggcgcatcgaagcttcccaagcagttgatgggggagagtgtgattgcgccgcacgaggttgtgcagcctgcgagaggggggatggatttgatgaggctgttcaaggagttgaggcagtctgtggccaatgattggggaggttccaggccttccgttgtggaggaggataaggagtttttggagaagaaggaaaagattcaggagcttgagcagcagatcactggtgcatctcaacaggctgaatcacttgtcaaagcacagcaagatatgggagagacaatgggtgaactagggctggcatttattaaattgacaaaatatgagaatgaagaggctattgtgaactctcagagggtacgggctgctgacatgaaaggtgtagcaacagctgctgtcaaagctagcagattgtttcgagaattaaatgctcagactgtgaaacatttgcaggacacgcttcatgagtatcttggattaatgttggctgttcatagtgcattctcggatcgttcaagtgcattattgacggtgcagactcttctgtcagaattgtcttctttggagtcaagagctgaaaaacttgaagtggcctcatctaaaatttttggggctgacaaatcaagggttcgtaagttggaggagctacaagaaactataagagccactgaagatgcaaagaatgttgcaattagagaatatgagcggatcaaggaaaacaataggagtgaacttgaaaggcttgataaagagaggcaggctgacttcttaaacatgttgaaaggatttgtagttaatcaggtggggtatgctgagaaaatagcaaacgtctggacaaaagttgttgaagatacccgtggatatgtggatgaaagcacttgatctgtggctgtaaatgtaaatcttcattttattcattgatgtgccactctccccgaaatacgtcgtagtcatgacaataaactaacggaagctctttgtgggttcttaggctcgttctcacacttgtacctctgagaacatttcttatacatcattaaaagcatacttgctgttgtacattacgtgctatttggtttgattcctgctgtcttttcctaggttttgtttttggttggctgcataaatctttttccagttgactaaaacagatcatattcctaaggggtgttcaaatataaaaaaaaaaaaaaaaaaacaaaa

SEQ ID NO: 13483 - DNA, 546 bp, Glycine max
  Clone ID: PAT_MRT3847_112182C.1
acgagggtgtgggaggcagaccaaagcggacaatatacagcacaaaccgcttacaatctaatgagggaggtagaagttggggggatacaggatagggcttttgaggagttgtgaaagctaaaggtgccaatcaaatttgcagtatttgcttggaggcttctcagagataggttgcctactaaagcaaatttacacaggagacaaatagaggtcacaaataggagttgtccgttctgcagcaacatggaagaggaagcagggcatttattcttccattgcagcaaaattatcccaatctggtgggaaacatcatcatgggtcaacatcagtggacctttccccaaagatccaaggcagcattttctccaacatggtttgctattggttgagggggtaaggaccactaggtggaagtgttggtggctggctgtaacctggactatttggcagcagaggaataagatgattttctccaatgactcctttgatagcaacaaactgattgatgaagcagcattcctattgtggacatggctatctaattta

SEQ ID NO: 13484 - DNA, 908 bp, Glycine max
  unsure (1)..(908): unsure at all n locations
  Clone ID: PAT_MRT3847_112183C.1
ttttttggcttctcgcggcgggtctgatcgccgttggcggagcacaggcagccgatctccccgtaaaggccaaagcggtcgagcactttggacaacaccctctaaaccaatctatcaagtcctgattaatactagtttttctgtgtagagccctttggacacaccctctaaaccaatctatcaagtcctgaatctggtgagcaaatatggagctttgttggcaaacatccatccatggttcttgaagaagcatggagataaaggggtgtgagagggtcctcaccactcacactcctccacttaaaacagtttgttttggcttagctttggcttctctaatcaacaagggatgtgttctaacattctctcttgagtggcagaagcagatatgcattctccaaaggaggagaggctttggctacagcctggcaaaccggcaagtcacgaaaaggcaatggactccattggggtctctatggctatctattgctcatctatgtagttcttcttgctgtagaatgtaataaaacaaagttggccttcctttgagaagttaccaacttttgctgtccaaattactcaatttgcagctgactagaattcctttctctctgatcagtttctgcagatgagtaggtaggtaatttgtgatcactcccttcccttcatgtctgtgttcccttttccatgcttgtttgtgttgttagttataaccttatgaggaataaaagaatagtacaattctagtccctcaaagtttaggattgtattctattgaactttattagaaaagcttccagagtcttctttctaaggttggagtgaaaaatgatcatgatccctcaccctttccctttaaacaacaaaagcatctgattttgctaacacttgnaattgttcaggggact

SEQ ID NO: 13485 - DNA, 475 bp, Glycine max
  Clone ID: PAT_MRT3847_112184C.1
gctcgctaatgccctcatattaaaattaaataaaaatactagttaacatttatagaatattgattaaaaaaattagaataagaaatattttaattgaaatatataaaatcaaattgtccaaaaaaaattaaatctttactatttttaccgtaaatattttttttaaaaaaaattttaattaatattctaaagtgacttattagcccgatcatatatatatatatatatatatatatatatatatatatatatatatatatatataatatcttcattcctattaattgtttacaggcaggcctgggttcactgatctagaatctgtagtcttttcttcagaaggacctattctgctaaaaagttcgtaacgcatattttgaagccacttactgtctgaatcttgacctgttgactgataagtgctattcacaaaaagatacgagtgagggagtaactgagcatgagagaggagaga

SEQ ID NO: 13486 - DNA, 1686 bp, Glycine max
  Clone ID: PAT_MRT3847_112185C.1
ggggtgtctctccacagaatgctatgttatggagcataattacatctttaccccagccaattgtagccgttccttcatttatttgtgctgatgcattcagcaagtttcttcctttttgtacgggatttgctgctgggtgcatgatttggatggttattgcagaagtgcttcctgatgctttcaaggaagcctcagcttcacaggttgcatcagctgcaaccctttctgtagcatttatggaagctctgagcacattctttcagaatttcagtcatgactacaactctgaggatgcttcaggcttttttgtttcattactttttggtcttggccctttacttggaggaattattttggttgtatttgctcttgctttgcgtcttcagcatgctctcctcatgggcaccgcatgcggtattgcctttgttctcggtgcctggcgaccggtgcagcttattttgtcttcaaaattgggacttttccctgttttgttactccttgcaatgggggctgctttcatccatgtttcatcatctggtgtattgaaggtggcagcatccaagaaagcctcagtcaatgacttacctacactcaccggcttcccactcagtgttcacacccttcaatcattcatatcatgtggtgcagttgcgtttcacgctttggctgaaggacttgcattgggagtggctgcaccaaaagcatatgggcttggtcgtcacatggtccttccagtctctctacatgggcttcctcgaggtgcagtgtggctaacctgcatatttggagcactgatagctggcttgtatatttggagccactgatagctggcacggttctctagcaacagctgccataattggattcatgggaccaatatcagcaataggagctattcttactggtattgactatagtggtcttgatcacataatggttcttgcctgtggtggattgatacctagctttggaaatgtagtaaagagagctctaagtttggacaagaggaaaagcgctcatcatgggtattgggtttgctactttatgtctaacattcactaggttggtttgcttacatacaccttactgcaattctgcaccagaggctgtcagataagagtcttgtgctgcctctgccgcatgtgctattgttactcttcttgtaacagttgtatacatttctgtaattcgatttcccgaaacatggttagcctaatctgaagagatcatccttggtaaagaaactagaaagagcaatttcaaacggaagttccctaagaggaaggcagatttacaagtgaccaaagttttcatgtagaacatatccatgggtgtcatattttagtgcttacttgtatatatagttttacacatgatctaaatttgccgaacattgtaaaactattgagaagtgaaacagatgattttcatatatttttttttattttggcatgttatgtatgaatagaatcgatattttgcaatgttaagaaacaagaaagagcaatttcaaatggaagttccctaagatgaaggcagatttacaagtgaccaaagttttcatttagaagatatccattggtgtcatattttagtgcttacctgtatatacagttttacacatgatctaaatttgccgacaatgtaaaactattgagaagtgaaacagatgatatcttttttatt

SEQ ID NO: 13487 - DNA, 191 bp, Glycine max
  Clone ID: PAT_MRT3847_112186C.1
gtttttcaaaagaagaagactttggttgaaggagtgcatgctaccatggaggacagtgatttcagaacttatccctttgctactgcttctatcccatcaactggtgccatatgcactcggcttgatgttgctccaaggatacttggtgatttactaggcgtggtgacggcatacactacttgagttgcatc

SEQ ID NO: 13488 - DNA, 319 bp, Glycine max
  Clone ID: PAT_MRT3847_112187C.1
ccacgctttttctatttcatcaatcatcaccagtggcttctttttcttctgagaagaccgaattgcgctttgcaaaaatagggagaaccagacaaagatcctctttaccaatggaagttagcctcctcggttataggtattaccccacacacataggagactttttgaataatagtctgagccgcaaggtgcgttggaacaccatctatcttcttccaatcattcgccgaaaaaagacttgaacaagattcgaccccaatggacctctccaagtaaagcgataatttcgtgaaaaaagagatggtcttttttcagcccc

SEQ ID NO: 13489 - DNA, 241 bp, Glycine max
  Clone ID: PAT_MRT3847_112188C.1
gtgacacacaaattaagctagagcttcattgtttcttattcttttatcaccttacttatctcccttcagacaaagggacagaaaaccatccgtgagagagacagagagaaattcgcaaatccatgtcccacagttatctaaatgctgcctttgcgattataggtaacattgcctactacaagtgctttctggctccactaccaacatttgatagagtccgtaagaagaaaccacccgaagg

SEQ ID NO: 13490 - DNA, 299 bp, Glycine max
  unsure (1)..(299): unsure at all n locations
  Clone ID: PAT_MRT3847_112189C.1
agtcgcangcacgcgtacgtaagctcggaattcggctcgnncncaanctnaatcngnncnttgacaatnncagccannnctttagacgatnnnngtnatcntantnatngtcananggctntacaacanngcatgngnngttaacnatcncnatnntnatgatngcnannnncntgaannnnnnnnnnntncanccnanngtnccnngtgngganctcannnncaatntnnngggnnnnnannntnatntnntnngaagcnanngnccnagnnnngctnnngnagntttntngcnnggt

SEQ ID NO: 13491 - DNA, 543 bp, Glycine max
  Clone ID: PAT_MRT3847_11218C.1
gaaaatcctattttggtgccaaaaagaaatttgtttccgtaatcaaagtttggaaaagaaagggttagaaactggcggatgaccatgtatatttaaaaacacggcaaagggcgtgacaatcccttataaaatgcggggacaacaaaaggtccaaaaacaatattcaagaatgcgcaaaccaggcattaaatgctggcataagcctggaaagttattccccaacgagaaaggtaccctcggttagaaatgagaaccacacccactcgctttttggctttaaaaaaaggagttggtgggaaaacactaaaagaaaggccttcctcactggaaggaagaccctcggtttaaggtatcggaaccggaccattacggtttaaagggcgcgaaggttggcccctaagatggacttcgggcggagtttcctgaagaaaagatccaaactacgcaaagggtggaaccgccggttgataattgatccgttggggcccgaccctattcccgcggaagaccataccccaggcatggcttggcaaaattggtacc

SEQ ID NO: 13492 - DNA, 406 bp, Glycine max
  Clone ID: PAT_MRT3847_112190C.1
atcttacaaggaaacctaggagggtgcccagggaggtagttcgccatactaacgctcataggaataggtctccaggattaaccaaaataacaatgatatcgcagattattctgaactaagaggaccatactgcgattgagctacaaaggtagaaagcatatttcatatgtaaaaatcatggcataactgaacaatgaataagggccactaaaaagatctaaagtcgagagcaagaataggcacttaacatatccagagtaccacactccctaatagcaggactctagaagctggatgctcccttgctgagaaacactccgccagcaaagctatcgtgagcttctattactgcatctaatgattcatcaagcctcgatcgtctgggccataggatttacatacacac

SEQ ID NO: 13493 - DNA, 553 bp, Glycine max
  Clone ID: PAT_MRT3847_112191C.1
aaacgctttgcagttaaaaaacaaaaatggagcagttaccggcgaaccggagcgaagcaaaacggccgccaccgcaagtgcttcaccagagcgatgtggacgaggatgacgagaacgtgaagcagctcgatgaatgctcttctctctatcgcttgatgcaggattgcgttgttcgaacaaacaggaattggaaagaatgccagacagaagtatatgctttgaaggaatgctttgaaaagagaaagaacgtgcaaggaaagtagaattttgaagagagatttttttttagttgacaatgacaatgaggctaacctctgttctccctagttaatcttcgtggttctactatgatgtacagagtacagacgcttactcctactaaaatgaatgatcttgggaatgatcttgtagtatagttcaattgaaatttgaaagtgattgagattgatcttggggaaagggaacttttatatacagagatatgtgataaacggtgttttctgattggaaataccaaatacgtgttttgaggtgagagcaatcacccccctta

SEQ ID NO: 13494 - DNA, 177 bp, Glycine max
  unsure (1)..(177): unsure at all n locations
  Clone ID: PAT_MRT3847_112192C.1
tnnatgcacgcgtacgtaagctcggaatgcnnnctcgagatncaggnnacgntggtcaagngcgatagnngcaaccagnngctgnngagtcnaatatatccaatgattgccgcctncagtgacttanctnccntttgaagtgctanagcgtcttgntccggncactnaanagttgtt

SEQ ID NO: 13495 - DNA, 224 bp, Glycine max
  Clone ID: PAT_MRT3847_112193C.1
aatcacatgaataatcagagttacatgggaactacgatgacaaggaaggatatcattataaccatataaactattaaacaatcacagttagaaagctcaaagtcctcggatgacacatgggatcacacacttaaagagcactggttagcatcacattcaacatcaacgaactaattacaatcacacatctgatagcagttcagctgttctaacttgaaattaat

SEQ ID NO: 13496 - DNA, 445 bp, Glycine max
  Clone ID: PAT_MRT3847_112194C.1
gggaaaaaaaacagaaaccccttttattattatttaatttgcgggggggcctgggttatttcccccagcctttttttttttttatccaatttcccctggggcacgggtcactcactcccacaaccggggtggaaggcccctttatgaagggaaaactggccccagtcttttcctggtttcggggggtcaaacacaatacccccccccttggggagccccacaacaaacgggctgggtttctggggatgcgcaccaatggccaggggaaaaatccttgaactcgaagttgaaaaaaaataacccgagggaaaacccctccacccccttgggagttaaaaagtattaaattttggccacagttccattaacaaaacgggaatcccccgccgggccataaaaaaaaaaaggtgcctgggaataacccctaaaaactttgggaaccccc

SEQ ID NO: 13497 - DNA, 278 bp, Glycine max
  Clone ID: PAT_MRT3847_112195C.1
tttttgtatgcctttttagtttcaccatcatgggcagggttattcctttttttattttctgggaaggggataaaactaagttaactgaaagggcccaattaaaaaccactttcttaaaaaacaccgtggcttaagaggcgcgattaaataacatgatgacttgagaaagatgctatatctaagcttcttactcaaaaagagccaccagttttttttctctccccgaataatgcatgattaataaagaaaccattcgtgttagcaattagccgattggt

SEQ ID NO: 13498 - DNA, 1027 bp, Glycine max
  Clone ID: PAT_MRT3847_112196C.1
acggctgctagaagacgacagaagggggaagagaggatactgcagcagcaggaggaagttgacactctgataaggagactggaaaagattgaaaaaaaactgtgttcaaagcaagggtgtaaagaggaaaatgagtcaaaagatgtggagtcaagtgggtttatgaggaggctattgcgtgtttacaaaagtgaggatgatcctggaatggtgaagtcaatggatttggacatggatgatcaaaaaccccttggccgcgaggtaaacacttctggtaatgctatgttttttggtgattattatgtttatcaggacctcgttttatcagccttgttagtatgctttgactggtgtaaaagaaaatgctcatgttttttccccctactttcgccaaagggcgtgccttagtacagtatatgaggaagaaggacaaggagaaggggaagatgaggaagtggagaaaggaataatagaggaaaagagagtatgtagtgttgaaaagcctagtggtgcaggctccttgggaaccttaaacctgtctaacacaagtccaaacaaagaggaattttgtttaaaggtaagttcaggggataatgactctagactcctgagaattcaaaatatattcactctgtgtggcaaccatagacagctctcccagcacattggaacaccagtgtccacaaaaaagaggtctgatgaaacatttgagttttctccagccaatgacaaggattccattttcaaaacctccaacaaggagaactttgaaccacatcatgttctaggaaattagctctagttgtttgtactgaaaaacgaaaaagctgtgtactacttgttatgtttccttctggaaatgcgacttattatcaatactatgtattttttgggtgttattttgagtatgtacatagttgtgtactacttgttttgtgttctataaatattttcatgtccgttcttctttgtgctatattgtatcatataatctatttaaactaattttgctcaaatcactttcatc

SEQ ID NO: 13499 - DNA, 203 bp, Glycine max
  Clone ID: PAT_MRT3847_112197C.1
tctcactgcaattttatatttcctccaagaaagagagagagagagatggattcgataccaagggggagaagcatccaccgtccaaaccaccacctacaacgtactttttactttgatacattgccattccttttatctcaccacgaatcttaaggaagctttgctacaacaccgtcatcaatcccttcaacttctcttaccct

SEQ ID NO: 13500 - DNA, 258 bp, Glycine max
  Clone ID: PAT_MRT3847_112198C.1
atttccaatatcacaattgttgagcaaacagtaaccgtacaacttaaaacatctgaaccacataaaaaatactttaactcaaaaaccattttataccctatcaaataaactatatgtcctttactcatcatacttatcaagcttatgaaccttgaattaactcttcttcgcaacattatatctccactcactctgaccattcttttcaatatctttagatttgaacgtacagttctatatcaatatatcctattgttc

SEQ ID NO: 13501 - DNA, 388 bp, Glycine max
  unsure (1)..(388): unsure at all n locations
  Clone ID: PAT_MRT3847_112199C.1
cccacgcgnccgcgaggcncnccagaacccacgncaccgccgcaccagagagaggagggggcnggaganccagaagggagggaanaangccgaacagcngcatacngaggagcaacaagaccccncnaccgagcgccaacaggcagcacaccggggagcacaacacgacaacaagcaaacaagggancaagagaanggcgaaganggccagggaagnaaaanncnggccaggaagnnaccagaaagcaagnacccngnagnncgagganccgaaagacccgcgaagcagnnggaaaacgagaaagcggagcagaaaaaaanggggaaaagacccaggccnaanaaaaacagnnngaaagangccaacggagangggaggaaaggaaac

SEQ ID NO: 13502 - DNA, 1416 bp, Glycine max
  Clone ID: PAT_MRT3847_11219C.1
gagaaaggcaaagagcacctccaaaaaaaaacaataaccgtagcccacacctcctctcagcaaacatctctctttctctgtttcttttattatgttgtgttccttgggggtgcccatgtatgtgggttgaagttctgaatttgaatggaaacacgtgctagtggtgatatgaagatggccatagatgatgctttgaatggcttctctcctgtctccacccctaggattttctggaaatcacgaaggagatcagctagcgggaggaatttagaggtatcagaagatactgctaataaaccacccagcaagcaggaagatactcctccaccttctagtgaggaggtgcagaacacgactccgatttctgagcgccgaaaggctctgtttgaacctttagaacctataatgaatattaatggccgacgaccctcggccgagtctttacttcctcctcctgactttgagtctgcaaactatccgaagggctggctgattggcaagaagagaaaactcgttaatgtcgatgttgttgaaagcatgagaaggattgccatccaagaaatgaacagaaaggacagggaaattgatgggctgaatgaacagctggaggaggattcacggtgtctagagcacttgcaactccagcttgtggatgaaaaaagcaaacgcgctcgagtggaaagagaaaatgcaatgctgcaagaacaagtgaacatgcttatgaacatgttacaagaagcagaacaaatgggagatgaaggcccagatgaaccttaaagtttattattataccgtgtgtgtgtgtgtgtgtgtttgcttgtgtgtattaaattctttttgtaggttttgttcgtcatgtctagttggctgcgcatgtcggatgtctctgcagttataaaaatagagtgcatatattaatatttggggggaaatagatcaaaccgcaatgagcaaactattcgtttatatcgtatatattaagtcttaacttcacctacgttcctctattttctctctctactttatctattacattctgttccaaacaattttcgcaactgcactttactttctcttctgtgccatttggatttcaaattcaatgtttttgttcatttttgcatggaattttcaatattataacatgccctctgccaattcttaattctttcaaaaataaaaataaaaattatctctgtatttacaagatttggaactcagagtctgagactaaggctaattcctttttcaatttaacttcttttctgtaattcctgcaaatttgttactgtttcagatagaggaagcgtaaacacacaggttttaacggttgggtgtgacttttatattacgttggtttattttgttaggatgttgctaacaaataaagcatttaaaagataaaagtttctcttg

SEQ ID NO: 13503 - DNA, 393 bp, Glycine max
  Clone ID: PAT_MRT3847_1121C.1
ggctcgagggtcgagatagaacatataaatcatcttacctttacaaatacattctttgaacttatggggtgagttgaattataccttcaaaaactaaccattcccttcactactgctaaaaccaaatcttgtctacacatacctctatgatcaacatcgtgcaagatcatcagccttcctatgatgaggtttgggagagatcacacagcatatcgaggaggtgagattacatcgcgtgccctgattaacaaaagatatgatgatgagaagcttacagggccacaaaccatgggtggggatcataacacgatgttgcgagctgaatatatctccccagacgacaactcgtaaaaagcctgtactaaactctatataaactgggaccctggtaag

SEQ ID NO: 13504 - DNA, 1435 bp, Glycine max
  unsure (1)..(1435): unsure at all n locations
  Clone ID: PAT_MRT3847_112200C.1
ggccggcgtccgacggctgcgagaagacgacagaagggggacatcaacaatttgttcacttgcaatttagaacgggcgcagacaagagcacaagcacaacacaacacaacacaacatcctccaggaacgggaatcccacgccgcttgtaactccatctcggtgtttgattctctgcttcttccttcattccccttcggaatcgatcgatccatcttcctcttccaatggcaacccctaccgacaataataacaaccctgcacaggaaaaccctaacaaaaccctagaccccaccgaaccagatccaatccctgccactgaggacgccaccgccactaagggctccgacgccaaggaccccgccgacgccgacgccgacgccataacttctccgccgcccgattccggaaacgacgctccgctctccgatattcagaagaagatgcgccgcgccgagcgattcggcatttccgtccagttgtccgagaaagagaagcgcaattcccgagccgaaagatttggcactgtctccgcatcgcagggatcagagccatcaaaatcggaggatctgaagaggaaggctagggcagaaaggtttgggatgcctagtccaactacaactgcagacgaagaggcaaagaagaaagctcgacttgctaggtttgcacctgcttccaaagttgatcctcaagaagaagataagaggaaagcaagggcaccttaggtttgcgaatccgtcatcaacttctatagctaatggttaatggcgaggcaaagattgagccggctgctattgcaggcaatgctggaggagggacctgaatgacaggtcgcgtctttaatttgtaggaatttttctttttttagcagttcaaaatttgcagagcaacctccacaccgtttctcatttcagcatttatcccaatgcgactatttctttgttcattgatgccccctctatgaaggaaatattcaagtggtctgaagaagcttgtgttttgttttgttgtagcgttggctttataggtgacaagcttttggggtaattattggccatcttcattagggttacttatcttaaaaatctttgaaaaattgaattttggaatctacagcctaaaagaagttaatagatgaaggtatgcagaaacaagactttttcttgatttgtttcatccttattaacggtctttaatctactgcttttgaaatgtgcattatcattatcactgtgctaaaaggttgtacgaagtaggttttttttaatccaacatcatgctgatccagaatgaagtaatgttagggtaggtttttgttgtttgatatgtcttggaaggagtgatgattaaatgaggaaataggctctcaaatagaatatagcatgtacgtangattaacttgtttctggttaatgctatacatcttttgggcattga

SEQ ID NO: 13505 - DNA, 978 bp, Glycine max
  Clone ID: PAT_MRT3847_112201C.1
taggtttgtacagcgtttgctttgggggcgaaaaattcagccttttccgatttgcaccaaattcaacagagaacaacaccatttggtcagtcttctatgcttctgcctccaatctagggtttccttttcctgaattgttattctcttcaattgatgcggttcgatttgaaaggattgagggggttgtttgttggaattggactcaaaattagggtttgtgttttaggatcgtctcgtgtgaatcgattctgttagccggagttgttggctttgtttattcggtgcgttttcattgttgcgaattgttttcgatcaaatcgatcccctctatagcatggtgtcattgcgtcgtcgttgttgtctttcacatgtaatagaccccaaaaatttgcttctttctgttatcccccccgaatctgttatgttagactttgattaggttgttgtatgctgctgtggctgcggatcgtatatggtggaaactgtgtaattggtgtggcagtggtttgattctgtaattttatagggattcgtatgttctatccacactttttgtctccctggttaaatgctgaaaactctatatatcaactaacatatgtaagagagaagctattgcacagtgagagtgtaagatgaagaaaagagtaaatcttggccatatagttgcatacggatgttcaagggtagtgttaatctagtttttatcttagccatccgttttaattatatggtctgagatttgcttctttcaagcactcatctttcacctggttcgtcatctgtgaaaaatatatgatgttaagaatgttgttgaaagggaatattgaaaaattgtggggtcagtactggcttctttcttttgaacaaacgtttttcattgggaaggcccctctctgttttatttgtggattggaggataattattggttattggtatacattttagtaaaatctactacttgccattctatgggc

SEQ ID NO: 13506 - DNA, 2431 bp, Glycine max
  Clone ID: PAT_MRT3847_112202C.1
ggtcttcggctcgagctaagtgcaatttagaacaggaatcccacgccacttgcaattccatctcggtgtttgattctctgcttcgtcctttcattcctcttccgaatcgttaatcgttcgatcgatccatctcccgcttccaatgacaacccctaccgacaacaataacaaccctgcacaggaaaaccctaacaaaaccctagaccccaccgaaccagatccaatccctgccaccgaggacgacgccgccgccgacactaaggactccgacgccaaaaattccccgccgcccgattctggaaacgacgctccgctctccgatattcagaagaaaatgcgccgcgccgagcgattcggcatttccgtccagttgtccgagaaagagaagcgcaattcccgagccgaaagattcggcactggttccgcttcgcagggatcagagccatcgaaatcggaggagctgaagaggaaggctagggcagaaaggtttggaatgcctagtcctactacaacttctgacgaagaggcaaagaagaaagctcgacttgctaggtttgcacctgcttccaaagttgatcctcaagaagaagataagaggaaagcaagggctcttaggtttgcgaatccatcatcaacttctatagctaatgttaatggtgagggaaagattgagccggctgctattgcaggcaatgctggaggagggacctgaatgacagtttgcgtctttaatttgtaggattttttctttttttagtttttagcagttcaagatttgaagagcaacctccacacagtttctacttttcagcatattaatctcagatgtgcctatctttcatttgttcactgatgccctcctctatgagatggaagagattcaagtggtctgaagaagcttgttttttgttttgttgtagcgttggctttatagatgacagcttaaaaatcttcatagggttacttgtcttaaaaatcttcaaaaaattgaattttggaatctacagcctaaaagaatttaatagatgaagatatgcagaaacaaaactttttcttgattagtttcatccttatcgtggtctttaatctactgcttttgaaatgttccttatcattatcattatcattgtgctaaaaggtagtacaaggtaggtttttttttatccaacatcatgctgatccagaatgaggtaatgttaggataggttttgttgcttgatatgtcttggaggagtgatgattaaatgagaaaataggccctcaaatagaatatagcttgtttgtaggatgaacttgtttctggttaatgctatacatcttttgggcattgaggggaagaggggttagagttaagagttaacatttcatcatccataatcttgaatcacttttttttcttttggttttacaatggtgttttgggggtagtgttctttaggttgtctgtcaaattggctgatggcttgtgtttgaaattgcttttcctcaatcctagtctcctttaggttgtttgttagtgttttttgcttcattgtttttcgatcttatttgaaagtagcttttaaagcacatcacgttgattagaagcatgtttcttgaaaaggggataaatatactatgtttgggtaccttgtggaaatgttatcatgtttggtatagagctattgcactactttactttggatcggcagaaatgttgaggctcaagttcctggtactatcttctggcactcaagaaaagagttagctgaatgttttggtggggctgaattctgtatgttttcaagtcggttttaaaactcggtttattttcaaggctgtagcttccaatttttattatctttactgtcaccttaagataagttaaaccctttgaagtttgaagatgtttcgttgtttacttggttgccaaaattcggaattgtacatttgtagggctggatgtggagggaactctttactttttgttgtattattaccctgtaatttattttaagctttgtttgttctaatgtttggatgttatatattttgctagcctagtattggatgtggaggggactccttactttatgatttattattaaactgtaatttatttttaagctttgttctaatatgtttggatgttaagatattttgctagctagtataaatgaatggaaggaccgatactttatgcgataaaaaaaaaaaaaaaaaaaaaaaaaaaaaaaaaaaaaaaaaaaaaaaaaaaaaaaaaaaaaaagattatacaacaaaaaaaaaataaagaataaagtggggggaaactatttaaggagtgctgcgggctcaataatttttcctgtttcgaaactatttacagctaggagttttttttatcttagctgcttttagggtgagaaatttaatgcatattatgtttattgaaaaaagaactttgttgctg

SEQ ID NO: 13507 - DNA, 399 bp, Glycine max
  Clone ID: PAT_MRT3847_112203C.1
gtttgcataaagacagagggttaattgtggagtatcttggaaggatgtcttacgctgctcataacattaatcagccccaagagaaagatttgttggcgggaaacgcttccttcggtattaaatgtcgctatagattggaaaaagcactctctacaaaagcacagtttgatagtggcatgaccttcatatatgacataattggcgctggtttacattctttagaagactttcctgaaatggacgatcaagataaacccaaaaagattgatgccagattgtgacaaagaatagatccttaacatcaatgtggttcaagctcagattggaacacatttgccgtaattgtttattgatgatgttgaaactaccaaaggttccatgttggatctgacaatttct

SEQ ID NO: 13508 - DNA, 331 bp, Glycine max
  Clone ID: PAT_MRT3847_112204C.1
caccataaacgcacctaaaaaccaaatctccattaccgatctgtctgttgacaaaaccccacatatcgacatgactatttaagaagcttgagacaaagttaaacaccaatatgcggagagttcacttgccgtatcctgtgtggttgcataggttggctcaactcgcatgatctcaacaattgataagcttactttaattgctgaggttcttgaagtcgtaggcatcgactacagcgggtggtttgcttacaagaacctatttttcaagcctgacacggaagcttttctacgacaggtaaaggaaacatatatcgaaatacttggaagcagc

SEQ ID NO: 13509 - DNA, 424 bp, Glycine max
  unsure (1)..(424): unsure at all n locations
  Clone ID: PAT_MRT3847_112205C.1
acggctgcgagaagacgacagaaggggatgactgaactttgaagtataccgattctgggaaccatcagaggaagcaataatgagttccaaaggcaaagtgatgagagtgagagaggtggctgggtgaaagtgaaggagctcagagagatcacagcaagattaaggatagtggagtgagtaaggtttttggccaattagtgaagaacacaatgtgttctttttttgcaggcattttggttagagatacaatacaagaagtgttcttagttacttcttagttcctacacatacacacacaacctgtgttaagagagagagacattgagaggaagcaaagcatggtactcttgaataaatggggccctcatagagaagtgtgggccccacacaccgnccatgcgcacgctgtatttcttaccaatat

SEQ ID NO: 13510 - DNA, 686 bp, Glycine max
  Clone ID: PAT_MRT3847_112206C.1
ccaacattgaactacttcaatttttaacgggaaaaaaaaacacattactaaactcccaagtcccaatacccattattttacgcaataattcccataatttatatacaatacaagccgtgtgacacagcttgatagttctatattaccacaaaattcgaataaaccaatgtttgttccaaccaatcagcattttgaacgaggaggattcagacttagtttcgagaaatgccacaatatctctttaaccagacaaaagagcagagagggacaatagacatcaaaatgacaccacggactgtggatgagttgaagattgcagctgagatagagcagtatcactttcttcgttctcatcaaaaggaattgatttgccacatgtatccttcctttgagagatgacagtctcctcagataatgccttctctaacctctcttcaaatgatgttgcatgccaatttactttctgatcttctttatacttattggttgaatttggtatgccgttaccatcccaccacttcggaggaggagcttgagaatccccatccttgttccagtgagctgcaaccatcccaatgataggcctatcagcaggtgttttgcggacctgattataactggtctgcattctcttgtttctctcctccagaatgacagctgcaggcttcaaccaggaagacaagctt

SEQ ID NO: 13511 - DNA, 607 bp, Glycine max
  Clone ID: PAT_MRT3847_112207C.1
tgcttgcattattattctcaagcattaagcatgcctggactttggtacgtgcatcatgacttttaagaagttacatgaatattttgactgaggacttcttgcttaaggtttcttatttactcttctatgttgcttttagagaatctagagtaagcattgtccatctttaatgcaggtagatgcagtggtctacttggtagatgcatatgacaaggaacgatttgcagagtctaaaaaagagttagatgctctgctctctgatgagtctttgactactgtccctttccttatccttggaaacaagatagatattccatatgctgcctcagaagaagagttgcgttaccatttgggcctgaccaattttaccacaggcaagggaaatgtaaatttgtcagactctaaagtccgtcctatggaggttttcatgtgcagtattgtgaagaaaatgggttacggagatggtttcaaatggctctctcagtacatcaaataaatagtccatgtagtcagagatggcttggtatccccgtttctagatgcttatttctatagttatgctatagaaatgtttttagtacaaattgctgttaaacattttttttag

SEQ ID NO: 13512 - DNA, 465 bp, Glycine max
  unsure (1)..(465): unsure at all n locations
  Clone ID: PAT_MRT3847_112208C.1
tcgaggcgtgcgagaagacgacangaaggggggagtcaataatattaagaagaattcaggggcaatggaagtcaaaaaaacctgcaatgtaggataggattaaggcaccgataaacgaaatcttccatggataacctacccatactaagaaaaaagggagagcagcnnttacttagggggtggaatctgggttccttactaacnntagttaaattacccgaagaagnaaaccttctttataaggagaaaactgannaccgaaactcccttttcaaggggaaagaaacagcgggananccttgattaccgcacncnntggcttacttttcttcgtttagttacctgganaaagcgttgatgananncaatcttccttaattttaacaactcaagaattcctcctgcatgggcttgaagctnatccannacttcaagcttaagggggctttcggaaattcccttttc

SEQ ID NO: 13513 - DNA, 1132 bp, Glycine max
  Clone ID: PAT_MRT3847_112209C.1
caagcattaagcatgcctggactttggtacgtgcatcatgacttttaagaagttacattaataccccgactgaggacttcttgcttaaggtttcttatttactcttctatgttgcttttagagaatctagagtaagcattgtccatctttaatgcggattagccggtcacccttcccttcccacaagacccacagttctacttccacagccatcgaaatggttacagcagcacagtcactctttctatattccttgctttctgctttcatcttcactctgtttttgggggtcagatcttaataccgaaggcttcgtattctgtttgaatattgatatctattgggagtggagtagtattgagatcgagcgtaaaagaaaggcgatgtttttgtttgattggttttatgggattctggcatcgcttggattgtggcagaaggaggccaagatcttattcttaggtctcgataatgccggaaagaccaccttgcttcacatgctcaaagacgagagactagttcagcatcagcctacacagtatcccacatcagaggagttgagtattgggaggatcaagtttaaagcttttgatcttgggggtcaccagattgcacgaagagtctggaaagattactatgctaaggtagatgcagtggtctacttggtagatgcatatgacaaggaacgatttgcagagtctaaaaaagagttagatgctctgctctctgatgagtctttgactactgtccctttccttatccttggaaacaagatagatattccatatgctgcctcagaagaagagttgcgttaccatttgggcctgaccaattttaccacaggcaagggaaatgtaaatttgtcagactctaaagtccgtcctatggaggttttcatgtgcagtattgtgaagaaaatgggttacggggatggtttcaaatggctctctcagtacatcaaataaatagtccatgtagtcagagatggcttggtatccccgtttctagatgcttatttctatagaaatgtttttagtacaaattgctgttaaacatattttgttcttagtacaaagaaattgctgttaaatgaaaatgacagttttccctttctttcaaaaaaaaaaaaaaa

SEQ ID NO: 13514 - DNA, 143 bp, Glycine max
  Clone ID: PAT_MRT3847_11220C.1
cgtgtatcgaatattagtgcaggggtaaatcatgtagttcagatatccctattggcataggagtacattctgtgcttcttgtgcaagggatcgcagaattacgatggtttttaagaatatgtatcctcaagctattgcaatgc

SEQ ID NO: 13515 - DNA, 991 bp, Glycine max
  Clone ID: PAT_MRT3847_112210C.1
tacggctgcgagaagacgacactcgagccgaatcggctcgagctaaatcgttcaacctcacacccactcctccgatattcttttctgctttaatcttcgctctgttttcgggggtcagatcttaatgccgaaggcttcgtattctgtttgaattttgttatctattgggagtggagtagtatttgagatcgagcgtaaaatatataaaaataataaaagaagcaaaggcgatgtttttgtttgattggttttatgggattctggcatcgcttgggttgtggcagaaggaggccaagatcttattcttaggtctcgataatgccggaaagaccaccttgcttcacatgctcaaagacgagagactagttcagcatcagcctacacagtatccaacatcagaggagttgagtattgggaggatcaagtttaaagcttttgatctcgggggtcaccagattgcacgaagagtctggaaagattactatgctaaggtagatgcagtggtctacttggtagattcatatgacaaggaacgatttgccgagtctaaaaaagagttagatgctctgctctctgatgagtctttgactactgtccctttccttatccttggaaacaagatagatattccatatgctgcctcagaagaagagttgcgttaccatttgggcctgaccaatttcactacgggcaagggaaatgtaaatttgtcagattctaatgtccgtcctatggaggttttcatgtgcagtattgtgaagaaaatgggttacggagatggtttcaaatggctctctcagtacatcaaataaatagtccatgtagtaagagatggcttggtatcctgtttctagacgcttattcctatagttatgctatagaaatgttgttagtacaaattgctgttaaacatttttttttagtacaaaaaattgtttaaagaatattttattaaaagaaaatgacacttatccctttctttcacctgtcc

SEQ ID NO: 13516 - DNA, 678 bp, Glycine max
  Clone ID: PAT_MRT3847_112211C.1
gtggagggaagagtacatccaagagacagaagaatggcctcaaaatcatccaccattagacttctttgtttctgctacttcatgctcttcagctttatgcatttcagcagctgcactgtgttctcattgaaaagtcatgcaagcacatgcaatggttccatagctgaatgcaatcaagaagatgagctgttgatggagtccgaaataagccgaaggtttttggagcagaagagatcatacatttccaatggagctttacagagagataaaccagtttgtaatggtggtggctctggtgaagcttatagtaaaactggagggtgtcttcctccaccctcaaatcctcaaaatagaggctgctctaagtattatcgttgtaggtctgactcttgattgcatcttcatgcaaacatctttaagggtgttcatgaatcatgccttttcacataatctttaagttgtccattaaatttgatggtaatttacttttgaatttgaagttgtatgaaaatttccaaaaggttctctaataactaatactgtgaatgaagaattcttattctgtggtcgtaggtaatcaattctgaataagtgaatattaagtgcaatagccaaagatcaactgctatgattgtatcaataatttcgattctttttatctcccaactctttctttgt

SEQ ID NO: 13517 - DNA, 859 bp, Glycine max
  Clone ID: PAT_MRT3847_112212C.1
atggaaaataacataatttccttgttgtccaaaaggtttggtgaagtgcgctctatcagcttatcactaatgcaacttgcaccttttcaaaaaggtggtgtcatatattataatattctctatatagtgcttcttagtggagagtggaaggaagggtacatccaatccaagacacagaacagaagaatggcctcaaaatcatccaccattagacttgtttgtttctgctacttcatgctcttcagctctatgcatttcaccagctgcaccgtgctctcattgaaaagtcatgcaagcacatgcaatggttccatagctgaatgcaatcaagaagatgagctgttgatggagtctgaaataagccgaaggtttctggagcagaagagatcatacatttccaatggagctttacagagagacaaaccagtttgtaatggtggtggctctggtgaagcttatagtaaaactggagggtgtcttcctcccccctcaaatcctcaaagtagaggctgctctaagtattatcgttgtaggtctgactcttgattacatcttcatgcaaacatctttaaggttgttcatgaatcacgccttttcacataatccttatgttgtccattaaacttgatgggaacttttgaatttgaaattatatgaaaatttccaaaaggccctctaataactaatactctgaaggaagatttattatcctgtggcagtgagtaattaacactgaatagtgaatatcacactactgcttgcagattaagtgcactaaaggaaagatctatgattgtattaattatccgtttcttgtcaaaaaaaaaaaaaaagggcggccaacaagactagtgagctc

SEQ ID NO: 13518 - DNA, 534 bp, Glycine max
  unsure (1)..(534): unsure at all n locations
  Clone ID: PAT_MRT3847_112213C.1
ctttggcctctgcctggattcacctgttggttgttgatctttttgctgcaaggtcattcattttatcttaatcttggtttctcattcntttannnattattttntnntatgatagttatcatggntnntatgaattcaggcanntattttccaagatnggannctgaagaaatccanaatnntgaaaaacttncnccggngnnnncccnncaaannnntnnnnnnnnnnnnnnnnncccccncnnccnnnccnnnnnnnnggggnnggnnnnnnnnnnnnnnnnnnnnnnnnnnnnnnnnnnnnnnnnnnnnnnnnnnnnnnnnnnnnnnnnnnnnnnnnnnnnnnnnnnnccccnnnncnnnnnnnnnnnnnnnnnnnnnnnnnnnnnnnnnnnnnnnnnnnnnnnnnnnnnnnnnnnnnnnnnnnnnnnnnnnnnnnnnnnnnnnnnnnnnnnnnnnnnnnnnnnnnnnnnnnnnnnnnnnnncnnnnnnnnnnnnnnnncnnnnnnnncnnnnnnnnnnnnnnnnnncncc

SEQ ID NO: 13519 - DNA, 700 bp, Glycine max
  unsure (1)..(700): unsure at all n locations
  Clone ID: PAT_MRT3847_112214C.1
cacgcgtccgaacaagtaagagagaggtgtgcgcggcatacctgcctcatcaatgacactgtctagtgtctatagtactcacttgctccagcacactggcaagacgatcaagctctctgagcatgttcctgcttctcctgtgagacacaaatcaggatcacacaagcaactgaaacaagagccatatgatatcacagtgctaaacaaacctgatagaaccaaatactaataatgtccacttcgaaacccatatccccttttcgactcacctccctcctccgttccacgaaagacccctccctcgccctccagctcttcctcaaccctaaccctaaccctaatcctaaccctcgccccctgcgccactccctccgctcctacgatctcctcatcaccaaactcgcccgcgccaaaatgttcccccaaatggaacaaatcctccaccaactccaaaccctaacccaattccccgtccccgaacccctcctctgccgcgtcatcatttcctacgcacgcgcccgccttccctcccgcgccctgcgcaccttcctctcaatcccctccttccgctgcacccccactctcaagtccttcaactccctcctcccgcgctcctactctgccnggacttcccttnccttccgcgcctttctccgcgcctccggcacttttcccgctccgggcccgacgcctgcaccta

SEQ ID NO: 13520 - DNA, 263 bp, Glycine max
  unsure (1)..(263): unsure at all n locations
  Clone ID: PAT_MRT3847_112215C.1
ccacaatagagccacgtacatcanatttgggacctgtgaatccatcaaatgctccttatagtcaagacacgaccactgatactatgtccttaaacanagaaatgtttggnaattngcccaactcattgcaagacactcctgctgctaacattagagccacatgcatcnaatttgggcatctgtgattccatcagatatttctgnnngcagggggaggcccaagaatntagtngtttctcgtgcncccaangnnctcgggtngg

SEQ ID NO: 13521 - DNA, 395 bp, Glycine max
  Clone ID: PAT_MRT3847_112216C.1
aagggaaaacaaaactcaaccaatcactgatacaaaatcagcaatgtactgatttaacagtaattacacttccaaaaacaattcctgaactgaattcctccacttcaccacctatgcacaagaaacaatgcccaaaccaatattccaaacaagttaaaaaaaaaaactgaaaaaccaatatcagtacccgagcactatgccacaaaaacgaacaaatgaaacgacctttatatccttccgtcaccaccgtgcaccgccgcaccaaccttcgaatgcgaaaccggaccgggtgcgtgaaccagataaaccggttgaccaaccggcccagtaacgggccgaaccgcttgaaacattccagaaggagtctgaatgagataaatctcattccccgtagt

SEQ ID NO: 13522 - DNA, 368 bp, Glycine max
  Clone ID: PAT_MRT3847_112217C.1
ctagaattgaatggataatgcatacagaggtactgatgactacgaaaatggtaatgggtgtccgagtgcggcgaatctgagtgatagttcaaaggaacttgtgaggtacactctgatctctaactatgaccatctaagtctttcttcccagatggtctcctgccttctaatagatgacgcagcgcacccatgttcttgacactcactatcacaaccatacggtgtgcgactgtcaatttgtattccacaactgcttctgctgcttacagacagtgctgttctgtttttagtggaggaggccgcactttatcagggtatcttcaaataagccaatcaactgacgagtcaaattgtcaaattcgttataa

SEQ ID NO: 13523 - DNA, 271 bp, Glycine max
  Clone ID: PAT_MRT3847_112218C.1
cttactatctggtgaatgaatgcactacatatgatatatgattgcatcatagaccttttctgaacatttcactcgatataaactctgggactgagatgatagctaccgggatcttaacttggccgaaagaaaatgagttatgactgcacatacagacaaactatgggagttttagtttgataatagtgagatactgaaagaagcatgatgtgtttggataatactgattgttgaaacacaatcaaggaggtcgaccccatgtaagatacct

SEQ ID NO: 13524 - DNA, 313 bp, Glycine max
  unsure (1)..(313): unsure at all n locations
  Clone ID: PAT_MRT3847_112219C.1
gttcangacncgtacgtaagctcggaattcggctcnaggcnnaatttgagtaatatgcnnattanccggnanatttnacgacggcagatacaaantntggactanaacacnatnannaancgtgctgtaannngaagagagaanaatatggaaggtggttaaaaannagaggcangtcnagcngatgtncnggcaaagcgagntcatnaanttgaaaaacannggggtcatnaaatcctnaaggatgcaaattcngngtannngnaangtggattctactagggttnngaagggtgnaaagatgataagccnt

SEQ ID NO: 13525 - DNA, 821 bp, Glycine max
  Clone ID: PAT_MRT3847_11221C.1
ttgggaccgctaggagaggctgaagctaatcatgatggtcccatacaattatcagcatctgcgtgtgagttgttagagacaagaaaaacgagacctttagatggccggaagatcaaaaggagaaagccaaacagcagctcctcagcaaattaacataatattcctcgcgggggggtatacttttattattcggtccggattcccgggtcgacccacgcgtccggaagttctgaatttgaatggaaacacgtgctagtggtgatatgaagatggccatagatgatgctttgaatggcttctctcctgtctccacccctaggattttctggaaatcacgaaggagatcaggtatatattaagtcttaacttcacctacgttcctctattttctctctctactttatctattacattctgttccaaacaattttcgcaactgcactttactttctcttctgtgccatttggatttcaaattcaatgtttttgttcatttttgcatggaattttcaatattataacatgccctctgccaattcttaattctttcaaaaataaaaataaaaattatctctgtatttacaagatttggaactcagagtctgagactaaggctaattcctttttcaatttaacttcttttctgtaattcctgcaaatttgttactgtttcagatagaggaagcgtaaacacacaggttttaacggttgggtgtgactttatattacgttggtttattttgttaaggatgttgctaacaaataaagcatttaaaagataaaagttttctcttgtaaaaaaaaaaaaaaagggcggccgc

SEQ ID NO: 13526 - DNA, 276 bp, Glycine max
  Clone ID: PAT_MRT3847_112220C.1
gacccactcgtacgtccggaagaagactcttcagaatttatttccattcactaactcctcatataatcgtcggcctatttcacatacacgcacggcataaatttaaattaactatatactaatttcatttcccaccctcaaacatctttctttttctgaaaagatgttcttatttttttaccgtgcctgtctctaaatcacatattattacacacacttaaaaacaagaacaaagaacaccctcatgacaatccttataagaatgaaaattacttc

SEQ ID NO: 13527 - DNA, 101 bp, Glycine max
  Clone ID: PAT_MRT3847_112221C.1
aattcagacactgactgaaatctcgtctccctcttacttgtcttattgactgccatgtatcttcaatagcctttagtggtgatagacaaaggtgggatttg

SEQ ID NO: 13528 - DNA, 489 bp, Glycine max
  Clone ID: PAT_MRT3847_112222C.1
tacggctgcggaagacgacagaaggggatagacattgaggtttaacctcagtcaccagccctctcagattttcacacgcgcctcaaacgctttcacttctaacatctgcaggagctagtttccatggaaggtttggtgagttctgggatcagcacggttcgtgtttttggcattacaaaacaccaatctcgttttcttccttcatcaactctgcatctgaggaataacagtgtgtgtggatttggaattggggttgagaagaagaagaagaaacagtgtttcgttgtggctgcttctgttggtggctccaaagtggtccattttgagaacacactcccttccaaagaggttcttgagctttggagaaatggtgatgctgtgtgctttgatgtggatagcactgtgtgcttggatgaagggattgatgagcttgctgaattctgtggggctggaaaggcagtggctgaatggactgctagagcgatgggt

SEQ ID NO: 13529 - DNA, 281 bp, Glycine max
  unsure (1)..(281): unsure at all n locations
  Clone ID: PAT_MRT3847_112223C.1
gcataacttactatntntatgcggantgntgnctatantttggctgnanttcgnagtcaggatacaatgnanactgtgnannaaagggtaattatttgtatttgggttngtnggtaattgatgatgntaggnaaaacantttgggtgtncagnaantggaaatgatgctancgtggttgcntgacttggaattatgtgtntctanacaaaatgaatggcatcattcantggatgattggacagnnatggagattaaactatgcagacagatantngntgaa

SEQ ID NO: 13530 - DNA, 1438 bp, Glycine max
  Clone ID: PAT_MRT3847_112224C.1
ggatggtgcacctgcttctgccgctctcaaattttcacacgcgcctcaaacgctttcacttctaacatctgcagaaggtactcaataagattcatacactctcgaatcacaccctttgatcctaaattctagcaccctttatcctctaatgggattttgataaatcaacagttttttttttttttgtccctggatttggaaaacagctagtttccatggaaggtttggtgagttctgggatcaacacggttcgtgtttttggcattacaaaacaccaatctcgttttcttccttcatcaactctgcatctgaggaataatagtgtgtgtggatttggaattggggttgagaagaagaagaagaaacagtgtttcgttgtggctgcttctgttggtggctccaaagtggtccattttgagaacacactcccttccaaagaggttcttgagctttggagaaatggtgatgctgtgtgctttgatgtggatagcactgtgtgcttggatgaagggattgatgagcttgctgaattctgtggggctggaaaggcagtggctgaatggactgctagagcgatgggtggttctgttccgtttgaggaagccttggctgctaggctgtctttgttcaatccctctttgtcccagcttcaggattttcttgaacaaaagccaccaaggctttcccctggcattgaagagttagtccagaagttaaaggctaatggcatagttgtttatctgatctctggtggcttccgtcaaatgatcaatcctgttgcatcaatacttgggattccacaagagaatatttttgccaatcaactgctatttcgaagctctggagagtttctggggtttgataaaaacgagcctacttcaaggagtggaggaaaagctgttgcagtccaacaaatcaagaaggctcatggtttcaaaactttaactatggtgggggatggtgcaactgattttgaggctcgtagacctggtggtgctgacatgttcgtttgctacgcgggtgttcaacttcgaaagtctgttgctgcaaaagctgattggctagttttcagttttaaagacctcataaattcgttggggtaatgaattttcttttctttttttttttctttttttcatttgtttccttctgagccggcctgaggagtttcctgtattttaagaggatgggaatgcagtccccatctccctgttttgatttttttttttggacttacgttttattgatttatttaatttataaaaaaatatttaggggggccattctctagacttgactttcaagtgtagagaaatctttcggatgatagaagagtgagaaatcgaataaatgtacatttgatgtcttttcttactaattgcccttaaattttattcttggggggttttaaaaaaaaaaaaaaaaaaaaaaaccaaaa

SEQ ID NO: 13531 - DNA, 482 bp, Glycine max
  Clone ID: PAT_MRT3847_112225C.1
gccctaagtccccaactacgccattcattgcttgtgttgggagctgttctgttttcttctccacttcaaatcagcgtctcagtttcaaagcaaacatcgacaacaacaaactagaaagaaagaaaggaacacgaaacctcaaaaaagcagaacaccatgaagtttcggtacgcgatggtgtgttcttcgaaccagaaccgaagcatggaggctcatttcctgctcaagaggcagggcttcgacgtgtcctcgtacggcaccggtgcccacgttaagctccctggtccttccctcagagaacccaatgtctacgacttcggaaccccctacaagcacatgatcgaggacctccgcagaaaagaccccgatctctacaaacgaaacggaatctttccaatgcttaaaagaaattcaacagtcaaattagcaccgcaacggtggcaagaaaatgccgctgatggttcctttgatgtggtaagtac

SEQ ID NO: 13532 - DNA, 279 bp, Glycine max
  Clone ID: PAT_MRT3847_112226C.1
tcaagatgtggatatcaaagttcttaagccttgaggcatgagtacagatatgataagggagtttacagaggaagtttaggtcatgaagaagattcggcacaataatgttgttcacttcattagaggatatactaggcgcccaaatctatggatagatactgagtttatggctagggggagcttatatgactttctgcacagacaaagacgtgtatttaagcttcgatcattggtaagagtagcaactgatgtttccagaggggtgaactatttgcacca

SEQ ID NO: 13533 - DNA, 257 bp, Glycine max
  Clone ID: PAT_MRT3847_112227C.1
cccactctgaaactgctaatgactcgggaaatgatttattctttgcttgatattctccactactcatatcaccatattccatttacaacttatacactcaacaaaccccgtcatcttataaacgatgcatctatttgataaaatgtccacacatgctatatctgttgatatcatgattcatgattacttgtctaatcgcaccatcttttttccgcccacaatatttacatattcttggcctatacactttccataca

SEQ ID NO: 13534 - DNA, 404 bp, Glycine max
  Clone ID: PAT_MRT3847_112228C.1
caaaaggtacaaccaaaaaaaggcttgttaagatttttcagggagtggaagcatgttctgaaatttccttctgtcattgattgttctgtttgtatatatgctacgcataaaagtaaacttggcttctctcaaaagcctctaagggtgtatttggttcagaggagaaaaatagaagaattttttttaattaaaatagaatggaagaggtgtgagtctcaaaataaaatacaaaatttctcttgtatattatttctctcctccaaaacaaatacaccctaagtgagaaggttcacataggtaaattgttggcagtaaatgttcacattctgtacggtgcaaaactcacatatgtaacttgtatatggcatcagattatttgagctcagtaaaaaataagtagtttt

SEQ ID NO: 13535 - DNA, 829 bp, Glycine max
  unsure (1)..(829): unsure at all n locations
  Clone ID: PAT_MRT3847_112229C.1
ggctcgagcttctcttctctttctcgagccgctttggcatgcccttcacaatgcagagataacctctccctcttccctctcatattcttcgcttttttccgaatagccataggtcaaaataatctgtgaacgactgcacctgacaaaatggctcaagccaaatatactagaatagataataataataagcgaccgtcgagttactgttcaacagtgactattgtcgtgtttgtagctctttgcttgtttgggatttggatgatgacatcgtcatctgttacgcccgtgcaaaatgtagatgtgtctcaagagaataacaatgaggtgaaggaacagagtgaggcgaaggaacagccaactgacccctctaataacaattctcagcagtttgaagataatcggggtgatctgtctgaggatgcaaccaaaggggatggtagtgtcacccctgctacaaactatgacgtgacagaaaaacaggacgagaaatcagacgaaaagtctcaagaaaaaccttctgaagatacaaaaacagaaaatcaagattcaagtgtgagcgagaagagatccgattccgacgagagcgagaagagatctgattctgatgagagcgagaaaaagtctgattctgatgagagcgagaaaaagtctgattctgatgagagcgagaagaagtctgattctgatgagagcgagaagaagtctgattctgatgagagcgagaagaagtctgattataatgagactgaaaagaattctgaatcanatgactcgagtgaaagggagaaataatctgattcagatgaaatgaaaaagagtctgatgatgc

SEQ ID NO: 13536 - DNA, 742 bp, Glycine max
  unsure (1)..(742): unsure at all n locations
  Clone ID: PAT_MRT3847_11222C.1
ccacgcgtccgattttcctttgttgtgcaaatttactgtatctaaatgatgagctgccaaaaacaaaaatggtaacttgttccccacagctagcgggaggaatttagaggtatcagaagatactgctaataaaccacccagcaagcaggaagatactcctcctcctcctcctccaccttctagtgaggaggtgcagaacacgactccgatttctgagcgccgaaaggccttgtttgaaccgttagaacccataatgaatattaatggccgacgacccttggctgagtctttacttcctccccctgactttgagtctgcaaactatccaaagggctggttgattggcaagaagagaaagcttgttaatgtcgatgttgttgaaagcatgcgaaggattgccatccaagaaatgaacagaaaggttccaagtttcctcaacaccttcacttccaaacaaagacacaattatactgagccacctgctcattttgttgttgttgttgttgtaattgttgcttgcaggacagggaaattgatgggctaaatgaacagctggaggaggattcacggtgtctagagcacttgcaactccagcttgtggatgaaaaaagcaaacgtgctagagtggaaaagagaaatgcaatgcttcaagaacaagtgaacatgcttatgaacatgnntacagaagcagaacanatgggagatgaaggccctgatgaaccttnnaagttattattatacc

SEQ ID NO: 13537 - DNA, 341 bp, Glycine max
  Clone ID: PAT_MRT3847_112230C.1
ccaaaaaaaaaattagttttatttcatttcattaggaacaacttttttccatcttggggtaagaaagaaccccccaaaggggtaaatttttgccagtttttttttcaattttcacaaacaaatttaaaactttttcccatttttgacccgaagaccggcccaatttttagtcccaacctcagtttgggaaccaaggacccgaaaaaggttttttaaagaaaaaaatttgtttgaaaaaaaaaatgaaatcaatcctcacccccttttgcttgcttccttagggggataaaacttgccctggggccatgaatgctccaacaaacccagcaggggaaacaaag

SEQ ID NO: 13538 - DNA, 371 bp, Glycine max
  Clone ID: PAT_MRT3847_112231C.1
ggtttgcgcagatccctacctctcctttcaagatgcagatcttcgtcaagaccctaaccggaaagaccatcacccttagaggaggaaagcggtggcaccatcaatagcgtcaaggccaccatccaatacatggcaggccttcccctggagcagcaccgtcttatcttatacggagagcaattagaggtcggccgaaccctggccatctacaacatccagaaggagtcaacccttcatcacgttctccgactacatggtggcctgcaagatcttagtgaagactctcactggcccaaccatgaccgtagacgtccatagatttgacaccattgactgccccatggccaagatccaagacaaggaggccatcc

SEQ ID NO: 13539 - DNA, 365 bp, Glycine max
  Clone ID: PAT_MRT3847_112232C.1
gaggacaaggcttttttatggccacaacttcattatgtttcctgtaatactctggaaatgcaagtaccttatcttgtctatcttttaaattctttacaagttttgaatttgctcatactactcttatctcacctatttctaatgcacacgctacttccaaatctattgaaaatgcaagatactctgcctcatctgcaatttagtgtatctttcacttgatcctttgtttaattcaataaacgaaattaagcattacccttttgttgagtatgctcttcctatttgaaaattttcacacctcttttaattgtccttatgatgtttgaagtgttttttattttaaaaaaaaataaaaaaataaaccc

SEQ ID NO: 13540 - DNA, 374 bp, Glycine max
  Clone ID: PAT_MRT3847_112233C.1
gataaaagggtgcaggaactgaagaagaaaatgaagaagtgaaccctctcaatcaaaccatacatatacaggaccgaagactaggtggggtccaaaactcatgtctatatacgattggaaacacaaccaccgacctaaaccttacaaggcatcattacgcgaggtgcacccaactcattgtgaactgtacggttcttgtctcactctaaagaagagccacttctggagaaacagacactcctactgtggatgccgaacttgcagaagataatacaggagcacagagcactaccgatgacagcacagtctgctctccatgtgctctggacaaacaacttaatacggaagcgcatgagactgctgctacctgtgca

SEQ ID NO: 13541 - DNA, 381 bp, Glycine max
  Clone ID: PAT_MRT3847_112234C.1
ggcttgaaaaggctattttacctaccagtataacaagaactactttgaaaggaacggaaacacattgggggtatgctaccatgcataggaggccgtcgatcaatgcaaggacggcgagaatatatgaagtgatcgatcttgagtcactaacctactttgctcgacaaatcaaatcaaggacaaaaggaacacgaaacaatacatacattaacagagaggcataagcatataaccactaaactgttaaacagctcaacttctgaaattacttggagcgacaacagtaagcagtgaatataataattgattttaagctcaaacatcaggtaattacatgcaaagctctaatgatgattaagaaactgacggagcttgatattc

SEQ ID NO: 13542 - DNA, 596 bp, Glycine max
  Clone ID: PAT_MRT3847_112235C.1
ggcttcttaaacagtaatatatgatgttaatatatgattttaatttttttttttttttttttggctcagcaagagtaagtagcatatatataaatgagtaccagaggtactgtagatacataaggggattggattaacaactggttcagaatgccaagatacatgtagtaagaaccaagctgaacccgaggaaatagagaacaattacgcagcactaattacttataatactacggctaccatcctttcctaattacaaaaagctgctgtgagatgagaggaccagtgattgaaaagcagggtgaaacccttctccataagtttaaggcatgtccataataggaaaatcgcatcttccatcactttacttccttcgaaagtttgattagcaaagatcacctcatttcgatgcttccaaatggtccatgttagcactacccaccagcatttccatcttgttgctttagttccaacagcagacccacttacatgttgcagaaaatggtccttgggatcttgtgggaatactccccttgtgtttatccattaatccatgaagtctattttggatacgagctctttttcggacgcgtggg

SEQ ID NO: 13543 - DNA, 163 bp, Glycine max
  Clone ID: PAT_MRT3847_112236C.1
gcctgcacaacacaaagaaacccgaactaaaatgactaatatttctgctggcagcaacttattgctccatgatcttcagttattctgtattctgattatctttctgttgtaatttttgggctggcttcctctggtaattactcataactggtctagcccccag

SEQ ID NO: 13544 - DNA, 280 bp, Glycine max
  Clone ID: PAT_MRT3847_112237C.1
gtcgattttaattggtgaattgtgtgtaactttttattgactttcctctaatgaaacgaattcgggattccttggcacataatgttgtaattagtaaagtgttttggtctcttgactttttttgtgttgaagacccgtgattttgatgtggagcattctaacttcaatcttggttccttcatggggtatgagcgttaggtgttggttggttccacgttgtctttttctgttggtaaaggaatgcttctgatgctagctctcttagatttcttgtctgtgc

SEQ ID NO: 13545 - DNA, 1795 bp, Glycine max
  Clone ID: PAT_MRT3847_112238C.1
ctctagaacgatccataccatagccacttcacactcactcactcttgttgccttcatggccaagccagtgtccattgaggtatggaacccaagtggcaaatacagagttgtcagcaccaaaccaatgcctggaactcgttggatcaatcttctcattcaaaatgatgttcgccttgaaatatgtaccgagaagaaaacgattttgtcagttgaagacatcattgctttgattggtgataagtgcgatggagttattggacagttgactgaagactggggagaagagtaactcgaactatccatacatagccactttacactcactcttgtgttgttgccttcatggccaagccagtgtccattgaggtatggaacccaagtggcaaatacagagttgttagcaccaaaccaatgcctggaactcgttggatcaatcttctcgttcaaaatgatgttcgccttgaaatatgtaccgagaagaaaacgattctgtcagttgaagacatcattgctttgattggtgataagtgtgatggagttattggacagctgactgaagactggggagaacagttgttctctactttgagcaaagccggaggcaaagctttcagtaacatggctgttggttataacaacgtggatgttgatgctgcaaacaagtatggtgttgctgttggaaatactcctggagtgctcactgagacaacagctgagttggcagcttcattgtctttggcagctgctagaaggatagttgaggcagatgagttcatgagggcaggattatatgatggatggctacctcatctatttgttggaaacttgctcaagggacaaactgttggtgtaattggagctggtcgaattggatccgcttatgcaagaatgatggttgaagggttcaagatgaacctaatttactatgatctctaccagtccacacgactagaaaagtttatcacagcctatgctacattcttgaaagcaagtggtgaaacccccgtgacttggaaaagggcagcaaccatggatgaggtcctccaggaggcagatataattagtcttcatcctgtctgtggataaaaccacttatcatctagtcaacaaggaaagactagctaagatgaagaaggaagcaattcttataaactgcagtagaggacctgttattgatgaagctgcacttgtggagcatttaaaacagaacccgatgtttcgagtaggccttgacgtgtttgaggaagagccctacatgaaacccgggcttgcagagttgaagaatgccattgtggtaccccacattgcatctgcctccaagtggactcgtgagggaatggctacactagcagctctaaacgtgctggggaagatcaaagggtacccagtttggtttgatgccaatagggttgaaccattcctcaatgagaatgctcaaccaccagctgcatccccaagcattgttaatgcaaaagccctgggtttgccaacttcaaagctataaacatacatggttctatcctacaagggccttcaattgcacaaatgaccaatttttgtctgttgagttgggctctgtggctagtctgttcttttttttgtgtatgtggggtgctgatggcactgtgcatataaagactgtcaggttaataatagcatcatgtgtttgtagtatttcaaacattaattaaacataaatgaagttataccttatgtccctacaaaaaaaaaaaaaaaaaaaaaaaaaattcaaacggcaacaaaatattacgagcctccattctcactacaaaaa

SEQ ID NO: 13546 - DNA, 250 bp, Glycine max
  Clone ID: PAT_MRT3847_112239C.1
gggtgaaaaaaatcctgacccaaaagctaaaggacttttccccccttcttaggggagcaaatccaaaccgactggtaaagtcccagcgagacccctaaaaatgggatcaaaaagggtatacccaaacaagaattttggcaaaaaattagtcctttgcagcaaaaggaggcctttgccccaatgcccccttccccaagcccaggattaccaaatgcgcttaacccgttacaaggcccaaatatgggtccaa

SEQ ID NO: 13547 - DNA, 436 bp, Glycine max
  unsure (1)..(436): unsure at all n locations
  Clone ID: PAT_MRT3847_11223C.1
gggtcgacccacgcgtccgaccatctgggaagaggtataagtttgtggccaccgggcatgggaagtatgagaaggtgcttgtggaagggggcccggctccctaggcgtcccatctcgcttcctgggtctgcaggtccagccggctggcaccctccatgtacccaggggagattccagccagacacccgccccccggccctggctaagaagttgcttcctgttgccagcatgacctaccctcgcctctttgatgccatccgctgccacctccttttgctcctggaccctttagcctctctgcccttccactctctgaccaccgcccccgccctccccacccagctccgcttcttgttacttgggggaggaaagaaactcctgatcattggccaaatggacttacccctggagaggccaagtgccttccangaagtta

SEQ ID NO: 13548 - DNA, 503 bp, Glycine max
  Clone ID: PAT_MRT3847_112240C.1
acgaggattccttatcgcaatctgctccatcatcggagctcttccgtatcgcttcttcatcttcttctgctgaatcccactttcgtgaactcgatgatgcattcctccagactcaaacgagaaattggctaggagaagtattgcagataagactagatgggcaactcattatatcagaactacttgctgatggagaattgctgtttcaagtatcaaaagtggtgtggaaattgcttttggcaaagcatatggagctaaggcatattaaagcatacaaaatccagtcatttgcttccaagaaaaacatcgcgagatacaggccttattctaatgttgattcatttctgaaggtaaattgtttgattatcatgtcttctttttgacaaattaagggaaaaattgttatattttccttccaacttataagaggatatagttagaatgctttttgaagtgattgaacagatcagtgacacttattaccagaatatagttaaattaca

SEQ ID NO: 13549 - DNA, 292 bp, Glycine max
  unsure (1)..(292): unsure at all n locations
  Clone ID: PAT_MRT3847_112241C.1
attcccanttcctaatngtttaaacctaattctcatttcntcatcgttcgattcttctccncctaaagattnagatcttcgtgaaaacttngaccggtaagaccatcacccttgaggtggagtcctccgacaccatcgataacgtgaaagctagattcaagacaaggaagggntcccacctgaccaacaganacttatctttgcgggtaaacagcttgaggatggtcgaacccttgcngactacaacatccagaaggaatccntctccacctcgtgcntcggctcaggggtg

SEQ ID NO: 13550 - DNA, 283 bp, Glycine max
  unsure (1)..(283): unsure at all n locations
  Clone ID: PAT_MRT3847_112242C.1
tntctctnaaactncanaagcngcttnccgnagcattctcaagtntggnanangcaaagtttggcttgacccgaatgangtcaatgaaatctccatggcnaannctcgacaaaacanaaggaaantngtcaannatngnttcaggancaggaagccacagagangcantcccntncccnactcncagaatgaaggaggccaagaggaagngacgtcactctggttatgggaagcntaagggtacaagagaggctaggctccccaccaaaatccnttngatgag

SEQ ID NO: 13551 - DNA, 181 bp, Glycine max
  Clone ID: PAT_MRT3847_112243C.1
cacacgccttctcttacttcaagtattgaacttcagctacttctacatataatggacatgagtgacgattaaattcacatccgtattgaaacaattgcccatgaagaccctaagaagcccactaccactacccatctaatccacattcttctaagcatatactaacctttaatttagagat

SEQ ID NO: 13552 - DNA, 269 bp, Glycine max
  unsure (1)..(269): unsure at all n locations
  Clone ID: PAT_MRT3847_112244C.1
cagccttcttcttcgctctctcgctctgactgccgccgccgtgcgttcgtcnctctctggcgttgactttttttttttngcctgtgagagagtaangcaangnaanaaccacccacngaagccgtcnaatcgtngtccgtctcngaccctnagatcccccaancancnaatcccagtcnaantnancttttgactcnggaaganaaattncaaatnggnagaagcgtcggagaagaatgcattnaggntgccgaactcctnaaccncct

SEQ ID NO: 13553 - DNA, 341 bp, Glycine max
  Clone ID: PAT_MRT3847_112245C.1
cttcctttttttttttttttttttttttttaagcacaaatgatgtggtttactttgttatattttattacatacatgcatagatagcctgctctcaaataagtcggcaggaacaaagatagagagacccaacgagcctcaaaaaacacatttgccccaaaataaaacagggggggggggtctgggataagagaaaagaaagggtcacccccaaaaacacttttcggaagtggggcttttaagactaaaaaggtgacatggcctctaggaaaaccccttttttaggagcccgggaaacaaaaaccctggggttttaaaaagggaagcccgggtgattgcccc

SEQ ID NO: 13554 - DNA, 306 bp, Glycine max
  Clone ID: PAT_MRT3847_112246C.1
ctacataaaaatcaccacattactgggaatcaaaaaaacaaagagaagggtgtcacactcaataatgtcttttcctttcattaaatttcctcaatggcgtcttacgtcgactaacgtccgaacccctgtctccaatatgaaactggttgccctctatgatattgtcttgacaacctgaaaagatcttgaatatgctattactactcgaactccatctttttctgattcaacagaataaaaggacaacactttgaacttgaacgatcagattcacaatctaacaactgagtttcaatatcacacgct

SEQ ID NO: 13555 - DNA, 237 bp, Glycine max
  Clone ID: PAT_MRT3847_112247C.1
gtaaaatatttatgaatataaaacattacttatcataataaaattgtatgaaagctgaatataagagaaattatatacgattaatggataaatagaatactattatgggattgcattttgcagcattggtttgaacaatttatgccgaagaatacaattaataaatcaactacaatttattgatttcgcccttgataatgttaccgctgtcctattaatcccgatttacgggatgaa

SEQ ID NO: 13556 - DNA, 202 bp, Glycine max
  Clone ID: PAT_MRT3847_112248C.1
aacagatgtaaaaacacaatataaagggattcttaactcataacacaattgcgctgactttgtctttttcaaaattacggaaacaacatttactcaaaattactctttagcctttcttccctgcctccacctttaatcctattctctctccattttttaattctttttaacttagatagatccaactcctttgatatcacaa

SEQ ID NO: 13557 - DNA, 629 bp, Glycine max
  Clone ID: PAT_MRT3847_112249C.1
gagattacatttcattaatcttgagggggaaacattacataaaatcaaatatatcaatcgtctaaaagataccaaattgcattcaacaacactataactttagacagcaaaaccgagcgactacctccaaaaaaatagcaagaaagcacttcaagtactcaataggacacaactctcagtggcttgagaggaaaaatttgactatggcattttcatacaggaatatgttgtactaatgtacataaatcaccttcctcaattgaaggaatgaaacatgaaaaccgcaccaataattatggagtgctggggaaaacgatgggttttgtgcatcaccttaatgacccctgatcattgggcttcataaaccatgaggaaagttattgacttgtccttcctccagtgtatccttgccatttatcttgtatgctatccttatacgcatgacaagagatttcttcccatgttggctattagtaattttcaaactttgggttatggacccatttgcgggaagagtattgctgctagctggatctaagtgcaattgaagaaacttaggaactgctgcttgaaaaacaaaatctgtatatgaattggaggacaaattcataaaagtagcctggataact

SEQ ID NO: 13558 - DNA, 205 bp, Glycine max
  Clone ID: PAT_MRT3847_11224C.1
ggcagcgggactacaagcagcagctactttcatgcagcccaccaaggtgagcaggatcaacacttttcacgagaagtctactcaatagattgcgaaggcaatgggagtggaacctgttggagctaagaatgtcacatgctcccttcaagctaatctgaacgacttagctcacaaatgttgtgatagcgtgcaaaatgacaagatt

SEQ ID NO: 13559 - DNA, 461 bp, Glycine max
  unsure (1)..(461): unsure at all n locations
  Clone ID: PAT_MRT3847_112251C.1
gttagtagtgtgaaggagacaaaacagagttgttgaataaacattaatctaggccacagagttttgatgcctagcaacaaggatttggatagtgagatggggaccaaggtaaagaaagctatgaagaatttgaaaagggcaactactaataagccatccgaggatgctgactttttggtggtcctgtttgcaaacaacccgaacagaagctgctgaagaatactgcaactgttttgtatgtgggtaggattccacatggattctatgagaaggagatggaaggttaaattggacaatttagaaccatcaagaaattgagaattgcaagaaataaaagggcgggaaaatcaagacattttgggtacatagaatttgaataatcagaggtagcaaaaattgtagctgatactatgcacaattatctcctttaaacaggtttatgtgatacctncgtagcatgc

SEQ ID NO: 13560 - DNA, 627 bp, Glycine max
  Clone ID: PAT_MRT3847_112252C.1
gaaaaggggaaagtgaggattaaaatcaaagctaagaatattaaaagaagtcaattataaaggcattattctaagttctagagttggttctaaatcactaaaatgggagattgaagaaaagtaataataacataagagacttacaaatgcaatgaattcatggtctttgctcctctttgaagagttatttcataagtgcggtcacaaagatcttgcaaaaatagttctagagctttatctgttatgcagtaaaaacatattaggagttccatacattgcaaacacacaacaagaaaaggtaaacgatggacaggactttccacaacaatactcatacctgtatgtacggcaaaagtgaaaggcagacaatatgtgcaatttgtcccagattggggcgcgagacaagagtgtttaacagagtcccattatgccttcacgttgactaccaaaagtagatttacttaggttgcagaaccttttaaaaaataataactaaacaaaaacgtcactaaacaaatatcaccaaattgctaagagatccgaatcctgattataaactaaatctattttatttccaatttaaacccagaaaaacagtttctatatcagttctgaaccaaaagaaag

SEQ ID NO: 13561 - DNA, 403 bp, Glycine max
  Clone ID: PAT_MRT3847_112253C.1
atgatgggtatttacacatatctgaccgcttgaaagatatcatcaaatacaaaggctttcagattgctcctgccgatttagaagctgtgttaattttgcatcctgaagtagttgatgttgctgttacacgtgcaatggatgaagaaactggggagatcccagtggcatttgtggtcagaaaggttggaagtgtgctgtctccaaagcatattatggattttgttgctgagcaggttgctccatataagaaggttaggaaagtgttcttcactgacaagataccaaggtctgccactgggaagatcctacgaaagcagctgaggaattacttgacttctaatctatagtgcattttttaggactcacctcaagtgttacatattgaaaaattaccaggacattt

SEQ ID NO: 13562 - DNA, 354 bp, Glycine max
  Clone ID: PAT_MRT3847_112254C.1
gaggaaaaaaaaagaggacccagggagcaatttgaaggaaaagaccgcggagacagccataacgaagcaaaacaggaaagcccgaggggcaacacacaaacagccaaacccgaaaccggagaatcaacaacaccaagaaagagaaagcgacgccgggcacgacaagaagaacacccaataaagagaggaacagacccgaacaggagacccacgagaacgcaaacggaacgagagcaccgaggcaaagccaaaggtgccaagacaactggaccgggtaaagcagggacaccgaaaaggccaagtcaagacactaagactacagctattgacaacccaagaacggcaaccgcaaca

SEQ ID NO: 13563 - DNA, 451 bp, Glycine max
  Clone ID: PAT_MRT3847_112255C.1
ctcccaatgggcaactaagtttttgggtgtttttttgtgagtgaccggtcacaaacccgataataggtttgtttgtacttttttaaaacatccgtttctgttcctggggggaaggaaaccccaaaaaaaaaaaaaacatttctaaaaaaagccccccccaccccggggggttttttttggcgaccaaacaaagggctatccgcaaaaaaggggtctttccccgccttgcgagaacaagaatgtggtccacaaaaaggggaaggggaacggggtcataaacacacagaagatttggggccaaaggggcacccaaagggtttttcttccgggccgacaccggggtggcccccacccccagagtgacccccccggggggttaaaaaaaattgggggcccgggagaaaaactgggccaaactgggaacttggtaaacaacaggggggggggtttt

SEQ ID NO: 13564 - DNA, 502 bp, Glycine max
  Clone ID: PAT_MRT3847_112256C.1
aaaagacaaaagaaaaaataaagtaaacaaagaagggcagattaacgttgctatgaaaacccactccttagtgcctcttcaagagacgattgtcattgcgtgctgcgtgttaatcctccccgtgccacatttctgcacaaatatagcattcccgtcattcacccaagataatggagaaatcagaaagtcagaaacaatgtaaatcaccaattcaggagttgttgcaaattgaagaattgttgacaaagcatcaacaaaataaatactatgccaacagggattttgacaattacatgcaaacacagttaagtttggtagaaatgccaacaatatgttaaaaaaatatttggtagacgagagcaaaccaaacaaatagtgtcatttgaaggaaaattactctcacacaagaggacaaagtagagaaatattctagaaattatgtgtatttacagaagacctgaaacaaagtaataacatctgacagataatttatgtaaataat

SEQ ID NO: 13565 - DNA, 378 bp, Glycine max
  Clone ID: PAT_MRT3847_112257C.1
aatttttaattttgtttatataattcacagcattttaattccaataataataataataataagtaaggtttaatcattcgagttggtcagattttacttatgttttgattaaattgaattttaaattagtcaaaatctttttttaagaggattaagaaaaaaaaattctaaaaatgtgtcccttaaacatcaagccatcttgattttgcctacttttaatacatttgtcttcttgctcacataaactttttttttatgcgttttttctcataaactcaagaaattaaactggcataagaagatatagatgctaataaaacaaactagagatccccgaacgtactccagctattcaagattcatgtgtgtcaggtttat

SEQ ID NO: 13566 - DNA, 438 bp, Glycine max
  Clone ID: PAT_MRT3847_112258C.1
gctcgctggccggccgtcgcccttttttttttttttttttttttttttttttttcaaggcaaaatctattggggaataatgatgttttcaatgtttttgtgccaaggaaaaaacaagtgatccccctccttctccaaagggtctttgccgggaaacgcggatttgttgaacccggaataacaggaaaccctaaaaaccaagacgccaattttcaagttttttttctgggaatgcatggaccgctttagggcccttaaaggaaaccaaggggtggaaaccaccaccaggggattccttcttccctgggtcctttaaaaaaccccctccttgttttaaaaaggaaatagcctggaaaaaatggggcgtattgggggcacacggagccccagggagacttccccgcttaggttgccagattggcccccagaaaccgctggc

SEQ ID NO: 13567 - DNA, 417 bp, Glycine max
  Clone ID: PAT_MRT3847_112259C.1
ctttttcttgttttattttatcttttctatttattaactttgttgtttttatttatggcttttgttttgtactctacctatgcaaacaagaatgctaaaaagactctgaccgcaatagagcactttggcgtccaagcggaattggcccctaataccgagatgggtgtctctaatagaacccctgaatggcttaaaacgaatgccacacgataggaaactgccctggaaacgcccgacggttcaggcggggagagcaatgccattgctcgttacgaagctcgactcatgggagacaacgcttcgccctcatggtctgccattgccaatgcccacattgaccacccgattgacttgtcatccttggagatcgacgctaggactacgaaatgatacccaccaagaactggatttgcccca

SEQ ID NO: 13568 - DNA, 501 bp, Glycine max
  Clone ID: PAT_MRT3847_11225C.1
acgagcggacaatacttcgatcttctcgaaatcttcagattgaacggtttcccctcagagacacatggctacctcttcaacggtgacttcgtggaccgcggttcttggtcaacggagatcgcacttctgctttacgcctacaagatgatgtaccccaagagcttcttcctgaaccgtggcaaccacgagactgacgacatgaaccgcatgtacggcttcgagggcgagtgcaaggcgaagtacaacgagcgtgtcttcaagctcttctcagagtccttctccgccctgcctctagcaactctcattggcgacaactaccttgtcctccatggtggcctcttctcggatgactcaacatcactcgacgacatccgcaagctcaacaggcacgcacaaagacaacctggccaagagggtctcatgatggagatgctttggaccgacccccagaccatgcccggtcgcggaccttccaagcgtggcgttggtcttcagttcggt

SEQ ID NO: 13569 - DNA, 127 bp, Glycine max
  unsure (1)..(127): unsure at all n locations
  Clone ID: PAT_MRT3847_112260C.1
cctcacncacaagctncagctnacnttcatgnaacncancaaggttggcatagactctgcgcaacntcaaatctacnanaatgcatttcttaggcttttggcttggaacctgctgcagctaaactca

SEQ ID NO: 13570 - DNA, 371 bp, Glycine max
  Clone ID: PAT_MRT3847_112261C.1
aacctttgggctgatttagtgctttctgtcgtgagtactcattgaacgggacccatataatcaatcaagacatctccgtacaggtttttaaagacgtagagttttcctcattacgtctcttcctctctacgcgttcctattattctacatacattcctagttactgtcaaatttgtgtctcacatcgaaggcaattttccagaaaaaggttgtatacaccacacacggattcatacactacttacagccgcaactagagttgttataattagaatcgataaatgttactcaatcaacgcctatatcgtcaccaagtacggtataggcatactcattactacacgacatttacacggcacttattacaccgc

SEQ ID NO: 13571 - DNA, 773 bp, Glycine max
  unsure (1)..(773): unsure at all n locations
  Clone ID: PAT_MRT3847_112262C.1
gagctttcataaaagtactgcgtctccaggcaggcgcagggcgaaacaccacagcagcctggggatggtcggtagcgggcaatagacgcaccgccaccacctttagagttcacctctgctcatccacaaaaaggtttgagtattgcctatgacacatggccgaccaataggcaaccaagtccaaagccaaaggtaaggaaagtactaggtccgtgacctacaagccatcatgcgtccagctaaagacgttaaagaagcgctactaggaggcaacctagtaccttttgaatctatgcttgttatttgatcactttttatagtaggacgcacctaattgctcatgatcctaagaatttaaataaaacgagcacaagctcggaaggtagtcatacctcacaaaatatatgtatgcgtgtttaggtagtgaaaaataccttagatatgcatgtatgtaatttaggtagcaaacaactacctcacaaaatatatatattgtatgttttaggtagaaagataccttagatatgcatgtatgtaaacaaaaacacacttcacaaatatatgtatgtatggtagaaagataccttggatatgcatgtatacagcaaaaatacttacaaatatatatttgtatgtttaggtggcaagaaaccttggatatgcatgtatatagcaaaaatacctcacaaaaatatgcacatgtttaaggtagcaaaataccttatggaaaananaaaggaaaaaagaaaaaaaaaccaaccagaaaaggaaat

SEQ ID NO: 13572 - DNA, 272 bp, Glycine max
  Clone ID: PAT_MRT3847_112263C.1
gggtgactcaaaataactattaaaatttttaaacggggcacattctgggtgaccttaaaacacccattaatttaactccaatccatattacacctttatcttgcactaaactctactacaccgctcataaaacaaacaattttattaagttttccctacataaaaaaataccttatatataagacgatcaacttttatatgtatcacctaaaattcactaaataatcataactcaattcacactgattggcctctcccatggcacattgaaa

SEQ ID NO: 13573 - DNA, 396 bp, Glycine max
  unsure (1)..(396): unsure at all n locations
  Clone ID: PAT_MRT3847_112264C.1
gactcaccacttcaaagcactcataacacatagcacaaagcaaagctcatccttgagttatggaatggcagcagcttcttccatggatctcgcatccccatccttggctggcaaggacgtgtagctgggcccagcagccccagaagtgggaaaggtgagcatgaggaagaccgtcaccaagcaggtctcctcatgaagctcatggtacggcccagaccgagtcaagtacttgggctcattctctggcgagcctgcgtcctatctaaccggtgagttcgcacgcgactacagctgggatactgctgggctttccgcagatccagagaccatcgccaagaatcgtgaactctatgtgatcactctangtgggccatgctcggaaccttgggctgcgtc

SEQ ID NO: 13574 - DNA, 313 bp, Glycine max
  Clone ID: PAT_MRT3847_112265C.1
gtttggttgggattatttatgggaaaagaataactttttcttctaaagctctttcaagatgaaaaaagtgaatttatttcttcaaaataaactaatccaatcatggctcaaattactcatgttgtcatacattctataagtagcacagattttattctgtaattagtacagatttgatttttttttatttgtacagattttgttccattttatttcttttcttaattaggtcattggcagcttgtaaatgagtcttgtattcactcttcgaaagacagaattacattaatattcagattattatctttcaagt

SEQ ID NO: 13575 - DNA, 323 bp, Glycine max
  unsure (1)..(323): unsure at all n locations
  Clone ID: PAT_MRT3847_112266C.1
nngcgtncgtgcncgcgtgncgtncggttcgaantaggntcngngcnngannntgnnngaggntnnntcnctnacttatttngtacntctgatgnngnggttncggatccannnctcntncnggattttcntcggtattntcggcnatctctngcancctntncctangaanangggnctgcgtgnnacaaagacacacttcgnatnnancnnggattgncccnnganaannccngnannancacccgcccccaaancggggtanccngcaacagcgcaaanaaggcntncnnntaanaatagcagcgagntgaggggaggng

SEQ ID NO: 13576 - DNA, 243 bp, Glycine max
  Clone ID: PAT_MRT3847_112267C.1
ttgtttacgccataaccgtcgcgtgatataggaatagaacttacggacattactgggactttgcatatcattgtaagtacagctgacacctaagataggagacaattatgactgcagcgacaggtgatcacctacctttaaatccacaggatgatgttttatatgatactcttattcaaagaactcttcctgtgagacaaacttgatgaagggttctgtgaaagaatacggatctttgccata

SEQ ID NO: 13577 - DNA, 516 bp, Glycine max
  Clone ID: PAT_MRT3847_112268C.1
ccacgcgtccgagttgatattatttggtttacatggagaatgaagcttttgtctgggcgaagaggggttgctatactgtatgcttacatgttcctaggtcttggttttctaagagctgtgtcccctgactttggggatcttgcaaaccaagaacaagaacttgaaggcacgttcaggttcatgcactcaagattgcggacacatgctgagtcaatagctttctttggtggtggatcaagggagaaagctatgattgacgctaaattcatgacattgctcaaccactcgaaggttctattgagaaagaagtggctttatggtatttttgatgattttgtgacgaaacagcttcctcataacgtgacatgggggctgagtatgttatatgctttggagcacaagggagaccgagctttgacttcaactcaaggagagttggcacatgctctgaggttcttggcatctgtggtgtcacaaagcttcatagcgtttggtgatattcttgagttacacaag

SEQ ID NO: 13578 - DNA, 234 bp, Glycine max
  Clone ID: PAT_MRT3847_112269C.1
aaagattttctccaattgaaattctaaaaatgactgggatgaactgaagatttcactcatagaaattgaataagcaaacaattcaattggattggtcgactggtatcaaaaaaataggagtactaactcccatctcttatttattattgaattaaccgatcaactggctttaggtatcaaaatttcgtctagatttgcaatatattacggaaaaaatgggaatctatctctata

SEQ ID NO: 13579 - DNA, 238 bp, Glycine max
  Clone ID: PAT_MRT3847_11226C.1
tgaaactgccagagcgagaagtgagaagggtggcggggagtgcctcaccgatgaacaacaggcccgtagagcgccacaggagcaaaacactgttttggtgagaggagacaagaaagcgcgagaggcagccaagtactttggaccagcgccaggagagcgggagagcaacaccaagcccgagggccgtgcaaagggaaggaaaggggaggggaggagaggaagaaggaatagcagaggc

SEQ ID NO: 13580 - DNA, 417 bp, Glycine max
  Clone ID: PAT_MRT3847_112270C.1
tgcatatgttcaattcgtaatttgaatttatttcggcatggacgatgctactagtccgcggtcgccctttttttttttatactttaaattttctattgtaaaaccaacatactcatgaggagaggcatcatataagtattaatacactcgcaaaataacaaaaaatatgtaagattggcacatccaaatgcctttttattacacaaatattattaagttgattggtacttatcgaccgaaacttcactgtggcaatccctatccatcctgaaaactgatgaatgatctactccttttttatcttcacgaccaatgtgtagaacttgagctgcacaagatgagactatgcggcactgtataacctgatgcttctactgtatttagcatcccacctggggcaccatttctaaaagggga

SEQ ID NO: 13581 - DNA, 443 bp, Glycine max
  unsure (1)..(443): unsure at all n locations
  Clone ID: PAT_MRT3847_112271C.1
cggctcgaggtagatggacaaggcttcgattatcaaggatgctattgagtacatccagcacttgcacgagcaagagaagattatccaagctgagataatggaacttgaatctgggatgccaagaaagagtccaagctatggttttgagcaagaacagcttcctgtggttctcaggtccaagaagaagagaacagagcagctatatgattctgttacttcaagaaacaccccaattgaagtccttgaggttaaccctctctcttaaattattattttggtatgtaaaagtagatcagatgaattggattctaaggactcaccaagagtgcttacaaagatcttccactaaccatgatctcacattgatgatagtgggatttgaactcacatacttatgcgatatgagtttaatccttagtgactggatcaacctttgntagtca

SEQ ID NO: 13582 - DNA, 730 bp, Glycine max
  Clone ID: PAT_MRT3847_112272C.1
atggcatatagaaaaggaaaaaaaaaaagtattactagggacacaaaacatattctcttctatctcgtgatcatgatgcaaaagcattagcatcaagcaccatgcaccccatggaaagtgtcttctctctctctgtagccgccagaactgattttatccaatttctggtgcagtctttgggctgcagttacattcgcctttgggcttttgcttccccctcacccagtcgtttgagcttcttggatggtatctacaatgtaaggaacaaccaagcaagctctagtttggggagtgtgcaggcacaacagcttttcagtcagttccggactttgacatttgatgtcaatgatgaccgtgttcctggactagcttttaggaatcaacgaccctacctagagctccaacaattggaacttctcagattagcatccacagaaatacaaatacaattctttcaggaggcaaggattaagactgctgttttcatggggtgtaacaagggagaaattgagcttggtttcttaaatatgtcccaagttgacattcaaacagcacttcggcgtgtgcttcccggactgctgtcctcttggggtctgtcccggcagattgtgcgcttccctccttcatcatctccctcgtcgccgtgctcactgccctcaggtggccctgtcctctcgtctcttccactcagtattccaggcacatctcaaccccactttccacctgagac

SEQ ID NO: 13583 - DNA, 398 bp, Glycine max
  Clone ID: PAT_MRT3847_112273C.1
cccagacaaaaactaatgatttcattacttccctctaacacatgccttgaaacagcggagggtctcttaaacccttcaaagctaggcatctctacacaaacatgctagctcgcaccaacgaagacatcacgtaaaatacaagtgaaatgcaactgtgcacaaaacaagggtgtgagaccaacgtatttgacactataagaagctgctttgcttgaaatatcacgtttgagcacacatgaacgctatctatgccgcgtaacgatatcttacctgaacttgctaagagtgatatcatatcacgaatgatgtgcaattgaggagctcaacgctaacaacatatgcgattggttgctcacagataagctgacaagagaacagaacttaggctctacggttct

SEQ ID NO: 13584 - DNA, 518 bp, Glycine max
  Clone ID: PAT_MRT3847_112274C.1
catccaactatcagaacgaataaaattacgagacgcggaaaaactggatttttttttgcgcaaaacaagtacagacttaagagagtcaaacggcacaagcccacttctctgaaaatgacataggagttaaaacactctccacaggttaaccatgatcctttagaggagcgataccacgacaaccatttttgacccaacctagggtcaccaacttacactaacaaacttccttgactaacccataaacagtgctgctattgattatccaaactcacgctatacaaaaaatcccacacagccacacaacctgatacaccaaagcctagctatatgacacattacttcacgagcaagaaattagcttaagctgtatagccatatccagcactgactgccaaaagattactggattatggacctgacactccaccactagactctggacgcaattactgattcaatactttgctgaaggagacttacattattgccacaccgagattcctgccaattattct

SEQ ID NO: 13585 - DNA, 688 bp, Glycine max
  Clone ID: PAT_MRT3847_112275C.1
cccacgcgtccgtacggctgcgagaagacgacagaaggggcagcaaaagacatttgaagcgccgtcgtttcaatctccatcgtcgccttgaaaagaaaaaccctaattacaagaagttgcaaaactaagtggaataagagctgaaaaaccctaataacaatgggaggaaaatgtccgcacaggaacgtgaagaagagaagatattctcacaagaccgcgcggcgaaccaaatttgagctgaaaggggacgacatggtttatgcgcagctcaacaaacccgatcaagagagaccccctttacccgtcgacgaagatttgcctgggatgggccagtactattgccttcactgcgatcggtactttgccaatataactgtgagggatgagcactttaagaccaaacgacacaagaagcgtataaaacaaatgatgggtcctgcaccacatactcaacttgatgccgatttagcttctgggatgggtatgccagacaatggaccaaagctaatgtctatgtaacttcttttttggtagtgggtgggacgattgtcttgggagctggtgttataaagatatatagtatttgttatttttcttcttttttgttactagtgcttgttattctattctaatataagcaatattatattttgaatgccaaaaaaaaaaaaaaaaaaaaaaacccaaa

SEQ ID NO: 13586 - DNA, 369 bp, Glycine max
  Clone ID: PAT_MRT3847_112276C.1
gcgggttttgagacattttttttagttttgctggtgattgctgctgatgctgagacagaagaaggaagaaccaacaacagatgaatccaacattctttctacggaccgggatgcctcattcatgctacttaaacttggtacctgcttttccttcctctaactcaagcagattctttgttgccaatgagattatagcacagggcctggatcctttatagtgagttggcatcaaagttgggaggatacttaaaaaaattatgttgcacaatggtacgctgcgctataaatccaaacaggaagagtcatagacataaaagaaagaacaaaatacttagaaaacatgcttcacttgctgacatgccaaagaaa

SEQ ID NO: 13587 - DNA, 948 bp, Glycine max
  Clone ID: PAT_MRT3847_112277C.1
ttcttccaaacttggagtttaagtattctgatccagatattcatgaagatttatatcagctcataaaatattccagtggagaaatttgcacaaccgaacacgtggataaagttatgaaggtttggacaacatttttagaacccatgctttgtgttccttgtcggccccagggtgcagaggatacagaagatgttgtcaaggctaagaataatcatgtcaaaaatggcactgcaactgttgctgagagtgactgtagccctgttgtgggtgctaccataatgaatccaaagcatataaatgtttccagaaatggggatgagtgtatgccattagatcaatcaacttctagtaaagcatggcagtcaaatggtgatagtggggttagagaggataggtatcttgatgaccatgcattgcgtaaaactgaaactttgggcagcaatacacagcatggtaaaatgaatagtattgcattcacacctgatgaaccatcaggatttaacaataagcaagaccagtccagcgaacggttagtgaatgcaaatgtctcaccagcatctggaatggagcaaagcaatggaaggacaaacatagataatttgtcgggactcactgccactccaacaagacctggtaatgcttctgttgagggaggacttgatataccgtcatcagagggtggtgattctacaagactgggtacatcaacaaatggggccatcactggaggcaccaaagttcaccgataccaagaggaaatcagttcgacccttcaaaaatgaaagagaagaggtgcataaaggaaaagatggtggtggtgagtcggcaataccaaaataggcacggggaagaagtttgtggtgaaactagaggagaaaacgatgctgatgctgatgatgaaggtgaagaaagccatcacaggtcatcagaggacagtgaaaagcatct

SEQ ID NO: 13588 - DNA, 316 bp, Glycine max
  Clone ID: PAT_MRT3847_112278C.1
ttttctttgttttttttgattcttttttgtttttttatttatggaacacagacaaagggaataggatggagaggaagacaaacaagtctatcgtgtcggaatctatcgcagaggcatttgggttagctggagcaggtggtggaattatcgcatcggatgatatcttattctctttttgcgggaaatacacaccagttaactggccgatcggttttgaggaacaagttaatttttatcttcaggggagacgctgttcctaacgctaatggtcagatcattcacgtcattggaactgccggttggcgtggacgctata

SEQ ID NO: 13589 - DNA, 286 bp, Glycine max
  Clone ID: PAT_MRT3847_112279C.1
gtgaatcagggggacatgacccttgggaacagtcacaaccaaccattatgatccgctcaaggggtgcaaggtcaggagatgcgaatcaagggaatgacccttggaaacagtcacaaccattcagaataattgtgtcaattagatgtagtataaatataagtaaaccagaatgggaaagacacttgggaattaggaagaatctgaattgtggagaaacagactctcgaaaacttgtgtaataaaatatctcaaattatctataagaacttttatttcatcttttcaa

SEQ ID NO: 13590 - DNA, 1397 bp, Glycine max
  Clone ID: PAT_MRT3847_11227C.1
ggctcgagagcgatccgtaagatgcttccacgtgttctggttttgctgctgctgaatgtgctggctaccaacgtgctggccgactatggcccaggagatgcggtggtgatcctcacggagaaaagctttgcgaaagaggtgctgcaaagtcctgactattggctcgtcgagttctacgctccttggtgtaaacactgcaagaatttcgagccggagtacaaggctgcggccaagaagctcaagaaacacgcgcgtttgggcgttgtggatgccacggtgcaccaggaacttgcccgaaagtactttgtccaagacttcccgacgatcaaggagtttggagccgaaaagaaacgtcctcaggactaccgtggtggacgcaccacgagggaaattgtgaagtacgtgaagaactcgcccgatgcaaagaagctcggggtcagtggtgccaacgtcgtgacgcttacatacgacaaggtgtacacattcttgaacaaagatttgccgttcgctattttcttcggcagcccaacgaagggtaagaagagccccaagatgccaacgtggctggatgatgtagcagagtcattcatggagggcaagaagaagaagaagagtccgacggttcaattggcattcgtgccgggatcggataacaagatcgccaaccactttcgacttgccaaagaccagcttcccaccgttgtttacatttattcagccagtcggaagtacactgtgttggatgtaaacaacgtgaacgaagctacggccagaaagtttattagtgatgcgctggcgaaaaccgaggcagcggagaaggatgaatcgctgcctagcgtgcctctgttcccgtcacccgaagtggccaaaaagaaacccgtggtcggactgaaggaactggatgtagacactgtccgtgattgtgtggctaagcgagacaagatgtgcgtcgtagtggtcaagacagacacggaattggtgcgctcgctggccaaaaagtaccgccgcgatccgttcaccttcttgttcagcaagcctgacgcgcaggttttgcaagctttgaccacttacgttggcgaaaagaacgcggaggtggttgtcctaagggctggtcgcaatatgaagtactcggccctgtcaggcacgaacgatgagagtgccatctcggagttcctagacaagctcattgatggctcgattccgttctcggtgccaagcggagacatgaagacgtttgttgccacggtggctggtatgtcggccagacacgaagagttgtaggttgcaagcctgcgaggattttcatcgtctggaagctggacaatggagctcttgacgcagtaacactgagcgtctagttggcgttgggctcaactaaatacattttttggcagctt

SEQ ID NO: 13591 - DNA, 153 bp, Glycine max
  Clone ID: PAT_MRT3847_112280C.1
tggaccaacccttccgtccggttgcaaaaggccaccaaagggggtttggctttttaattaagtaattatttcatgccaaggggtttcgcctggataatagtccataatatccaagaatccgataaaaggtgcatcaagaagtgcaatcagaaa

SEQ ID NO: 13592 - DNA, 484 bp, Glycine max
  Clone ID: PAT_MRT3847_112281C.1
aaattctaactttaaacataatacctactcgtgttcaagcacgtgattggttaaaactattctttcgaaagcatgggacactacataatgtacacgttgcaaggccagaacaaacatcggagatattatacatgtatatccaccaatatatatataatcgggcaattcgtcctttgggaagtccaagtatacaaaaaaatgaaaaacatgggggcttttcaatacaaatacataaactgtgctccctgaggcattccttttggtgcgctctttttttaacagatctttttttggtctactgctccacaccaatgaacaatgagaaagtttcatcctgcgcgctaggggaggcatagacaacttgtgaggagcccaattgttcgttggcgctgctgtttatttgccctgaggatgccatgagggcagcaactggcagctttaagataaaccacattctacgtacaggataggtgtagttcttgaa

SEQ ID NO: 13593 - DNA, 430 bp, Glycine max
  Clone ID: PAT_MRT3847_112282C.1
aagggcccgggggggggaaaaaaaaaaaaaaaaatacctttaagggtcaaaccttaaccccctttgggaaaacattaaacttattttaaaaagggggttaaaaaaaacccgggaacctgtttttgtcccgaaaaacgggggcccccccatacaggggtcagaaaaaaatcattttttcaacggggggggaaaaaactttaagggcttttcggaaaaaacccaatttttttaaaaaaaaaattgggggggttctctcgggtttcaaaaaagaaaaaacggggccctttttggggcccccgggggaaaaaccccttttaattttttgaagcggggtttgattttaaaactttccgggcccccacaaagggggacctccccgggaaaaaaagttaattttttttgcccccccctggtttttccatgggaaatt

SEQ ID NO: 13594 - DNA, 302 bp, Glycine max
  Clone ID: PAT_MRT3847_112283C.1
agaatatgaagcagtgacaaattttattcaattattcactgattgggggagcaagaaccaatcaagtaccaatcatatccaatgaggaaggaaaaagacaggtatcaaatgtggttccatgaaagccaatggcctaagaactaaaaaatcgtgtttatcccacaggacctgagcaatggaatccgggcgaggattctaggcccaagaacgataccattacaatgctcgggtaccatttggatcacaaccttgaagtgcccaagaatgatctcttctgcctctcgggaaaagcaaacttataa

SEQ ID NO: 13595 - DNA, 441 bp, Glycine max
  Clone ID: PAT_MRT3847_112284C.1
gcaattgacgttaaaagctttagccttttctacaactacaaacacaaagacatcatcatccagggctgcctccgtctccactgtcggagctgtcaacagagctcttttgaacctgaatggttcttgagctggagcttcagctcccaggtcagtcttctttgggaccagcttgaagaaggttattgcctcatgggtccgcaacagcatggatttccgtggaagcttcaagattgttgctgtccaatagaagaaagagattgaagagacccattacacctacaaagacagatggaagggtcttgcctatgatctctcacactaccaacatgacatcacaagaggaaagggctaggatgactctcttttacaagctccacacgatgctggaactgactatgcagccatgagctcctacgagtacctgagcactggactttgaca

SEQ ID NO: 13596 - DNA, 329 bp, Glycine max
  Clone ID: PAT_MRT3847_112285C.1
ggggattaagccttcccctctcaagattaaaaagcaatttaaacctttgaagggccccggttttttaggaccaaatttcactatcccctttggcttttcattggtcccagggccccaaaaagggggtaactaaaaagccttacataggggactaggaaaaggtgcccaaacattttttcaaaatccttcacattgaaaatgaataggccccatttccccacaaaaaagctaacaatgggggctatgagtaaaaggaccaagggggccataaacaccggtgccccttggaaaacaaaccccccttggtaatatttcttgagcttcttttt

SEQ ID NO: 13597 - DNA, 398 bp, Glycine max
  Clone ID: PAT_MRT3847_112286C.1
cacactcattcagtgccagaatggcactacggcgcttggtgatgaccctttatgccatcttcactcttgcacttgcgagagaaagccatgccacatacaaagacttttggcctgctgtttgggcaaccactcccattacaagttcattgagagatcttctaatgcctgtccctgcaagtgttgaaatcgccgatcaccctatgcaaattgaagaaacacaagacctggaaaccttcttatataaagaagaccttgatgcatgctaaacagatgaaagtacaattcagcaagtcttcctttgaacaaccatggggtgatggtccatgggttaagggaattaaagacactactgaagaaggatatagctttgaagagctatgcatcaagaaagaaaccat

SEQ ID NO: 13598 - DNA, 230 bp, Glycine max
  Clone ID: PAT_MRT3847_112287C.1
ggtctaatgatggctaatttcctttattataatttgttgatttagggatgaagggagatacagatatatcaagactcataaaaagcaagagagatagtggggatcatctttaaaaagatcgtatccgattaattgtaatccgggttggccccaatgttagcctcaatggccttgaatagaggatcaaccttggcttctccagtttttagcaagtccccgttgggctgaac

SEQ ID NO: 13599 - DNA, 375 bp, Glycine max
  Clone ID: PAT_MRT3847_112288C.1
gggcccaattggccattgttagcctagaagtaggcaaagcacatggtgccagtcattaattaccgggcacgtcgagtccgatcgcatatatagcttcaatagcatttacatcgtatctccctcgcagagcatcctatacaacttcaaagatgacggacccttgcgaacagaccaaagagcaactggtcaacctgctggccaagttccatgaccccgcctagctgtactacatcgctccagggacgacaggtacagtggatgataatgaccactcgagctcgagaccccttcaatcgaggccgcattcgaatcagtgcaactcgagcggctgtggcgccaaataccataagagtcttgagcttggacttgaagagt

SEQ ID NO: 13600 - DNA, 406 bp, Glycine max
  unsure (1)..(406): unsure at all n locations
  Clone ID: PAT_MRT3847_112289C.1
ataaaaaaaaaannagacaannaaangggnttttttncccccntngggggnntnnnnnnnaaaaannccaaaaaaggggnccnnnnaaaaacccnnttttnncnccgngggggtttnaaanccnggggnttttnnaaaaaangnccctttgctggtgggnagaaagtttgtccctgggggtnnttgctgtaaatnggcnnaanccgtttgaaanangntnnccgaggaaacangatgntagncaaagancggttnacnttgaggtcatagantntngcgaatttcttnctantnctttgtgtangattcttaagggaaagnaacanctctgtgtggcaagatcgnncagtcttncaaaaanngacncntgnngtctgatancntgntntannnnatcattcgngnt

SEQ ID NO: 13601 - DNA, 155 bp, Glycine max
  Clone ID: PAT_MRT3847_11228C.1
ataaaaatcgaatccctagataaagggggtgaattcaggatgaccaacggtataataacctactagcctaaatttaaaattaaaagagaaatactttcagaacgtaaagtttacagtatattgcttatccttcaatgaccccaccatattaattt

SEQ ID NO: 13602 - DNA, 597 bp, Glycine max
  Clone ID: PAT_MRT3847_112290C.1
ggctcgaggttttcttctgtcacaacgtaatactattatttttgttgtttgggacacaacaactcagagagttcttgcggctcgagaatctctctctctctctctctctctatcccctttctgccgacgattttgtttgtcccctttggatcaggttcgttcgtttgttcgatctctcggatcagatctggattccttttcattgctgcgtcttcgatctcctttctttctttctttttatgcattattgttattactattcgcaatctcttcggtggccaatgatttttattttatccttagatttcggatttgatttagctctgctgtatctctttggtttggatcttctggctgttttctgtgattccaatgacagagtttcattcaatgtgttttgattgtttcaagtttgacatgccacaaggtgagatttgagatgtgatgcgggataatgatgctatcctcctgttttttcagaattaagattgatctcagcagaagaagattcatgttggactttattttgcgttttccgtggtgatcttatattattgtgtttcaattttgaggttatgatattactttatacatgat

SEQ ID NO: 13603 - DNA, 1740 bp, Glycine max
  Clone ID: PAT_MRT3847_112291C.1
tcgagactttgcctctgtttctggtcagttctatcagagtccataaattaagagacttcaaaatgaaatttgttgggaacattatttctagtttagtaatagttacccttaaaggtatgttaaatttgattatacaaaacaaattctgaacatagctttgtcattcctgcagtgagatcaataaggcattctgcggttttctgtaccaatgtaaatatcaaccgtatcagaaaatattgcaagagaatggatgtacatctgcactgttctatgctgccacctcaacatctatggaaacagatgaaggagaaatttctaaccacaaaattacaaattctcaaaatgattaccacgggatggatcagggcaataatattggggttgcaactggaaactggggatgtggtgcctttggaggagatcctgaagtaaagacaataattcagtggcttgcagcttctcaggctctaagacctttcatagcttactacacatttggcttggaggcattgcagagcctagacgaggttgctcattggattttgtctcagagatggacagttggggacctatggaacatgctaattgagtactcaataaatagatcaaaaggagaaactaatgtgggcttccttcaatggctccttccatcaatatatggccatggtgctaggatggatttgccaaatctggcttaatcttctgttgttgaaccttctgttgttgaacgtctttctcttttgtcaatgttctcactttgaaggagctgtgaaaaggtatgctgtgcatagtttggtttgtggacttccaagttttatcactcttacatgactacactgcagaccgtgaagctagaatctacagcataaaggatataatgatgtttttttagcaaagtgctactagagactcttctgttttattgtgtttagctttggagtagagagggtggatacaaaaaatatactatccggattctcttcttacatttaaaaggtgctggaaaggaaacatttgtttatgtcttttgcgtgcaatgaaggaaagatacaaaagtaatgtaaagacaatatttgtacaaccattgttgatccgagtcctctgaagaaggaaatatccttgttgatgtcagatatatgttttacttgaatagtcagcagcagtcaaatttctcttttatcttgatcaggattccaaattttttctttcaaagtggtgcacccatattttttgattattgccgcagctgtgcaatttccgctgtagtgaagtctacaggggcaaaatgctttgtggtaatggaagtggaatgcaaatagttggaagggggatttgatccatcaaacttgcactcagctatgcctaccccttcgattgtcaatcttgccttcaaaaactgtaaggcacttccctgaactacaagatggccaaaacctaaatctaggtggtttaatttctgatgaggattgatgaatttccatctgctgctgataagcttttctgggagcaaaggctgaccatgccattcttgttagcagtcaaatagctttgccctcgagaacttgttcatatagttgctaaacctctgaatgaatgtgatgcatatgtagtcaaaatattctagacgaagaatctcattatttttttttaattttcatcatctttctcttcaaatgattgtacatccttcttgctgctcaagtaagtaatacccaaaaaaagaaacctgtttcaattttt

SEQ ID NO: 13604 - DNA, 466 bp, Glycine max
  Clone ID: PAT_MRT3847_112292C.1
ttttctttctctctctctctctctctctctctctctcatcatttcttgtgcatataaaagaacatgccattcctcgaattgacacgagtatcttcatgtgtagctggatggtctttttgactcataggtgtgaatttaggaggacgaagatgtgtgacaaaacattctttggatcatatgtgcgaatgtgaagacatgaacggttgctaacacgcagagtctacgtgtagataaaaacctgcattgcgtgtataaaacgacggattctatgagaagaaatatggctcatttctgtgcgccttgctaactaacgtggtatactgcgtcttattcggatacccagaaaaagatgatgttataataacgtatataacatcatcttacgcatttatgctcgaagtgcctccacaaaatatatccggcaatattgcaaatccattgaattcagaagatacattttatgagt

SEQ ID NO: 13605 - DNA, 453 bp, Glycine max
  Clone ID: PAT_MRT3847_112293C.1
ataacctttattctttgtttatttaattcgtgtcgggtctcatttggatcttggaaagtttatgaatttctatagtatagacccatgaatacgtaactaacctggaattctgggtttgtgaggcttcacctaaaaaaaattcaaaaactttccaaaaaccaatggccccccccccattttacttaccaaaaacttaggggtggctggcccccaattacggacttcccccccccgggaataaaaccggaacctttctcttaggggccccaaatttccttataggggcccttttttaccacggcgaactgggaaaaccccggtttcccccaaaaaaattgttttggataacaatcccctttaacaaacggggggaaaacaaaaaagggccaccccgggggcccttaccaaagagttacctcactttattggggatgggcccccccccctttttcc

SEQ ID NO: 13606 - DNA, 482 bp, Glycine max
  Clone ID: PAT_MRT3847_112294C.1
gtgttttttttttttttttttttttttttttttgttttttcttttttttttttgggccaaaaccaaaacctaagtaaaatgttgttcctatggaatcaggtcatgatacacaaacaggggaaaaataaaaggtttaaataaaaagaaattttaacaagagttggggcaaggctttcacttgaaaggaataaacctgaaaaagggaggggcaccaataccaggcctaccatgcttgacgggtttttatgaaaaaaaaaactgagggagatacgggccaatcatctggggttggattccaacctgattgaaagtcttgccgtggtacactccaaggaggctaccaatcttttgaggcacaataattatttttcggaaaagggtgcccactggttctggcttctcacctgggggtgcttccctttaactttgggggaccttttaaatgaaggccatgggcttctttgaaaaacctttttggaacc

SEQ ID NO: 13607 - DNA, 397 bp, Glycine max
  Clone ID: PAT_MRT3847_112295C.1
aacatacagcaacatgacagagcatgatgaagcatgtaagtggacaaaatctgaaccacattcctgggaattgatcttgccaatagaggtgtgtggtgctaacaatgggtcatgaaatgttgtgttctgagtgggcaaactaaagattatgtgactggacttctcttattgacaatcccacacaggatacagtttgtgacattctcttggaaaaaagacaagattttgaaattgctggtaatactcttataccagcttgttgtgttccacacgctactggcagatcttctgaaaatgccaaattctctgcttgaactgcaatgtggattccctactgaatggtcgtgcgtctaattcaattaaggacagttggcatgaccctatagtggagtatgct

SEQ ID NO: 13608 - DNA, 423 bp, Glycine max
  Clone ID: PAT_MRT3847_112296C.1
cacgcgcagatactgtacagcaatcgctggctatatccacacgcttggtgagaaccagggattcaaatgtggaccaaactgctcctgcaacccctgctcttgcaagtgaggtgttgagatagcaagcttcatgcacagatatcccttctttaggaaaaatgataaactataaatgtgcacctaaaaacttatgcattatgcctgagatggaattcttgcactctgaagtagtgagctaaacaaacatacttacaataaagtgactatgtcttgtctttcagcaagatcaagtgttccggacttgtgatggaagtgttcagctcacggttgcaggctttttttttatttttctcaatggtgggtaatcggtcgactcatgataaaggccagctaatattgaacttgaacccctgctcctgatat

SEQ ID NO: 13609 - DNA, 366 bp, Glycine max
  Clone ID: PAT_MRT3847_112297C.1
ggtttatttcctctcacgaatgtgatcccaggacctagtgtttttcaaatgcataacagcccatcctgtgaaatagttgcttatataatcaaattattcctaccaatacttgtattttccctatacctttcttcagttgattatggtgcaaattcttaattgatataatctattttagtctttaactcttattatgattcaatacatacctttttattcattctgttacctatgcagatttataatttcttgcaactttgtatttatgatttatctatttttttttttttatatttttattttttattatttttcttttttttattaagttttctttttttacaattagattaatttagttttaat

SEQ ID NO: 13610 - DNA, 965 bp, Glycine max
  unsure (1)..(965): unsure at all n locations
  Clone ID: PAT_MRT3847_112298C.1
caaacacgacgcaagcagcagtttagcttgcacacactccctcactccacaccacactggattctttgttctccagaatcataaaatatgttcagcttcttcatcaggaaaggcgtcagaaagatcctcaagcgcaaagacagcgatgctggccaaagaaggaagagctttggaagacttgagagcttctctctttaatcaattccgttcctctgaaggtgcaaagcgtcaacagcagcgcatatgtggtccagctattgcactttccttcaattttctggttgcagttggtattattttcatgaacaaaatggtttgtttactctctttttacctcctatctggttaagctgtgttttctgttgaaatttaaaaagtattatggtttttatttgctgattttctagggtttttcttgttttggttcaggtgcttcaaactgttcagttcaaattccctatacttcttacactaattcactacgtagtgagctggttcttaatggcaatactaaaagcattttcttttcttccggctgctccttcctcaaaatcaactcgattgtctactttatttactcttggatttgttatgtctctatccactggctttgctaatgtcagcttgaagtataataggtaacccaaactattcacattattatttgaaatatttgttttatactctcaatttaatttctatatcttcagcattggtttctatcagatggcaaagattgcagtgacaccatcaatagttttggcagaatttgtattgtatagaaagaaagtttctttcgcanaggtatatgcacttacttggttntgcatgcatttctgatataataagtagaaatgtacggttctagcaggaatacgaacttttattatataaaaacagatgaaatatggacacatttntgtactatgaacttcttttattaaacatanatcgagttgctgatg

SEQ ID NO: 13611 - DNA, 463 bp, Glycine max
  Clone ID: PAT_MRT3847_112299C.1
gtgagatatccccccaggttgttgcaaacctgactagctgcacttatatagacactcgcatctgcaacctcggagctatcaacggatggatcggaagcatcattggactgaattttaatagcatactaaacttgccggtcatgaaactcttgctccactgctattacatggagagaggttatcatctctgctgaaaaaagaaaacgattgcttgacctccaaagattgcgaggatgattcatatagcatcaccagcttaactctctttatgcactgtatctaacccaaacatgtgcatgaagcctgatactagatccagggacactgtcatagaagatgatgccaatatgccacaaacacactagtagtaagcttacttgaagagcgggatactatggtcgtcttcaacatgcactcaacgtagatcatgatgaaccaaatccagtaactgagaaaattgatg

SEQ ID NO: 13612 - DNA, 475 bp, Glycine max
  Clone ID: PAT_MRT3847_11229C.1
tacggctgcgaggaccacagaagggtaccggtgccgaagacaacacataggtaccgctgtgagaagacaacacaaagggacaatcattttactctactacacgctatcttagcttgttagcactttactttatcttcatttcattatatcgctcagaatgtcaactttcatgttgaacatcgtccttttaatgaacatctttcagatctctttcaccgctatgaggtcgactgagttctttcatgaccatacctcagttcttcgctaccacactgggcctcttgtctctggcaaaatcttcattatcctcatttggtacgggcacttcaaaccttcccatagggcactagtctccgattgcatcacctcgctgtcaccctgatccactaacagcacccaaccatgcgtcgacacgtggtggacatccacggaaaaatactgccaccacctcagtactactatgtaaacctgccct

SEQ ID NO: 13613 - DNA, 370 bp, Glycine max
  Clone ID: PAT_MRT3847_1122C.1
ggctcgaggagatcgctcatcaaggtccggatgcacgcacgcatgccctaacataagttgctcgggccctaattcgcatcttcaatttgactaacagacccatatatttcatcataacatagcatcaataatggtcttatattggtagacgtggaccgaatggacatggaccggttcaaggtctcgtagagcgacgcggaagtcgatgacttggataagctcgaggagcggcacgggcccatgcactggccgctcatgatccggtagattgtgggccggactgggaagtagcgcaggctactggggagaatccagctgcagcctaaggtgtagcgccgtgtcttaacacgaaaagaggaccagaccatga

SEQ ID NO: 13614 - DNA, 3058 bp, Glycine max
  Clone ID: PAT_MRT3847_112300C.1
gcgtaaagagacccctgtttctatcttctgctacagtgcctttcttttcgtcccctctcggagggctcgtctgggtttctctcttctttctctctcttttttttttttgccctatctcatagggtttccaccctctctctcatgcatttttgctctcacgagttcttctttgccgttgccctcttattctttgctgtatttggagccttcttttgtgtggaacagagcagatttcacctccctgggttttttgaaccgtgcccatgtctaaagttttcagctttaccggaaatgatgatttctaccatgggggcccctatttatcctaacccgaaggaaccatgtctcttcttgtctcttggccgtcaagttgatgtttaccttcctcttcagaagaggtctcgcttcagtgttccatttgatatcagcggagaatggtttgagcagaagcagaagccaaagacatctattgaatctttgccagatgaatgcctctttgagatccttagaaggctgcctgcaggccaagataggagtgtctgtgcttctgtatccaagcgctggcttatgcttctgagcagtatttgcaagactgaaatccacagctacggaagtactggaaatgaaaaccaggaaattagtgacgaaggatacctatcccgaagcttggagggaaagaaggcaacagatgttagacttgctgccattgccgttgggacagcctctcgaggagggttggggaagcttacaattcgtggatgcaattcagatcgtggggtgactaatgtaggtctcaaggcaattgctcatgggtgtccttctctaaaggtttgctctctatgggatgtcgctactgttggtgatgtaggcctgattgagattgctagtgggtgccatcagttagagaagcttgacctatgcaagtgtcctaatatttctgacaagactttaatagcagttgcgaagaactgtccgaatctggctgagttatccatagagtcatgtcccaacattggtaatgaaggtctacaagctattgggaagtgtcccaatctgaggtcaatctcaatcaagaattgctccggggttggtgatcagggagttgctggcctcttgtcttcagcttcttttgctctaacaaaggtgaagcttgagtcactgactgtttctgatctctctctagcagtgattgggcattatggtgttgcagttaccgatcttgtcctaagttgcctcccaaatgtcagcgagaaagggttctgggttatgggtaatggccacggactgcagaaactaacttcaatcacaatcaattgctgccaaggagtgacagatgttgggcttgaagctattggaaggggttgtccaaatgtgcaaaacttgaagcttcgtaagagtgcttttctgtcagacaagggattagtatcatttgccagggctgctccatcagttgagagcctgcaattgatcaagagtgccacagaattacccaaattgggctctttggtgtcttttttaactgtggtgcaaaattgaaggttcttactctgattagctgctatgggatcaaagatctcaatatggatttgccagcaatatctccttctgaatcaatttggtcattaacaatccatgactgccctggatttggctatgctaaccttgccttacttggaaagctgtgtcctcggcttcagcatgttgaaaatgagtggacttcgagggagtaacagatgcagggtttcttccattgctggagagctctgaggctggtctggttaaagttaatctaaatggctttggtaaatcttacagacagagtagttttgtacattgtcaactcacatggatggactctcgaggtgtctagactttatggttgtaaaagagttcagtgatgctagcttggatggcaattacaggtgatttgcccattgctagctgatctcgatgtttccaggtgtgcaatcactgatactggtatcgcagcccttgcacgcggaaaacagcttaacctggaggtactttctttggcaggttgtgcattggtttcagacaagagcgtgcctgccttgaaaaaaatgggctgttcccttgctggattaaatatcaagcgttgcaaaggaatcagcagccgctctgtcaacaagcttcaggaacatctctgcatgtgtgacatcctctactgaacaggaaatgcctcagcagcttttatagttagtgttgctcgttagtgtttttgggttcattcacgatggatcttggtcgtctagtagtcggttctctttttccagaggataacagttatatttaaacctcttttttgcaggtttccattaattggaaatctgttacaaattttttggcactccgttggatgagatgccacttttaaaatatggctgtttgatctctgcgagcataagttaccgagttctggagttaggtatctttttttcgtagtgttggcacctgatgtttttagctctgctttgtatcggttttgccaccatgtgtttccttgtcctcgtttctttgcagcagtacatttatcgagtctgtccagtggtgtttacccaatttttcacgtatttgagcttatgttctttacgtgatttttgggtcttaagttttagtcaaggggcatgttgaagttccagtttatgtggtgttgtcttggtttactttggcagttcttcagagttatgaagcctttgtcctcaggggcgttggtcatggcagcaagttatcctggtctgtcatcacaatcttttcccgttgggatgggttgtttttttttaccaaagccctagctttttaagcttcattttttttttttgaacttgtcattgtaaccttctatatcatgtaatgatactgagatatgccctttgtactgttatgtttattttatgaaaaaataataaataaaaaatttaagtctccaattcaaagtaaaaaaaaaaaaaaaaaaaaaaaaaaaaaaaaaaaaaaaaaaaaagggcggccgcttaagaggatccaagcgggaactggaattaattcggccagtgcacat

SEQ ID NO: 13615 - DNA, 715 bp, Glycine max
  Clone ID: PAT_MRT3847_112301C.1
tacggctgcgagaagacgacagaaggggagatacattgcacttgggaacgttcccattcagtgcactcgaatctgtttgcaataaaacgacctctctttcactaccccaagaccttcatttctctttccaccactttctctctctctctctgttttttttttgccctatctcatagggtttcctccttctctccctctcttccatgcatttttgctctcacgagttcttcttcttcgttgccctcttcttcgctgtctttgaagccttcttttgtgtggaacagagcagatttcacctcccggggttttttgaactgtgcccatgtctaaagtcttcagctttaccggaaatgatgatttttatcatgggggtcctatttatcctaacccgaaggaaccgtgtctcttcttgtctcttggccgtcaagttgatgtttaccttcctcttcagaagaggtctcgcttcagtgttccatttgatatcagtggagaatggtttgagcagaagcctaagacatctattgaatctttgccagatgaatgcctctttgagatccttagaaggttgcctgcaggccaagataggagtgtctgcgcttctgtatccaagcgctggcttatgcttctgagcagtatttgtaagaatgaaacttacagcaacgaaagtactggaaatgaaaatcaggaaattagtgatgaaggatacctatcccga

SEQ ID NO: 13616 - DNA, 406 bp, Glycine max
  Clone ID: PAT_MRT3847_112302C.1
ttttttttttttttttttctttttttttttttttttttattatttttttttttttggtaagggttggaaaaagaaaaatacattaatttggcttgggttccacgcaattattcacattcttctgagaacattggaattaaaagaacctctccaaacacagaattgaaaaatctctaaattccacaaagtgaacgttttttttacgcaaacttgccggggacaaaaatgggggtgtaaccccaagcaattttgtttcctttgcccacaaggggataaataaagtttttcaatgggaccttaacgggtgcaaagggctgaaaaagggaccgcaaatatttggacaagggccaagatcccgtgttgagttcctttcccataaactcaagcaagccccttgggtaattat

SEQ ID NO: 13617 - DNA, 391 bp, Glycine max
  unsure (1)..(391): unsure at all n locations
  Clone ID: PAT_MRT3847_112303C.1
gcgtncgaacagaaactttgtcagaatgtggaagccacgtgtcgttcccagtgttctctctttgctggttcttcttcactcgctgctcgggatggtctctgcacaaggcattatccgaaccacttggaacactctcactggttcgtgtctcgtttcattcttctttctctcccttctgtttcacacttattcatatgttgccgacaaaatgcaccaaaaaataaattataagaggaattgttcgaagcttgacttagcttgtttagtgttccttcgttcatctttgtcgagctcgtgctttgaaaattatgtatttatttatatttgatgtttgtagaatttgagtgagtacgaaagtgagaattttacagttggagcaggtaatcaactc

SEQ ID NO: 13618 - DNA, 169 bp, Glycine max
  unsure (1)..(169): unsure at all n locations
  Clone ID: PAT_MRT3847_112304C.1
gancagaaacancgccancggaaggccngaagaggcnactcaccccgacacgcngaaggcgggngcggccgagcccaccnccaccnagaacnncgcgnncgccggtttttttttcggcatcgcctacaacaagctcaccgacaacgttgtcgccactcccgccggcctc

SEQ ID NO: 13619 - DNA, 501 bp, Glycine max
  Clone ID: PAT_MRT3847_112305C.1
ctcgagccgaatcggctggagctcgagccgaatcggctagagtcaagatttggattcatgggaaatcgtcatcttaaatcaaaaccgatcacttcgcaggttgattgaaaaattggagacctcaggagtaaactacatctcactgcagaatgaagaagagatgaagattcctatcgccgctcatttaatcaggggtttctggagaggctactgtgctttgcggtgaattagtgaagggttgatgcgtggcgattgtgttgtgtgagtgctgtgctgagtatctgaatacagacagttaggtattgggagaactcatggattaatcagagagaaacggggtagtactggaaaatcaagtggggggaacggttcgaagcagttctggaacaggagactctgacatgcgtctaagcctatgcgtaatgctgggcacggataactacatgcagctcattattatcaatgatcctggccacagcctgatcgtcggctctcatcatc

SEQ ID NO: 13620 - DNA, 206 bp, Glycine max
  Clone ID: PAT_MRT3847_112306C.1
agttttgccacgggtattccaacacaccttgtgttaaaaagaatcttaagtgaataagagtaccaaattttagggcgacagtgcataaaaattaatctctttaacacaatctacttcatgacatgggatcctaagctccatatacttttcaagaaacagattaaccttttatgatgattggtccatgtcattcactacttgcattt

SEQ ID NO: 13621 - DNA, 259 bp, Glycine max
  Clone ID: PAT_MRT3847_112307C.1
tggtcaattcatcactgaagtggtatgtgccactaggaggcttgtcctggaagcaaacagcgtattcaagtggtaaactgcatctgcagcttgcggagagtacatagctgactacgttctaggagaccaatatagatcaaataccaaaacagttcaccaacaagcttatttctatgctaaatccctccgactcaccaacatagatgtctttgtcttggacgttgacgacactactctatataatctccagtactttggg

SEQ ID NO: 13622 - DNA, 483 bp, Glycine max
  Clone ID: PAT_MRT3847_112308C.1
ggccgcccttgcttttttctttttcttgttaaatgaatatctgttcacaataatatcgtatttgagagcattaatcatgtattccaaagatttattccttttcatgccattcaacggggatccggaggatcacccactttatcacaatgtctaaccaacgcctgcaacgcaaaaagggtccacttaaaagcagttttatgctagggctcgacgacctgcctagaatatcttaagaagtccctcaatggatgggtggctatacccgggatgtatctgagaatctcaaacgtcatcttctgctatctcgaacctgaccaggtcccctctgacccatgcgctatgacggataccaaccggacttctgtctggagggagcaaggccctttataagatgacaagctgttcctctgtaacaaaaggcgttggaaaatcgttaccacttgggtggtgccaccgtgctatcaactcattctgagagatgat

SEQ ID NO: 13623 - DNA, 338 bp, Glycine max
  unsure (1)..(338): unsure at all n locations
  Clone ID: PAT_MRT3847_112309C.1
aggggcgaactgctgaggagaagcttaaacgcagtttatttggtgatgatgaaggagctccacttgaagacattgctgaagaggaagagcaaggagaagaggaagaagatgcagacattggagaagatgatgaaatggccgacttcattgtggatgaagaagaagttgatgagaatggggctcctatgangcagaagaagctgaagagaaagaaaactaggcaggctcctggagtctcttcttcagctctacaagaagctcaagaattatttggtgattcagatgagttgattctgaatcgccagaaaaatctagaaatgagtgaatttagagagact

SEQ ID NO: 13624 - DNA, 356 bp, Glycine max
  Clone ID: PAT_MRT3847_11230C.1
aaaaaaaaaaaaaaaataaaaattatattaaaaaaaaaaaaaaaaaaataacaaggaaaagaataaaaacaaaagaaagtatgaaaaaaaaaaaaaaataaaaaaaataaataaaaaacttaaaataaaaaaaaagggactcttatttttaaagtatccattttactttacactttatttccacttatatttttttcttaatgtaccccaaattcaatttcattgtcattcttttaaaaacatcttaatttggaaaaacctttgctttcccaaatttattcactttgcaaaaattcctcttttactaacttggcgtattatctaaaatgccctcacattttgtctttacaaaaatt

SEQ ID NO: 13625 - DNA, 551 bp, Glycine max
  unsure (1)..(551): unsure at all n locations
  Clone ID: PAT_MRT3847_112310C.1
atcaaacatgtggcggtgtaattaagattctataaaatgcataaaattcattcacaacaaggccagcaattaggaagacagacagacaccgcaaacaagatagaatcagtctcagcttgagtagaatagatagaatgctgagggttcgactctcatgtcctcatattagaccctagttgtgaatgaattttatgcattttatagaatcttaatgagaatgatcaaacatgtggcggtataatttcaaattaccttgcataatttaacttgtataggttggagtgtgttaagttggaaaattacaatttttagaattaacggtttgcagttgagggtgctaaacacatgacataatatccttttgtaataatccatgcatcagtgcagtaatgggcatcaaacatcctagatctattaaggtttcaatgcacaaagccacctatgccatttcagcgaaaaatttatctatgaactctacttacgtgaataataatctacataattgagtgtatntattgatattgatataattattataaagggagaaaaac

SEQ ID NO: 13626 - DNA, 353 bp, Glycine max
  Clone ID: PAT_MRT3847_112311C.1
gataccaaccagaaattgctaaattacccaccgtggctacattacttcaaacttagacatcaaggaacaaatcatgaccccaaaataccaaggtgcaccagggacgcaacacccctgcattcattttcaccccattagctgacacctaagaaaggcagaacggtacactatctgaggaatcgccttgtagaagagacacatgcttgatccccagaaaaggccgcccttagtgacctccgcagctccgcgaatccgcctgactacccaacccagagactacggtacggaccaggcaacagaacactttcgtcggccccattgatctggacctacgggatgtcagaatcactggg

SEQ ID NO: 13627 - DNA, 269 bp, Glycine max
  Clone ID: PAT_MRT3847_112312C.1
cctattcgaacattgatccttcaattgacttcactaataactttagtcaagagctgcaactacaagttaacacggctgagcatagtggatatggaatgtgtggttcagggaattatagagactcagcatgttgaggccttggagattcttcttcaaggactatgtggtgttcagagagaacgattgaggatccatgaaatatgcctcaagagtggtccacatctgggcactgtagcctcagaggttcaactcttgagtgacctaaagca

SEQ ID NO: 13628 - DNA, 1044 bp, Glycine max
  Clone ID: PAT_MRT3847_112313C.1
gctggaaagctttttctgctttagatcgtacactcccctgtttcctcccttgttcccacgcgttcgctcctctcttgtttggcagctattctttccggtggttccatagttccgttgacgcctttccttagttcctctcattcgaagttgtagggacagctgtgcaaggtggatatggaatgcgtggttcagggaattatagagacacagcatgttgaggccttggagattcttcttcaaggactatgtggcgttcagagagaacgattgaggatccatgaaatatgcctcaagagtggtcaacatctaggtactgtagcctcagaggttcgactgttgtgtgacctagagcaagctgaaccttcgtggactgttaaacatgtaggtggtgcaatgaggggagcaggcgcagagcaaatttctgttctggttaggtcaatggtggaaagcaaaacaagcaagaatgcactgcgcatgttttatacactggggtacaagttagaccatgagctgttgagggtgggattttccttcaatttccacaggggtgcacaaatcactgtaacggtttcatcaatcaataaaatgctgaagctgcatgcaactgatgaggccgtgccagtaacacctggtatacaaatggttgaagtaacagcacctgcaactgctgaaacctacgctgaagttgcttctgctgtgtcatccttttgtgaataccttgcaccgcttctccacctgtccaaaccaggcatttcaaccggtgttgttcctactgctgctgcagctgctgcatctctaatgtctgatggtgggggtacaaatttgtagtgggactataccgttttctttataaacgctcactttatgtacattgaagttccttgaccccacttcttaattataatagagacgtgaacatagaattttcacttgataataacatgtaaaaatttaacatgggaacatgccttcccattattaattgtttcatgatggattaattgaaatttgatcctaccaaattgttttgttttttaaaaaaaa

SEQ ID NO: 13629 - DNA, 587 bp, Glycine max
  Clone ID: PAT_MRT3847_112314C.1
aacaaaaaacaaaatctatggtgggaaaattttaaaaaaaggattaaaaaattcaagggtttacttgaaaaagaaaaaaaggggaattaaaaaagaaaaaaaatagggctaattaaagaaaaatatattttcaaaaaaagggttttcacatggaattttataacaatcaaaagctttactaattattggggggttccaaaaaagcgcccttttatttcaaaaaaaggggttcggaacccttttgggaaaaaaaagggatattttacaacattgaaagctttttcattagcccaatttatttttacggggaattcaaaaagctttttttggaacaaaaacaaacggtaaacaaatttcaattaactagggccaacgaatttttttaaatcccaaaggaaatccgaatataaatttcatatataaccaaaaataggaaaaaattcatttgggaaatttaccttaaacctaaatacccacctatttagggggggatttttgggtggatttttagatatttttctaaaagattctaagggccttttttaaaatttttttatcggacgcgggggcccacccggaaattccgg

SEQ ID NO: 13630 - DNA, 1332 bp, Glycine max
  unsure (1)..(1332): unsure at all n locations
  Clone ID: PAT_MRT3847_112315C.1
aatctatgccttcaatttaatctaatggctgaaaatttattaatcggagatcctccaattattttcaattggagaggatctggatccgagattctcctggaaagcgttcgcgtccgctcgtcacgttcccgcccactccctctcgcgttcgccctattcgaacattgatccttcaattgacttcactaataactttagtcaagagctgcaactacaagttaacacgggttttgtctcaattcttaagttattttactttatctttgaatattgtgtagaattttctgtataaatactggatggatttatctgtgtttatctgtataaatattggatggatttatcaaaagtgttagattgcataaataatacatgcatctcgtgtgtaatgcagctgagcatagtggatatggaatgtgtggttcagggaattatagagactcagcatgttgaggccttggagattcttcttcaaggactatgtggtgttcagagagaacgattgaggatccatgaaatatgcctcaagagtggtccacatctgggcactgtagcctcagaggttcgactcttgtgtgacctagagcaagctgaaccttgctgggactgttaacatgtaggtggtgcaatggagggagcaggtgcagagcaaaatttctgtctcgttaggtcaatggtggaaagcaaacaaagcaagaatgcnctgcgcatgttttatacactggggtacaagttagaccatgagctgttgagggtgggattttccttcaatttccacaggggtgcacaaatcactgtaacggtttcatcaatcaataaaatgctgaagctgcatgcaactgacgaggccgtgccagtaacacctggtatacaaatggttgaagtaacagcacctgcaactgctgaaacctacactgaagttgcggctgctgtgtcatccttttgtgaaaaccttgcaccgcttctccacctgtcgaaaccaggcatttcaaccggtgttgttcctacagctgctgcagctgctgcatctctgatgtctgacggtgggagtacaacgttgtagtgggactgtactgttatctttataaatgcacacttgacaataacatgtgaaaatttaacgtaggaacatgtgaagttccatgaccccacttgcttacttcatataaagagaagtgaatattaattttcacttgacaagaacatgtgaaaatttaacgtaggaacttgtcttcggccttcccataaatcaattgaaatttgcccctccccttttgttttgttttaaataaaaaaaaacaaaaaaaaaaaaaaaaaaaaaaaaaaaaataa

SEQ ID NO: 13631 - DNA, 402 bp, Glycine max
  Clone ID: PAT_MRT3847_112316C.1
gatgcgtcgttttgaggaaaagaaatttgagatgcgcaatggcgcaaagaagaaagaccaacgaagttcaaaaccattaattaaccaattctcattcgttggttcattcaattctcgatcccccatctaattagggtttccatgctctcccaaacaagaagcgattaagattagatttttcagcaatgaacaacaccaacccaaccaagaatgctgcaacgccgtcgtttttcaccaaccctggaacaccctccatccccatgaaccaccttctctcccaaacgcagcctcaaccacaaggtgccacgtcacacttccacggccactttcagctttcacaaccccaaacccacgtgctcgcaccacaacaacagccacaccctcatcctcatcctcaagtgc

SEQ ID NO: 13632 - DNA, 354 bp, Glycine max
  Clone ID: PAT_MRT3847_112317C.1
gacactatatgatataccttgaaatgatgccatgtgcccaaagcaacgcttaattaaaacctatgtcgaagtgccctagtacccaccgaacgtcgagttccataacctaccaaacgcgtctaattttacgcaacgtacagatgccgaaaatgtatcaaagccggcgcggattaataagaacccatcggtgctaaacatcttacagacactaatccttattacatatggaagtcacttaatagatactctgctccaattgcagcccaagtatatacaacctgttgcttggccacattcattatgaagtgcatggcctaatgcacctgtgatatctaggcctatgccaagccacac

SEQ ID NO: 13633 - DNA, 258 bp, Glycine max
  Clone ID: PAT_MRT3847_112318C.1
gtgaacctgaaaagactcttttttaatgccatgcaaccctaatatgtaagggctattctgcaataacaagagtaggcacatttaccatacaaaagtagggaagattaacaaaatattccacttgggctaattatcctaatgaggtggatttctgaaaatcaaagtgccttgataatctagaagaaggcccccatactatgcgagtggcatgactatttgtggcctcgaggagctcgttcacgtccaccagtggaatca

SEQ ID NO: 13634 - DNA, 322 bp, Glycine max
  Clone ID: PAT_MRT3847_112319C.1
ggaagcgctttgtgaccatcgggggagttcccggcaaagagaacacttggttcaagatccagaaaacaggcaagtatgcatacaagctggtgtactgcccaagtgacgagaatgcctgcagcgatttaggcatttactacgacaaggaggccgggaagaggtggcttgctttgagcgactcgccattggaggttatgttcgtcaaacactgatcgtcactactcaacttcaaccctgcctgaactgtttgagcttggcttttgtgttaaatttgtatgcaacctttatgtatgaataaagtgggtgaggatcctttgtagcc

SEQ ID NO: 13635 - DNA, 558 bp, Glycine max
  unsure (1)..(558): unsure at all n locations
  Clone ID: PAT_MRT3847_11231C.1
ctcgagccgattcggctcgagataaaaacgtccgtctctttgtagttgttgtttcagatctgatctgaatgtgattgatgatgggtgctattccagaggccaacggaaatgtcgccgacgaagaaaacgggagcagcgttggtggatccatcgatttcggcacggcggaggccgttcaatacgtccgttccctcaccgacgttggcgccatgacgcgcctccttcacgaatgcatcgctcaccagagagcggtggacgttgaactcgacgagcttctgtcgcagcgcaccgacctcgaccgccatctcctccagctccagcgctcctctgacgtcctcgacatcgtcaactccgacgcagactatatgctctccaacgtcgcctccacctccgacctcgccgaccaggtcagccgcaaggtccgcgagcttgacctcgcccagtcgcgcgtncgcaacacgctcctccgnatcgacgccatcgtggaacgcgccaactccctcgaaggcgtncaccgcgccctcgaagccgaggactacgaatccgccgcctgctacg

SEQ ID NO: 13636 - DNA, 480 bp, Glycine max
  Clone ID: PAT_MRT3847_112320C.1
atgcagattaataatgccttcataattatgggccttaaaaaagaagaaacaacaagaagtgctagggccttattatttgacattattatatatagagtttggaaattgggaagcagtaagcacatagcagtagcactcaaaaagactaaaaaaacagcttgagagggtagaaaaccaaaaacttaatcagaggtgggggttttgctaatattgaaggtaaaaagttactaatttggagggagaggggatttaacaatttttttccaaaatttgagcggtttgtctttaatggccgttttgtataaaggaaggggcgtaatttgaaagggcaaaccacccagcggggcattgataggattaacccttttttgggcctttcgcttttttttattggtcaaatcttcggataaaaaactcaaatgtggcatgtaaggagtggaattggtgtaacccaagtgggtgcaacaatgtgcgctggtt

SEQ ID NO: 13637 - DNA, 335 bp, Glycine max
  unsure (1)..(335): unsure at all n locations
  Clone ID: PAT_MRT3847_112321C.1
gggctcgagaattcattcattgagtggattcctttcnattcgtttccttcgtactccgggttcacgtcgttcgggtctggaaagtggggaaaaaagagaacaccacagtaccaaagccccattgctcgcccttctactctaatgcaatcaacacacaaactagcgagatctaattgagccagagaaccaacaatcaggggagggcggactacgacaaaccgggtgttgaaggtgagatgaaagagaccaccggtggtaccagtccttctgggagtggaaggaacaaaaacaaaggtttcttgttgcgtattaggaacggcatatttaggttacac

SEQ ID NO: 13638 - DNA, 836 bp, Glycine max
  unsure (1)..(836): unsure at all n locations
  Clone ID: PAT_MRT3847_112322C.1
ggctcgagtctgaatcaagcttcttgtgatcttgtgtcatggtcatattgagacatgtgtgtagtccaccccattgcgtgacttctcatgaatcatttttttagataaaatttccctcatatagaaagggcaaagacactctgcacttttattcaagcaacaaacgacataattgttcgatttgctttcaacaactttgaaactttgatgcaccttcataacatattgtttgactgcatttttgaccgcatctttactatcaaaatccatgccaacatattattcttggccaacattaaaactcgatggcatctcattaccacaaatgtcctcctcatcaggatgactctagttgatattaatataatgcaaagtatcattccaaaatggattttgaattccttgtacacctaatagttcaaaaataaattcaaatcatacttatttagcattgtatacaattgtcatcaaatgatcaatgtattcacctattttttcatgtaaattatttatatttcttggcagttccgactcattaagagatagattatgtccacatgatgtaacagagtttgtagaatgaaacatagaaccaccagcaacatccttttctacgtacaattctagaactgacatttgttgttgttgttgaaaactttcgattatagtttcaacatcttcgtcatcacaaatttgcaaggcaacatattttcctgaaactaaaatctacaacttatagtataaataatttcattattttctaactttaccttatctcnnntttttttttcaaagcattgaaactaattccgcgtttaatctgaatcgccttttta

SEQ ID NO: 13639 - DNA, 323 bp, Glycine max
  Clone ID: PAT_MRT3847_112323C.1
aatatctccacgagcacaacaatcctcctgtggttcatagagacttaaaatgctctaatgttcttctggattctaactttaatgccaagttatcagattttggatttgctgtggtttcgggaatgcaacacaagaacattaagatgtcaggaactttaggatatgtggctcctgagtacatatcacatggtaaactaactgataagagcgatgtctatgcttttggggttgtccttctctaactcctaaccgggaaaaaacccatggagaacatgacctcgaaccagtatcaatcccttgtatcatgggccatgcctcagcta

SEQ ID NO: 13640 - DNA, 888 bp, Glycine max
  unsure (1)..(888): unsure at all n locations
  Clone ID: PAT_MRT3847_112324C.1
aaaagagaacaatagagaaaagggtttttccccccaaaaaaaactcttttttttttggaagtcatcaatggcaaacataatgcgtaatcactagctaacaataagaaattgtaattatcattgaccatacattctaacatgagatgattatgttagaatatatgttagaagtcaacaatggtctttgataaatatagatattatttcaacataaatcattgtctttctttgcatttttttttctccagggaaaagttttaggattaaggagactagtttaaaaaagttacagatggagtttatcaatcagatgatcatttccacccaaaaccaatgaagtgctctgctacaagcaaacaagaatagatttacaagacaaagaccattggaaaagagaacaataggagttccaaacttttggaagtcatcaatggcaaacataatgcctaatcactagctaacaataagaaattgtaattatcattgaccatacattctaacatgagatgattatgttagaatatatgttagaagtcaacaatggtctttgataaatatagatattatttcagcataaatcattgtctttctttgcatttttttttctccagggaaaagttttaggattaaggagactagtttaaaaaagttacagatggggtttatcaatcagatgatcatttccacccacaagccaatgaagtgctctgatacaagcaaacaagaatagtttcacaagacaaagaccattggagaagagaacaataggagttccaaacgtttggaattcaacaatggcaaacataacgcctaattactagctaacaataagaaattgtaattatcattggctnntatattctaacatgagatgattatgttgatgaa

SEQ ID NO: 13641 - DNA, 353 bp, Glycine max
  Clone ID: PAT_MRT3847_112325C.1
aaactgctaagaaggaattctagtctccctatatttactcatttatacgttaaagcgacaacacatgttgctctcattcacatctcaatgcgccttcttcttatgcactacaatttgcaaccactaacaatattaacaatccattcttaaaccccctcaaagatatgccttcattgaatgttttgctttaagttagtggacaggaaaccagatgcttctttattcttgactgctctagaaggattcataacgagttaatcttcaatactattcagttaactttaccaaatacaatgaatgctatacaattgcatgaaaagtaaatagttcccactctcaggttaatgatgtaa

SEQ ID NO: 13642 - DNA, 393 bp, Glycine max
  Clone ID: PAT_MRT3847_112326C.1
agaaaacctcacaatatttaaaaaatgatagccttgtcatgcatagcactgacaggggggtttagggtccctgtgagggatctaaacaagatgttattttgccacagtcatacatggcccattattttaaggacttgttgtaatctaaggtctgttgtgacatactttataaggtccaaagggaacgcttcaaagcttataatttgatacttgcaagccgatctcctgtgtctagagcccaagatttctggctaccttaggattctaccttatagaaagtattgtgagaggatattaagccacttactttcaaggcaatacttcacttaagatactctaacatacatatcttgcatatatgaggctatgaactcaattctcctttgctcatac

SEQ ID NO: 13643 - DNA, 344 bp, Glycine max
  Clone ID: PAT_MRT3847_112327C.1
cttgtattttttttttgctttttttttttaatttttatattttccaataaaaattttcaatattataagcaaagaataataattaagattaaccgaactttaaatacaaacgaccaatttccaaacattaaaaaaataaaaaaagaaccaaccatgagattaatacaccacataaaggtccaaaacaattgaatttgttaaaaggtaagaaatgaccattttatttaaaggatgttttgttaaacccaaaacaccaaagatgaaggaaaaccattgaagccctaatacataagtttttggactacacattaatagtctataataggcgctaattaagggctatt

SEQ ID NO: 13644 - DNA, 327 bp, Glycine max
  unsure (1)..(327): unsure at all n locations
  Clone ID: PAT_MRT3847_112328C.1
ccgcgatcanaggttgccgcaccttaaaaccggnaacnagagcantcgttacttgatttcaagantgctctncaatgtactttcctaacttctttgtgccacgatttactgtaagaggnnagaaantgcagctncttctcgtgnctgggtacancagtgcttccgtnnaatgcatgctncacgtgncatccattgcttcaggttncatctcagcnctngcanacaactactaccctcatcntngnatcntcagaggaactatacggtggtgcaggnnttntnaancactgtgctatacttgtatntgcttncagccaccagggggtt

SEQ ID NO: 13645 - DNA, 625 bp, Glycine max
  Clone ID: PAT_MRT3847_112329C.1
aggttattaagtccaagagtctacttcatataaaaataataataaaatatatataaatgacatacaaattaaacattttaataacataataaagaaaaatattaaatcataaattctataatacttaaataactaagtatagtaatgcaccactactagatatttagtaacttgtggaggtgatagtcgtggaagaagattttcgtcaagggtttgatgttgttgtagaagtaagggttgttcgattcaaagacgacacttgaaatgaaggtatatgttgaaccttaaacatatagaaaataacttaaaatgacttacattttagtataatatttttaccttgttgactcgctaatttggtggtaaattcgagagtctaccgaatttattataaagagagcttgctcatgagccaactttcataagataattggattcataaactcgtaagagttaataaattagtttaagagtttgataaatatgtccagaatccaactcaccgatctttttggtcagaaagaaaaaatataattaagccaatcatagttatatgtgtggaaacttttatccatgcagaaaaattgctagaaagtaccagaaatgcaaatgggaaatgcttaac

SEQ ID NO: 13646 - DNA, 121 bp, Glycine max
  Clone ID: PAT_MRT3847_11232C.1
gtagatcttagttgtgagcagtagattctccaaatttggcggcaatgggtacggctcaccgctggagatctgtcgaccatcggcgtaatcacgtccgtgtcgcttctccattgcgtcattc

SEQ ID NO: 13647 - DNA, 220 bp, Glycine max
  Clone ID: PAT_MRT3847_112330C.1
tgctgacactattggcatcagactcttgctcctgtctgggttgaccctcacaggcactgtcataggtacgatcattgcaacccctcatcttgttatcttcaaccccatccttgagcctgctgcgtttgagctgatcctagttgctcctggctttatgctctctgggggctgtggagtggctgccatagctgctttgtctcggatttacaactatgtggct

SEQ ID NO: 13648 - DNA, 1822 bp, Glycine max
  Clone ID: PAT_MRT3847_112331C.1
gcacgcgggacgcgttccgtctcaaatatctggtatacgtttcgccacaaattccgcgattaacgctcccccaatccctttctctctaaaatctttgaaaatggtatccaaaaacccgaacccgcccgagggattctacttggatcccagtggtggcatgcctcttcctgggatgcctcccttcgcctccgtctccgccgcaaccgctgcgaactcgccggaggacgccgccaagaagatccgcaagccctacaccatcaccaagtcgcgggagaactggaccgaacccgaacacgacaagttcctcgaagcaattcaactgtttgatcgtgattggaaaaagattgaagcatttgttggatcaaagagtgttatacagatacgtagagaggcacagatatactttttaaaagttcagaagagagggacaagtgaacatcttccaccaccccggcctaaaagaaaagctgcccatccatatcctcaaaaagcttccaaaaatgctcctgtactctcacaggtatccggacgttttcagtcttcatctgctttgcttgaacctggatatatcttgaagaatgatgccccaccaatgcttaaaactcctattatgaacactgttgcgtcgtcctggtcgaacaacaccttgcaaactgccaatttatctcctgtgacaaaagtgaataatccttgcagtagcggtgaaagcactcctaaagtgtggccagttggtgaatctaatggtcaagggaataaaatccatccattgagagttcttccagattttactcaggtatatggcttcattggcagtgtatttgacccaaatgcaactgagcatctgcagaaactaaaaaagatggaccgcatagatgttgagacggtgctactgttaatgagaaacctgtccatcaatttaactagcccagattttgaggatcatagaaagctgctttcatcatatgaagttgaaccagagagagatgataactatcaacgcggatagacccatgcacgatgagcagttgaagagtgctaatgggatggaggcagaaaatggcttcattttccaccgattggatgcagtcagggtgctattattttccatgatgtgataaagatactgatggtcatggcaaggcaacaaactgaagacgtttgagtcacagctaatttttattctgctctagatttttattgctgttgctcgtcatcttagctatgcaaatcataattgtcaaatttaactattatggattttgagcatcatcgaaagctgctttaatcatatgaggttgaaccagagagagataataaaaaacaaaaaagataaatagacccaaaaaaaaaaaaagttaaaaagtgctaatgggatggaggcagaaaatggcttcattttcccccaattggatgcagtcagggtgctattattttcgattatgtgataaagatactgatggtcatgtcaaggcaacaacaaactgaagacgctcgagtcacagctaatttttattctgctctagattttactgctgttgctcgtcatcttagctatgcaaatcatttaatttgaataatttattatgataccgtgtatatatgaatctactattaaaaagaaaataataatgtgagattgtataattacttcctagttctgtgtaggtctgtacagaacctaataattgtgtattaaaattccccaaaaatcaaaatatttggtagcaagaatattatattctatttttgtgtaggtctgtacctaaatttgtgtattaaattcagacaaacatctaacagttggaagcaagaatattatttc

SEQ ID NO: 13649 - DNA, 349 bp, Glycine max
  Clone ID: PAT_MRT3847_112332C.1
ggggaagggaaccttgagccgccacattaatgaatatttaggatttttaagactttgacactggcctgtgaaggaaccagaggtgcaaaagggagaattcaacaaaacggccgtgagcacccaagataggcccacgggcatttaattttatggctagggaaaaaaatttgggggccagcaaggggagcctagactggataaaaaaaaaaaactaagacctaaggtaaagaaggcccaaacggaaaaataaaggcccgcgtagggggccgtatgaccagacttccaggaacatttaacgattgtgggacagcaccgagcccctgccacctaataaaagggggcgagatct

SEQ ID NO: 13650 - DNA, 269 bp, Glycine max
  unsure (1)..(269): unsure at all n locations
  Clone ID: PAT_MRT3847_112333C.1
ttttccctctctttctttgaaaattcccccgattntctcgagaaagtgaaactggattatgagctttgaggacatcaagctctgccggcctcttcgtctaagcgcgcgtttataaacaggaaacaagaccccacacaagcggtggctgtccgaatatttcacatctacaccggcgtctccacctttcacagactcttcaacaccctcttaacccccaaagacaccccccacctcctcgaaaaactcctcaagacaagactacatatttt

SEQ ID NO: 13651 - DNA, 336 bp, Glycine max
  Clone ID: PAT_MRT3847_112334C.1
ttcggttccctttgctttatgatgaactggggttggaatatattaaccatctaattattagagaagcatacagagggcttatacctgatatgatatgtcagaccatgtgcatcactaatatgtaagtgtcaatcaactataaacattatccacatgcgcatgtatccagtgctgcgtaagcgtctttaacaggaacaacagtgaaacattgcaatgacactctaagacttccttgcacgattgatgttaaattccagggcagaccgaccaaaaaggcttacagatgcctaaagatctagacaattgaactatgtgtgcctcgtctatgaggtataa

SEQ ID NO: 13652 - DNA, 976 bp, Glycine max
  Clone ID: PAT_MRT3847_112335C.1
ggcaaaacttcttgcatgcatttatgtcttcacaggcatggctcttgtagggttaattcttagcaaggcagcagattacattgttgaaaagcaggaaatatttctagttagaaccttattcaagggtgaaaattttggtccagaagagctttccaaagaggtcgaaactaacaaagcaaaatacaaattcattctcgcagcatccgtctttttggtgcttatgatttcagggactatttttctgcattatattgaaaatctagattttgttgatgccctatattgtgtttgttccacagtcactactttaggttatggggataagagcttctcgactactattggccgtgcttttgctgtgttctggatattgagcagtaccatttgcttagctcagtcttttgcttatcttgctgaattttatactgaagaaagacagaaagcaatggctaaaatagttcttacaccaaagttgtcactccttgatcttgaggcggctgatcttgatggagaccatgttgtcaggtaaggtagaacaattactcttggtaaccatttgcaccaagagacgcagtaagttcatatatatttttctagcattcatagattgttccaatatttagccgagttaagtcattaaatgctcacattcaacatttttcattttctcagtgccacagagttcgtattatacaagttgaaggaaatgggaaagatcaaccaagaagatattttagttgtgatggacatttttagaaaactagatgttgataaatcaggaaccctgacagaagctgatctaaaatattctgaatcatctaaaccatagccctaggccagcctagtacatcatgaatttcaattttcattttaaactttgtcatctgtatcatcttttatatacactgtattgaggtatttcaaagtgttcctgtaggaactatactctctgtaagctacaaggatatatgatgtt

SEQ ID NO: 13653 - DNA, 639 bp, Glycine max
  unsure (1)..(639): unsure at all n locations
  Clone ID: PAT_MRT3847_112336C.1
cggaattcccgggtcgacccacgcgtccgctgacgtccagaagatagttttctccatctatccgaatcgcttttactcactcgcttcatgactcggcgcaagcgatcatcatcatcttcttcttcctcgaccaagaaattcgaggttttcgaattcaatgacgaagacgagaacgtcgagaagacctctcggaagattctccgcaagttcgcaaaccctagcactagtagtagcaggtctcgctcttccaccgtcaccaaatacgacttcctccaagccttggcgagcggtaccaattccaaacctctctccgatgacgttaccgccgatcctattgacctcgattccgagcaagaagaagaaatgaagcgctcaccggaggaagttgccaacaaacccttagaggttgttgttgatgatgatggtggtggtggtggtgngtggtggagatggcggtgttgttgatnatcgaggaaaatgtgataatcggtgttcaatagacacaccgctgctagactccgctgatgaagagattccaggccacactgatttcgctgaaagcgatttggactcgaaaaatcagtcacttgatgtggtttctgatgacggcgatagtaatcaaatgagttcctcttcgac

SEQ ID NO: 13654 - DNA, 184 bp, Glycine max
  Clone ID: PAT_MRT3847_112337C.1
agataggcttacttcgagggaccatataggaactagacaacgggagattacgttgaactcccacgcctacctgttgacccatcagatgttgtacctgtcaaagctgagctggagaagaagaaggcttagcgagcttacaatagaccagcgtggccttgcttcaaaagggacaacgctgcaactt

SEQ ID NO: 13655 - DNA, 490 bp, Glycine max
  Clone ID: PAT_MRT3847_112338C.1
gtttcaggtgtcaacgtgagaagaaagaaataagatagagaaagaaataaaagaaagaatgagagagggagggggaaggaatcagaccctacaccgttgacaaaattaggtagtgactcactcttcattcttcctataattcttttttttcttttccacttcttaattcttatttttgctttcttttgttctctgattttgtagtaataactaataattataaatattactattattactagagagtgcgcgctcgcctgtgatgcgttgcgttgcctcagattcaggcaactcatggtggtatgtggaaaagggtgtcatctttttagggtttccttgtgattcttgagactttaccttttttctgggtttctttctcatgaccctccttcttctttcttgtgtttagagatatggggcgtttttgtttttgaaatatgtttccttttaactggtggggtttagtgcaatctgtttttgttcagataaa

SEQ ID NO: 13656 - DNA, 378 bp, Glycine max
  Clone ID: PAT_MRT3847_112339C.1
gacttatctcaaccacctctctatgccaatctctctgactgtgcttctataatgactaggagcgcgagatacatcactgactgctacaaataacttattctctccaaattctcatgttcatcattaaccaacaactgcttcatacaagattcacccagtagcaatcatacttatatctctaatgcagacagatactcatattgaactcataatttttaacatgctggattagctacttaacaaaacctcgattgtgaccaacacactgcattcatttatgaagggacctcaaggcattactgcctgtcctaaaggtataatcacatgtgccctgactttcataattatagtaacagacgtcactccctattgcaaaac

SEQ ID NO: 13657 - DNA, 160 bp, Glycine max
  unsure (1)..(160): unsure at all n locations
  Clone ID: PAT_MRT3847_11233C.1
ttcggctcgagcacaanatnagctttcaactgttgctcngcctctgnnnagngnatgntgtgggatggngnnctngnntggntnnatctgtgtnnanagnacnactgtttccctgcctnanacccttatctagaagnnnaagaatcagnncatacnccnn

SEQ ID NO: 13658 - DNA, 132 bp, Glycine max
  unsure (1)..(132): unsure at all n locations
  Clone ID: PAT_MRT3847_112340C.1
nagtnanantaangcgtacgtaagcncggaattnggcttcgagacaaatccntnctctntntctccaacgngnngaangaaangaangnagtnngnggagaatcccaaaaaggcgncgatgangtggnacnn

SEQ ID NO: 13659 - DNA, 1124 bp, Glycine max
  Clone ID: PAT_MRT3847_112341C.1
atacaaggaagtctgaaatttgacgagtgacgttccaaccggccacgcccaccgaaagggaaagcgctggaaaatgctgcgttccaccgcgttttctgttttcgggaagattaacttcaaaggcttaaaccaagcaacagagcacccagatatagagatttgactagtcatatccacgtgctgcatacacatacatacttttgttgtgctcagcttctattgtgaattgaagaacccatttgcattcaggcttagatcgcttaccacaccacaccatatggctgttactgtggccatgttacctcgttggtcggtgtttcttctttttctgtttgtcttgtgtagctcaggagcaaaggttgtcgccattgatgtacatgcagcaaagcgtctcatccagaccggttccatttatcttgatgttaggacggtggaagagttcaagaaagggcatgtggatgcagttaatgtccttaacattccatacatgttgaatacacccaagggcaaggtaaagaatccagactttctgaaggaggtttcatcagcttgcaacaaagaagatcatctcattttgggttgtcaaagtggggtgagatctctgtatgcaactgctgatcttctgtctgaaggttttaagaatgtgaaagacatgggaggaggttatgtggactgggttaaaaacaagtttccagtgattataccagtggccaaagaggagctataataagtaatggataggaacattcatctttctttctaaatggttttatcagggagataccacatcccttcatatgtatctacttcagagtgttcattagttcaacttacaatacttcatttcaatcctgcggctatgcttccaattatatttgtatctattccaactatgtaacacaagcattatcaggggaagactttcagagaccactctcattaattagtcttcttcatgtgcatataagatggactcatgatttgatgattgtcttgttattttgatatttatcgccgtttgaaaaaaaagcaattggattcggttaaaatcgaattgcaagtaaagaaagaacctttggacttggttaaaaatgaattgccagtgaatgcacctatagtcggtt

SEQ ID NO: 13660 - DNA, 252 bp, Glycine max
  Clone ID: PAT_MRT3847_112342C.1
tttcctttttttttatattttttgctatttggcgtgagacgccttggaggtttttttcaattcccaccacacgaatatgttcacattatcggtgggagctgtctgattgaaaaccagggaaagtacaaccaaattcacatgcttgggtgtttcactgaggcctcctggattattttacttgaagacggttatcgacatgaccagatactagtatagggttttgaaattattcctgggcactacccgtctttg

SEQ ID NO: 13661 - DNA, 579 bp, Glycine max
  Clone ID: PAT_MRT3847_112343C.1
aaagggataattgatctatctataatttggctcctcactggactaatcatacaagattgaagaaataaaaaccaatcaccaaaacacacatatgcaagtttgttgtttcattttctatcactaaggtcattgaatttcactcacattcatatgcacaaattggaaggaagcaatccaatgaataaagaaaaacagattgtctttttatctttacacacacgcacacacacactgactgtaaccacttgaaactgaacttgactctgttaatgttaacatgatgatgtaggctttgatcaaatatgcatgcttttgttctgagtactcattgctttccttcagcaggcactgcttttttctctgtggcagcagggtaagacaaccttcttctagctttagtagttccttttgcattacttaaaggttttgtccctttagcattagctgaaggagttttaactgaaactggtttttttgatgttggtgaattcctatccttctgaacttttcttggcttcttattttgatctttctcggggctagtgtttgttacacttggtacgcggctttcccaagggc

SEQ ID NO: 13662 - DNA, 556 bp, Glycine max
  Clone ID: PAT_MRT3847_112344C.1
aaaaggaagcaggggggtccacttttccaatttccaatgggaaacaaagccacaaaagtttgtaacttgtgtgcactataagattgtatataacgttataccttttacctatatagaatatctaattagtccaaaaaatgaagcaggaaaagaaataatgtaatgtaaaagcctcccataattaacacttgacgcaaatatgctctcaaatcctcatttccatagtttcacccaatgatcatggctagctgaggcaaccatttcattttcgggagaatctgctagtccagcaattaatcccttgtgagcatgaacagcccatgttttactgttttcagcgggactccacaattccagggactgataaccaccaataactaagaggttatgatattccggatgaaatatgcatgattggaacttgtttccggttgaatgcaattcacttatgcattgtccgtctgatgaccaaatacgtgcactatcttcactgacggaggcaacatagtttccatttttatcccaacaaatggaacgaacatctttaacatgtccc

SEQ ID NO: 13663 - DNA, 305 bp, Glycine max
  Clone ID: PAT_MRT3847_112345C.1
atgctaaagaacactacatgatttaaaatacattcatgaaagtgtatctctaacacagtacacatcaggtaccggcgcgggcacatggattagaatacgcctaacaggtgtttatcgttctttaatcaaaccatttgtaaagtgtgaactattcatactaatgcaattacatggagctagcgatacccctctttgatgacgatccttcagaggcgacagttgcgttttaaagttcaacagatttcttgctaacatagctacaaagtttattgatcacggctttgatcccagtgtgcacctgcagc

SEQ ID NO: 13664 - DNA, 1002 bp, Glycine max
  Clone ID: PAT_MRT3847_112346C.1
cccacgcgtccgtccaaaggctagaatatctgtaccgcaggcattagagcacaggtacttctcatctgcgcctctgcccacagatcctgttaagctttcaagacctgctcctaagaaggaatctaaggtttcagatgtaatttcaaacgaaggtcctactgtcttgtcacctccaagaaagtccaggagagtaatgccagggcgtgatgggtctgaaggaaattctttgcaaggagataagtttgatgacagtgttgttagtgtcagacaggcagctggtgataatatgggaaagaatgagccagctccaatgtcactagatttttctctttttggattaaaacctccaaatagacctacaattaccagtgctgacagatcacatttaaaaagaaaattagatctagaattctagcagccaaaacgaatattctatgatggttccatcagtaagagaggggtctgatgcatttgagaaaattctgaatcagcttcgcttgtatgccattccttatatttttctctctgcatgaagctcctatgattatgtagatgtttaaaggaagaagtagtagtgacaacagattagcatctcacttgaatagttcagagagctgaacgtaactatcatagattaaaaagaaataataaccatactctttggatccctttgttctgattcttctgaatttttgttctccacattcaggagaacttgcatccccccacggaaggcctagagtgagagcattttcttaagccctcgctgtatatctgacacttgaaaaagtagtggttgggggaacacttgattttaacattgatttgttattgaacataaagaaaagttattgtttacactttaagtgtataatatgtattttcttgggggtttcaaataggttgtgtactgagcaaaatgatttgtggacattgtggttgattttggctgattgcatgcaatttctggcatgccaagtttgttccatcttggttttatgt

SEQ ID NO: 13665 - DNA, 811 bp, Glycine max
  Clone ID: PAT_MRT3847_112347C.1
gtgcgcacttcccccattaagtcccgtgaatgtgacgcatagaatatttgcttgctttattatatgtatcgacctcaagtaaagctctgtgcaattccaataattattatacagttcctcactatggcagaggaatctaagcctaaatgggaaggtaaatccgtgactgagctaccaggcacggatgcagaacaagtatggactgcgttagaggatttctgcaacctacacaagtggtggcccatagaaacatgttaccaactagagggtgtaccaggtcaacctggtctaatccgctactgtgcttccaccgttgaagaagctgttgttggtgctcagaagacaacaacaaccatcaagtggaccaaagagaagctactcgcgatcgatcccgtccaacgttgtttgtcctatgaaattgtggaaaacaacatgggatttaagtcctatgtggcaacactcaaagtgctgccaatgaatggagatgggtgcaagatagattgggggtttgtctgtgatcctgttgaagggtggagtttccaagacttgaagttataccttgagtcttctcttcagtccatggccaagaagattcagcttgcatgtagtagcactagcacacactaggtagagtgaaaattgagatttgggatttcatatgagaataaatcttgcttttatcttatttctatttcctgattgtgttatagatgttttagtttttcatcccattgagtccaatcagtgctgatccattaaaacttaaaaaaaaaaaaaaaacagctggccgctctagaggatcctagctaac

SEQ ID NO: 13666 - DNA, 710 bp, Glycine max
  Clone ID: PAT_MRT3847_112348C.1
ggcttttgacgccttataacagagtgaatgaggaagatagttttggttccgctgagagagcgttcaattgcgtccatgggaatgcgatggagttggttggggatgcgttcgggaggcttcgtgccaggtggcggcttcttgcggcttcgaggaagtggaagcaagagtgtgttgagcatttgccgtttgtggttgttgcttgttgcttgttgcataattttgttgtcaagttcaatgaggcaatgccggatgaaggggtgagtaagtggtgcgtggaaaaggagaaggaaaaggaagaggagcttcctgcttttgatggagtgggggatgagagtgctgtgagggtgagagatgcacttgctttgcatttgagtaggttgagcttgagaaaatgaatggtgtgaatgttggaagaactagtggatgtttgattggtgaacttgttgtttgggaattgctgtaaagtgtaccttgcaatttggaaaccatgtatgtccatcagttctattatgttggactcttatatggtagcattttgtcatcctaggatgtttttctgaaactgctagttaacaaagtaaggtacaagttatcaaaattttccctttcaatggcaaaggtgtatgtattagagttaggtaaaaatatttacttgattaaagtgtttgagtagaaagaaatctgcaatgaaaaaaattccaattattgtt

SEQ ID NO: 13667 - DNA, 1057 bp, Glycine max
  Clone ID: PAT_MRT3847_112349C.1
ctcaacattaaccaagccttgtgtgggagaagtaatagatttgaacaccaaggtgagtgttcctgaagcgaaaattctgctgcagcaacatctaaaaccataatcttccaacatctctgtcttaacacctcagcactatcgccccattggctcttccatatgtgtatccaccatgagcgagaacttgaatcttcccccaaatccagcaaaacctgaaaagctcatgtaactctacaagccagtggccccctaccccttctcccctccaaaatcgcacgcaagcgacggaccttgggcatctatgtccacagatacaaaccagacccaccagcaccagaaagagaggcagaagtcctttgacactaccctcttcctccctcaatggacacaaatcagtgcttcatcatgtcttaatcttagtgactcattgactttttttccatcttcatcaaacggtttcccttgctgggtgcggatagagtggcggatgtgctcctccacatactcttaatcactgtctcaaagctttcaatggtgccatgaagatggcctgcaaatctagggactatctgttcacatgaaggttcccaactcgtactaccagggaagccaagccatcaagttgcaacgctagaaacaagtaataaaagttaatcaatgcacatatagttttctctttagctagactcttggtccatgtatcgatgatctctaattttcttgtctgctatcgacatacatatatgtacatggttatatagtagtattattagggatgatcaaatatagtttttcctatgtttcttttttactaaaatgtcttcaagaccttgttcttttgagagatcaaaatatgtatcaagaacccagctatttagtagttaattagtactagtactatatagtatttagtatttagttactatataaactcttttccatatacaaattcgggaaattaaacggatgtgctcgattatattatttttaacttagcttacagtttcacatgaacaaagagatcaaatgggggaaattgcaccatttttttcaaaaa

SEQ ID NO: 13668 - DNA, 127 bp, Glycine max
  unsure (1)..(127): unsure at all n locations
  Clone ID: PAT_MRT3847_11234C.1
tatttctcccaaccaattaccctctgtcttcccaaagattctatatttatgttccttgcataactcgtgcttgtggccttccacaaaataccatctattttnaanatactaactaaaatgttaatcc

SEQ ID NO: 13669 - DNA, 549 bp, Glycine max
  Clone ID: PAT_MRT3847_112350C.1
ggctcgaggggaatggaagaagaccaatggagtcaagagaagaggtcaaaactggagtgccagattgcttcaacaccaagcatggatgggacaatgatggggctgtttctgagatctaggatttgaggcttgtcttttgtccttgtgaatgagtagtggtgtcaactctcaagactttctgagaaatggggtctgctcgtaacgaggaattatccatgaaaacggacattttccaatggaatcaagagaagaggtcaaaactggaatgcggaatgtctattacaacaccacttatggatgggacactgatggggtttatgccgtagcgaagaagtggacttgagggtcttggatcagtgtcactcactttgggtcttaggcatggtgttgaaggtgtgcaacaacaacaattgcaacaaaatgaatagcttaggcgtcaatgaatacttctcacgatccatgacttggtgggtgacaaggattctttgttactcatgaaggattaatatggggtcaaggagaaatatggagaccctttcactcactcag

SEQ ID NO: 13670 - DNA, 447 bp, Glycine max
  Clone ID: PAT_MRT3847_112351C.1
taggctgcgagaaaacgacagaagggtgcccaacttctaagaagtttctttctcttctgttcatctatcaaccaaaaagcaatattagtccaggtttcaagtcacaccaatctagagaaaaattgatggcacatgtgagttaaaacaccatgcaaaggaaagacttgcttaacaatttccactgattccaattttagaagcagattctccccaatttcccaatggatttcttttccatcaaatttaagggtttttactgacttgctgttgtttacctgcaaattcaattttacaagagaacgaaaatgttaagacatgtcaaattgtcaataggagagttcatacaagactgcaattccatggtagtcatggccacactactgattacagcaacaaagtttatgagcatgccacatttttcgttttcatcatcacaagaatgctttt

SEQ ID NO: 13671 - DNA, 223 bp, Glycine max
  Clone ID: PAT_MRT3847_112352C.1
gagaaccaacagatttctgtagacgcataattttacaatttttacagatatcggtttaaaatattgggccataactgaactatccaatagctacttttggggtcaaatgatttcacaaacttaataaatcgggtaatatgattaataatcgtataggttaatgataaaagctgtgtttcaaaaaataacagtgcaattttacaaatctggcaactttgacatt

SEQ ID NO: 13672 - DNA, 764 bp, Glycine max
  unsure (1)..(764): unsure at all n locations
  Clone ID: PAT_MRT3847_112353C.1
ggctgagaaaattggcatgaaatttgaaacactagtggtgagcgcgcttcatctttttacattccctccattttcatttcacgatttcctccctatcacaatcataatgactaaaagcctcctctcttcttcttctgcttaggattttactctcttcgcaaattcattttctacattcccccctctctcaagtctcaaccatgtcttccggaaccctagaaaacgagaaacctcaagtggaagaagaacaagcccaagctgaagacaaccacaccaagcaagaagataattcggagatgaaagacgacgatgacagaggcgaagaggaaagggatcaggtagaacaagagaaggatgtggagaaagaggaagaaaaagaagaagaagaagaagagaaggaggaggaccgtgacgaggtgaagtcaaaaaagtcaacgaaagaaagcggttacgctactccaggaagtgagagaccaactagggagaggaaaacggtggagaggtacactgtttcttcgcccgacaagtttcccagatcttcttccatcaaagctctgtcaattgaaaagggcaacggtacgcagctcaaggacattcctaatgtggctttcacgttatcaaagagaaaagctgatgacaacctgcatgcacttcatagtatattgtttgggaaaaaagcanaggtacatcatctaaagagaaatataggtctgttttctggctatgtggggactgaaaatgaggaaaaacagagggtgaagata

SEQ ID NO: 13673 - DNA, 420 bp, Glycine max
  Clone ID: PAT_MRT3847_112354C.1
agggggtaaatctacattggtgcattcaattggctcttccttgtttataggagccccatgggaatgttaagattttgcaacaaaaattagaaaacagaaaccccagacattttaccattttgttataaacaatgcttggctgtcgtttgtcctcagaatgggtcattaaagctttcagtaattatctcactttccattttgctttttaatccgcttagcctctaagggatacctctccaagtcatcatcaaaatctttagcagtcacctttccaaaattgccatttacttttgcgtagcttctttgactctgagggcggggaaacctttcaaagctttgatcaagatctctaaaagacacctttcgaatatggtccttcttttttccacgggcccttggaagggagccctgtgcaaagtc

SEQ ID NO: 13674 - DNA, 621 bp, Glycine max
  Clone ID: PAT_MRT3847_112355C.1
gggctctgaggaaagtttgccgcgggttctgagatatcatggaaggactctagacttgccttttaagattttctcaggctttgaggcacttgagttgaagaactattttctcaagacttcgccctcgagtaatgattcttgccaggttcttacaactttagcctttaggaacatgagtgttaagaaggatgcttgggaagggattttgtcttgttgcctgtgtcttgaaaatttaacacttgaaaatgtaacacatgataactgcaagttgatgagagaggttactatcaatagtccaagactcaaatttctcagaatttgtagaatgcagatgaatgggtttaaggtttctgctgtgaaccttgaggtctttgagattgatactgttgtttgtatgccgaaaagactacttacttttgaaatcccaaaggttcatctgcttcgatctcgctctgatttgaaaattagagggcaatatatttgttgggttgggagcaaactgttgcagtcgagaaatattctacacactagcagccagagtcatcaaggaacaacttcgagctttgctggaatatttgagaacctggctactctatgtattgattttgatttgaagacagt

SEQ ID NO: 13675 - DNA, 398 bp, Glycine max
  Clone ID: PAT_MRT3847_112356C.1
ggaaccactagccttaccatcattattaaggacataaactatgctaaacattcaaggcaaatgaccagagctctatgagggttaaagatgcatcatggctaaaccatcttataagggcaagggctgacaagcgtatgaagtacttcacaaggcattggacacggtggcaccttatttgaaggtggccgcccaaggactgcccccagcgctgaatattggaaagggatccaaaagcagaatcttgaagcaccccagctgttgatgaccctaggggaggattattgtgccacccatctatcaagaggccatgagccttagatgtggtgagtttgccacatggaacactggaattggcggtatagatagggttcaatacctgtacaggaggaccacccctt

SEQ ID NO: 13676 - DNA, 387 bp, Glycine max
  unsure (1)..(387): unsure at all n locations
  Clone ID: PAT_MRT3847_112357C.1
caaaaagggaatcaaaactttaaccaatcctcaatccaacaattccaattcccaatccaaaacctaatactttaaagaactaatattgatcaattttggaacaagaagaaaagcacgaaaaaaccgttgagaaaaatcacgtggaaaaagtccngcgaaaaagccaggccggaaaaaagcttccaangaggaagacccgccggaaaaagggggaagaggaaaagaggaacaagaagagcgtggagacatacaagatatacatattcaaagttctgaagcaagtcaaccctgacattggtatctcaagcaaaggcatgggaatcatgaacagcttcatcaacgacatcttcgagaagcttgctcaagaatctttcagacttgcccgct

SEQ ID NO: 13677 - DNA, 245 bp, Glycine max
  unsure (1)..(245): unsure at all n locations
  Clone ID: PAT_MRT3847_112358C.1
tctcgcatatgcgtgcaacagtcataataatattaagctagtccatgattccttagtattattataagttgcattgtgagcctatagtatagtgttaataaaattaaggaatcatggactagcttaataaatttgaaaagcattcttatttgtaaaccactctccacttcgttactttatattctttctcattgtaagttgtaaccaaccaaaataatatattcttcctttttggagtgnaaaaa

SEQ ID NO: 13678 - DNA, 602 bp, Glycine max
  Clone ID: PAT_MRT3847_112359C.1
attcttcactttttttttttttttgaaacctttttttttggtttttgtttttgggaagccaacaccccgaaaactttttttatggaggaaaaaaaaatgcacgctggtctaaaccaacgcaaaaaatgcccgccatgcgtggtcttttcaaaggcccccccaatttttggaagggggggcggagggcccacccccgtccagaaaatcacgcaggggggggaattgtgcgataaacacatgggagcggaccagcattccaacctggccccggggtgcaaccaggaaattcggaccaggtacggcggggccaacaattgtattctatagggaggccccttaaagcatgggggaaggatgagcatagagatccccgggagaaaagggaatgcccacaacatctcccactaaaattacgtggcgggagctcaagaggtaaggccgggggggcccaaggggggggccacccccatttgatggtgggcggcgcaccgcccggtttttatatggaaaaccagtgcggcccacccaataaaataatccgcccccccccggggagggggggtttcttttttgggccccaggggggttttttttttaacccc

SEQ ID NO: 13679 - DNA, 286 bp, Glycine max
  unsure (1)..(286): unsure at all n locations
  Clone ID: PAT_MRT3847_11235C.1
gnaaacgggaacttgcattccccttccgcctaactaaaacttcagtgtgagactgaaacaaaagaactagtccaaacgcaggcaaacttaacctagacatggaaatggtttttgcttctactcaaaggggactgtgcctgttcacctttcacaatgaggagggttggggtttggatttacatttcctttcttgtgcctgggccactgagtgagcttgttatcacaaacccggctgtgttcgttaccaaaagaaaagtggctattgtttttttttgaaaatgaactc

SEQ ID NO: 13680 - DNA, 2381 bp, Glycine max
  Clone ID: PAT_MRT3847_112360C.1
tatatgtacaacagatgcgtcctccatttctccatgggtaattagtttcaggggtaccactaccacctttccgccttcagccgtttcaaccaccagcaaatggctgggcttcgtggcggccgtgtggattcaatgcatctccggcaacaactacactttctcaaactactccgacgccctcaaatccctcatgcacctcactcagctccaactcaacaacctctccgtcgctaaagacgttggcaaagcctttgggcttctcgcgggcctggcctccgaccgcttccccacttgggccattctcctcataggctccgtcgaaggcctaattggctacggaacccaatggctcgttgttagccaaagaattcaacccctcccctactggcagatgtgtgtgtttctgtgcatgggagggaacagcacgacgtggatgaacactgccgttttggtaacatccattcggaacttccgttcaaacagaggacccgtttcggggattctgaaaggctttgtagggttgagcactgcgatattcactactctctgttccgctctcttcgccgacgatcctggctccttcctcatcatgctctctgtcattcccttcgcagtttgcctcaccggtgtgtttttcctccgggagattcctcccgtcgcctccgccgacgccgacgccgaggaggtaaagtatttcggcgtcttcaacgtcgtggcggtggcaatggcgctttttctgttggcgtatgggttcatccccagccccagcatgttggtgtcaagagtgttcgtggcggttttggttgttatgctggtttcgccgttggggatcccggtgtactcgtacttgaagggtagcttcggagaggggaatgacgtggaggggcagagggtgaaggagccgttgcttcagattccggagaaggagaacgaagctgtggcggcggagatagtgaagagggtgccggtggtgggtgaggagcacacgataatggaggcgctgagaagcgtggatttttggatcttgttcgtgtcgtttctgtgtggggttggaacgggtttggcagtgatgaacaatatgggtcaaatcgggttggctctcggatacccagatgtctcgctctttgtgtcgcttacaagtattttcgggttttttggacggatcatctcgggtactgtttcggagttcaccatcaagaaagctggaacacctagacctctttggaatgcagcatctcagcttctaatggctgtaggttacatactcctggccatggctatgccaggttccctatacattgggtctattttagttggcatgtgctatggagtgaggcttgccattacagtcccaacagcctcagagttatttggactcaaatattatggtctcatatacaacattctcatccttaaccttcccttgggttctttccttttctctggtctgcttgctggcatactctatgatatggaggcaactacaacagagggaggaggcaacacgtgtgttggaggtcattgttacaggctagtctttgttgtcatgactggagcatgcattgttggcttcttcttagacattctgttgtcaatcagaaccaagaatatttacaccaagatttccatgagcaagaaatccttagcaacatccaataggcagtgattcagaatggtatgacattcctgggattgatgaactttatgctcaagtgatatctcaagatctgtcagcaaggtgacttatcctatcagatagttaaaactcattttttcaataaaggagggccgtttgtcatgtactgtaatttttatttatttatttttatgatgtgtttggaaggatcagtgagaattctttttgttccatatggagagaagtgcatttagtatcgtgagagttttttgatagattaaaatattatgctgtttgtttatgaattagactggtgtagtggtgttcttagctgtttttttcgtaccagtcagtgttgtttggctattagcgacagtcactagtctatgtcctaagtttgcaagtggccatcctaatgttgcagcaatctttggcattgtaacatgtgttattggcaatatgttcaatgaaggaggcaacaggtgcaattgatgcagtaggaaaataaaatttattaaagattatgcaaatcaaatggtactactatttacgagggtggagaccactctagagttggcttgcagcttccaaactacagtttgccaaaaacaaaagcatttttaacttctactcaaaccatgacttgggactttaaactatattcaaatataatttaatagtgagttttccaaataaataaattatacatgaaattcattttgcattctccaaattaaccataccc

SEQ ID NO: 13681 - DNA, 877 bp, Glycine max
  unsure (1)..(877): unsure at all n locations
  Clone ID: PAT_MRT3847_112361C.1
agaaataaaaaaaaaaaagaaggaaaaaaaatcctccacggttcccagcaataggcactaatattcaacgttacggagaaggacagaggaaactttggtgacattgttataagtagaacacatgcgtcctccatttctccatgtggcgtccggcgatgggcagcactagcagctatgtttcaagcagcagcagcagcagcaaatggctgggcttcgtggcggccgtgtggattcaatgcatctccggcaacaactacactttctcaaactactccgacgccctcaaatccctcatgcacctcactcagctccaactcaacaacctctccgtcgctaaagacgttggcaaagcctttgggcttctggcgggcctcgcctccgaccgcttccccacttgggctattctcctcattggctccgtcgaaggccttattggctacggagcccaatggctcgttgttagccagagaattcagcccctcccttactggcagctgtgcgtgtttctctgcatgggaggcaacagcaccacttggatgaacactgccgttttggtaacatgcattcggaacttccgttcaaacagaggacccgtttcggggattctgaaaggctttgtaggcttgagcactgcgatattcactactctctgttccgcgctcttcgccgacgaccctggctccttcctcatcatgctctctgtcattcccttcgcagtttgcctcaaccggtgtgtttttcctccgggagactccccccgacgtctccgccggtgatgacgacggcgaaaaggtaaagtacttcggcttcttcaacgtgntnnggcgtggcggtggcgctttttctgttggcgtatggggtcatccgcaccctacat

SEQ ID NO: 13682 - DNA, 1290 bp, Glycine max
  Clone ID: PAT_MRT3847_112362C.1
ggggaaatgacgtggagaggcagaggctgaaggagccgttgcttcagattccggagaaggagaatgaaggcgtggtggcggaggaagaggcggagatagtgaagagggcgccggaggtgggtgaggagcacacgatagtggaggcgctgagaagcgtagatttttggatcttgttcgtgtcgtttttgtgtggggttgggacgggtttggcagtgatgaacaatatgggtcaaatcgggttggcgctcggatacccagatatctcgctctttctgtctttgacaagtattttcgggtttttcggacggataatctcgggtaccgtttcggagttcaccatcaagaaagctgcaacacctaggcctctttggaatgcagcatctcagcttctaatggcggtaggttacatactcctggccatggctatgccaggttccctatacattgggtctattttagttggcatgtgttatggagtgaggcttgccattacagtccctacagcctcagagttatttggactcaaatattatggtctcatctataacattctcatccttaaccttcctctcggttctttccttttctctggtctgcttgctggcatactctatgatatggaggcaactacaacagagggaggaggcaacacatgtgttggaggtcattgttacaggctagtctttattgtcatgactggagcatgcattgttggattcttcttagacattctgttgtcaatcagaaccaagaatatttacaccaagatttccacgagcaagaagcccaagaaatccttaggaacatcaaataggcagtgattcagaatggtatgacattcctgggattgatgaactttatgctcaagtgatatctcagtatccgtcagcaaggtgacttgtcctatctgatagttaaaactcatttttccaataaaggagggccatttgtttttaattccatttaggcctccatgtactgttattattagttttttttatgatgtgggatcagagagaattctttttgttccatatgaaaataagtgtatttagtatcgtgagagttttttgatagattaaaatatcacgctgtgttattattagctgtttgttcgtaccagtcagtgttatttggctaatagcgatagtcactagtctgtccaaagtttgcaagtggccatcctaatgttgcaatctttgacattgtaccatgtgttatgtgttgtattgtattggcaatatgttcaatgaaggtggcagtagatgcaattgatgcaatatggaaata

SEQ ID NO: 13683 - DNA, 295 bp, Glycine max
  Clone ID: PAT_MRT3847_112363C.1
aaaaccctctcgggtaaaaacggataacacattcatccattatattcccaaacttcaaacaaaatacactatttttcaaatttcccaattaactacccgaaaagcccaaaatcctaacagcgcattttcattaacactcaaacccatataccacaccacggtgacaattgaccataccttcctcttcaaccatttgttcatcccgaccactttcactttccacaaaaagcataacacccttacccaaatttctccttatacccattgattttaatttgttcaataccattttcct

SEQ ID NO: 13684 - DNA, 234 bp, Glycine max
  Clone ID: PAT_MRT3847_112364C.1
ttctatatgcgccaatatacttatcttggtgatacagccggccttaggtataaaggggatgaccaatgagagtatatcgcagataccaccacgctattaaatagaaatagggacattgtcacaaagtgatagatgatgttctaagtacaatacactctgacttttgcattactatacacttgcagggatcattgttttgagtaaagcactcagagtaacttacagccccaaggg

SEQ ID NO: 13685 - DNA, 648 bp, Glycine max
  Clone ID: PAT_MRT3847_112365C.1
ctcaaaatgagaatgacattcattttatgtattcaaaagatacatgaaagcaagatatccccatagctagaagccacgagactaatccaggaggaaatagagcaccaattaaggagcaacttctctcccaacaaatgcttttctattcagcatattttcgttttttgatctcttgcagttcagctgaagaactttgttcacacacatgggtcatttgcagcaaagttgaagaacttggctaatttttgtgaaacagagtattggctttcatctagtgatccttcgtctcccacgtaatcatcatcgccttcaaaaactaaaagaattctgcagttcttcagctccagcctctcaataagaggagggtctctctttttcaaatgtaaggtatatttatcttgtaactgaaaaactaacgaagaattaactccaaatctgcgcaaaaatatgtggtctttatttgtcctaggtactcctagaaggcgaaacgttgtgctaaacactttatcagtcaaattgaagatttttccttgaacatcctctaactgcagtccttctctttggttttcaggtatattattgaaagagagaacaccagaacaaataatacccttaagctcacggtttctttgcttggaaaaacaactg

SEQ ID NO: 13686 - DNA, 135 bp, Glycine max
  Clone ID: PAT_MRT3847_112366C.1
tggccaaatgcgggtgtacaactatacaggctcgttgaaggaatattcgagtcccgaccccaacccagatcgcgatccaagaggtgtgtgcctccaatgtcgaagaagaattccaactcgtacgccaacttattg

SEQ ID NO: 13687 - DNA, 353 bp, Glycine max
  Clone ID: PAT_MRT3847_112367C.1
gcgtgattggtctttgccaacagatgctgcaaaagatgaataaggttgaatattggggtgggttgaatccccgggttgaaccgtatcgcacatgacggctcttataagcgtgtctagctctctcacacatgtcccaactgtacgacggaggacatgttgcgttactgccaccaatccttctccgctccgagggcgtggtgcttcaccttctgaaggcgagagctccttcagactgcgctcttcttagctatgagcgggaatgcgtgcttctagctgcttgttaactcttttaattcaatactactaataagctaccacgctttcaaaataacagcaacaaacacttgcttact

SEQ ID NO: 13688 - DNA, 541 bp, Glycine max
  Clone ID: PAT_MRT3847_112368C.1
aaaaaaaaaacacaggattttttttttttgaaaaaggggacaaatcacccccaagtttgggcccatcgttttaaaaaaagaggcccgaattttaaataaggggatacaaaaaaccccccctttttttttttattaacaggggatcacgttagaataagttttatttttcattaaaatttttgaaaatcatgacccagggggggtataaacctcctttttccaaaggacaaattaacctcaagggggggcccccttttgttatttgcctaaaaaaaagcccgcattaacgcgtactcctatcgaccctaacattaagttaacatcaatcttccttcacaaaaaaaaaaggggagaaaatccaaggggttcaatattttaaactcttcccccataggaaactttttttgcctcaaaaaaacaagggggtttatctatcaactttatttaaggccctttttttaatcaaatgaccaaaaagacggtacatttgagggtggatgttgactgccattatggggccttgcaacagaagacttcccta

SEQ ID NO: 13689 - DNA, 257 bp, Glycine max
  unsure (1)..(257): unsure at all n locations
  Clone ID: PAT_MRT3847_112369C.1
gagggagggggggggtgttgttttataaaccaacatcaactanctatccaatgcggacggtgtcagttgggggaaggggaaccaatccatgcagataactccagcaaacacagagtgtgaacaagcgcaaaaaacaaatgaaatagccagaactaacattacaaccaacaaacaaaaggaagacccaaataatgtagagagggaagacgcaagcaaatttatgacaaatagtgaaggataaagataacaaaataacc

SEQ ID NO: 13690 - DNA, 238 bp, Glycine max
  Clone ID: PAT_MRT3847_11236C.1
ggctcgagcggaattgtacacaccaaagtttttactgtctgaggaggggcaaccgcgccctcaggcatggggaagcatgatgagcaccgaaccaacacagtggaaaatgagggggatcctgcacgtctcgggacggctaaggagcaaccagagctgatccagagcctagtgagtggactacaaccagcacggaatacatccgacggagaagcacggagtgaacctagatctacagctc

SEQ ID NO: 13691 - DNA, 362 bp, Glycine max
  Clone ID: PAT_MRT3847_112370C.1
aaaaaactatctcacaatgcataaacagcataagaaagaagctactccaatcccactccactattataagcaaatcgaagcaacgcctagcttattggcagctttacgggcaaaggataccttttaccagcggcagtggtcatacacttccatcctaataaccgatgagagacggtccgggatctccctcccatacgcaggcaacaaggaaaatgccattgcagaaccctgttggtagcagcgccatttatggccacgccaagcaatgaccttcaccatcggagacgaggaacgaccgggaatttcctgagccgatccggctaggcgttccatttggacctaaaattgagacaaataaaagc

SEQ ID NO: 13692 - DNA, 333 bp, Glycine max
  Clone ID: PAT_MRT3847_112371C.1
agcgggaattcggctcgagcgcgcaagcaaaaagaaagaaccccttcaaagagaaagacggaggggaaggagcgagaggtgttttaaggagcgaacaagtgcccccccacacagccaatcgggacagcgcggcacagcccaaaccacaggcaaggacaaccaataccgaggcgcacgggccggtgggtgaccccacggagtgaacctcaggagaaaataacagggtaagagaaagccagcccgcggacacattagcgtgggataacacaacaggataaccgtcctaggaggcgggccggctaagacgaagtaaagaaccacagggacaaacgg

SEQ ID NO: 13693 - DNA, 1559 bp, Glycine max
  Clone ID: PAT_MRT3847_112372C.1
ctgcctcgcgctctgcaaaacccaaacactgtctccgtctggatggcggcatcgcgaatcgtggcccatcctccgccctatccccaccgtcaatctccgccgtcagatgccccgccgtccctcaacctcacacttaatccaaaacggtaccgtaacctcggcattcgcgcctcccttcgcggccacgaggagaagaacaagaacgatctcgccgataaaccccactccgtcgagttgcgagccaccagcacccccgacgacgtcgtttcccgagatctgctctctcttccgcggcctttgtcttcgactcagttatctgcttcggtgtccgatagctctcgccttcgtgttgcatatcagggggttcgtggtgcttatagtgaatcagcagcacagaaggcctacccaaattgtgaagctgtgccttgtgagcaattcgacaccgcatttgatgctgttgaaaggtggcttgtggacagagcagttttgcctattgagaattctttaggagggagcatccacagaaattatgaccttttactccggcacagtttacatatagtaggagaagtaaattttgcagttcgacactgtttgatggccaaccatggtgttaaacgtgaggatttaaaacgggttctaagtcatccacaggctcttgctcaatgtgagaacacactgacaaaatttggattggtgcgagaagcagttgatgatacgtgctggtgctgctaagcatgttgcctaccacaaactacaagatgcaggagcagttgctagttctgctgccgcaaagatctatggcttgaatatacttgatcaagacattcaggatgatagtgataatgtcacccgatttttaatgttagcacgagaacctatgattcctggcactgataggcgatttaagactagcatagtattttctttagaagagggtcctgggatacttttcaaagcccttgctgtttttgctttgcgccagattaaccttacaaagattgaaagtcgtcctttgcgcaaccaacctctacgagcagatgatagcaacaattccaagtactttgattatcttttctatgttgattttgaagcatcaatggctgagcagagtgcacagaatgccctgaggcatctaaaggagtttgctacattcttgcgagtgctagggagctatcctgtggacactagcttgacgtaaataatcttcaaaagtggactcccgaatataattactgttgtgcgcagcatagcccttctggttgtcaaatcgtgttaatggaaatagagtttacattgcttcaatacaagaaatatacagaaaatcgtatcaaatgtaaaagcttcttaaaattttgatgggcctccccggcccttaaatttatgttctctcaagcagcatacaatgaatcgactgcttattattattattattaggcttaaatatgtttttcatacttgaaaaataaatcgtttttagattatttcctgttatatcttttgaggaagatacaggcggcctgctttttaggcagtccaaagacttagcgtagcgcggt

SEQ ID NO: 13694 - DNA, 486 bp, Glycine max
  Clone ID: PAT_MRT3847_112373C.1
gttctagatcgcgggcggccgctcgcgatctagaactagggatggcggcatcgcgaatcgtggcccatcctccgccctatccccaccgtcaatctccgccgtcagatgccccgccgtccctcaacctcacacttaatccaaaacggtaccgtaacctcggcattcgcgcctcccttcgcggccacgaggagaagaacaagaacgatctcgccgataaaccccactccgtcgagttgcgagccaccagcacccccgacgacgtcgtttcccgagatctgctctctcttccgcggcctttgtcttcgactcagttatctgcttcggtgtccgatagctctcgccttcgtggtgcatatcagggggttcgtggtgcttatagtgaatcagcagcacagaaggcctacccaaattgtgaagctgtgccttgtgagcaattcgacaccgcatttgatgctgttgaaaggtggcttgtggacagagcagttt

SEQ ID NO: 13695 - DNA, 665 bp, Glycine max
  Clone ID: PAT_MRT3847_112374C.1
cccacgcgtccgagacgacagaaggcgacgcgaccaagcaaactaaacgtacttcgcaattcgcactctgcgaaacccaaacactgtctccgtcttgatggctgcgtcgcgaatcgtggcccatcctccgccctatctccaccgtcaatctccgccatcagacgccgcgccttccctcaacctcacactcctcccaaaacggtaccgtaacctcggcatttgcgcttcccttcgcggcgataagccccactccgtcgaactgcgagccaccacctccgacgtcgtcgtttcccgagatcttctctctcttccgcgtacctatatatacacacgctttcccctttttcttagccattgctattattggtgatgctttttgcgatttaattttcagggcctttgtcttcgactcagttatctgcttcagtttccgatggctcttgccttcgtgttgcatatagggggttcatggtgcttatagtgaatcagcagcacagaaggcctacccaaattgtgaagctgtgccttgtgaacaatttgaaaccgcatttgatgctgttgaaaggtggcttgtggacagagcagttttgccaattgagaattctttaggagggagcatccacagaaattatgaccttttactccggcacagtttacatatagga

SEQ ID NO: 13696 - DNA, 324 bp, Glycine max
  unsure (1)..(324): unsure at all n locations
  Clone ID: PAT_MRT3847_112375C.1
cggctnggccgccgtcgcttatcacgcggcacctgttttcaacgcctgctgcggggtcttcgatgctgcgtagtcattttcaaccttgggccttcgggtgtagatgatcacatggatctgtctgggtggagacctttcattggtagctgcgacttgcagcacgtctaccacgcagtgtcgccatgatgggacagttcccttcaagtctcaagtgctttaatccataccgttcatgcctaatccagttgggaacaacataaaagatctgaacaatgtttctggagttcgggttcattgcatttagatgatctgattatgtttttt

SEQ ID NO: 13697 - DNA, 1056 bp, Glycine max
  unsure (1)..(1056): unsure at all n locations
  Clone ID: PAT_MRT3847_112376C.1
ctacttaaaaattatgttctagttcttagcttttagtcttgttttcttgtcgcggttacctttttccatgatcattggaaccatacccactttttttaggttgagaaacatgcttctttcctttacatttcagagcattttatatatttagtttatgtaagtaggtcatccttggtcagattctgatttgcttggtaaattagcatattcttatcatctgaaagacatgattaaatattgtgccttgggttatagggttgaaattcacattttactgctactgttgacttgtttatcagtatcactcaacctaacatagttacaaattatagcatgtcgcctaccacaaactacaagatgcaggagcagttgctagttctgctgccgcaaagatctatggcttgaatatacttgatcaagacattcaggtctgggtccatggtgtcagtgtttacttgtgtggttgacagttctggttcatggtagatttgatcactaatgaatttacatttgcaggatgatagtgataatgtcacccgatttttaatgttagcacgagaacctatgattcctggcactgataggcgatttaaggtactcagctaatatagaataattagctggaattattggatagaacacatcacatgtctcctgactcccctattgattggatttatgcttatcaatattaatattgccattgattgtggtgttgatttctcagactagcatagtattttctttagaagagggtcctgggatacttttcaaagcccttgctgtttttgctttgcgccagattaaccttacaaagattgaaagtcgtcctttgcgcaaccaacctctacgagcagatgatagcaacaattccaagtactttgattatcttttctatgttgattttgaagcatcaatggctgagcagagtgcacaaaatgccctgaggcattaaaaggagtttgctacattcttgcgagtgcttgtgtgctttcccattgacactacaatgaatcaacaactttttttatttaaatattactnacatgttagttc

SEQ ID NO: 13698 - DNA, 440 bp, Glycine max
  Clone ID: PAT_MRT3847_112377C.1
ggaaacagatgcgggcatccttatatttcccaagaactcaaagtctatttttaatgttctgagtctgaggatgataaataaacagcagtgagctgcccaggcttgttctccaagtactaataacttgatgaaagagactttgagtgcttgggtaacactaccggtcagccttatatgttgctaacaattgtgcataccggcggcaagggtgacagacaacaaagatatgcctctggattgaccctacacgagaagatgccacatgctctgtgctttggaagatgtaccacattgttctatatgttgatgattacccaatgagggtgttcaagacccatagtgagttcagagtgaagctaccattttatctacccatgcagatatacaacagtttagttgaatgctgatgtctgtgtcacactgggggggtatgataaaac

SEQ ID NO: 13699 - DNA, 226 bp, Glycine max
  Clone ID: PAT_MRT3847_112378C.1
ttcaaaaaaaaaaagattgcatgatataggaaaacgaggggaattataattcaattgaaaccatattatcaaaaacaccattttttacacaagttacaaaccattttgcattattattttacccaatactattgtactttcacaacacctattagttaataaccaacctaatcttggtatcaatatttattctcaaagaagccatatccatattttaagagaaata

SEQ ID NO: 13700 - DNA, 214 bp, Glycine max
  Clone ID: PAT_MRT3847_112379C.1
aaaaacaagaacagcccttccaaatgtttaaagagtttccctcaaacgaaggatgtttcaagtctttttttacattctaatattttttttgtaacttagaccgagtaacattccactcaaaattctggcaggggtcaaaagtttttggttcaaaaatatgtcttgggttgcctacaataatatttgatctgaaattatccaggttggcgatatc

SEQ ID NO: 13701 - DNA, 310 bp, Glycine max
  unsure (1)..(310): unsure at all n locations
  Clone ID: PAT_MRT3847_11237C.1
attcattaactgttcttaatgttatatttttaatgggaaaaaaaaaaaaatcccttttttggtaccaaggaataccccacagaatgtattgttttggaaaaaaattaaggaaaaacttggacgaaaaaaaaaaaaaacaaaattttaagacgagggaaaacaatgtgaaataacaangaaacgggccccctagtgaaaattttgggcggaacaatgaaagagctgtttttggccacccccccagcaactttttcaggaacagggggggagcccctagcaaaaccaaaacaatggcgttaataacccactt

SEQ ID NO: 13702 - DNA, 473 bp, Glycine max
  Clone ID: PAT_MRT3847_112380C.1
actaaaattaaaggtttattatttttaaattaggcattgggaattttactaaagaaaaaagagccctagtcaaaaatcaaaaccaaattgattaaagaatccaatgcaaagtttccaagggtagcctttagcaacaagttaaaacccattctttttccttcccacatagcaattatttcttcggctaaaatttgaagcttacccccaaaattaaattgactaggataggacatttaaaaccctgaatttgggggggtattggacttatggcctggtcatttattacaaaaattgcatcagccctactttaagggttttggccagttccttaacgcccatgtggaattcatcctccattttggttacgaaggttgggtcgaaaacagaggaacccaaagacaaggggctgttattgaccaccgaaagatgaagtttttttatctctctgaatatgttcaccagccctggctttt

SEQ ID NO: 13703 - DNA, 292 bp, Glycine max
  unsure (1)..(292): unsure at all n locations
  Clone ID: PAT_MRT3847_112381C.1
aaaaaatcttttttttttttttttggtgcttttactggttaagtttcagtttactacattattgcgaaatcttgggtggaaacgggaagaataaaaagggcaagccgaccgccaaaaaaggacgacggcgaaaccgtcggaaggaaaattctggcacgggggggagaaaaaaaaaggcgtgggttttccnncgnacccnaannccgccccagaagaggggggggggggngagaccccccccccccaacngcccaaaccgaacccccaacggccccggcgggccgcgcaaggg

SEQ ID NO: 13704 - DNA, 383 bp, Glycine max
  Clone ID: PAT_MRT3847_112382C.1
cctaaattgtggtcagccctagatagagggggggtgttgaaagtcccacatgacggatagctgtgggcaaaaggagacatgctaaagtctcacatcaactaaaaatagtgtcgagataaactatataagtgagaaacaattctcaccttactagccggttttgtaggattgagttatactcataactcgctttctgacacttcatattaaatcacttcatatgttcatgtttcattgtctaaatcctttgtttcccacttttccttgttggaatttatgttttgcagatgggagatgtggcgaaggaccttgcagctgggactgttggaggggcagcacagttgatatgtggacacccattttgacacatcaaggtcaagctc

SEQ ID NO: 13705 - DNA, 344 bp, Glycine max
  unsure (1)..(344): unsure at all n locations
  Clone ID: PAT_MRT3847_112383C.1
tcccactcattttttttctttactttctacttcactttcacagaacaatgtttaattttttataaattcaacccccacccctcatctctcancaatatcttcctcaatctctactgaataatatgaactccttctaccttactcttataactttccttactcttacataattaaaatatcctatctctcccaaaaatccttccagtccttctttatcaaaacctacacctaatatacccccatatacaccactaataaacctctctaacacatatttcttataaaaattaaaaaatcaaatcataaaacttattatcttattctacttccatcaacttctcaaa

SEQ ID NO: 13706 - DNA, 382 bp, Glycine max
  Clone ID: PAT_MRT3847_112384C.1
tgatttatgtgcttgcatggtcgtgagaagatgatagtaggggcccgaagcacagaagagagagagagagagaaagtgcgctctgcgaagtagtaggcgaagtctaagtaaaagaaaacaaaagtctattctccctacttccctccctccctccctctccttcctcctctcttacccctctctctctctcatacagtccctaatatcctataatatactatattttacccctctctctcaataacctaccttctatccctatgagacttttactattgtccgcgataccgtcgtcgtacacctatagagagagaaagaaagaatgaaaaaaaacctataaacccacaatacaagagagaccccagcccccaagacatttcct

SEQ ID NO: 13707 - DNA, 216 bp, Glycine max
  Clone ID: PAT_MRT3847_112385C.1
cactagagacaacgggagctccaactcactttatgataccgcagcataggatgcctttgttagtgatctccaccttgtctactacggatgtgaggtcactatctctggcaaagtggccgaatgaggaagatacactgattgtattgaccctgaactctgtcagcagaatgctcaatacagacaaccctgttgggcttaagaaaagcacctaatctt

SEQ ID NO: 13708 - DNA, 269 bp, Glycine max
  unsure (1)..(269): unsure at all n locations
  Clone ID: PAT_MRT3847_112386C.1
gtgggcaggatgtgagtgttgaaaatggcttagagnaaccgctttgtgatatagctggtgaaagagtcatgtatagagttatggaagccgcagtgagtcagtgcctttgtcctcaatcaaacgctgatacagcggagtagtaaggaggcttgatttttaaggggatgttgatgatgagaaaaagacttgcatgctgcgcacgggaaaagaaatttagtgtcgatcttgatgagcacgaaattgagagcgcatcttgtttaggggatgaa

SEQ ID NO: 13709 - DNA, 214 bp, Glycine max
  Clone ID: PAT_MRT3847_112387C.1
aaaaaaaacccccaaaagggaaaaacaactttgtccaggccccctccaggacaaaaaaaaaacccccgggattttttttaaaaaaaataaggggcccccttaagggcttgttttgaaaccttaatcataacccaggggtttgggcccttaaaaagcccaaccccttttgttgctccccaaggaacccgggggcgaccccggggtcccccccgaa

SEQ ID NO: 13710 - DNA, 206 bp, Glycine max
  Clone ID: PAT_MRT3847_112388C.1
gataaaccgacatgcataatgggatcacactttttcaaagatctctcaattagttacattgttgagaggctggtgtttgtaaaaaaggctgtactattgtgctatgtgatgctggaatgcacagtcaaaaggagtgattggggcatttatttggtaacaaagttgttttttaacaaaacagtaaaccagtttcaggaggcaatttt

SEQ ID NO: 13711 - DNA, 280 bp, Glycine max
  Clone ID: PAT_MRT3847_112389C.1
ccttttcttataaagttttttttttacatcaacaacccaaaaaccttctcattttaaaatccacttcagggttgaaaaaagggcccatttccaaggcatgccccacccttttttgggaccccaagaaacattcagtttattaatcccacaaggttgcgccaaaaaatatttatggtaaacggatgcctgggctaatgaattggaagccccaaacaattattttaaaaaaccaattttttttgaggtggaaaaaacccgggttcttcccccatttataacg

SEQ ID NO: 13712 - DNA, 1877 bp, Glycine max
  Clone ID: PAT_MRT3847_11238C.1
ttcaaaaaacaatcccttgagatcaccgttgacttgtccaaacgttccattgtctccaccaatgtctacattggccatggcttccccatgctcacgttcgatgagcaagactttgtggccgagcttccttttaagtataaacccttcattgaatcagtgaacaaacgaggccttaatatatctgaagttgtgtgttctactgcctcggttgggtggtatggggagataaagagcaaaaggacactgaagcttcagtgctttcacacacaagggtctactaatttgtttgctatgccgttggagggtattacggtggttgctgatcttgatgagagaaagttagttgcatattttgacagcaagattgttcctgtgcccaaggctgagggaactgagtacgtagcttcaaagcaaaagcctccatttggaccaacgttcattggagcagcttttgtgcagccaaacggaccaggattcaagatcaatggccactctatcagctgggcaaactgggagttccacctgggatatgatattcgagccggtccagtgatatcgctagcatcaatttatgacattcaacagcaaaggtatcgccgagtgttatacagaggatatatatcagagttctttgttccatacatggacccaacatcaagttggtacttcaagacctttcttgacagtggtgaattcgggtttggccaatccatggtgtcacttgagcctttcgctgattgcccatccaatgctgcatttttggatgcatattttgcaggagaagatggtgtgccagttaaaatagctaatgcattttgtgtttttgagaagtatgctggggatatcatgtggcgtcacacagaatcagaaatccatgatgaagagataagggaggttaggcctgatgtgagcctagtggtgagaactgtctcaactgtgggcaactatgactatatcgtagattgggagtttaagccaagtggttccataaaaatgggggttggtctgacaggaattttgggaatcaaagcaacagcatacacccacgtggatcagataaaggaggatgcctttggcacattgctaacagacaacaccattggtgtgcaccatgatcactatctcacatatcacctcgacctcgacattgatggagaagccaactcattcgtcaagaccaatttggagaccgtgagagtaacagatcacagttcaccaaggaaaagttactggaccgtggtgcgtgaaactgctaagactgaggctgatgctcgaatcaaacttggtttgaagccatccgagctagcagtggtaaatcccaacaaggaaacaaagcctggaaacaaaatggggtaccgtttgttcccattcacagtggcaaacccacttttggcccctgatgattatccacaactgagaggttccttcactaattataatgtgtttgttacaccatataacaagtctgagaaatgggcaggggggttgtacgctgatcagagcagaggagaagacactttagctgtttggagtctcaggaataggagcattgaaaataaggacatagttctgtggcacacggtggggattcatcatgtgccttgtcaggaagattatcctattatgccaacactgagcggtggatttgagctaaagcctaccaatttctttgagagtaatccggttcttaaagccaaggcaccaaagcctgtgcatttgcccaagtgcaattctaaaccttagttgattttttctttaaattctactttggggtgcagttagcgtgaagggcggccacaagagggttgtgttatgccatccttaagagattcacacgtgatgtgcttttgcaataaaataattggaaaagtttgctc

SEQ ID NO: 13713 - DNA, 488 bp, Glycine max
  Clone ID: PAT_MRT3847_112390C.1
aattcggctgcgagaagacgacagaagggaactcctttagaactgctcattaaattaaactatacatcaaatatttgaattatgtttagattgagcataatggactattcaatgctatgactggagcattttccacactctaaatcttaccagataagctagatcactactagtttaaggtatacgggacagctctcgaaagttttgtgctagcggcatcattagaaccaagtaaaacactaaacacatgctttggcaaagacactgaagaacttcaatcaaagataaagaaaaaagaaaaatcaagaggctcttgaaaaatgtccaaacttatcagtaaaagtaagatgacatgcaaaaatttgaaactcaaagctacaattgtccatagaagtcaatttatatttcatagctaacaatcccccctgactaacaatataaaagccaaaacattctctcatactccatgatgcatgcaagagttcaat

SEQ ID NO: 13714 - DNA, 273 bp, Glycine max
  Clone ID: PAT_MRT3847_112391C.1
ccacgcgtccgtgctttgatttaggttgatgtgccgaagcaatctcaaagaaagaagagccggagccacctcaacatcagaatttcattgttaatgaacccaaaagggttcaaatttcccggatattggaaaattttttagcatcagaagatgaagtgtacaattttgatgaattgtctactagagatcgtgctctagtggagaagttatcccaaaaatggggcttagttgtacatttttcgggcgtgggattagaaagaaatattttgttca

SEQ ID NO: 13715 - DNA, 468 bp, Glycine max
  Clone ID: PAT_MRT3847_112392C.1
cctcgtgccgaaattcggcacgaggctcatgttgcaactggattgcacatccaaaggcccttaaaaagcaatccacaaagcataaagagagcacataaattgccctataaagtacactacatgtttgaaaaagagcaaagaggaaacgagcaaagccccggcttcatcatacatgcagagaagatgaagatagaaactgaaactattagagtatccaaaagaaagttaatgggcaaaggcatgggtgctcttctcaaagaaggtagaggaaggttttatatacttagaagatgtatcataatgcttctatgctcccatgattagtgagtacttataagttatgttcatataatatagtacttccagcataaatttgtatattactgtctcctaaagagaaagagatgggaagttgttctagtttgacataaaacaaaagtagttggtttcttttattctctttcaaaa

SEQ ID NO: 13716 - DNA, 324 bp, Glycine max
  unsure (1)..(324): unsure at all n locations
  Clone ID: PAT_MRT3847_112393C.1
ctatagctcggaattcggctcgagtggngaactctggctctacctatagtacattgtctactagtctaactattcacagactgtccaaaaaactaccgtaatagtcctgccttgcgtaaatgtggcaattatggttgtcaaagcaacttcctaatggatgatgccgttagagaatcttgagaactcaagtcaacgagcactcatggctgatacccttgcagcatgtgctgggtttacaagggcgaacggtggctccccaaaaatggccctgcgcttagttgctaagtataataatgggtgccttggggcaacaaaatgagttgg

SEQ ID NO: 13717 - DNA, 810 bp, Glycine max
  Clone ID: PAT_MRT3847_112394C.1
ggtccggaattcccggggcgaccccgcgtccggaacggctctgatagctctttggtgcagcaagcggcgtaggaatatcaaagacaaagccattcgtgcctcatacctcatttcatcacacccattcatctccatcacaacacaacatacatacgaaccaggtgaagctcaggttcttcttcctcctcacttcccttttccattttcattttcctctataaacccctcctctctctctctctctagcgcaccgcaccgcaccgatggaaacacaatgatccaaccctaacccaagcgcctcttacctccaaggtcttccattttcttcttaattcctcttccatatcccctcttttctttctctcatctattttattttcttcttttaattgcatatatgtcaaaaacaattttctgcttttttttttcttcctaaaatcgttatcgcgaaaaccctaatcggcgacactttaacacggcttcccttcaattcgagttgaattcaccatgggttctccatacaattgtggtcaaccctgtgtattggatctggggtccttcatgtttgcgacgaaattagggtttactcccaatttcgccccaaattttgggggttttcgtttctgattgttcaatttcatcacccgaccccccgtagaacctgggtttcttcgatttgtgttaaactcgagctttttggtggaaaaatactcgctttccttttccctttgttgttccctttccctgcaattgaaatttgtaataaaggaagcttctttctaagtttgtgattgaagctgcgatggagga

SEQ ID NO: 13718 - DNA, 760 bp, Glycine max
  Clone ID: PAT_MRT3847_112395C.1
aagtcagcttaattaatcactcctcgaaacaaatctacttttgctattccacttctctcatcacccctttcatctttgatatgaatttcttagctctatcaaacaaaggaagaaaaaaacagccacaactgagattactggagatggtgatcacagtttttctcctcgtgttagccattccttcacctcttaaaacagcagaatcactaaatttcaacataacaaacttcgcaaactccgagagtgcaaaaaacatgttatacgtgggtgacggcgctgtgaacaagaacgggtccatagagctcaacatagtggactatgatttccgcgttgggagagccttgtacggacaacctctgcgcctttgggactcatcttctggtgttgtaaccgacttctccacgcgcttcactttcactattgacagaggaaacaacaaaagtgcttcttatgctgacggtatcgcgttctacatagtgctgaaagggagggtcaattgtgccattaaatgtgtcaaactcaaccgcgagcacatggttacggggaatgaagggattggaggtgacgttgaagagtgcaaaagtgccaccagctgcgtttgggggaatctggtagccatgaggggctatgtagaacgcgaaaccgtcagcataagaagcacttttgttgtaaccgacttctccacgcgcttcactttcactattgacagagcaaacaacaaaagtgcttcttatgtagaacgcgaaaccgtcagcataag

SEQ ID NO: 13719 - DNA, 874 bp, Glycine max
  Clone ID: PAT_MRT3847_112396C.1
cgaatattgggtgattcgaattggtgtatgatcgagtcgaagtcgaggcaacaggagttctaaacttagcacaatttctgacaagaggaaatttgaaaatgtacaagggtgtaaacttcttgttccatggcggaggaatagtcatttattttgtttcaagttatgcggctacacactatactttatcattttaaaatgattttttttacggagattgagttatgctattgttagcccatattttcgacgggctaaaatatgctctaagtatgcattggatgtcgtctcgaggttcgaagcatattacagagcaagagtagggtcaggacctgtttgaatcgaaaagagagaagagtcttttgaaagggattcccaggttcaaggaggtatttgcgaagtacaaggctaggataagaaagagagctttcgaatcattgggtgattcgaattggtgtatgatcgagtcgaagtcgaggcaacaggagttttaaacttagcacaatttctgacaaaacttcacaaaattagttcgacttcgagcaatgtggataaccgttctaaggagcagttatgtgcatgtaaggtgtacgtggcaggacacttggcattaggatagtgttcgaccgttagggcagtttattttcgaatgtctatatatagcagtttttagttagatttcggggtcgcaaatcatttctacaaatccttatacactcaaagtacccagcgcagagagaaacgagtacgcaaggagaatgtatgtttgtgaaccattttaagtttctgtaaactttacattttgaatgcaatgcaatttacgcttcattttaaaaaaaaaaaaaaaaaaaaaaaaaaaaaaaaaaaaaaccccccc

SEQ ID NO: 13720 - DNA, 264 bp, Glycine max
  unsure (1)..(264): unsure at all n locations
  Clone ID: PAT_MRT3847_112397C.1
gaaaaggcactggatactattttgactcaaaagagaaggttccaaaatgaaatgaaaatctatttgngtatgcggaagaaattgaaggaaatttgtccagaagaaacacagaagaagattgaaattatgtttacaaaaatagcagcattcttcccggattctcacaaagctgaagagtgtctgcataagttaaaccaaattaaagataatagcgtgtttaaattacttgaaaaattgttggaggaacaagccttcaccacgatt

SEQ ID NO: 13721 - DNA, 261 bp, Glycine max
  Clone ID: PAT_MRT3847_112398C.1
gtagttgtgagcgtggcattagcatttgcatgtacccattattgaagcaagcgcaaggtccttattcttctctttcatattgctctcttctcctaaaccactgtttatctaaaaaatcgctttgctttgtcaaaatcgtgcatgatcactacctcaaattgggtcttaacacctacacatacttgggcaatcgctgtctcgacctttactctgagttcggccaccttaacgatgcaccgaagtgtttgatgatatttccca

SEQ ID NO: 13722 - DNA, 465 bp, Glycine max
  Clone ID: PAT_MRT3847_112399C.1
gcccccaggaaagccccaccccccaattgaggaacaaaaaaagtaacgggtaggaaaacggggccctctcccattggtcttaatattgttttttttacagggggggggggggggaaaccccccccattttaccattgggagggggaggggggaagtaaatggaaaaagcactcctgtcccccttttctttgaccctttcccagggcaattgattgggggaggcgttttcgcaacgagaatcaatttttattgtgccccggccatgcaattaaatggggagtgggggcgttttcctttactatgctccggggagggggaggggcctttttttttttaataattaaaccttttcgggtcaagcccaaacccaattttacgttcccgcccgagcgaagggaaagttttttttttttgttacggaaattaaaccccctgggcgggggtgtaaatttaaaagggggggaa

SEQ ID NO: 13723 - DNA, 683 bp, Glycine max
  Clone ID: PAT_MRT3847_11239C.1
caaaagaaattcttttttttttttttttttttttttttttttttgagaagaatgaatacaagaatttgaaatactaattacaggaaatatttgcaatcataaaaattgaagccttcaactactactaatatctatcaaagtctagagtagaagttaaaacgacaaagaactacaaaatcaaatatatataaaaaaaaaagaggctaaaactactcaaaactgcaaatgcactcagaattgtgttgattgagcacctaatcctagccatgtcatggattcagccggcttatttgaagcagagttgggattgtttatttgatatggtgctttggaagcaattctatcttttctcttagaaaggaaccgatgaagtgaaactttcctagcaattggcagttcacaaacaattggtctggacggtgcttgaggggagacattaggaacaaaggaaggatgattcccttgctggttatgagtgtgagcacatgcagaggtgttttggctttgggatattcccttgccggctaatgacattatctcctccaatttttcagcaggaaaatcatcaaacacaacaacttgcccagcataaaagattgtcaactgagcaggtttaggctccttctctatagacttaaatgcacttgatttgaccatggttggaacctctgagtggtgaggat

SEQ ID NO: 13724 - DNA, 415 bp, Glycine max
  Clone ID: PAT_MRT3847_1123C.1
gagagagagggtggtggcttctttcggagtgagccagtctttgtgtttaagacgcgccagaattgcggtgtcgcggttcggggttgtggaaaattgggacagggagaacaacaagaacctcgtagaggtgatgggtttcagaggaaccacgaccggagcaagggttcgtgggatcatttttgtttttgttgttgtatgtggactggtcttggatttgatttgtataaagttatggttggaatttggactgatactggctgaactcacgaacggactaatcacactcaaggactcaggtttgctcgaatgttaaagattgtgatttttttttttttttgaaaagaaaatgctttgggagttgctaggtgcacccagcattattgctggtgcacccagctacttttgaaattgccaa

SEQ ID NO: 13725 - DNA, 1126 bp, Glycine max
  Clone ID: PAT_MRT3847_112400C.1
gaaaagtgaaccacgcgtccgtgaaaacagaccaataataataataataataaaagaccaactccttggcttggcgcatctttattccctctcttctataaatcgttcgatcgttaattcctcgcacgagcttgtgtccgtcgtcaaaccatggagaatattggtgaggatcagtacggctacttgccggagaccgacctgtttttcccaaacgaagaccttggcagctgggcaataatggatggggaagcggtctcttggtactatgattcaagctccccggacggcaccggtgcttcttcatcggtggcatctaagaacattgtctccgagaggaatagaaggaagaagctcaacgataggcttttggcacttagagcagtggtccccaacattaccaagatggataaggcttctatcattaaggatgctatagagtacatccagcacttgcatgaacaagagaagagaatccaagctgagattttggatctagaatctaggaataagttcaaaaatccaacctatgaatttgaccaggacctccctattctgctcaggtctaagaagaagaaaacagaacacctatttgattctctcagttcaagaaattccccatcaattgaaataattgagctgagggtaacatacatgagagagaagacgtttgtggtgaacttgacatgtagtaaaaggacagacacaatggtaaaactgtgtgcggtgttcgaatctttaaagctgaaagtcattacggccaatatcacatctttttcaggcacgcttttgaagaagacagtcttcatccaggcagatgaagaagagaaagactttttgcatataaaaattcagacagcgatttcagctctcaatgatcctctaagcccaatgagtatctgatgaagaaacgagttcagatcgaagctgagattgttctgtttgttgagtttctttttctcactcaatgttaattatctttagtgaatgagtcttaaactcgaaagttggcaagttttctttttctttttcattttctgtatgttgatgttgatagcctctaacgttgtaagctttacgttattaatgaaatcgcattttcatgttcttcatggtaaaaaaataaaca

SEQ ID NO: 13726 - DNA, 1649 bp, Glycine max
  unsure (1)..(1649): unsure at all n locations
  Clone ID: PAT_MRT3847_112401C.1
gttttgaagagctaaacatggatttattcaggaagtgcatggagcccgtggagaagtgtttgcgggatgccaagatggataagagtaccgtccatgatgttgttcttgttggtggttctactaggattcccaaggttcaacagttgttgcttatggtgctgcagtgcaggctgcgattctcagtggcgagggtaatgagaaagtgcaggatcttcttttgttggatgttactcctctatccactggtttggagactgcaggaggagtcatgactgtgttgattcccagaaacacaaccattcccaccaagaaggagcaggtgttctcaacctactctgacaaccagcccggtgtgttgattcaggtctatgaaggtgaacgaacgaggactcgtgacaacaatttgcttggcaaatttgagttatctggaattcctcctgctcccagaggtgttcctcagatcactgtttgcttcgacattgatgccaacggtatattgaacgtgtctgcggaggacaaaaccactggacagaagaacaagattacaattaccaacgacaagggcaggctttctaaggaggagattgagaagatggtgcaggaagctgagaaatacaagtctgaggacgaggagcataagaagaaagtggaggccaaaaatgcattggaaaattatgcctataacatgaggaacacaatcaaggatgacaagattgcttccaaactgtcttctgatgataagaagaaaattgaagatgcgattgagcaggctatccaatggctagatggaaaccaacttgctgaggctgacgaatttgaggataagatgaaggagttggagagcatttgtaatcccatcatagcaaagatgtaccagggtgctggtggtgatgcgggtggagccatggatgaggatggtcctgcagctggcagtggaagcggtgctggacccaaaattgaggaagtcgattaagcagaagattctcatgggttgttcttgattttgtcaaagacccttttgaagtttagataacagcgtgtcattatgtttttattgcgattttatttttctcttttttttttaatgtacttttccccgtttctacttgaacaatgatataagtttttgctcatatggtctattgattgtttcgtttcggagactaaggtggtaaaagtaaaacatctttttcgcaagtgattggaaaataaatagagtgtaggatatgtatcctttgaaattaagggataattggagattattgaaaattagcgtggccaacagaaataaattaattaaaaaattaaaacgtattgtcttccttcttagttttcatcttctttgatgttttgcccgcattgtgtgagatcttttgcaagataacgtttttttgacggagcttccttttcatgcctaaaccaccattagcatttgtctttgaaggatgatctttgacaaaaaaactcagagataccataaaaaaaaactagatctgggcttctcatgcgtaccatgttgtcactcaccggatcgagtagttgagaccaaattatcacattcgattcaacggttaaatattctttggcacggtgtaaaagtagttagactatcacacccttatnttcatctcgtttccataatatgctca

SEQ ID NO: 13727 - DNA, 460 bp, Glycine max
  Clone ID: PAT_MRT3847_112402C.1
gcacgaggacaagagagattagattagattacaatcaaatcagtttgagggaaggaattatgtcatacttgctacctcatttgcactccgaagaagaacgagttgttgtcattcgcttcggtcatgattgggatgacacctgcatgcaggatacaatgcaataatgccaattgaattgctgaacacggagccttttatgtcgaataagatggatgaagtgctggcatcggttgctgaaaagataaaaaacttcgcagtgatttatcttgtggatatcactgaggtgccggatttcaacaccatgtacgagttgtatgagccgtgcaccgttatgttcttttttaggaacaagcatattatgatagaccttggaaccggaaacaacaataagatcaattgggcactcaaagacaagcaagagttcattgatattgtcgaaacagtgtaccgtggtgcaagg

SEQ ID NO: 13728 - DNA, 937 bp, Glycine max
  Clone ID: PAT_MRT3847_112403C.1
gagaagtacaaggctgaggatgaggagcatcttctcaatctcctccttagaaagccttcctttgtcgttggtaattgtaatcttgatcttctgttgttggatgttactcctctctcccttgggttggagaccgcgggaggagtcatgactgtgttgattcccagaaacacaaccattcccaccaagaaggagcaggtattttcgacctattccgacaaccagcctggtgtgttgattcaggtctatgaaggtgaacgtacgaggactcgtgataacaatttgcttggcaaatttgagttatctggaattcctcctgctccgagaggtgttcctcagatcaccgtttgctttgacattgacgccaacggtatattgaacgtgtctgcggaggacaaaaccactggacagaagaacaagattacaattaccaacgacaaaggaaggctttctaaggaggagattgagaagatggtgcaggaagctgagaagtacaaggctgaggatgaggagcataagaagaaagtggaggccaaaaatacattggagaattacgcctataacatgaggaacacaattaaagatgataagattgcttccaagctgtctgctgatgataagaagaaaattgaggatgcaattgagcaggctatccaatggctcgatggaaaccaacttgctgaagctgacgaattcgaggacaagatgaaggagttggagagcatttgtaaccccatcatagcaaagatgtaccaaggagctggtggtgatgcgggtggagccatggatgaggatggtcctgctgctggcagtggaagcggtgctggacccaaaattgaggaagtcgattaagcagaccaattgtcatgggttgttcttgattttgcgaagacccttttgaagtttagataataacctgtcttgtcattatctaaacttc

SEQ ID NO: 13729 - DNA, 2298 bp, Glycine max
  Clone ID: PAT_MRT3847_112404C.1
ctcgagccgagaaattgctttgctgtaagtttctgattcctttcttcagaattccaagttttcatttcgttagggacaaaagattgtgagatagagtatggctggaaaaggcgagggtcctgctatcggaatcgatttgggaacgacgtactcttgcgtcggcgtgtggcaacacgatcgtgttgaaatcatagccaacgatcagggtaatagaactaccccatcctacgtggctttcaccgatacagaacggttgatcggcgatgcggcgaagaaccaggtcgctatgaacccaatcaacactgtttttgatgctaagcgtttgattggaagacgtttttctgatgcatcggtacaaagtgacatgaaactgtggccgttcaaggttattcctggccctgctgacaagcctatgattgtggtgaattacaagggggatgagaagcagttttcggcggaagagatatcttccatggttcttataaagatgaaggagatcgcggaggcgtatctaggatcgacgataaagaatgcagttgtcaccgtccctgcttacttcaacgactcacagcgtcaagctacaaaggacgctggtgtcatttccgggctcaacgtgatgcgaattatcaacgagcctacagcggccattgcttatggactcgacaagaaggccactagctctggggagaagaatgttctcatcttcgacctcggtggtgggacttttgatgtctcccttctcaccattgaggagggtattttcgaagtgaaagccactgctggtgatactcacttgggaggtgaagattttgataacagaatggtgaaccattttgttcaggaattcaagaggaagaacaagaaggatattagtggaaatgccagagcattgaggaggttgagaacagcatgtgagagggccaagaggactctctcttccactgctcaaaccaccattgagattgattccttgtatgagggtattgacttctacacaaccatcacccgtgcccgtttcgaagagcttaacatggacctattcaggaagtgcatggagcccgtggagaagtgtttgcgggatgctaagatggacaagagcaccgtccatgatgttgttcttgtcggtggttctactaggattcccaaggttcaacagttgttgcaggacttcttcaacggaaaggagctttgcaagagcattaacccagatgaagctgttgcctatggtgcagcagtgcaggctgccattctcagtggcgagggtaatgagaaagtgcaggatcttctgttgttggatgttactcctctctcccttgggttggagaccgcgggaggagtcatgactgtgttgattcccagaaacacaaccattcccaccaagaaggagcaggtattttcgacctattccgacaaccagcctggtgtgttgattcaggtctatgaaggtgaacgtacgaggactcgtgataacaatttgcttggcaaatttgagttatctggaattcctcctgctccgagaggtgttcctcagatcaccgtttgctttgacattgacgccaacggtatattgaacgtgtctgcggaggacaaaaccactggacagaagaacaagattacaattaccaacgacaaaggaaggctttctaaggaggagattgagaagatggtgcaggaagctgagaagtacaaggctgaggatgaggagcataagaagaaagtggaggccaaaaatacattggagaattacgcctataacatgaggaacacaattaaagatgataagattgcttccaagctgtctgctgatgataagaagaaaattgaggatgcaattgagcaggctatccaatggctcgatggaaaccaacttgctgaagctgacgaattcgaggacaagatgaaggagttggagagcatttgtaaccccatcatagcaaagatgtaccaaggagctggtggtgatgcgggtggagccatggatgaggatggtcctgctgctggcagtggaagcggtgctggacccaaaattgaggaagtcgattaagcagaccaattgtcatgggttgttcttgattttgcgaagacccttttgaagtttagataataacctgtctttgtcattatgttttggatttggattttacttttctcgtttttttaatgtacttttccccgtttcaacttgaacaatgatataagttgctcatatggtctattgattgtttcgtctccatatttgcttaaatgcttatcaagtgggttgctctcccatttttgagagttgaacatctctgctag

SEQ ID NO: 13730 - DNA, 2273 bp, Glycine max
  Clone ID: PAT_MRT3847_112405C.1
ggtccggattcccgggtcgacccacgcgtccggaattgttgtaactttttgattcctaaattctctaaaattcgaaattctaatttcgttaggggaaagagattgtttgtgtgtgagagagtatggctggaaaaggcgagggtcctgctatcggaatcgatttgggaacgacgtactcttgcgtcggcgtgtggcaacacgatcgtgttgaaatcatagccaacgatcagggtaacagaactaccccatcctacgtggctttcaccgacacagaacggttgatcggcgatgcggcgaagaaccaggtcgctatgaacccaaccaacaccgtttttgatgctaagcgtttgattggaaggcgtttttccgatgcatcagtacaaggtgacatgaaattgtggccgttcaaggtgattcctggccctgctgagaaacctatgattgtggtgaactacaagggggaggagaaacagttttccgcggaagagatatcctccatggttcttatgaagatgaaggagattgcggaggcgtatctaggttccaccataaagaatgcggttgtcactgtgcctgcttacttcaacgactcacaacgtcaagccaccaaggacgctggtgtcatttctgggctcaacgtgatgcgaattatcaacgagcctaccgcggctgccattgcttatgggctcgacaaaaaggccactagctctggggagaagaatgttctcatttttgatctcggtggtgggacttttgatgtctctcttctcaccatcgaggagggtattttcgaggtgaaggccactgctggtgatactcacttgggaggtgaagattttgataacagaatggtgaaccattttgttcaggaattcaagaggaagaacaagaaggatattagtggaaatgccagagctctgaggaggttgagaacagcatgtgagcgggcaaagaggactctctcttccactgctcaaaccaccatagagattgattccttgtacgagggtattgacttctacacaaccattacccgtgcccgttttgaagagctaaacatggatttattcaggaagtgcatggagcccgtggagaagtgtttgcgggatgccaagatggataagagtaccgtccatgatgttgttcttgttggtggttctactaggattcccaaggttcaacagttgttgcaggacttcttcaacggaaaggaactttgcaagagtattaacccagatgaagctgttgcttatggtgctgcagtgcaggctgcgattctcagtggcgagggtaatgagaaagtgcaggatcttcttttgttggatgttactcctctatccactggtttggagactgcaggaggagtcatgactgtgttgattcccagaaacacaaccattcccaccaagaaggagcaggtgttctcaacctactctgacaaccagcccggtgtgttgattcaggtctatgaaggtgaacgaacgaggactcgtgacaacaatttgcttggcaaatttgagttatctggaattcctcctgctcccagaggtgttcctcagatcactgtttgcttcgacattgatgccaacggtatattgaacgtgtctgcggaggacaaaaccactggacagaagaacaagattacaattaccaacgacaagggcaggctttctaaggaggagattgagaagatggtgcaggaagctgagaaatacaagtctgaggacgaggagcataagaagaaagtggaggccaaaaatgcattggaaaattatgcctataacatgaggaacacaatcaaggatgacaagattgcttccaaactgtcttctgatgataagaagaaaattgaagatgcgattgagcaggctatccaatggctagatggaaaccaacttgctgaggctgacgaatttgaggataagatgaaggagttggagagcatttgtaatcccatcatagcaaagatgtaccagggtgctggtggtgatgcgggtggagccatggatgaggatggtcctgcagctggcagtggaagcggtgctggacccaaaattgaggaagtcgattaagcagaagattctcatgggttgttcttgattttgtcaaagacccttttgaagtttagataacagcgtgtcattatgtttttaattgcgattttatttttctcttttttttttaatgtacttttccccgtttctacttgaacaatgatataagtttttgctcatatggtctattgattgtttcgtttcggagactaaggtggt

SEQ ID NO: 13731 - DNA, 453 bp, Glycine max
  Clone ID: PAT_MRT3847_112406C.1
gaatataaaattataaaaactaaaaaatccttagggccaagtacacaccaccaaacaaacccgggaaaaaaaaaaaaacaataaaacaaaaaaaaaggtttgctaatttaaaggaagcagcacctagcttacaaagccgcgggggccacgcatccagaacaaaaacaaacacaaaagaatttgggccaacccaacccgaacaaggagcaaggcccccacaaaaagcaccggaatccccaaaaacagcaccttagaccatactttagaccaatccaccaaaaaccttcccgggccccaaatcaaagctttgcttgaaacccctggttagaagagcccccactgggggggcccagggaacaggggaagaaacccggcgggccaaaaaattctttaaggggggaggaactgtttgtggcggggcatacccaatggagaagacggggactccggacc

SEQ ID NO: 13732 - DNA, 401 bp, Glycine max
  Clone ID: PAT_MRT3847_112407C.1
ccacgcgtccgccacgcgtccgcccacgcgtccgcccacgcgtccgaaatttcatttcttttcattttattttcattacgtcatagtcattgcaacttatatctcctagtccggggttattacaacttaacaattgtggttttgagtttgagtaccggatatgtagtagaattcaatatttaggatatatttgttgctcacaataattatatttgactagagcatgaatacctgacccaagagaaattatatgtggatgtaataattttatacaacgaagggagcgacaaggagatagaggtaaaaagaatcgtttgagataaggtgattgatgttataaaaaaaaaaaaaactaaaaactcactctgaaatttggcggccgttctctaggatccaaacta

SEQ ID NO: 13733 - DNA, 335 bp, Glycine max
  Clone ID: PAT_MRT3847_112408C.1
attcaaagctgcgtatgttattagtataatgtagtaccatttttttacaacaacgcgaggatcaccaactatgcccatgcatatgaaaacgcctctagcaggagaattagtcgtctagcgtcgacccattcagaaaaacgttctcaaattgtgggcctccggcatataaaaggtacagtacaccccggaccggcacggccttctacataacaggagtactcacacttatagagtcccacgggatcgttaagctggcaaagtttatttagcaaaaagcaactctccgggggggaggagtaccatcccgggcacaatggtcaaaatctttcgatccg

SEQ ID NO: 13734 - DNA, 276 bp, Glycine max
  unsure (1)..(276): unsure at all n locations
  Clone ID: PAT_MRT3847_112409C.1
cacacatgagttgggcctcttccaacttaaaagcagaggatgacattgggccactgacgcgacacatgcaccacctaataatcataatatttacannntttacatacaaaatacaaagactttaaattttataaagaaaaaaagagatgaaccgatcatcttaatgaaatgaaaccataacccacatacattggctggattctgnntgttnntgatgttcccaacttgattatgcatgaaccnnncngattgaatcacttggacttgaagggaatg

SEQ ID NO: 13735 - DNA, 1837 bp, Glycine max
  Clone ID: PAT_MRT3847_11240C.1
atgaaaaaaaaaaatatagagaccaaaattataaaaaaaaccaaaagtgatgaagagaaatgggtccatgatgcatctgtggattacaagggaagaatccctctccgtgcttccacgggtgtatggaaagcttcgctttttgtccttgcaattgaatttagtgaaaggatatgccactttgggatagccactaatcttatcatgtacctgactaaagtaatgcatgaagatctcaaaacagcgaccaagaatgtaaactactgggtaggagcaacaactttgatgcctctaattggaggatttgttgctgatgcctacactggtcgatttcgtatggtcctcttttcttccctcttatacctcaagggattaagcctcttgaccatgtctcaattcattccaagtctaaaaccatgcaacaatgagatatgccattggccaaggaaggttcatgaagtggttttattccttgccctttactgtgtcgccttgggaactggaggattcaaaccgtgcttacaaagctttggagcagatcaatttgatgatgaccaccttgaagaaaggaagaagaagatgtcattcttcaactggtggaattttacactttgcacggcaatgctgcttggggcaacagtgattgtttatgttcaagactttgtcagctggggagtatcttatctcatcctcagcatgttcatggctctcactatcattgctttctatgaggggaagcgtttttacaggtacaggagcacagaaggtaaccctttcatgctaattctacaagtactaattgcagcaataaggaaaagcaacttgtcctgtccttcaaatcccgattcattgtatgaattcccaaagtcagagaagtcacaaggaaggcttctaagccatacttgcaggctcaggtttcttgacaaggctgcaatagttgaagggaagtatactgagcatagagaccagaatccatggagattagcaacagtgacaagagtggaggagacaaagcttattctgaatgttattcccatatggctaacttcattaataattggtatatgtatagcgcaaggctcgacactctttgtcaatcaagcagcttctatgaacttaaagataatcaacagcttcaaaatcccaccagcttccatgacatctgtttcagctattagcccaataatagctatcccaatatatgataagattatagttccaattatgaggaaagtcaaaggtaacgaaaggggcatcagcgtcctttggagggttggcattggcttagcattcttagtcatagccatggtggttgctgccttagtagaaacaaagagattaagaatggttgaacatgatgaaacaatgagtgtgttgtggttgataccccaatacttgatccttggaattggagcagattcattgtctctaattggtttgcaagagtatttctatgacgaagttcctgactcaatgagaagcataggaatggccttgtatcttagtgtacttggagtaggatttttcttaagtagctttttaatcatcattgtggaacatgtcacggggaaaactggcaaaagttggattggaaaggacataaattcaagccgtttggataagttttattggatgctagctgtcataaatgcttttgttctgtgtgtctttctcttggtgtccaaaaggtacacctataagactgtacagagaagagctatggaaactgattcttgtaagagtgatggggttgagatggtggcttgatgagagcttctcagctgtacctctcactgctatattttcagctgaatcaaatgtttaatgtattgtttccata

SEQ ID NO: 13736 - DNA, 488 bp, Glycine max
  Clone ID: PAT_MRT3847_112410C.1
gaaatcataggtcttgaagcaatcacacttggagggcatttggcaccagaaaagtttttggtttctcgggaattagaggttaaaaaatttaatttctcatgtttggtattaatttttaaaaaataacattcttggaaaagaatgtctcctaggaatgttttttaatcaatttcttacgaaaattttctcgagtaatttttctcttactataacaaaattatcatctttctctttattaaattatttaatgtgataaaaaataatataagtttgtaatttttagaaaaattattttaagattccaattattaatcaaataaattttattcattcttaaggattcatgatctttaggaattatgctatgaaaaaatttgtcttaccaaacgaacccttgtagtcaatctgccacttaaactggttagcatttttatgcaccacggtatgtacttctgtagatggcttaaatattgcctagatttcaaatc

SEQ ID NO: 13737 - DNA, 290 bp, Glycine max
  Clone ID: PAT_MRT3847_112411C.1
tgattaacctcactcctataatatcctgagataccgtgtcatttcctcatggggagaaaaaaagccccattttttaacaaactttagtgaacctaaagccaaataaacgatcgacttatccataggggcagtctctttatgcactgaaaatctaacccccactggccaattttttagacaagcccatgtacaatgaattttctcgtgtaaagtgaaaaacataaaaaattaatgggtcaagggtatcccctcatagaaataacccattgttctctctaacctagaactaa

SEQ ID NO: 13738 - DNA, 287 bp, Glycine max
  Clone ID: PAT_MRT3847_112412C.1
gccccggacgccggccatcttcccctataaagcggcccgtgaccccctggaaccacctggccagggcagacacccgcgcgaaaaaggaatccggccacacccccccacaaatacaagccggaggcccccggcgaaaaccgggggggcctaaagagggagctcccccaaactaaccccggggggcaaaaagcccgctttaccacgagaaacccaggcgggccaacaccacaaaagaatcgcccaacccccggggggaggcccatttgccttagggcccccggggggcc

SEQ ID NO: 13739 - DNA, 639 bp, Glycine max
  unsure (1)..(639): unsure at all n locations
  Clone ID: PAT_MRT3847_112413C.1
atagctcataaatgaactttggaccctgtggatgcatgacgttagatttgtattatcaaaccctcaataaatttttggtggaatacaacacgtaccatatcatagaaactgaacttggcaccaggttcaccatttctttagtccatccgtatttttttttttcttgcttcttggtaattctcactctattttagactaattatagaataaaatatatataatgaatgatcttatcttcatattcattcatatgtttaatttgaattttgatatttttttggctaaattaaattttccattcaaattagtatggttttatataaacgtttaataacatgtcaaaaaaacaagacgtgatgacttgatattgttattgcttaacaaacgaaaacaataacaacaatttttttacgaagaaaacgaaaattttttaggcaatttatttggttaaaaaaaagaaatttttagaataggaaattagaaaaatagggaatttttctcatttttgaaaaaattttaattaattcaattctaaaaaaaataatncttttagtttaaataaaagataaaagggggaatttttttcataaataaaaaatataaatttaggaataaaatggaaaaatggaaatatttttt

SEQ ID NO: 13740 - DNA, 298 bp, Glycine max
  Clone ID: PAT_MRT3847_112414C.1
gataaataacgataaactaattaagctcaagtggctcaagttcaaaataaatatgataataatcacctggtacttttacactggtggctatgggccacctatcaataggtgaaacttgaaacaagggaaaggtcgattgaaaaatgacccaattctgggtctggtgaaaattggcccggatgaaaaaaatttccccgccccatggaattccaataccttggtttctttttctttccaacccgagggttttgggatgcctttattcgacctaaaaagggaaaatttggtgggaacccca

SEQ ID NO: 13741 - DNA, 126 bp, Glycine max
  unsure (1)..(126): unsure at all n locations
  Clone ID: PAT_MRT3847_112415C.1
tntcanatnacactgtttatngatncatgctctgaactgctttatntatatatgcctgctctgatgnacgcatgggtgcnncnagttttncgggaagcttgaaanttccnctcgcnggcccgattg

SEQ ID NO: 13742 - DNA, 564 bp, Glycine max
  Clone ID: PAT_MRT3847_112416C.1
cagatgcagcagatccgtatgagtctgcaaggcacagctgttgtgctcatggggaaagaacaccatgatgcgtaaagctatccgcggtcatctggaacgtaacccagctctggaaaagcttcttgctcacattaaaggcaatgtgggttttgtcttcacccgtggagacttggttgatgtccgtgacaagctgcttgaaaacaaagtgaaggctcctgcccgtgctggtgccattgctccttgccctgtcgtaattcccgctcagaacactggtcttggtcctgagaagacctctttcttccaggctctgtccatccctaccaagatttccaagggtaccattgaaattatcaacgatgtgcacatcctgaaggaaggtgataaggttggtcccagcgaagccacactgctcaacatgcttaacatttctcccttcaactacggtttgattgttgagatggtctatgactctggcaccatctttgagcctaagatccttgacatcaagcctgaggacctccgcgtcaagttcatggagggtgtgagccgccttgctgctgtctg

SEQ ID NO: 13743 - DNA, 431 bp, Glycine max
  Clone ID: PAT_MRT3847_112417C.1
tcatacaaaagcatgcattatatcatccatgatcaaattgcagtgcgttaagcgtacagcatacacttgagataagcgttggcacactgagtgcagtactcggggatagatagcgttggaagttggaattcaggctatcttgacctctatagtcctgggcttcttgggctgaggaggaggcggcttattgacagaaacatgttgcacacgagtgtgggagtctttacggatagcattggaagcttctgcttcagagtgctgaaacttcctcatcaacttgccaagccttctctccatgcttaaacactctgcgcttggtcacgatttttgccactgacactatcttgactgtgttctataagccagtatttgcacccgccccgcacaggcgtgccatgctttacctgttgtgagttgtattaaaggctaga

SEQ ID NO: 13744 - DNA, 625 bp, Glycine max
  Clone ID: PAT_MRT3847_112418C.1
cccaaccttcgcaagcgaagagcctctgggcaatgggatacgaaagttttttataactgctaaaccttcttcataccttattgtgcagctgcagagttaactatggatatttgcggcttacaaccttattggtagaataatggctatgtggatctaagaaaatatacaacatctattctcagctctcatgaatgacaacaggttagtctcttatatagatcacactacttcaagagattagtctccgacacttggctagaggacatctcggattcaacaagaacaaaaaaagaagatattgtaactgaagttaactcatgctatgactttgtgaaataacaagtagaagttttacttcactaattttcttgtctttgttatttttgcaggatttgaagattctaaccaaggtgtttgacttatattcttttacacaattgagataaaccaagggaatatttgtatcccgtgttaattattttttagttttatcttaaccatcctattattttcttacagcagctttagtgagaatcattgaagctaatgaacaaaatttacgttgttttcaattttgtttatatgaataagttgcaatgaaaagggaaaaggaactacactactt

SEQ ID NO: 13745 - DNA, 550 bp, Glycine max
  Clone ID: PAT_MRT3847_112419C.1
cataccaaatattttgttttgattagatatcagtacttctgtacaatagttgataacatttccattacatatttcgctgactaagaactcatagatggaaatagtaaatatacaagacatatcataaccccaaaaagttgaagaaaatacaagacatcttggttgtgctattgctcatatcaccaaggcacaaatcgatccataagcaaacacaccgttgcctcagacatggttccattagtagtgtctctcttaaccaccgcagtttgagtttccttttcttcttggttcctttctgatccttctttggctttggataataagaaaggcttgcgggcaagaactttttctcgaagctttgtcagctccccaacccatacctctaccatagcagacatttttctcagcacttagaaactaatgaggcaataattaaaactctttgttctcttgtttgtgcttcaaggttggagctgaggtgagtgtggtttatataggaatagtagaaaggctaatgaaaggggcttactagtgttgtgtctccccttct

SEQ ID NO: 13746 - DNA, 245 bp, Glycine max
  Clone ID: PAT_MRT3847_11241C.1
aatagccgggccgaccgacgcgaacgcacaagttgaaaattgcggctctcgaggccgtcaacaaatcccatgcacgcggcagctatgggcctcttttaaaacggcggtctcgactgccatagtaatgtttttaaaggcttctacatggaatccatcgcgtttaatcccagcttgttcccttttcattcctcccttgtctccttcttcgcctttttccgttttcactacaacctgattgttttttc

SEQ ID NO: 13747 - DNA, 313 bp, Glycine max
  Clone ID: PAT_MRT3847_112420C.1
ttttttttttttttttttttttttttttttgggtttttttttttttttttttttttttttccccccccaaaaaaaattggggaacggttaaaacggtggaccgaatattttttttacttaggggccttgtgcggtgaatgaaattttaaaaccccccctaatttccggggttttttttcccaccttaaattccggggaaaggacttcttttttttaaccttggacaggggaaatataccttggtttctttcaaaaaacaaaaaaatggggtttctgcggacaataaataaaaaagacggtttgttttcttttt

SEQ ID NO: 13748 - DNA, 315 bp, Glycine max
  unsure (1)..(315): unsure at all n locations
  Clone ID: PAT_MRT3847_112421C.1
attaacacagcaaccacatgacccataaagaccagaaatacagaggtataactcagacagacacgacaatatggcaaataacaaatttacgatccatccttaaaattagacatatggataggcaaccacnacaaaccatttcgtcagcggagttttacccaaaacaccaacaaggngatancaaaaaccaaccagcacgcggaagggggaaccaccacacgataaggaggacgcaanngacanaagccaagnaaaaagaaaaccaaaagggccgcaaacaaaaacaacanaagcccaaaccaaaaaaaaaaaaca

SEQ ID NO: 13749 - DNA, 627 bp, Glycine max
  Clone ID: PAT_MRT3847_112422C.1
acggctgcgagaagacgacagaagggagtgataagactgaagaattgaggtgtgttgtaaaggagtgcagtgctgagtggaaagggattttgtgagtccatgacaactaaactaagtccaggacagttactgccaaaacccacaccacactgcatttttcacagtcccaaaaccctcactttcttctttttttaattaaatgaagccctgtagctatagctctatttgtcggatattcatgttacacgcctccaaatcatatcaaatcaactgaaaaccattactaacttattaatgcatattttatgtatataatactactactataacaatatactagaatatagaccatagaatactatacatatatgtatttttaccttagcattattctgttactcatgccttgaaattcaccaacctatattgtaggttgggttgtcagattatgttttccttggaattgtctttttttgagaaagatatgatatacaaattcaaaggaggaggtaaagaaagaaaccttgttaatgattgtttggtttatttatcttatcttatacattaacttttgctgtctactagggggagggccttaatcaataatccccccaaacaaccccagtg

SEQ ID NO: 13750 - DNA, 438 bp, Glycine max
  Clone ID: PAT_MRT3847_112423C.1
ggaaaagaagaaggaccgccagcaggagccgggacggaaaccccgggacgtcccacgcgaccgaatgattctaaaaaggggccaagagaaaagggcagcggcccaaaaacacaggcggaggaaccaagccgacgagagaacaaagggcaaagtcgtaagacagagggcaatcccagagcaagcgtagaattgcagcgcactcatcgaattaaaggaatgatcaaaatggaggccacagctgggattcctgagaatacaggtatagcaaaggcctgagctatgaatagctccctaagggggcgggccagtcctgaaattaacaccatctgctctcaagactgtgaattatggaatcccgcttgcacaaaagcaacgactaagccaattaaaccaaacccggggactgaagcaaggaggtaggaatttctgaagcggacc

SEQ ID NO: 13751 - DNA, 1683 bp, Glycine max
  Clone ID: PAT_MRT3847_112424C.1
ccggtccggaatcccgggtcgacccacgcgtccgcgtttttacattcttgcaatgaagtttctcttgctgtgccatcagctgaccaagggcaggttgataattccagttcttatactgctgcaccaccagaagttacaggcaaaaagggtgggaatggtttcaattctattgaaatagcatctataacatctgcatcggccattgtttctgttcttctagccctaattgtcctttttatttatacacggaagtggaatcctaggtccagggttgttgggtctatgagaaaagaagttacagtgttcactgatattggggttccattgacatttgaaaatgttgttcgggccacaggaaatttcaatgctagcaactgcattgggaatgggggatttggagcaacctacaaggcagagatagtaccaggaaacttggtggcaataaaacgtctggcagttggacgattccaaggtgttcaacaattccatgcagagattaagacccttggaaggcttcgtcatccaaatcttgtcactctgattggttatcatgccagcgagactgagatgtttctcatatacaactatttgccaggtggcaatctggaaaagtttatccaagagagatccacaagggcagtggattggaggattcttcacaagattgcattggatatagcccgtgcacttgcatacctgcatgatcagtgtgtaccccgagttctacatcgggatgtcaagcccagtaatatcttgctggatgatgattataatgcttatctatctgactttggattggctagacttctgggaacctcagaaactcatgctaccacttggtgtagcagggacctttggctatgtagctcctgaatatgccatgacttgtcgtgtttctgacaaggctgatgtgtatagctatggtgtggtgcttctggagttactctctgacaagaaggcattggatccttcatttttcgtcatatgggaatggtttcaacatagtagcatgggcatgcatgctgctgcgacaaggccaggcaaaagagttcttcgccgccggcttatgggatacaggtcccgaagatgatttggtagaggtcctacacttggctgttgtgtgtacggttgactctctctcgaccagaccttcaatgaaacatgttgtacggcggcttaagcaacttcaaccgccatcatgctagtcattcatcctggtgagactgtgctagtttgacatagtagtaatcttagaaaatattgtaatttgtgatttagcatggagtcctttttagtggactgctcttaggttgagttggaaattgtacctaaccccctcccccctccttccctgtacattgtaatatagatgtgcccccaattttccatgctcctttcctgattaggttaggggccttggtgatgatgactctgcagaagaatgcagatatttgatgtccagcgctatacctgtttattctagtttgatttgttcaataaaatcatagaatagaatcagtttcctgaaagaagtttttgctgggttctcctgcgcaatgtcttgttttatttggttgacaaggttgtttttgggggggaaacccatgcctgtctagtcccggcagacaatgtgcttttagggtacaatgttgtaacgaggttgagtttgttattatatcttat

SEQ ID NO: 13752 - DNA, 410 bp, Glycine max
  Clone ID: PAT_MRT3847_112425C.1
tttccgaaataataaaaaaaaaaaaaaaaaaaaaaaaaaaagaaaaaattaaaaaaaaaaaaccaaaaaaaaccaaaaaaaaaaaaaaaaaaaaaaaaaaaaaaacaaaaaaccacaaggggggggccgcccaaggggacccaacgcaccacccccgggcgggcgccgccaaacccctgcaatggggcccccaaaacccaatccccggcccggggtttcccaccgggggcccgggaaaaccccgggcgtcccccacctaaaccccctgggagcaaaaccccctctggccggcgggggaaaaaacgaaagggcccgacccgaccgcccttcccaaaagtggcccaccctgaagggccaagggacccctccctaaaccggcgcataaaccccggggggtgggggggcacccc

SEQ ID NO: 13753 - DNA, 237 bp, Glycine max
  Clone ID: PAT_MRT3847_112426C.1
ctcgagccgcaccagccctcatcttccggagaacattggacatctcctctctcttcttctttgcgcgcttatggagctggagacaagaagaaataagtcttgtttactttttctagtttcactagactgtttcgatgtacgagttgtcttatttttgttttagttcaagattttgctttgagaaatatgttttacctaatcgagacatgatttactgaaaaagtacaattggcttaa

SEQ ID NO: 13754 - DNA, 129 bp, Glycine max
  unsure (1)..(129): unsure at all n locations
  Clone ID: PAT_MRT3847_112427C.1
ngtcgcgngnacgcgagcgcggnattcggctgcgagcncnncctcaaatttcctttngccttcctagaaagagttagtgngccggaggcantcncgccnnngcanttgcatgatntgancnccgccgtg

SEQ ID NO: 13755 - DNA, 342 bp, Glycine max
  Clone ID: PAT_MRT3847_112428C.1
ctgagagccctgcggaccgcgatcgcgggcttattcaaaccgccaccgccggcatcaccaggacgtcctgcatagacggccagtgtggaggatcctcagagagccgggggataattgaaagagagtgcccggaaaaatgctccagttgcaacaccctaactgcctaagtcacacttacacgggcacagcaccgtgattgattgcggaccaaagaccgacaattgaatcgcacgtcgcggcacctgccagcagaacacagaggccaccgacgagggttggtcaatctaagcaatgggtggtgagacagcatccttggagacaccccatgtcaaaagatacact

SEQ ID NO: 13756 - DNA, 398 bp, Glycine max
  Clone ID: PAT_MRT3847_112429C.1
tcgagctcactagctggtggccgcccttttttttttttttttttttttttttttttttttttttttttttttttttttttttttttttaaaacaaaacctttggtcttttttttctcttcattcaaggggaaaagattcattggccatttaagggtcctgctgggcttccgtgcttggcttaattggcttaacaaaggaaaaaaggggtaaaatgccccattcctaaaaagaaaaataaaggcccataaaaaattgttaaaaatttccaaaattgaaacaaaggcttaggctatcaaggaaaaaagagccttcttccttagttaaaggagaaattattcccctttaggaaagaggggaaagagaattaaagtctgtgtgaagatttcttttggttgtt

SEQ ID NO: 13757 - DNA, 1692 bp, Glycine max
  Clone ID: PAT_MRT3847_11242C.1
atggaacaggaaatggagaagagaaagcgtggaaaaagtgaagaaaaaggagaagagaaatgggtgcatgatgcatctgtggattataagggcagagttcctctccgtgcttccacaggtgtatggaaagcgtcgctttttgtccttgcaattgaatttagtgaaaggatatgccactttgggatagccactaatcttatcatgtacctgactaaagtaatgcatgaagatctcaaaacagcgaccaagaatgtaaactactgggtaggagcaacaactttgatgcctctaattggaggatttgttgctgatgcctacactggtcgatttcgtatggtcctcttttcttccctcttatacctcaagggattaagcctcttgaccatgtctcaattcattccaagtctaaaaccatgcaacaatgagatatgccattggccaaggaaggttcatgaagtggttttattccttgccctttactgtgtcgccttgggaactggaggattcaaaccgtgcttacaaagctttggagcagatcaatttgatgatgaccaccttgaagaaaggaagaagaagatgtcattcttcaactggtggaattttacactttgcacggcaatgctgcttggggcaacagtgattgtttatgttcaagactttgtcagctggggagtatcttatctcatcctcagcatgttcatggctctcactatcattgctttctatgaggggaagcgtttttacaggtacaggagcacagaaggtaaccctttcatgctaattctacaagtactaattgcagcaataaggaaaagcaacttgtcctgtccttcaaatcccgattcattgtatgaattcccaaagtcagagaagtcacaaggaaggcttctaagccatacttgcaggctcaggtttcttgacaaggctgcaatagttgaagggaagtatactgagcatagagaccagaatccatggagattagcaacagtgacaagagtggaggagacaaagcttattctgaatataagcaacagcttcaaaatcccaccagcttccatgacatctgtttcagctattagcccaataatagctatcccaatatatgataagattatagttccaattatgaggaaagtcaaaggtaacgaaaggggcatcagcgtcctttggagggttggcattggcttagcattcttagtcatagccatggtggttgctgccttagtagaaacaaagagattaagaatggttgaacatgatgaagtgataacagtaggggggactaggcatgagacaatgagtgtgttgtggttgataccccaatacttgatccttggaattggagcagattcattgtctctaattggtttgcaagagtatttctatgaccaagttcctgactcagtgagaagcttaggagtgggtttgtatcttagtgtggttggagtaggattcttcttaagcagttttctgatcatcactgtggatcatgtcacggggaagaatggaaaaagttggattgcgaaggatataaattcaagtcgtctagataaattttattggatgttggctgtcataaatgctttcaatttgtgtttctttctattcttggcaaaggggtacacttataaaaccgtgcaaaggaaaactagggaaatttgtagtgatggggtggagacaatggaatcatga

SEQ ID NO: 13758 - DNA, 127 bp, Glycine max
  Clone ID: PAT_MRT3847_112430C.1
attccccgcgaccacgcgtcgattttaaaggccacgttctactctttaagcctggcttactctattcgctagaaaacactcatgtctatatacttataatactacatagcttattcaaaactatgcg

SEQ ID NO: 13759 - DNA, 854 bp, Glycine max
  Clone ID: PAT_MRT3847_112431C.1
tgaaggtgctagtggagaaattgctcttacagcagctggtggattgaggcaaattcctggaataaccgagacctttgaaaatgctgcattgattggaattcattatggtggaaatttttatgaatttgtgccatggaatggtgttgttaactgggaagttactactcggggttattggtttatgtcagcagacaatggcagatatgtggttgaattagaaggaacagtcagaggatccaggtacaacattgcgtgctccaacagcagaagccggcttggcccctgcttgtaaagatacatgcttcggagatctaaaattacaaatgtgggaacgaagatatgacggcagcaaggggaagatcatattggacgtttcaagtaatatggcagcactagaagttggaggaggtccatggtttaacacttggaagggcaagacatcaactccagcagcccttagccgtgtccttgaattacccatagacgtagagggcattttcaatcctgttcctctatttaaaccgcctggcctgtagtcatttggtttggtatcttcccctttttttagtttttaatctaatcaggcagcataatgcatggtttaatgttataaactttgccatagtgcatcaaaggattcagagtttccccataaggatagaaactagaaagggattcttgattagaaaaacacaatgtctgtatccttagataaaaagagagaattaaaaaaaaaaaaaagtttacatgtgcgtgtgacgggaatacataagaaaatgtgtaaaaacgatttttatattgatattattgaatatattataattttatgggagagtatttaaccactttaaaaa

SEQ ID NO: 13760 - DNA, 419 bp, Glycine max
  Clone ID: PAT_MRT3847_112432C.1
aatggacaataaccaatttaactgagcacacgatgggactgataacactaacttacgaaccaccacttccagaacaatgtatgacacgcaagctcgtaatatgcatccattgccatcaggaaaagagatcgcctatgagggctgaacacggtggtacaagcccaaactacttcgattgtctgtgatctgatgcagatggtacctgggccagagcggaaacaaacgtgcccttagggggacagataggaaacgggcccttccgtgcctgatgcacgggcgcacaaccggcttgaaataactgagacggacaaggggaatccttatgccaaatgaagagaaagtattgctatggaacctgttgatgaacacacagtgtgcattctgcgcaacgctgtgaatgctatggacaaaaactccct

SEQ ID NO: 13761 - DNA, 702 bp, Glycine max
  unsure (1)..(702): unsure at all n locations
  Clone ID: PAT_MRT3847_112433C.1
ctttttttttttatctcgttacatttcttttcactttgatcgcttcttttatacaaaccaaacaaagcctgtcttaacggaatagtagtaaaagagattatatttttaataaatatttataaataaagaaatacaacgcattttcgatctctatgacacgaccgtcagcgtcaaaggcaaactccgcaaagtgagaaaagttgagtttatcagtatcttgtattatgtcagaatccgtgttctacgtcagctcaatcattggaggacttttttgtttttattttttcgggagaaatattgttattttaagtatactcgtatttattgggaaataaaaaatggctatttcattttatgtagaaaagtttaaaaatttgtttatttaatatagtttatttttaaaatttattgaatattttcagaacattaattagtatttacttaataaagcttaatatggaaagaatttataaaaataacaatatatcttcttaagagtatttcttaataaaaatattttttatcttcataaaataaaatacattaatattattaattaaaaatatactgaaaattgattaaggaagacataattatttttttaagtcagaagatataaaaattttaaatctatttatttcttaataaatcaatcactggttatgcaccggttgatttgataaggatggaggagagaanaag

SEQ ID NO: 13762 - DNA, 242 bp, Glycine max
  Clone ID: PAT_MRT3847_112434C.1
cgtggctgccagagcaaggtggccatccataatacctggagctcagaaaggcagatccatctggccctgcatgagtgttctcagacttcaagacactcgactagtgattagaacctgtacccgcatattgcactccctttcttcctctaagaagggcccatcattgtattgacctgtgacaccttactctcctgaacagaagctgagcctactgcgggatgtggctgcatgacagtaagccc

SEQ ID NO: 13763 - DNA, 204 bp, Glycine max
  Clone ID: PAT_MRT3847_112435C.1
acgcgtccgaagacgacgacaggatgcttctgctgcaagacgacgacagggggggacagcaactacctttgatagtgatgagtatgaagaacaacatggtggggctcaaggtgtgtgcgctgcttctattccgtgccgtggttacatcatacctccctgaactgatcgttttttaaagggatcattcttaatgttacgatgttg

SEQ ID NO: 13764 - DNA, 533 bp, Glycine max
  unsure (1)..(533): unsure at all n locations
  Clone ID: PAT_MRT3847_112436C.1
ggtgcggagttcccgggggcgccacgcgggcgcatctatctacttctcttctcttctcgtggctggggcgggggggaccaacaacaaataacacttttatccctcagaaattaaccatttttcgtgtctggggtttctataattttggggagtttccattccttctattttctgcggcggctagggagcagtgggatgtgtagcttatgaggtatgagggatgagcatctttctattttgaggagaagattgggatttttttctctttagagagagggttcttcctagggggggggtttttatccatcaaggtattggttgaggagggggggagcacgcgatcttngaaatgatggagagggggtnggttgggggggggtgagtctnagatggactgggtggggaagggaagaatcaaagggagagggttggacgataaatttgacttttgggtcgagggggggccatttttgggcacaattgtgggtgggtgagtctgggaggagctctctaaagggagacagaggggggag

SEQ ID NO: 13765 - DNA, 326 bp, Glycine max
  Clone ID: PAT_MRT3847_112437C.1
gaaacaaaactcgttagaatctgattgacatacatttaggcttgcaagtaccaactgaatatacatacttttgattcaaaaaaaacggtaacagagcaggacacagtaatgtaagtctactctaatcttgaacttatgcatgtgctctaattttcgaaagcgaatatttacaactgaaggctgcaagaacaaaggcagcactacagagagagcaacggggacaattggatgaaaaagaaaccacaagttctttgttgcacgaccatccatactatcagctgtaggacctgtgatgaacgtaaaatttatagaatacgggtgccttc

SEQ ID NO: 13766 - DNA, 431 bp, Glycine max
  unsure (1)..(431): unsure at all n locations
  Clone ID: PAT_MRT3847_112438C.1
acgagaacaaaaaatgtttttgaaaacagttcaaaacatgctcttaaactctaaattccctcattcctatcctaataactaatcatgaatccaacaattatgatcactagatcccaaaatacaaatgcataaatattaaatacaataattgtagaatgtggagaagtggctcacatggtgttaagttgtcccacaaattgtggcgacactagctcaatccccaaatccaatttcggtccccattatccctgctggcaagccagctttctactatctatgctaatctaaagaagaagaaaataatgcatatcactcattctttaccaatgacatatctttttttgtagttaatgttctgttatattgaaatgaagttctggtagctnttagttaatgtgtcattgtgtctggtnaatggaatgccacaatcg

SEQ ID NO: 13767 - DNA, 261 bp, Glycine max
  Clone ID: PAT_MRT3847_112439C.1
atttatttactctttcttattttattatggttgatctccttttctctcttctctttcttccctttgcttgctactcttgttgagtgcatgcctttgctcttagcaccaacaaactcaacgagggccaacttttcaaccggcaacggggggggaacccgcccacccaattaaagaccgaaggcggttggattcaaacatggaacctctcccaccctgagccagaaaagcgcctgtgtcactgttttcaaacaaaccctggac

SEQ ID NO: 13768 - DNA, 1988 bp, Glycine max
  unsure (1)..(1988): unsure at all n locations
  Clone ID: PAT_MRT3847_11243C.1
atttacattttaaatgttactaacgaggccacactaacaatggatttcatccacccatttcatttgtctatgtgacacaccatcagaaggttacaccttcaatttgtaaacatgaagcaggaaatggagaagagaaagcgtggaaaaagtgaagaaaaaggagaagagaaatgggtgcatgatgcatctgtggattataagggcagagttcctctccgtgcttccacaggtgtatggaaagcgtcgctttttgtccttgcaattgaatttagtgaaaggatatgccactttgggatagccactaatcttatcatgtacctgactaaagtaatgcatgaagatctcaaaacagcgaccaagaatgtaaactactgggtaggagcaacaactttgatgcctctaattggaggatttgttgctgatgcctacactggtcgatttcgtatggtcctcttttcttccctcttatacctcaagggattaagcctcttgaccatgtctcaattcattccaagtctaaaaccatgcaacaatgagatatgccattggccaaggaaggttcatgaagtggttttattccttgccctttactgtgtcgccttgggaactggaggattcaaaccgtgcttacaaagctttggagcagatcaatttgatgatgaccaccttgaagaaaggaagaagaagatgtcattcttcaactggtggaattttacactttgcacggcaatgctgcttggggcaacagtgattgtttatgttcaagactttgtcagctggggagtatcttatctcatcctcagcatgttcatggctctcactatcattgctttctatgaggggaagcgtttttacaggtacaggagcacagaaggtaaccctttcatgctaattctacaagtactaattgcagcaataaggaaaagcaacttgtcctgtccttcaaatcccgattcattgtatgaattcccaaagtcagagaagtcacaaggaaggcttctaagccatacttgcaggctcaggtttcttgacaaggctgcaatagttgaagggaagtatactgagcatagagaccagaatccatggagattagcaacagtgacaagagtggaggagacaaagcttattctgaatgttattcccatatggctaacttcattaataattggtatatgtatagcgcaaggctcgacactctttgtcaatcaagcagcttctatgaacttaaagataatcaacagcttcaaaatcccaccagcttccatgacatctgtttcagctattagcccaataatagctatcccaatatatgataagattatagttccaattatgaggaaagtcaaaggtaacgaaaggggcatcagcgtcctttggagggttggcattggcttagcattcttagtcatagccatggtggttgctgccttagtagaaacaaagagattaagaatggttgaacatgatgaagtgataacagtaggggggactaggcatgagacaatgagtgtgttgtggttgataccccaatacttgatccttggaattggagcagattcattgtctctaattggtttgcaagagtatttctatgaccaagttcctgactcagtgagaagcttaggagtgggtttgtatcttagtgtggttggagtaggattcttcttaagcagttttctgatcatcactgtggatcatgtcacggggaagaatggaaaaagttggattgcgaaggatataaattcaagtcgtctagataaattttattggatgttggctgtcataaatgctttcaatttgtgtttctttctattcttggcaaaggggtacacttataaaaccgtgcaaaggaaaactagggaaatttgtagtgatggggtggagacaatggaatcatgagagcttctcagctgtacctctcactgctatattttcagctgaatcaaatgtttaatgtattgtttcccttnnnnaaaannnannnnnnn

SEQ ID NO: 13769 - DNA, 376 bp, Glycine max
  Clone ID: PAT_MRT3847_112440C.1
ccacgccaaataaaatttaaaaaatatatattaaaccatttcctgaaaacccttacctttaaccagaaggggaatttttaatttatattgaaggccaaccccaccaagaagaaaacctaccttcctacctaaaaaatttaaccaaccgggaaaccttttccctaaccaagggtaaagggctggtgaagcttgcttttttttttaaccctttccttaacaaagggccacccttgggagtgaaaaagcccccaactttaagaagaggggggctggtccctttcaagggcaaagcccagggtttttgtgaaacctcccaaagtcaaaagggtgggtaaaaccacagaagtggtagaaaaagccgggtggaagccccccg

SEQ ID NO: 13770 - DNA, 327 bp, Glycine max
  Clone ID: PAT_MRT3847_112441C.1
aaattatctgtattccaaatctatttacatatttagatagataataatattttcacggttttgtaggaaaaacaaagttgacagcaagacctgaaaattgattagttttgaaaatagagaaacttaaaattgaatcaaaattttagggaatcaaaattacacaattaatcctaaaattaactatcataatcaattttactagaacttttctatcctttgcactagggacatatagtttgaggggtccaaaataaaaaatgccaacaatcatttattgcattgtacgtaccctttctattatttttagttcactaacttatgcactta

SEQ ID NO: 13771 - DNA, 149 bp, Glycine max
  Clone ID: PAT_MRT3847_112442C.1
cacacactgaataaaagatgttattcacttttttcccagttgaaagcaatcaccatccaagaataatttctatgactgcggatatttctcatatcaccttgcatacccatgcatccgacgcaacatctaatccatatactcatctaaat

SEQ ID NO: 13772 - DNA, 248 bp, Glycine max
  Clone ID: PAT_MRT3847_112443C.1
ggctcgaggttcgaggctgcgtgcttcaaacatattgtttattccacgcatcgatctttctttattggctccggggaacctaaacctgcacctcctgatcatctgcgctttttcaactacaacttattagcggctggcgatacaatgcgcgaagaattttacaccgtccaagtgcttggcgcagccaaagcatatgtatcagcagcgcacgcttgtgaatgtcctgtaaattacaagccaaggaactc

SEQ ID NO: 13773 - DNA, 405 bp, Glycine max
  Clone ID: PAT_MRT3847_112444C.1
tattaaaaaacgcgctgctcgctttattaaaagagaacgaagaatctggatcctatctacaactggagccgggctagattagttgagaaatgcacgccaaatccagacataacagctcccacatgcgatgactctagcacaccctcactaaacgcagtgacttcgacgagaggaccttcacagtcgactgtcagctcattccttgattcgtgaattcctaaggcctgggtagaaatgactggactatgagagaacttcacgaattgtatttgctcttatgcacgggtggacacttttatgacacataaaccgcactgctgtggtggtgtccgcagcacttgatcgcacgcgcctggctcataaacttgtgaagcacgatgaactattgaaccgcaacaggtgggt

SEQ ID NO: 13774 - DNA, 1184 bp, Glycine max
  Clone ID: PAT_MRT3847_112445C.1
ctgtctggtgggttaaaccttagtcacatcccaaatgccaaaaccctaggagagagaaagagacagacacatacagagagagagagagacgttgagttgaaattgaatgatcgatggcgacttcgaattcacgaaaatcagaaacctccccttccccttctcccaccaccaacttcatccccatccccgccgcccccgcccctaaaaccgtcgatgacgtgtggcgggagatcgtggccggcgaccgccgtgagtgcaaggaggaggcccccgacgacgactacgacaaggagatgatgaccctcgaggacttcctcgccaaggccgaccaagaccaagaacccgactacgacaacaacaactcaagatgccaatgccactcaccgagaggctcggcagcggcaccctcttctccttcgaccaccttcccacgacgccgtttcacgactccgccgccgcagaaggctccgtcataggcttcggaaacggcgtcgaggtcgtcgaaggggggagggttaaaagacggcgtcccgttttggagcagttggataaggccgcgcagcagagacagaggaggatgataaaaaaacagagaatctgctgctaggtccagggaacgcaagcaggcataccaagtggaattggagtccttggcggtgaaactagaggaggaaaatgacaagctcttgaaggaaaaggctgagaggaaaaaggagaggtacaagcagctaatggaaaaagtactccctatcgcgcagaagcaaaagccaccatgtatactccgtagggctcgctccttgcaatggtagatcaaattttccagtggtgcaggacaggaactgaatattaaccacatcagtggtggggaaataagcaaattaatcattatctcttaaaaatcatagttctcagcctaacggttagtctcaagggcaatcgtggttaaagatgtgaagagatagaaggaattggaacctgaatcgccaagaaaaattccttattacttaagaaacaacatttgcttattctcaggaggtaaaagcagaaatatggagttggaccgtgtagtttagatacaaattaaacatcctgtttgctaccctgcgcagaatgccaatgtgtaatagtagagggcataggggatttgtagactagtatataatattataatgtagtcatggctt

SEQ ID NO: 13775 - DNA, 537 bp, Glycine max
  Clone ID: PAT_MRT3847_112446C.1
tcgagctcgagccagatcggctcgagcaaaccattagatggtatttttgaatcaagggcgagggccttgcatggcttcagattgatcttcctctgcacttacatgttgcggcatctgtactgccgagtttcatgcagaataatggtgccggtagtctggttccataacgggaaggaaattgacgttgaacaaggacagagcagcagatggaggactatcgctgggcactacagagtgcgcagtggctgagcccgacctacctgtatgggagccaagcgtgacacattctacatggctcgatggcactctacccgacgacttctgctatgacgatcttggtctaggatctgacctgtagagtctgagatggtatgaccacgcagagctacgtgcactggagactggcaacgctgagtgctgctggccttatgatcgagaagagctaacgcagacggtaggctcgaagagtccgtgacggtcctcatgtggagagctagcatactacacagagacttctaccctcttcataggaccact

SEQ ID NO: 13776 - DNA, 518 bp, Glycine max
  Clone ID: PAT_MRT3847_112447C.1
ctgtgtttgatattattcaagttttcattgtctcccagcatcaagtttgagacacatcgtcattccctaggagcaaagatatcctacccaaacaaataaagcaaattgcccattgttataaactttcaagtgatcatgcatgaaactgaacattaacactcgttaactcctataatttttctcatttttaaatttagaactaagctaattatataaagaaaaacctgtttcataaactttgtactgaagcctaattcgtaccatataacatgaaagattaaatacccactcctccgcttcaattattatggacatctataaatacattattttcccgtgatttcaatcagaaaatgtcatgactcctccaagcatccattgtcaccggaagaaacaggtttaagattgaaagagttggcgaatgttctttggccaaatataattggaaccaccatctaagagacgcttagcgatgataacgtttgcagcatcagaaggatggtaagcggacgcgtggg

SEQ ID NO: 13777 - DNA, 494 bp, Glycine max
  Clone ID: PAT_MRT3847_112448C.1
aattcggctcgagtacggctgcgagaagacgacagaagggatctagccccttctttcatctatattagctcctaaagtgtaaagtctttcgtgtcatgagaagctaaaccccattgttgggagcctagtagggcaacactcttgtaatgtaattgttcttattatttattaaatgtaatttctttttctattgcttcttttttgctcttcatctttattgtatggtctgatcatccatgaattagtttttagggattatacattggaaaatgataatttctaaaaaattgggaaatgatatctaaacaattcattgctagggataaagtgactttgttttgcctatgcatacatcttcatgcttaatgtgatttattattcaatctttgcaaagggatttgggagagagaatagataatttagtttcttcatcgcaagggatcagtgttgagtgtcttattagatgtgggtggaaattggaaaaatatttaata

SEQ ID NO: 13778 - DNA, 442 bp, Glycine max
  Clone ID: PAT_MRT3847_112449C.1
catgatgcattgaagtctgcgttcaagttttcatctgctgaagcaagtccgttgaaaagtatatctgattataatatagacacaaatgaaaacatggaaggtctgccaattaatgacgggaacgttaaagcatctcctattgataaaaaattgaggtctccaatgaatgccaatcatgatggaattccttcttcactatcaacattccatgaatcagccatgaaatctggtaatgcagatgacttgatggcgaaactaaagatgcaaggaaacctgtcaaaaacatccgcaggaaagagaaaaactggctacttagaacatgctgattctgatcttccttatgctcaagtggagcaatatgtaaatctgaagcaatcttttgaagccttttcagtggggtcacttcacaggatagcattcacaaacacagaccagacatgga

SEQ ID NO: 13779 - DNA, 946 bp, Glycine max
  Clone ID: PAT_MRT3847_11244C.1
cttcctaccccatcaacttcttctttccttcttcattcaaacaccatcaacttcttcttcttcttcttcttcttcttcttgcgttttttattgttcattcaatttctttttcttctctcatcatctcaaccaacaaatcatttaattgcaatcatctatggcgtctttcgacccgaacgtagattcaagtaattccgacacgttgcgagaatccaatcacaagaagcgcagaaaaatcggagaccacgccgccggcgatctcgatttcgccgccgccgccccttggagatccgacgtggagcagcggatctactcccgccgcctcgtggaggctctccgccgcactccgtcatcggcgaccaagcctagagccgccggccaggtccgcgagaccgccgaccgcgtcctcgccgccaccgccagaggccgaacgaggtggagccgcgcgattctcaagcgctggaggaagctccgcatgcagcacaagaaggcgaaggcggcatcgtccaacaacggtttgaagagaacgaggattggaaacggagagaggaggaaccggttaccggctgttcagaagaaagcgcgcgttctcagccggttggttcccggttgccggaaggtttcgttcccgaaccttctggaagaagccacggactatatctccgccttggagatgcaagtgcgagccatgacggctctggccgaactactcgccggcgccgcgccggcaaatctcgccggctccacgttgagttgacccgcgcgcctaggctatattgcgccaggtgttttttatattttattttttatttttaattattatatcgttttttttttcagattcatgtattttatcgtgtacactgtacatgccatttgcttattcctccttcctttgagttccactatcacctacctactttgattcttttctttccttctttta

SEQ ID NO: 13780 - DNA, 499 bp, Glycine max
  Clone ID: PAT_MRT3847_112450C.1
ggctcgagctttgcatagatctgttgcagagcctagaatcattgtgcaaacaacaagtgaagtgaatctcttagatgatggatatcgatggcgcaaatatgggcagaaagttgtcaaaggcaacccatatccaaggtgatattggtttcccccctacactttgattgcttatatttaatgaataattatggatgagcattatcattgtctgctaagtgacaagtttaagtgaaaaaaaggctcaccgtaaataaagtatgaatggacaagttcaacaacgtaagtttaacatgagtttaaaatgagtgaaaaaggctcaccattacaaattgctcccatagtttaaaatgcagtataaaaaggttaatctataatataagttttgtcccgcacatacttatgtatatgaatatttccccacagcataaaatttctggatccgccactacatctaatggtttaaggcatttgagttagatatgatgtgaagttaatttat

SEQ ID NO: 13781 - DNA, 205 bp, Glycine max
  unsure (1)..(205): unsure at all n locations
  Clone ID: PAT_MRT3847_112451C.1
gcgtacggcaaacatcaaccnacgcgtccggaatctcatgctgatacattcattaacacatatcttgctgcggactctgataatacctgtgaagcatcccataacacattcttgtacataaattcaggatattatgagctcatgtaccggttaacttattatatctattcgacactctctaaatagatactgaatacttccatgt

SEQ ID NO: 13782 - DNA, 275 bp, Glycine max
  Clone ID: PAT_MRT3847_112452C.1
gggggggttaaggatgtgccccccagacgatagctatctccctagccagaagtaatttagaattgtgccccctgacaggtctcttcaagagaccaattaaactcctgtttttaattacaaaaaagtgaaatgcttggtcttacaagagaaccaatgtcacactactttacccatgcgagggacgggtctttgggcgccataaccggctcctaatataactctggcggctgtgaaaatgtgcggacaaaaatctatgaaatggggatcggggcctt

SEQ ID NO: 13783 - DNA, 810 bp, Glycine max
  Clone ID: PAT_MRT3847_112453C.1
ttgcatgcctgcagttggtataacttctgtattggctgcttgttctttactccttccactcttcgcatcgactgggtacattcttactcaggtgattctctactctgtgggtgtgtgttattaggggggcagggtgggtttggttaattgtggatgttagtaaacttaatagtaataaagtttataacctttaagttttgtagaaacagaacttgatttgcctgcataactgatctccagaaaccatctgcctcacgggtttttccctgatgtctcaattcagtaattccagtattgtgtcagtcttagcatagacgaggtgtcccacatcattcttgtttcacatgaccctggttcatataagcaccaaagctttacatagtactatttgttaccactggcctctgacaatttcttgtgtgaatgagttaggagccttgtggccaagcatttctcctggattcatgcatataatccaagtgcagcatgtggagttaggtcagaattcagataccacgtatagtaaggcttaaaggagtactggctctcctttcccccaactctattcttttctcaccctcgtgcaagtagccccactttaagggacgactatcctcttcgtttcaatttctcgcagatccccccacccttaaagggagggaaaggaatagaaagctacaactatgctataatttcatattatagtgcctcgcttaatagaaaaaagtcatgaaattgccatttatagttcagaaaatgaaatgaataaagctaagcgatggaaatctgctattctacagtattagttct

SEQ ID NO: 13784 - DNA, 299 bp, Glycine max
  Clone ID: PAT_MRT3847_112454C.1
aaaaaaaaggcgaaaattggaaaggggaatgaacctttttccctgggggggggcatacaatacattttttaccccccttttttttgcccaaattgccctttttgggggaatgaataaaaaaaagtaaagaaggcttgttacccccttcctcatttggggtagttgggaaggccccaaaccttaagggggaagtgggcccaaataaccccccaaatgcccccaaaaaaaaaccccccggggaacttggcccccccataaaaaatttggaactgatcgggctcctttttggggccccttaa

SEQ ID NO: 13785 - DNA, 2061 bp, Glycine max
  Clone ID: PAT_MRT3847_112455C.1
tttttggaacttaacaacgttgcatattgaggtgctaattttgtgacaatttttcagaacatgggtggaaatcctcccacccgcatgattcactaagcactgaatgtttgcttataacatagcttcaaatacttgtcaggtacagacacacttcaaactaatgtaggtgcacatattcagtataatggagaacataatgctagtgaaaaataaatcatgcaaaacttgtttactgagagttgaatcggaaggtctcctcagatgcatacttagttctcatactgtaatggtcaaactttggatcattatgatcaacagcccttgtctcaactggtttagcctcagctccaactgcccccataacgacttctccactcttttctcgttgtctgtgtcttggcctttctttctggctcttagatttggtgtacggaggaatctcagaagaaccatagaattcagcatactcaggtcgtcttgacgaccggtgcttgcttgacatagaggggtccttgaaactgcttgattttatctttgggggcttcatttctgaatatttctcagctatggttggagtatggacctgtgacgccatccgattttcggtaagaggagtatggacctgtgatgccatcctattttcggtaagaggagtatgtccttgagcattttgcctgttgaccaatggaggccgcacatcatcttcaggcatcacaagacgatctttcagtggtgttaggcctctcttggagttgctaggtctgaaatgtgagggtatgaattgaatgaatgtgctagctaatgcttcaagggaaagcttagaaagatcaacaatgagctgtccgaaagacggccatcccggctcctctttactgctctccaggattggcatgtgtttctcattgcttgctaaccctttgaactgtttttgtgatggttgctgcgtttttgagaaaaaagaggatccaaatccctgctgaagcatacatgtagcatatcctactataacagcaccaacaactgtaagtatatctgtactggaaattgaattagactgataatcacagtcctcctggtcaagagagatttgtcgaagagcagcatttcctctatcaatgaccaacaaggaacaggtgggccgaacatataccacatcgaaatcatttgagaatttagcatcctcactaggcccatccctgtagcctgcaacatttgactttcctccagcaatggttgtcacaccagcatctccaatctttctgatggccagattctgagtatcagcaacataaacattccccttatcatccacagttatgcctttgggatgattgaaacgagcatcacttggttttccatccacatggccagtgtatccctgaaatgacccagccaccaatcttcctctactatattgggacagcggtggagttatccgaacaatgttgctgttaattgcatcaacagcaaagagttcaccatcctcctcagagacgcggatcctgtaagggacaaccccaatctcgtttccttccacaacagtctccaccacgtagccattttcaaattgaagaacattcccatctgagtgtggtgtcttggaggtagaccttgtccatttgatgagtgaagaaatatgcttaatcaacggccctgcaggagcggcgtgagattgcaagtggagagagaaagtgggggcaagtgcaatgagaacgaataagaagaaaatgtgatttctcatagctattttgggactgatctgaagtggggcaaggaggaaaacgaatgagctgaactaggttgtgtgcttgtgctgttagtttaagaatcagaatcagaagaagaagaaggagctatggagtgatgaaggagagtttagggaaagaggagttgcaagctcaaagtaggggtagcaagcaagtggagtgtgttcgtcttcttgttcttcttctacctcttcatcttgttgttgggagcacacagtaacaccggacgcgtggctctctcacagtgtaataaaagtgcttttggtaaaaattaactttggtttttgcatttacg

SEQ ID NO: 13786 - DNA, 1007 bp, Glycine max
  Clone ID: PAT_MRT3847_112456C.1
cccacgcgtccgcaccaaattaatccatatatagagagagttaggaaaacaatggaagccatttctcctaagcatcttatgacatcccttgtaataattatagcttctagtttgaccgcacactgtggctgtgccaagagagggggtgaaagaccatacaaagaagccaacacactgttcataagaacatcttgcagctccacaacatatccaagactctgctacagctccttagtgaagcatgcagacttgatccaaacaaatcgtgtggttctgacaggcgcagccctgaatgtgactcttgcgtcagtgaaatcgacatcggcaatgatgtcaacgctggcaaagaagcaggggctgaagccaagagaggttgcagcgatgcaggactgtgtggagcagctgagtgacactgtggatgaactgagaaggtctattgcagagatgagtgatctaagagcttccaattggctcgagataatgagtgatgtacaaacatgggtgagtgccgctttgacggatgaaaccacctgcaacgatggcttccaagagatcactgctgccactgatattaaaagcaccgtcagaagactcgttattcaggtagctcaattgactagcaatgccttggctttgataaataagctagccaattcttaattaacttcaaactccaccactcttctcttgtactgttacatacacaacatggattatactcttcttgtctcaatttaattacgtgatcttcaactcctggagataggtagcaacgtacgcgtgttggtgtgaaatgttgtaaatatgtaattatcaattagttgagattgttgtcaccgctggctagtgttaatgtctcgggcctactagcgggtggacagattttagtgatgtgaattagacacttatattgtctattttctctttctttcttttttctttgggtgaatatattacgtgtatcattcatataaagtgaagttgatatggccatataaacattttga

SEQ ID NO: 13787 - DNA, 815 bp, Glycine max
  Clone ID: PAT_MRT3847_112457C.1
ggctcgagatcaattccgaataaaaattaggtttttctcttcgtctttcattttcttattcttcaccaaaccgataagcaggtgagactaatccatcatccaaacctttccgatccaatgacctctaaactaattgcttccaatctccgtcaccaaatcacaaaatcagctcaaaaccttcgccgccagcttctttccacggcggcggcggtggcggtgcctgaacacgatgggaacaactccaactcgtcgggaatgacgatgaagggcgttcgaatctccggaagacccctttacctggacgtgcaggcaacatctccggtggacccgcgcgtgctcgacgcgatgctccctttctacctctctggctacggaaacccgaacttcccgcacccacttctacggctgggaatccgacgaggccgtggaacacgcgcgcgctcaggtagcgtccctcatcggcgcgtcccccaaggagatagtcttcacctccggcgccaccgagtccaataacatctccgtcaagggcgtcatgcatttctacaaggacaagaagcgccacgtcataaccacgcaaacggagcacaagtgcgtcctcgattcctgccgccacctccaagcaggagggtttcgatgtcacttatcttcccggtgagttccgacgggttgattggatttgggtgccctccgcgccgcgggggcgccccccgccgcgcccctcgcggttgtggcggtgaacaatgaaattggagtggttcagcccatggaggaaattgggaggatttgcaaggagtttaatgtgcctttccacactg

SEQ ID NO: 13788 - DNA, 966 bp, Glycine max
  Clone ID: PAT_MRT3847_112458C.1
tttttctcttcgtctttcattttcttattcttcaccaaaccgataagcaggaaatagctagtgagactaatccatcgcacaaacctcaccgattcaatgacctctaagctaattgcttccaatctccgtcaccaaatcacaaaatcagcccaaaacctccgccgccagctcctatccacggcggcggcggcggcagtgccggaacacgatgggaacaactccaactctttgggaatgacgatgaagggcgttcgaatctccggaagacccctttacctggacgtgcaggcaacatctccggtggacccgcgcgtacttgacgcgatgctccctttctacatctctcgctacggaaaccctcactctcgcacccacttctacggctgggaatccgacgaggccgtggagcacgcgcgcgctcaggtcgcttccctcatcggcgcttcccccaaggagatagtcttcacctccggcgccaccgagtccaacaacatctccgtcaagggcgtcatgcacttctacaaggacaagaagcgccacgtcataaccacgcaaacggagcacaagtgcgtcctcgattcctgccgccacctccagcaggagggtttcgatgtcacttatcttcccgttgagtccgacgggttgattgatttggatgagcttcgggcttcgattaggcctgacaccgggctcgtttcggttatggcggtgaacaatgaaattggagtggttcagcccatggaggaaattgggaggatttgcaaggagtttaatgtgcctttccacactgatgcagctcaggctttggggaagattcccattgatgtggagaggtggaatgtgagtttgatgtcgttgagtggccataagatttatgggccgaaaggggttggggctttgtatatgcgtcggaggcccaagattaaggttgagcctcaaatgaatggtggtgggcaagagaagggg

SEQ ID NO: 13789 - DNA, 629 bp, Glycine max
  unsure (1)..(629): unsure at all n locations
  Clone ID: PAT_MRT3847_112459C.1
ccacgcgtccgaaaccgataagcaggtgagactaatccatcatccaaacctttccgatccaatgacctctaaactaattgcttccaatctccgtcaccaaatcacaaaatcagctcaaaacngcgtgctcgacgcgatgctccctttctacctctctcgtacagcttctttccacggcggcggcggtggcggtgcctgaacacgatgggaacaactccaactcgtcgggaatgacgatgaagggcgttcgaatctccggaagacccctttacctggacgtgcaggcaacatctccggtggacccgtacctctctcgctacggaaaccctcactcccgcacccacttctacggctgggaatccgacgaggccgtggaacacgcgcgcgctcaggtagcgtccctcatcggcgcgtcccccaaggagatagtcttcacctccggcgccaccgagtccaataacatctccgtcaagggcgtcatgcatttctacaaggacaagaagcgccacgtcataaccacgcaaacggagcacaagtgcgtcctcgattcctgccgccacctccagcagggagggttcgatgtcacttatcttcccgttgagtccgacggnttgattgatttggatgag

SEQ ID NO: 13790 - DNA, 175 bp, Glycine max
  Clone ID: PAT_MRT3847_11245C.1
aaaaggcagaaaaggatcgggaagcttaaatttcaagcagcattgccactaaggagaaagcggacatttcaagcaggtcttgccagccacgaagaggtttaaatcgtgacagaacatactagagcttcatccgctgctacgagcacatcgcgtacctcgattactcccagagtgg

SEQ ID NO: 13791 - DNA, 1129 bp, Glycine max
  Clone ID: PAT_MRT3847_112460C.1
cttcgatggggcaagagtcccaccatcctccacaaggtttgcgatctgccattaggagctttccatttgatgggcttccttctttctcattgtgccagcaagtggaaagctcctaatgatcaggttggttcacttgtgcttgaatctctatctcttcttggtcactttgcattgtttcatcctggaaatcaagctgtccttcgatggggcaagagtcccaccatcctccacaaggtttgcgatctgccattcgttttcttcagtgacccagagttgatgccaatcttggctggcacgttagttgctgtatgctacgggtgtgagcagaacaagtttgtagttcagcaagaactgagtgttgacatgctactttccttgctaaggtcttgcagaaatgctgcgcctgcaacccagcttaattccaccttggacaattccacaacagatgaatctggtgaatgtaatcaattaggtactgaaattaaaaagcctcaagtggactttcctgtaaaaaatagtcgttcaaatggcaaaggccctcgggcttcctcgggaaagagtggtgcttcgggaaacaacataaaaaatggcagaatacgaagccaacgggacgggaaaacacccaagaattctgaagaagtggctcctaagcacggcgagccgtcaaatttaatgttgcactgtagatttcctcccagcttcattgataaagtagagcagtttttttcagcggaaattgctaacagggttgatgaactctgaggttaaacattgtgaactcattttgattggtagtttacggatcttcccgcgttaactgaatatgtttctttatacttacccctgctaataaagccccccaaacaacccaaaagctgacgtctttgaagattaacctgtcgagttttgccacaccaaagctcgtatcagtcaatgccaaaagtattttactttttgcgaagtaatatatttagttcgagacttcgagttgagtatttttgtaatataaaaacgatataaaagtggctgttgataatagccatcgttacccctgctgtaattatagccattgatatggtttggggggtaacaacctcagcaatcaatttgtttttttgatttcaaccct

SEQ ID NO: 13792 - DNA, 524 bp, Glycine max
  Clone ID: PAT_MRT3847_112461C.1
ctttttaattcttctggctacatagctatttaaaatcatatgttgttagttagtctcttgttttttttttctttctgatttctccatgatattccaattttgagttattgtgttcttctacttgctttttaacaggtccagatcatatgatgtttgaggtatggaacccactaggaatagttggtgtaatcactgctttcaactttccatgcgctgttctaggatggaatgcttgcattgctttagtctgtggtaactgtgttgtgtggtatgcctatatatctatctctgtatattctatgagattactcaactggacatttttaagtcagatcatgattgctttgacaatatttcatgacctctacaatattttgttctgtattttcatgtgacaattggctttgatcgagatatttcattagcaaaactggttggcataatgctatatgtgaacttcagatcaattatcattgggcttattgtgtccaccattttctttcacttgaactagtgtaggaacc

SEQ ID NO: 13793 - DNA, 249 bp, Glycine max
  Clone ID: PAT_MRT3847_112462C.1
ttcatccgttattcttcatcacagtccggatgacagaactcgatcaggaagatccagagcatcaaggtgtttcgaaggcttcacgccctgtttcagcggagagcatggattcccctggcacctctcttccacagcttggcacgtttaaagaaggtgcctacactataatgtacaaagtggcataaagtgattcttttcgggttcggtcaggagggacaaagagagatgctttctatcagtcaaaagcag

SEQ ID NO: 13794 - DNA, 219 bp, Glycine max
  Clone ID: PAT_MRT3847_112463C.1
gtaaggatcttattgttgtttggggcgaaaaacacggacgggtcttggttagctcggattgcattaatcatttaaaaatcctacaggatccaatgctcatggtctgttattggttacacgcccctacataatgaaaaggaataggctttaaaccgtaaaaaagaaattttttttttgctttataggagatggaacaccccatcaacctcataatttaat

SEQ ID NO: 13795 - DNA, 177 bp, Glycine max
  Clone ID: PAT_MRT3847_112464C.1
gccacgccttcgttcacgcgttcgatcactccttcctatttatcgacataactagatacagggtgaacaaaaacaatgaccttgcatttttccgggctgcaagtgttgatgcatggcaatgccatgcttacactatgttacgtatggctatgaacactgattatgctgccactgctg

SEQ ID NO: 13796 - DNA, 375 bp, Glycine max
  Clone ID: PAT_MRT3847_112465C.1
gtggctgagagcggaccccagactggagctacctggacttgagaccatctaactctgtgctccttttccaatgctggtggatgatatgtcttagagatattcctaaaccatagttaaagccaatactatgaccctagacgtttgaactttaaggtactccaggcttcatcaggagctgtctagcgccagtacctacatatctatcgagcatgttagaagaattccacagtaggtttgctatcacttcaagaccttgcttcacgttctagaataacgcatctgatattgcactcctacattatgtctgtctgcatgcatttgatctgcgttgacgcatacagatgaatcatatatacgatgtaacttagatgctat

SEQ ID NO: 13797 - DNA, 1133 bp, Glycine max
  Clone ID: PAT_MRT3847_112466C.1
ccgcgcgtatctccctgcgcctccacacaacaaacaacaacctcaccattcttaacttcactcacttacaaatcacaatgacacaacaagcaacaacctcttccgaaacaacaacttcctcttcttcttcttcttcctcctcctcctccacattttcaccctcgcagcattcgggcccaaaggcccaggcccagaaacagagcaagaggcccagggactgcagcaagcacccggtgtaccacggcgtgcggaagcgcaactggggcaaatgggtgtccgaaatccgcgagccacgcaagaagtcccgaatctggctcggaacattcgccactcctgaaatggcggcgcgagcccacgacgtggcggctctcaccatcaagggcgagtcagcaatcctcaatttccccgaaattgcagacctgctccctaggcccgtcacgtgctccccacgtgacatccagaccgcggccacggccgcggcctccatggttaagttcgaccctgtgacacaatcctcagactcggagactccagagtcttcggagctgagcgagattgtcgaacttcccaacattgaagacagcagctttgactccgttgactccagaccggagttcgtgttggtcgatgttgttgacggttgggtgtttccgccaatgggaatggggtcagagggaatcgagatctgtgccgctttttctgatgagttgtttccgcaacagagttttattggttccgagatagagatactacccatttgggattgaatggtgagtgggattcatgtgccttttgctcgcttcacgtgggattggcaaatactagcattcatggctgttttgctgtcaatggtccagggccacttcaatttactctctactgtgtctgtgtgcactatatttttcacactgttacttatagttatagttagttagccttagcatttagcaagttccattgtcttcaacttcaatccctttcttccttccttccttccttctaccgagtaatttcctctgttttatacaagtagaaacagaaaatatgtgaatgcctaataaatttttaccacattaccttactgtacagaagaactatagtgttttttaagaatgttcccaaattttccaact

SEQ ID NO: 13798 - DNA, 822 bp, Glycine max
  Clone ID: PAT_MRT3847_112467C.1
cccacgcgtccgtacggctgcgagaagacgacagaagggggggtcggcccgatatggcttactttttcttcacaaaggatatattgaaagggaagcagatatctgttttcgagggtcccaatggacgatcagttgcgagggactttacttacattgatgatattgtgaagggatgtttgggggcgttggatactgccaacaggagcactgggagtgggccggcccagttgcggctctacaatctgggcaacacttctcccgtggcggtgagtaagctggtgaggatattggagaagttgctcaaggttaacgccaacaagaaactcttgccaatgccgcccaatggggatgtttttttcacccatgctgatattagcttggctaagaaggagcttggctacaaccccaccatcgatttggaaaccggcttgaggaaatttctcgattggtatatggactattattcttcctcttcctctctgcccaagagggcttggtaattttaattctaaaccacactcaattcaattagttttatttcattgtttgcatcaacatgaactgaaataccatagatcgtggggtggctgcactactttgcaggctatacctaccaatgtctctttctgggtaccgcacgttgaatttcactacggattcatttcatctccccttattttataatacttcttttctatggaaagtcattgctgctctacaatcttcttagctctaagcttgattggaacgtatatgtttgttgatcaataatttaagacacgactctttccaagataaaaaaaaaaggaggggaggaaagcg

SEQ ID NO: 13799 - DNA, 279 bp, Glycine max
  Clone ID: PAT_MRT3847_112468C.1
ccacgcgtccgcacacttcacaccccccatcccatgtgactctctcatcaatcatagtttctctctgttgtgttccgctaaattttctttatttagatgtaacctcagcacgagggttatcagattccgaccacctcaatgaatgtcgtgattagtgtggccggtggtgttactgttgactccttcttttgggttggactagagtccaaaatggcggtgccggggtgagttgaagtgaagccacctactttgcagtctgagttctttttttttttctct

SEQ ID NO: 13800 - DNA, 721 bp, Glycine max
  Clone ID: PAT_MRT3847_112469C.1
ggctgggcatatggacctgacattaaaagcctaagatggcctcctatttcttcacatttttcaaccaaatcagcctctgatgttgtgcgtcgaaggcgatggattcgtacaagacaatctttgtctgagcaaggtacagaaagcttgcagggtggagcaagtactgtgcaacctggagcttctgctgttttatcatggagaagctcatcaaagaattctgaccaatgtttgcaagttcgacctaaatttgataattctcagccctcatactcatggggttgtgctattgctgttggttcaagttatatatatagcaaagaccaactattagatccaggttctactagactgacttctgtaacacccacttgctcattgaagcttaatgagcttgagaaaaaagatatacttgtgtgctgcaatcctagtagtggaagtaaacagttgtggtttagtgtgtgtacagatgcctcagttctcaatactgaactaaacgtacctgtatatgattggagaatatctattaactctcctttgaaattggagaaccgacttccttgtcctgctgaattttcaatctcagagaaaacaaaggaaggaaattgcattgagcggcatcatggtgtcgtatcttctcgtcagagtgtacatatctattcagctgatattcagaaacccttgtatcttactgtggatgttcagggtggctgggttatggaaa

SEQ ID NO: 13801 - DNA, 104 bp, Glycine max
  Clone ID: PAT_MRT3847_11246C.1
gttaatcgtacgcaagagtaaatgcaaaattgtctgtatgtctgatcaagcttacattcaggaaattcgcatacttcatcgttaatgctacgatgttcagtttc

SEQ ID NO: 13802 - DNA, 1240 bp, Glycine max
  Clone ID: PAT_MRT3847_112470C.1
aggcgaataatagaggtcctaatttttattgaaggtagctcatcatatttttttatgtttctcataacagactccattcactctatgaacgaaccacatgatactgatattttagaaaggaaaggaaggattcaaaggggaagggtttcgaaatgatatccataacaccgcaatcccctaaacgacatgggaaaagaaaaaaaaggcaaaaacgacaccgaaagaaacgacacattcagagccaccgacacagagataaaagcctagggtcaacgtcgtctatctaagagagttgaccacagtcggcgacgacgacaggcttgctttgagcactctaatttcttcaaagtaacagcaccggaggcacgacccggccagttaaggacaggaggagaagtggccagcaagactaaccagcataccttattggttgacaaattctcaagttggagtttatggaaaacctgcccctgaagattttactgctgattatggacactggacacgtatagtgtccaagtcttatcttaatgggataggaattaattggtccaatatgcggaatgtcatggatatgagatcagtctatggagggtttgctgctgccttgaaggatttgaatatttgggtcatgaatgtggtttcagtaaattccgcagacacacttcctcttatttatgagcgaggtctctttggcatgtatcatgattggtgtgaatcatttagcacctatccgaggtcctatgatctacttcatgcagataatctattttcaaatattaagaacaggtgtagtttaaaagctgtagtggctgagattgatcggattcttaggccagagggaaagcttattgtccgggacactgttgaaatcattaacgagatggaaagtatggtgaagtccatgcagtgggaggttcgcatgacttactctaaagataaggtgggctttttatgtgtccagaagtccatgtggcggcctaaagaattggagacactcgagtatgctattggttaagacgccagcaagattgttatagatgatttttcgggttttggctgctcaaaattctttgtaactgtacttccgtcattattatgtaccattgtagttaggtaattaattatgtgttcgtcttttttctttggtaattaattttgatctctgtttacgggttggtgtctattggtgtaacatggtgccatagtcaaggaaattttatcacattctttcatatat

SEQ ID NO: 13803 - DNA, 2264 bp, Glycine max
  Clone ID: PAT_MRT3847_112471C.1
gctatttgactcagatgaaagggagaataaatctgattcagatgaaaatgaaaagaagtctgatgatgcaagtgaaacaacagataagactgaagaaaaagtggaacaaagtagtaaccaagagtctgatgaaaactccaacgagaagaaaacagatgacaatgccaacagtcagggttcaaatgaggtttacccttccgtggctcagtcagagcttctgaatgaaagtaccactcaaaatggttcttttacaactcaggcggcagagtcaaagaatgaaaaggagtctcaagtatcctccaagcaatctactaattggaaactgtgtaatgtcactgctggccctgattacatcccatgcctcgacaacttgaaagcaattaagagtcttccaagtaccaaacactatgaacacagagaaaggcaatgtcctaaagaatctcctacctgccttgtccctcttcctgaaggatacaaacgcccgattgaatggcccaaaagcagagagaagatatggtattctaatgttccacacactaagcttgctgaatataaggggcaccagaattgggtgaaagttacaggcgagtaccttacctttccaggtggtggaacccaattcaaacacggtgcacttcattacattgacaccatacaacagtctgtaccagatattgcttggggcaatcgctcacgtgtgattttagatgttgggtgtggtgttgccagctttggtggctttctctttgaaagagatgtacttacaatgtcattggcaccaaaagatgaacatgaagctcaggtacagtttgcacttgaaagagggattcctgctatatctgctgtgatgggcacaaagaggcttccctaccctgggagagtatttgatgtagtccattgtgcacggtgtagagttccatggcatatagaaggtggcaaacttcttttggagctgaatagagttttgcgacctggtggtttctttgtatggtctgctactccaatttatcagaagcttcctgaagatgttgaaatatggaatgaaatgaaggcactaacaaaagcaatgtgctgggaagttgtgtctatcagcaaggataaacttaatggagttggtatagctgtgtataagaagccaacttctaatgagtgttatgagaaacgttctcagaatcagcctcctatatgtccagactctgacgatcctaatgcagcatggaacattccattgcaagcttgcatgcacaaagtgcctgtgagttcaacagaacgtgggtcacaatggccagagaagtggccggcaagactgaccaacacaccttactggttgacaaattctcaagttggagtttacggaaagcctgcccctgaagattttactgctgattatgaacactggaaacgtatagtgtccaaatcttatcttaatgggataggaattaattggtctaatgtgcggaatgtcatggatatgagatcagtctatggagggtttggctgctgcccttgaaggatttgaatatttgggtcatgaatgtggtttcagtaaattccgcggacacacttcctattatttatgagcgaggtctctttggcatgtatcatgattggtgtgaatcatttagtacctatccgaggtcctatgatctacttcatgcagataatctattttcaaatattaagaacaggtgtaatttaaaagctgtagtggctgagattgatcggattcttaggcctgagggaaagcttattgtccgggacactgttgaaatcattagcgagattgaaagtatggtgaagtccatgaagtgggaggttcgcatgacttactctaaggataaggtgggatttttatgtgtccagaagtccatgtggcggcctaaagaattggagacactcgagtatgctattggttaagacgccagcaagattattgttataggtgattttttgggttttggctgctcaaaattctttgtatctgtacgtccgccattatcatatataattgtagttaggtaattatgtgttcgtcttttttctttggtaattattttttatctctgtttacgggttggtgtctttgtgtaacatgctgccatagttaaggaaatttgatcacattctttcaaatgtagaggcttttggtaattaatagtagttgagattctggaaaagttatggtcagatgttcaccaaaagtcggtggtaattatgtcattgcatacatggacaggagcaatatattattgattcacattatc

SEQ ID NO: 13804 - DNA, 737 bp, Glycine max
  Clone ID: PAT_MRT3847_112472C.1
gtagagccaaagtaaaacggaaaaccgggactagggtctgcccttctatatacctatgaaattgcaaccttttccgttgtaaaaatgaagaacgaaagtttgaagggaaattgagatttgactcaacagctataaccgctactcaaataacttcaatttccgttgcaagatggaaaaccggaacacaggatcagatgctggagatgtatcttcagccacagcagttctccttggagctttagctcctggtgttaatggtcctacatggattactttaaagtccacttttttattgctgggtctctgtcttgctgttatgctggccttagcattctcttccagtgattcatggttgattttccatgttgcattccttgtcctaatttgcctcatcctcttcttgcttctcagctggtttcttacacaaaccggtttagtctctgttgaacatcaaatgcgtgagatgggcttagagaacctaaagagcaaatgacttttttcttataagatgcgtgagattgggagcatttccgaagctaatgtcttaaaaagcttgagaaatactctatggttgttttggtttaatgtataatgaagaggatctcaatattcgtagtccaaaaacttgtaaattttggacttctcaatagaagtaatttggtagatattcttagtctcaatacgtgtaaatctgaaacttctcaaatctcaatagaagtaactgggcagattagatg

SEQ ID NO: 13805 - DNA, 355 bp, Glycine max
  Clone ID: PAT_MRT3847_112473C.1
accagctcactcaacagcgtacgcccttttctctctttttttaataattttttttccccctccgaaactctaatatataattggggtaccgaagcaaactaatacacatatctccattacctttcaattttcactcaacttatatcatataatattcttctgtttacaattatttatggacacaaccaaaaaatcttaaaataaataccacctaaatttcatgtatcttcctaaaaaaaaaataatctctgcctctataccacacaatacatgcctctccataatttttccattacccatccatcaattataaaaaaaaataaatttcccattctctatacatatttctcactct

SEQ ID NO: 13806 - DNA, 528 bp, Glycine max
  Clone ID: PAT_MRT3847_112474C.1
cccacgcgtccgcaaaatttgtctggttatggatgccccactataaatgaattcaacttttccattagtgccttcttggaagtactatttgttatcctttaagaagcatttattgtttaccttgaagtttacgttaaattggtaaagtagtttcttcatttagactctaaaactttggtttaatatgtctttgtactattatcttaaaggattgagccaaggtaccaagaaatgttgagcaaggacatagctgaaactatgatagatggtatcaaagttagagttatagcaggggaagctcttggaataaagtctccaatctacacaaggacaccaaccatgtacttggattttactcttaaacctggtgctcacttgcaacaacttataccaaagtcttggaatgccttcgtctacatattggaaggagagggtgtatttggaaaccaaaagtctcaacctgtaacctctcaccatatacttcttcttggtcctggggatggcctagaggcatggaacaaatcttct

SEQ ID NO: 13807 - DNA, 337 bp, Glycine max
  Clone ID: PAT_MRT3847_112475C.1
aaacgattgacttcattgcaggagtaatgcgtgcataaagtacacctagtgtacattataaggactagttataaccatacacaagatcaaacaatgacaatttcaacgcccaccatcgccgacatatacttcagaactcagcctaaaagatcttagtttagcaccacattcaacacctaccaactatttacattctacaactgattgcagatcagctgctatcactcaggaaattataggtccgatctcgctggcttcgggctgctgctatcttgtattcagttctggcaatcttctcttatcacacgaacctgacttctggatcaagacggatcgg

SEQ ID NO: 13808 - DNA, 914 bp, Glycine max
  Clone ID: PAT_MRT3847_112476C.1
ttttacaggagaaatatggcaaattggatacaatggtaatgtatgattcatgagtgtgctacaataagacacaacgcctgtccgcacttgcaaaggtcatttcctttgttatattactttcaaccaatttagaatagattaaacaccacaagaaaatggcaagtttcactagtttccattatgagacatatttggaatgatcattgaaggaatggatggagattcagatgggtgttctttgtcatcagcttcctggccattcatgttagggactttcaccatccctttgagcatatttccaaatgatctaaaagggtggcttattccatctttgactttcaaaataagagaaacctccgatagttgccaagccacagtgagaacaatcatcaccgaaagaagacaatgagtcacgaagttctgcctcttcaacttcttcagttctttgattatctcatcattttcacttcccttactttccccagcatcctcattttcactttctgtttcctgagttatagaagccaccggctcagaagaactagaagcttcgaattgctcaagtatctcttctcctttcaacattttcaactgagagacagagagaaggtgggaaagagggtgttggtattgagcatcattgttatggagggattcttggactttgttggtgttgtcgtgtacaagcttctgaattgcttggtcgatgagctcaaaccttcgatcttgttccatgcttgtatgttgtttggacttcaataataataaaagggtctttctctgttctcacccatcggccaccgacaagaggtgtattattgaatgaaaaccacaagagacgtggcgttttggttttgttttttgggtcttctcctcatctctagcatcatccaactttgggctcgagccgaatt

SEQ ID NO: 13809 - DNA, 1509 bp, Glycine max
  Clone ID: PAT_MRT3847_112477C.1
ccacgcgtccggtcttaaaggacgcgtggagcgatatagaaagtgagagagaaaaaaccacaacgtcataaaaaaaagacttaatgtgcacgccattgtggtgagatagaaagaaagatgcaaatggaattccaaggctaacaacacaacttcaacaaattagggctttattctttgcaatcatatcatatactcttcacttcactctcaaaactcccacagttgaagagacatgttggactatgaatgggggaacccgtccacgataatgctcaccggaaatgaagacagctccgccgcgggctccgaccaaacccaccgtcaaatcttcgaccactatgcgtcccacacactcatccccgaccacttcctacacgcgccaacgcactccaccgccaccaccgccgccgcaaccaccgtggatttcacccatccaccacttcaccccgcaaccccaccaccataaccacacatgaaccaccaccaccataccatgccttcttcgacccacgcgcttttcatggcgcgtcgaacacctcttaccccccacccccttccatgctctcccttgacccgctgcctcacgtcaacgctgttgggtctgggcctggacacgggcccgggccaggacccgggccaggcggacttctccttgtccccaagtctgaagaagtcggtcggcccatggactttgtcggctcacgaattggactcaatctcggaggacgaacttacttctcgtcctctgaggatgacttcgtgagccggctctaccgtcggtctaggcccgtggaaccgggttcgactatctcgtcgaactcgccgcgatgccaggccgagggttgcaatgctgatctgtcgcaagccaagcactatcaccgccgccacaaggtgtgcgagtttcactccaaagccgccaccgtcatcgccgccggcttgactcagcgattctgccagcaatgcagcaggttccatcttctttctgagtttgataacggaaaacgtagctgcaggaagagattggcagatcataatcgccgcagaagaaaaactcaacaaccaactcaagaaattcagaaatctcagccttctttggataatgttgcaagatctccaccggactccggagctcagtcttcatcgtcggtgacggtggcagtgtcgccaccggattatttccggcagaggccataccaaagcacaaacaacccttcatcgatttcaagctcactgtttttctcaagcgggtagagttcacgttggagaagtttaatttgcatggctaattaatatttgcaagaaattaacggaggagcgtcaacaataatatatagtgaactactacttccacttgtaactcccaatttaatttcaaactcttaatctcgcgttattaatttgtacgaattgtgatttaaagcatctatgttaatccctccccttaattttctataaaaatttaatagtatttgtttactgttgattattattggcccctttggggtgcta

SEQ ID NO: 13810 - DNA, 173 bp, Glycine max
  Clone ID: PAT_MRT3847_112478C.1
gggggcaattttttaatcctcattcaacttttataaccaacaagccctccaagaacaaaacgcccgggaatttttaacccaaaatcaaactaacaaaatgaaccccaacaagggccccccaaaagggtccaagagttccaattattgctaaaagttttagctaattttgagcc

SEQ ID NO: 13811 - DNA, 1582 bp, Glycine max
  Clone ID: PAT_MRT3847_112479C.1
aattcggctcgagctaagtttctttcatatttttcagaaatataccatccaagaaaatggtagttcttagagaacacaaacttgtagaaaaatttcaggttggtccagcagtgagaacaatcaccactcttcccctcacattccttgatttgcctttagcaggtcctatttatgtgagacgccaattcttctatcacttcccccactccacactccatttctgtgaaaccatacttccttgtctcaaaacctctctctctcaaacccttcaacacttcttccctctcgctggaaacctcctctgtccaccaccaccccacaaacccttcattcactgcaccggtgatgactttgtcaccttaaccatcattgagtccgaagcagatttcaaaaatctctcatccaaccgccccaaaagcctcaaagatttggatcacttggttcccaagttaacatgctcaaacacacaccatgacacgttcattttcccattggtagcattgcaagccacagttttccccaaccatggcctttgcatcgcgatcacgtattgccacgtgatggatgatagttgttgcagccatttcatgaagtcttggtcctccatttgtcgaagtggtggagttgactttactcttgtggagaagtcaacaccttgcttcgatagggaagtgttgaaggaccccaaaggactcgaagctatcttcttaagagattactttgaagagaggtcaacttggaaggttggtaaaacttctgaggtttccaatggaaatagtgaagattatgtcaaagcaacgattgtttttggaagagaagatgtcgaggggctgagaagatgggtgctaaatcagtggaagagaagtaaggaattcaacacaccacaatatatatcaaaatttgtggtgacgtgtgcttttgtgtgggctagtttggttaaaacaagatgcagaaatgatgaagaagaagatgtcaaagaggagttctttcgtttcgctgcagattgcagagatcgccttgagcatcctgtgccaaaaacttactttggaaactgcttaactctctgttatgcaatgcttaagagagaagacctcaagggagagagtggttttgtgaatgcggtcaaggtcattgaaagggcagtggctgatatgaaaagtgaactcttcaaagatgcagaaaattggagggaatcttttacgaagatgtttgtgttgggaagcactttgatagttacagggtcaccaaaattcactgtttatgagactgattttggatttggaaggcctaccaaagtggaaatggcacattcctttaagggtatgtctctggccgaaactggggataatgaaggaggacttgagattggcttggtgtgcacaagtacagaatatgaatatttaatttccctcattgaacaaggacttcaaatttcaaagtcttaatttcattcgtgtaaagctaaggtctataaaagaatttcatcactcaataaaagtcagggttgattttagcttcccctactgtaataaggatcttcggatttttatatttagtctgatttggtgatttatcttaaaaa

SEQ ID NO: 13812 - DNA, 277 bp, Glycine max
  unsure (1)..(277): unsure at all n locations
  Clone ID: PAT_MRT3847_11247C.1
gtccaacgcnaattnacttagacnttttatnctatggtaaatatnangtcagatctcatatcctcagtataccctcatgcaagantttgggaaangccatttgtcnatggctcccntgatggaccttntgggatcancnattgcacagtgacncagttgcttcctggnattcattttcaggncaattctcgtggactcactggattatggnaagnttagggngtgnaatcattattggagcantttggaaaggaangaatgtatagggtaatncctg

SEQ ID NO: 13813 - DNA, 399 bp, Glycine max
  Clone ID: PAT_MRT3847_112480C.1
tctggggggggactttttttttttttttaggcattaattcataaacattaattgacattggagaccagaaaccgggactacaggttcaggatgtttaattatgctaaaacaaatgcgaatgggattgtagttcaactaccacaaacgggggggtgcggatgctgatgctttgcaaaaatgtctaagactcataagggttggggctcgatggagatgaagcacttgccttggacttcgctgacgttttcaaagatactgatgcagccaatggcgtttgcggattcagcctttggctgttgattctacatctacaacggataagcgtaagcgcacataagcatatgccacttggacaaggagcagtcatgatcatattcaggtgcacgggacctgttacgg

SEQ ID NO: 13814 - DNA, 405 bp, Glycine max
  Clone ID: PAT_MRT3847_112481C.1
aaatcattgaattcaaaaacttaaggtcattccttgtgttttgctttcttcctcaaaaccaaacatgtcgaacacatgcggcaactgcgactgcgctgacaagactacctgcaccaagggaaacagctatggggctacagattgaacccgggttagtttattactaataaaaataactggggggggggggggtaaatgaattattataccttggcctgaatgagtggtaatctctgcctccctgatgcgtggttgattattctttcctaattttatggatatatgccttgatcacactgtctgtggcctttttatgttgattacctcttggtttttgctttgtttctggctagggtgcggcgctcctggtgttagtggcgtgtggttgggtgggcgcggggcgac

SEQ ID NO: 13815 - DNA, 1676 bp, Glycine max
  Clone ID: PAT_MRT3847_112482C.1
cggacgcgtgggctctttcccttactcactcgagccgctctaaaaaaaaataattagtaataacatcatcatggcagcagccactctctccgtccggcccgaccgtctctcgcccggttcggtgtttcccagaccaccggttcagcctccgctgcgaaaaccaatcgcggcgcccgagccgtggcgcgccgcggcgccgcggatacgcatcaggacggtggcgccggtccaggcgagctcgcgcgccgatgactccgcgccgttcgagatgtcggtggagaacgcgctgaagctgctgggcgtgtcggagggcgcttccttcgacgacatactccgcgccaaaaacgcaatcgtcgccaattgcaaagatgaccaagatgccattgctcaggttgaggctgcatacgacatgttgcttatgcagagcctaactcagcgtcgggcagggaaagtagtgaacagtagtgttcgttatgctgatgtcaaacgtgtgaagtcccctgctgggggatcaatgcctcaatggttgaagaattcacctgtatctattgagtcaccttccactagtgatttgggtttacaagctggagtgtatggtgcattgatgggtttaacttatcttaatggggcttctgcacccgccgcaggttatgctggggctgatgttcctggactcctcttggctggtagctttggagcttccctgtacttcatgaccaaaaagaatgttaagttagacccagcctccctatattacatgtttttggttatgggtttataggaaagagttgcagttctaatgctgcggatgcgggtagttctggtcgtgtttctgggatgagggcttaacttatctaacatgaagatgatgtctatgtaaatggctgtctggaaggaataagaagtatcaaataaagtatggcactgcactgcagttgaaaaagttgacctacttaacaaatggaacttctagctattggtggttgagatctttttcacttggaaggccactgtcataaccataggagggctcgtagctggtgccgttgtagggtcagctgtagagaactggttgcaggtagatatagtcccattcctgggcatacactcccctgctgctgttgttagtgaaatcattattatatctcaattcttggtttctctgtacctaaggtaaacaggaaaacatggggatcttacattaaattgtgaaacttgtaattattcatttgcatgcagcatgacctaaggtagtcagggaaggctgctgttataacttataaccataggactcgtagctggccccctgtggttgtgtcagctggagagaactgttataccatttctgggcatacactctcctgcttctgttgttagtttaaatcataattctctctcatttgttggttttctctgtacctaaggtaggcaggaaaatatggtgatcttatatgaaaatgtgaaacttgtaactattcatgtgcatgaagcatgatcattcccaagcttttttttaggatgtgaaatcattgcatattgtacaaaactttgaatagaatgtagttgttcaatgggcaaattagaaacgtgaaacttacattggaaagttgtagcctcatgttcacagttggtgagcaattgagcatattgcaatctcaatacgtccgtcttgcttt

SEQ ID NO: 13816 - DNA, 315 bp, Glycine max
  Clone ID: PAT_MRT3847_112483C.1
agccctaactcatttacaaccaaagtcttaaatttcacaaacttatacaactattactgtcatgacatattacaaaatatctaaactaacataatactaaatattaataactattaacatcataacaacccatccttcactaactcaatcatttataccaacacctattcatatcataataccttaacaactattgaacctaatcccatctgatccctagttctcctacataatctctcccatcatctaaaacattccatatactaatatactctttattcttacctaaaaaatctttaaatatactcctataac

SEQ ID NO: 13817 - DNA, 251 bp, Glycine max
  Clone ID: PAT_MRT3847_112484C.1
caattctcttgctatttgagtgcccttgtgcttttttacaattcaaatatcttttactcggtggaatcattttccattcacaacacatatcatcatcaacatgcctgaggctcctggagacttcaccaaatactatgtcattgaagagaagaacatgataatcttggactttatagaggatgagaccaacaacgcatatgaaggccagaagaaggttcttctttgaaatttctgtcccgcatatgcaaacg

SEQ ID NO: 13818 - DNA, 2426 bp, Glycine max
  Clone ID: PAT_MRT3847_112485C.1
tcccggtcgacccacgcgtccgacggctgcgagagacgacagaaggggacccccaaaacccctcttcactttcaatctctttcccttcctttccttgtctttttatttttttacatcaaaattaaaataataacacccatcaaacaaaccacacttctccccctccctttgaaaacacctcaatcaatctcgatgatcatggcagcactcaattcaagcacttgtgccaaacctcaattccctcaccctctctcctcctctttctcttcttcttcatcattaacaagagatttgggcttccccacaaggtttcagaagaagcccattagaaaggtggtggattgtgctctacactcccccccagtgatccatttcccaaaccagccctacaacaaacctgaaattaccaaagaacccaccacctccaccgcggaaaggcctcagtggaacccattccaaaaagccgcagcaaaggccctcgacatgttcgagagcgcgttgctctcacgcgagctcaaccaaccctttcccaaaaccactgacccacgcgtccaaattgccggtaacttcgcccccgttccggaacaccccgtcgaacattctctccccgttattggcacaatccccgacgccattaacggcgtctacctccgtaacggcgccaacccattgttcaagccaaaagcgggccaccacctcttcgacggcgacggaatggtccacgccgttaaattcaatgacggcaccgccagctacgcgtgccgcttcaccgaaacgcagcgtctcatgcaggagcgcaaattgggaaaacctgtgtttcccaaggcaatcggcgaactccacggccattccggcatcgcgaggttgatgctgttctacgcaagaggcttgtgattcggctcgagccaccgcagaggcgccggcgcagccaacgccggcctcgtcttcttcaacggaaaactcctcgccatgtcggaggatgatttcccctacgaactccgaatcaccgcctccggcgacctcgaaacaattggccgctacagctttcacggccagctcaattcctccatgatcgcgcatccgaaggtcgatcctgtctccggagagctttttaccctaagctacgacgtcacgagcaagatcctcaaatacttccatttctcgcccgaggacgagaggaagtcgccggacatagaaattccccttgacgcgccgacgatgacgcacgacttcgcgatcacggagaatttcgtggtgatcccggaccagcaggtggtgttcaagctcggcgaaatgatcaaaggaggatcgccggtgatctacgacggcgagaagaaatcgcggttcggaatactgccaaagtacgcttccgacgcgtcgagcatcgtgtgggtggactcgccagacacgttcttcttccacttctggaacgcgtgggaggaacgcgacaaagacgaagtggtggtaataggttcgtgcatgacaccaccagattcaatattcaatgacagagaagagagactgaagagcgttttaacagaagtaaggctgaacatgagaagcgggaaggcgaggaggagggtgctggtggaggaaatgaacctggaggcagggatggtgaacaggaaaaggttggggagaaaaacacggttcgcatatttgtgcatagcggaaccgtggccgaaggtgtcgggggtggcgaaggtggacctggagagtggggaagtgaagaggcacgagtacggagagagaaggttcggtggagagccattcttcttgccaacacgtggagggaatgggaatgaggatgaagggtacgtgatggcttttgtgcatgacgagatgacgtggcagtccgagttgcagattctgaatgcacttgatttgaagttggaggccactgtcatgctgccttcaagagtgccctatggcttccatggcacgtttgtggaggctcattgaagtccacctggactattttatttggtcgcttaaacggtaaaacacatttcagacaacaaacattttgttgccttttctacccttctcaataataaatatttatctatgctttcgcgaatcagcttgtagtttgtggatgaagctcagctgctttctgtttcttgcttcctttcttttgttttaaaaaagaattcgctttctgtttggcttttggttcttcaattttcaatcttgccttcctgactctcttgtcatatgtcatagtgttgtctgcatttggacctgaacgttaactaaccgcttatcatctcattcagtcagaataacactaaaaaaatacatatttgtcactctaaacagctttctaagtaaagttagatcctctttaactggtgtaatgatcatgatcatacatacttgttatcttataacatttcattaatacacctacgactttctatagt

SEQ ID NO: 13819 - DNA, 498 bp, Glycine max
  unsure (1)..(498): unsure at all n locations
  Clone ID: PAT_MRT3847_112486C.1
gaatttttttttgtattntncattnaccctaattgcgggggtttaccctttttnggtgtnttntnagattngtgagacgcacactctcttcgatctnaangnctntttgggttatattgtgancgacccacattggcattntgacgattatttggagatcaagcccccctttgggaagagaagaaggaaagggtagtttttttggttngtggggttggttttgnaaatggnntnnttntnggtgccatgcccaaagagtactaaaaattnttnttngtgttttttccctttgggggggaattttgaaaaggggtnatttaaaagnggggtgatnttgaaaacttttttttnattgggatctttggaaagctgaatatggtgnataaaggaaaaaanggggtgaanaggaagcaancnnctggtctgaaggggtgtaagggggagaagggcaaacatctggccctgggacggccaaatgggacctaccggcgnttnatt

SEQ ID NO: 13820 - DNA, 157 bp, Glycine max
  Clone ID: PAT_MRT3847_112487C.1
gcaaaacaactctctcaattattaacacaataagtaagcgagtacacttttttttttttcataaaaaaagagaagggagaaacaactttcaactatgaaagtaagaagcctaacaaactttctatagctatcagccaatcaccaagaaaaggggact

SEQ ID NO: 13821 - DNA, 481 bp, Glycine max
  Clone ID: PAT_MRT3847_112488C.1
cttcttggggacggttaaaatgaaatcaaggggttattctaaaatctaagatttttgatagtacatcttttggaggaaaccaatgaaacttactgagtgacattcttgaagtaggaatttgaattccaagggcctggacccttttcctttcttagtacatataaaaacctacctactcttgaaatccacaattggggttgaatagtataatgagcccatgtttagggcaaaaatacattaaatgtcaaaatcaaggcttttttacatagttaaaccccgaggaagcttgaatttaggattttgctccaagaaagccggagggccttggtacccaactgatgccccctttttaagaatcccgccgtcaaacccccatttaaggaatttttatggtcggtttaaagccaaccaaagtatcaaaaaatttttcccatgcactggaattttttggccccttttttcttcctaaaaaaatttttaa

SEQ ID NO: 13822 - DNA, 175 bp, Glycine max
  Clone ID: PAT_MRT3847_112489C.1
gggacaggaatcggtgatctacaggttcggcgctcgcggcaccggggtcctaggggaggacgccgaggtgaccgggaagttcaccagtgtggcggcgcggtgcctccatagactcccttcctccgacaacaagttcacttacaactgcggaggggacgccttcaacgacctcgtt

SEQ ID NO: 13823 - DNA, 414 bp, Glycine max
  Clone ID: PAT_MRT3847_11248C.1
cgccgaaggcacgcgaacggaagcgaggaaatcggcacgaggcgccacacaaccaaactcaacactttgcaaacgatataatggaaagcaacaaaccaaacacaatggggcagcaaccaaagggaagagggcacaaacagagaaacacaggacatgacgaaggccacaaaggcgaacgaacagcggaaagggcgcggaccacaagaagaaacaacggaagagccagcagaggaggacacggaggagggggacgagaacgaagaagagaacacacaagcaggagagaacacagaaaggcgcactgaccaaagagggaccacagaaaaacaggccaaaccaaaaaggcggagagaccagaaagggtccgggaagaacaaaaggggaagggggagaagcaacccacgacagggaaga

SEQ ID NO: 13824 - DNA, 375 bp, Glycine max
  Clone ID: PAT_MRT3847_112490C.1
ttccacgcgtgcggcgccaccatatcaaagttaaggccatgagcttcattaagttgcatcattattccttttggctttgtgtgctcggtatgagagactagtgttttgatatattctttggttacaaagtgcattggtgtatatcaggaactattttggtcttctttgctaagtcaatgatttagacttacaaagtgtattgacttaccaaaagcttggtcatcatcaacaactagagattgagtaatacaagaaaatggtgcatcttaagctcatagccttaaccttgttggtgttgtggtcttgtgggagctttgagggatcagatggaagaccctcaactctttctactcaaatgggagtgcggcgtaatct

SEQ ID NO: 13825 - DNA, 620 bp, Glycine max
  Clone ID: PAT_MRT3847_112491C.1
tacggctgcgagaagacgacagaaggggaatgcacaccacatagcaaaacctcaagtaccttctccttcacattccctcagcactttctgtattcaaaacttttggcattgtttccaatatcctaacttgagactatatatatagcagcatatatatatatataatggatagggtgacacagatggcatcagagaggccagtggtgatattcagcagaagttcatgctgcatgtgccacaccatcaaaaccctcttcagtgactttggagtgcatccaaatgttcatgaacttgatgagataccaagagggaaggacattgagcaagctctttcaaggctagggtgcagcccctctgtgcctgctgtgttcattggtggtgagcttgttggtggagccaatgaagtcatgagccttcaccttaaccgctccttgatccctatgcttaggagagcaggagctctttgggtttaatcaatcaattaattcactactatcaggcactaattaattaataaatctgttttggttacatatgtataattatggtgagatattattatatatagtggccggccggatccattatcccaaaaaaaaaaaaaaaaaaaaaaccccaaa

SEQ ID NO: 13826 - DNA, 795 bp, Glycine max
  Clone ID: PAT_MRT3847_112492C.1
ctcgagccgacttcgcttccccttaattcccaaccttacattattaacttcaccaactcatctccctctaccaaacaaaacgacacaacaaaaccctctctctaaaaccctctctctgtctcccttccttctcatcttcaccaccaccaatggcgtcgccgccgccaccaccttctctcctcctcctcttcctcaccctcgtcgccgccacggcttcctccctcacctgcaccacccaaaagctcacggactccaagaacaacctctactccaactgcctggacctgcccgcgctcgattccttcctccactggactcacgaccccaccaacgcctccctctcggtggccttcgcggcggcgccgcccaactccggcggctgggtgtcctgggggatcaaccccaccgctatcggcatgcagggggcgcaggtgctggccgcgtacaaagccgacaacggcgccgtcaccgtgaaaaccctcgaccttaaatcctacaccgccattgttccggggaagctgtcgttcgacgtgtgggacgtgaggggggaggaggttaggggtgtgattaggattttcgcgacggttaaggttccggataaggcggagagtgtgaaccaggtgtggcaggtggggccctcggttaccgcggggaggattgacaggcatgactttgctccccccaatataaatgccaagggcgtccttagcttcaacgggtccaaaatggtggtggttggtggtggtgccgtcgacctcattaccatgtagaaaaatatacatggaattctaaatg

SEQ ID NO: 13827 - DNA, 1732 bp, Glycine max
  Clone ID: PAT_MRT3847_112493C.1
ggaaattaagcaaaaccgcgtaggtgctcaaatcatagtctcagcatataaagtaatatcttaacctatctgcttaattgtttgattgtgatggcggatgaagggggaattgagaagcggcgctacgatgtttttctgtgttttagaggggaagacacgcgctacaccttcacaggtaatctctatgctgctttgcggcaggcgagattgaggaccttcttcgatgatgggttcaagagtggcgaccaaatctttgacgttgttcttcaagcaattcaggaatcaaggatttcaatcgttgttctctccgaaaacttcgcttcttcctcgtggtgccttgaagaacttgtgaagatccttgagtgcagggaaacaaagaagcaactcgttattccaatcttttaccgcatggatccctccgacgtaaggagacagactggttgttatggggagagcctggctcaacatcaatatgagttcagaagcgactccgagaaagtacgcaattggcaggaagctttgactcatgtcgccaacttgcccggatggaggttcagccggtaccaatatgaatatgaattcatcgaagacattgtgcgacaagccatcgtcgccattgtaccccgctatagcatttttctgagttttagtggaaacgatacccgctcctttacaggttttctcaacaatgcattgtgcaggagtaggtaccaaaccttcatgaatgatggggaccaaatttcacaatctactaatggagttattgaagaatcaaggctttcgatcattgtattttctgaaaactatgcacgttcctcgtcctgtcttgattttcttttgaccatccttgagtgtatgaagacgaaaaaccaactggtttgccccatcttttacaaagtgttaccgtcggatttaaggcatcaaagaaatagctatggtgaagccatgactgagcatgaaaatatgttgggtaaggactctgagatggtgaagaaatggaggtcagctttgtttgatgtcgccaacttgaaaggattttacttgaaaaccgggtacgaatatgaatttattgacaaaatcgtggaaatggccagtaaaatttaaaatggcttaaatcgatcaggtcctcgctcaagtgtcaactagaaggaaatatagactgaagtgccgtggaaggcagaactaatcaattcaacagattacaaatggttctatgagcagtcataagctcacagattgatactagtagttgtaatgtttacaatcggcactgaggaattgatttggaagtctgaattttacttcgaacattagcaatttctagaaaggtgaatatataagtcctgagggccatggccagaggcctgtcatcttgaaattgtgacacacactctcgtttaagtcatatttactttgatttcccaaatgtcatgcatatccaaacaattgtatgagctagattaaggaagctttagcattaaacagagtggagccaaatacccagttaagatgctgaatgatgtctctgttcagaatcaaccgacatagttattcatgatgtatataatcgaatttcgaaagacacaccaaacatatccttgcatgataacttttgattttggggtgtatcccgctgggaagattttcaagattgtggagtgtcacaaatgcccttaaaaaagtgatcaacacattatgattttaattagttaatagtaaaatgattgctgct

SEQ ID NO: 13828 - DNA, 761 bp, Glycine max
  Clone ID: PAT_MRT3847_112494C.1
cccgcgtccgctcgtgtgtgcagtctttgttcagtttctcttacttgttcgaaatcaatcccctgtttctctctccgtttactttctccctcgtctctctcacctgacaccgattacacaaccatattagaagccattggcggcgacgtcgtcgttttagatggatttagatgcattacctatctcggatttttgagcccaggaaacaaaccaagaccatggatcgcaagaacccgcggaggaagcccaagctcgagcgccgtaacgctcttaaatactcctcctccgaatacgacgtcgtatcctccccctccgacgacacgctctacacgcgctccatggagttctacgaccgcacgagcttccgaatcgagggcgtcgagggcgagttcgatcgaatttgccgcagtttgggcctctccggcccagaggactttgctattcccgctgcggcgtgggaggccatgaagtttcgctcctcttcggatattctcccgagactgaagctcgataacctcgatattcccgaggaagacgtagaagaagaatcgaaggttaacgaggtgagaatgttcaaatcagcagaggaaggcgaattgagtgaaaatcacggagttagtgatagtgttagggtcagggagatagatgaatcgagcaatggcattaaggggattcggccaccgatgctgaagcctccgccgggaacgagggttcaggtggtggatgatagcgcgtgttcctcgtgggacctcttgagggac

SEQ ID NO: 13829 - DNA, 202 bp, Glycine max
  Clone ID: PAT_MRT3847_112495C.1
atgagctttagcatcaatatagacctaccctcatccctaataccatttctttttcccttctcatcactcaccatactgtctttccaaacagtagagtgagatcgttctctctttaatctacaccttatccactagattgttcaccctacatatccttccacacatacttactccacacattattcccctcctctttctcaaa

SEQ ID NO: 13830 - DNA, 589 bp, Glycine max
  Clone ID: PAT_MRT3847_112496C.1
caaagttacagtcatgccttgtagaatcatctctctctctctcttcatatccaacttggcatgcaagttgtctgtagtaatgcaataacatagccgagtccaccctatgagtaccttataattgagacatcaacatcctcaacagttccatgatcatatatatatatatatatatatatatctatataagctgtcttgcatataattccagctatagctaccaccctctcatctctctctctatagatctcgtacaaacaacacagttttaatttagacttttagtccttagagggagggataacataaacacattatatattctactggcccttgagcccgaaattaattaagagtgcaattaatgatggcattccaaagcaaggcacatatcttgttcctgtgcttattaatctttgcattttcatccattaatattcttgctgctgctgtgccaaaagagcaagagcaagatcgaatctcggcgctgccggggcagccacgtgtggcattctctcagttctccggttatgtcactgtgaacgagcaacatggccgatcactcttctactgggtcactgaatccccc

SEQ ID NO: 13831 - DNA, 268 bp, Glycine max
  unsure (1)..(268): unsure at all n locations
  Clone ID: PAT_MRT3847_112497C.1
gcacctctcacccttctctctataggnaatagcanncgtgttttcccagctntagtnatctnttcaancanaacctctgctacactctngcatcctacacccccactttttctagtantantagtactacattatctagtgttcganagggnangcnttcntanttcantgctcagttcttcttcggcttcgttttngaggcagttaagtgcaaaanaggagggttggncagagagatnctatcatagtggtcgtggtggctggggna

SEQ ID NO: 13832 - DNA, 373 bp, Glycine max
  Clone ID: PAT_MRT3847_112498C.1
cttcactggattttcaaatcggagtcacgttcacataaactcatcattgatatcatcataagcaatacatatcaaaacattattctcgcatatgcactaagcagatcgcatttcacatgatccagggcacacatttatttgactgacttgaaccacaccaagataatggaaatggctggctacctggttacacttggggcaaccagaccatcggacatgcgggggagaaagtgtttcaagaaccggatccctctcgaagaaagtggttggcctgagctcgaatgcagcgctcaagcatggcatgatggggaaatcatcctgtgctggaacacgaggaattcctacaacgtgccacatctcagtgtcccctggg

SEQ ID NO: 13833 - DNA, 386 bp, Glycine max
  Clone ID: PAT_MRT3847_112499C.1
ctcgagccgaatcggctcgagcaaccctcccttctccctatttaaaccgatcgccaccactttttctctctaacttccaatggacgacgtcgctttttactctctgcttttcctgtgcttctttcaatcggtgcgagggattttggaccccaacgatttcctcgctctgcaatcaattcggaaatcccttcacgatgttcccggttccaattttttctcctcctgggacttcaccgccgacccctgcaacttcgccggcgttttctgcgccgacgacaaagtcatcgcgctcaacctcggcgatcctagagccggttctcccggtctcaccggaaaacttgacccttccatttccaaactctccgctctcgcagacttcaccgtcg

SEQ ID NO: 13834 - DNA, 695 bp, Glycine max
  Clone ID: PAT_MRT3847_11249C.1
cccacgcgtccgtacggctgtacgaaggctcggaattcgggaagtgcgaaggacaatgagtgttcggtccaaaaacttgaactctgtattctatgcagattcgtaccatcccattcaagctggcagcatcgacggcaccgatgttgttcctcacgataacgccgtttatcgcgctcaactctgttcctccatcggcctctatgacccatttggtgatcccaaggccactggagacccttattgcactctctttgtcgctcgtctctctcgcctcaccaccgaagatgatctccgcaaggtcatgagtaagtatggtcgagtgaagaacttacgcttggttagggacattgtgacgggagcttctcgtggttatgcttttgttgaatacgagactgaaagggagatgcgacgagcatatatggatgctcatcatttgattgttgatgattctgaaatcatagtcgattacaacagacagcaattgatgcctggatggattcctagaaggttaggtggtggtcttagtggtaagaaggaatcgggacaacttcgttttggggggaaagaaaaaccatttcgtgcacccctgaaaccaatcccatatgaggagttgaagaagcttggcatcccccctcctcctgagggaagatacatgtaacgcttttagggtgcctcggcttctaagtgagaaagga

SEQ ID NO: 13835 - DNA, 313 bp, Glycine max
  unsure (1)..(313): unsure at all n locations
  Clone ID: PAT_MRT3847_1124C.1
caaggcaggaacacccggaaccccncccaagcccccagaggacaaagatgaacagcaacaagccacaaaacacaagggacagcgccaaagaacaaacccggagccggagacaatttttttttttacgcacgaaagcaagaaagaaggaagaactgttaacatctcctctagaggacaccaacggctcacctatcgtggaggaatcccccgtgacaaaaggaacgaagaatccagccaagagaaatgctgcgcgaatggacaatcaaagcttgcaaccattttacatgcgaatgaactaacaagacgccccaag

SEQ ID NO: 13836 - DNA, 402 bp, Glycine max
  Clone ID: PAT_MRT3847_112500C.1
ccaaatgcaccctgaatatgttatgcatttaacttgagttcattgaatatttctgtctctgtggatttgccagtaattagctattgttgaggagattcgagcaattttaaatagttcagtatgatgattaaactagaatctggtgattcaatatctatctcatcattatttagataattgtttgttgtgtttttctttcttggtagttttgttgcatcaaacaaaccagcagatgggaaacgttttattcgatcccttgggaaggtagtcttttgttccctagttagttatttcatttgttgaaaaatttcagtaaagatataaggtatgttattgtggcttctgtaaacaaattactacactcaatttcaaatgcgttttctcttttatccatttatacat

SEQ ID NO: 13837 - DNA, 399 bp, Glycine max
  Clone ID: PAT_MRT3847_112501C.1
actctcactcattcacacacacaaacaaacccgctttctctctctttctctctcacacacacaccggtctttctcaaaagtctaataaaacctattgtagcagcaagaagctgtgaaatggtgttcccaaaatggggtggttaacacttaagacacataaaaatgaacacactcttgttgtaccttgaagcctttaaataaaattttcatctttcttctcttccaactcctccaccatgctctgctggcttgaatctttggtgggattgttggcttttcttggaatacagcttcctgtcataatggctgattgccctttgaattttactggttcaaacttcacactggcttcctccctatgctctaaccatggtgacaggggaaaatgttgtcgctaca

SEQ ID NO: 13838 - DNA, 445 bp, Glycine max
  Clone ID: PAT_MRT3847_112502C.1
ggacgcgtgggcttagcctctctttctttttatttctctttctctccaccttgatggcagaagatcaaggttcacatgctatagacttccatttgggaaaccatttattagtttcctccaattctgataactcgggagaaagtaaaaacaacatgaagccactgaaccaacaaaatgaagaaggtgaagcactcgtgaataagaagcgaaatctagagatcgccagtgaaaatgagaaagcacattttactagcgatgaatggttagatggaaaacatccagaatctaataacgaaatgtttgacgaccttcgtggtttgcttccgcaacttccttccgaggcggatgaagcaaccgtgattaaggtagcagctgactacattaaaggtctggaggaaagccgcaaaatgctagggaaaataactaagagaatgttcccatatgt

SEQ ID NO: 13839 - DNA, 1339 bp, Glycine max
  Clone ID: PAT_MRT3847_112503C.1
atccggcgagactcgccggattccgttccccgatggctcgttcgacttcgtgttcgccggcgacggcgctttagaaaaatcgccgcggccggcggagttcgccgccgaaatctctcggacgctcaaacccgaagggtttgccgcgttccatgtaaaggccaatgacacttacagttacaattcattcgttgatttgttgaatttttgttgcaacgtggtgaaaataaaccccacgcgtccgtttgattcatccatacctcacataagagaaatcgtggtgaagaaagtgcgtcacacaattgattctgaatccaattcaaactctaattccaatggaaaagaatgctctgttccggagtacaaggaaaagctggtgagaaatgcagaggctttgattgaagaggagccactgaagccatggctgactctaaagaaaaacgtgaagaacataaagtacctatcttcaatggttgatataagcttcaaggataggtatgtgtatgttgatgttggagctagaagctatggttccagcattggaagttggtttaggaaacagtacccgaaacagaacaagacctttcatgtgtatgcaattgaggctgataaaacgtttcatcaggagtatgaaacgaaaaagggtgttactttgttgccttatgctgcatgggtgaggaatgagagtttggtgtttgagattaaccgcgacccgggggagaaggagaaggagaaggagaaggagaaggttaagggtaagggaaggggaatggggaggattcaaccattgaaatcttctggtggttttgatggtggtgaggttgagaagattcctgggttcgatttcgcagactggttgaagaacacggtttcggagaatgatttcgttgtgatgaagatggatgtggagggtactgagtttgatttgattccaagattgtttgaaactggggctatctgtttggtggatgagatttttcttgagtgccattacaataggtggcagaggtgttgccctggacagaggagccccaagtatgagaaaacttatgatcagtgcttgcagctcttcacttctctcagacaaagtggagttcttgttcatcaatggttttaattaactttgtagaattgcctgatggatgatgggtcaaaccctatatgcatgttcttagcttctgcatgtttcttctttttagttttcttatttttttcccaagccaatagagaagagagagagtgagagtgagagttctttattttttaaaatttctctacttgtaacagttgcaactgaaaatgaaaattaaaaccatccctttacaacaattgtatttgtttt

SEQ ID NO: 13840 - DNA, 316 bp, Glycine max
  Clone ID: PAT_MRT3847_112504C.1
atttcctaatctatctttcttttcctcttgcacagtttttagtctcctatcccttcgttcataagatgcagttcctaccacctactcctatcgaaactaacagggacctcctactcttcgccgcactctttgtggttccagctggtgattgtgggctcttcaatggtgtagtttgccggacataatggagacgctttgctgctaccaattcgattgaacatacaactgccaataagctattgcgcaaccacctccaagaagtcgagttgtgcaatgagcatcagaccatactctcaaccttccgtttagatcttta

SEQ ID NO: 13841 - DNA, 466 bp, Glycine max
  unsure (1)..(466): unsure at all n locations
  Clone ID: PAT_MRT3847_112505C.1
atacaacagtcctcttttcttcataaagtaacacccgaaattcacagtaaaatctaatagccttagaaaagcattatttctctaagttttctaatttctatacaaaactctacaagttatccctataaaaaactctctcaaccatttattcaattatagatcctacatcaagttcttcagtcacatattaacttattacaccaattaatttaacacctacttcaaaagcctatttagatagattaccacccttaaatgataacaacagaccataataaatattaattatatcattcccatatctccttaaaaaatttgctaatagtatctacatataccttacaattactataaaatcantgttctaaatcaactacaatatctccccttctcttttatgttctgtagttatacataaacaataataaagaataccatacctttcaagaaagcgtatcacataagt

SEQ ID NO: 13842 - DNA, 250 bp, Glycine max
  Clone ID: PAT_MRT3847_112506C.1
gcgcggtgagtgagtgagagacggacgttgcacctccaccgtctcttcttctcagactttggctttgcttatcgattctgtctcctctgatctttgtcattctgggtttgtataagatggctgatgatgaggatattcctcccctcttttgtgaccttggccctggaatggtcaaggctgcatttgctggtgctgatgttcccacggctgtctttcccagtattgttgggcgacctctacacactggtgt

SEQ ID NO: 13843 - DNA, 1194 bp, Glycine max
  Clone ID: PAT_MRT3847_112507C.1
caaatccttgttgtctttgtcaagatgttcaacaagtcaagggaggaaaatgaaaggcaggcggatgctgaaaaaaagaaattagagaaagaagccttgaaggaaaggacagcaaataacttgcattccaaaaaagatggtgttcgataggatgcctatacaagcaagccgcatggttacttttagttcaaacaaactgcgctatacattttggactatctcaaatgcatatttgcatgcacctttgggatttattccttctgaagatgatgctggccgttggacgcaagtggtttagtcagttccttatagttggatcaacgtgcctctcccattgtgctgcactgctgctaaaggagaaatacaccgcgacacgctggtggtcttttgtaattataccacaaggcaactaatatagaaacttcacgcttttttcctctttaaaatatagaggccatcatatattattttaagttcaaattttcttgtgctttagaacattgcacttctcaaagctgcagataattctttgtaattcaaaaacactttggatatatgataacgagttcttcctgtgtatgatatataaatgcctaaacaagcaagccgcatggttactttcagttcaaacacactgcgttattcattttggactatctcaaatgcatatttgcatgtgccattgggatttattccttctaaagatgatgctagctgttggacgcaagtggtttagtcagttccttttagttggatcaacgtgcctctcccattgtgctgcactgctgctaaaggagaaatacatgaagaggctggtggtcttttgtaattataccacagggcaactaatatagaaaattcacgttttcttcctctttaaaatatagaggccatatataattttcttaagttcaaattttcttgtgctctagaacactgcacatgcacttctcattttgtaatctagctgcagataattctttgtagttcaaaaacactttggatatatgataacgaattcttaccgtgtatgatatgaaaccatagcaatcattattattgctgagtaaaggtgtcaaacagcagtgtgttagcctgtacagaaccattggggagcaaattctgatgaaataaggaaaaggattgatcattttgttaacttaacctaattcctacatatctgtgtaaaccatg

SEQ ID NO: 13844 - DNA, 1510 bp, Glycine max
  Clone ID: PAT_MRT3847_112508C.1
cccgtccgcccacgcgtccgcccacgcgtccggttggtattgaggggaatgttggctggctcgaggcttttcacaaaggaggttcacagtggatggaactataaggcttcggaccaggcttcattcccctcaaaagtacttccttcatttgtttatacttcaaacttcaaaccacaagatcataggtgtagctacgtacctagctagcttctctctttattttgaaggatctctctacacacacgtcatgtgtgtggttgagaacttgagatgtttccttgcaaaggtgaagttgagaggaatgttgtctggctcgaggtcatgaagaaaacagaaaggggaagagtgttgtgttgagatgggttggtattgaggggaatgttggctggctcgaggcttttcacaaatgaggttcacagtggatggaactataaggcttcggaccaggcttcattcccctcaaaagttcttcctttcatttgtttctacttcaaacttcaaacacaagatcatgtgtgttgtgtgtggttgagaacttgacatgcttcttcttcctagcttgcaaaggtgaggttgagaggaatgttgtctggctcgaggtcatggaggaggaggaggagtagagtactgagatcagtgaaagtttccaatggaaatttaccctcttacacaaaaaaatgattctcggaccaggcttcattccccccacccaacttttgctttttccttaatttaaatttctttctctccattttcatatctcgcatgcccttatggtaaggctttctcttcctttcatctttctctcaatctgcacaaaaaaaaaaaaaatgctctttcacagtttgtttttgcaggctcagaattttcaactcagtggtggcaatcttgttttgtaaaggttgtattttcgttaccttcttttttattacgagtgaatatgctaccttctcccaaatcccaagctacaacttactttagtgatggatgaaccaatttctttacatatatgtgtggctaaaatagagaaaaaaaaagtttgagctgtttgcatctgctcagattatgtaactatatatgctcaagtctcccatgtatagatttagttttcatcattaatttgaaggcatttgtatgaagaattagtccatgcttgaaaatatgttaattttagaaaacaatcatatatttttaaacaaatggttatcttttcaaaatgacttcttgtttgtgtttccctatttttctctctcatacacccactcaagagagagagagaagcatttttaccacagcaaatctgtctagttttctggtatagtattaatttaagattaacatttcagagagataagatactacctatgaaaatattattaacaaataagttggcggatgagtgttgaaggcatggcactcactagatgctgaagttgctgatgcatatacatgtgaaagataaatgaaataagatatgtgctggaacagttaacgagaagaagtgagattc

SEQ ID NO: 13845 - DNA, 144 bp, Glycine max
  Clone ID: PAT_MRT3847_112509C.1
gccacgcgtacgtgtactcggagagagctttaattttcgaacgattgatggggagatcagggcgcgtagtttgaaaacttgccgggcaattaatcaatctaggcatctgacgttattcatggcttgtagactctctagccgaaa

SEQ ID NO: 13846 - DNA, 360 bp, Glycine max
  Clone ID: PAT_MRT3847_11250C.1
ggggaaacaaaaacaaaacatttcgtccgaaactaatataacgtgttcctccttggaagaagccatagccataacatagccaccagaaaacaaaacccaccttagttattaaaagaaccaaagaaaaaaaatcaaaaaaaaagaaggcggcggcccaaaaggttcaaacctaaggtatccttgaagggaagttcaaaccccttcaaaatggtcaccaaaattaaattcacgggccgccgtttaacaacgtcctgctgggaaaaaccctgcggttaccaaatttaacccccttgaacaaaatccccctttcgcaagctggggtattaccaaaaaggcccgaaccgttggcccttccaaaaa

SEQ ID NO: 13847 - DNA, 208 bp, Glycine max
  Clone ID: PAT_MRT3847_112510C.1
cttcaaacttttaacccattaactcataatctatgcctaatcccatatcgaattcgcgtgcgatcaaattaacaacatattcactcaatttttttgcacttgctatataactctactgaaatctttactcatcgcctactcacaatgattacaaaacactctatcttcttctccttcatttcaaatcacctgtctttatccctctata

SEQ ID NO: 13848 - DNA, 765 bp, Glycine max
  unsure (1)..(765): unsure at all n locations
  Clone ID: PAT_MRT3847_112511C.1
ggctcgagcacacacaaaagtcattgtgcttgtgcccaccaactagtctcctctagaactagaagaaattcactcagttctgttcttctgcttatgaaattaaagcaaaaattaatccatttcaaaattgtgtcaagaatgagattctcagcggtgtattttgtcttattattatttgccacgcgtccgctagaagcaaccacatgtttcactttcaacaaagagaaaaagctgtcagaattcaagaccaaagttcatgaaaagattcaaaagttatcagcacctgcttcttcatcagaaacaaagaagagtgggagggtgctgtacgtgagtgaatatggtgcagacccaacagggaatgaagagagcagtgatggcattttgaaagctgttgaagatgcttttgcgttgcagaaaggtgttgagtttgttggaggagtgaatgaccttggaggagttgtgattgatttggaaggtggaaactacaaaatcagcaaacccatttcattcccttcatctggtggtgccaatcttgtggtaaaaggaggaacgttgagagcatctgatacatttcctggtgatcggcatctaattgagttatggtcatcanattccgggaaacttgagacannagaatctctgaacgctgatgtcttcaaagcatcaaagctcanaacaatgcaatttactatgaagacataacgttttcgggacatnncttttcgattcatcctacagagggagagggatattcatcgttgattc

SEQ ID NO: 13849 - DNA, 1643 bp, Glycine max
  Clone ID: PAT_MRT3847_112512C.1
gcgtacgtaagctcggaattcggctcgagattgagtcaagaatgagattctcagcggtgtgttttgtcatactattgctgctggtggtagaactagaagcaaccacatgtttcactttcaacaaagagaaaaagctgtcagaattcaagaccaaacttcatcaaaagattcaaaagttagctactcctcctttatcagccttggcatcaccacctgcttcctcttcagaaacaaacaagagtgggagggtgttgtacgtgagtgaatatggtgcagacccaacagggtctgaagaaagcagtgatggcattttgaaagctgttgaagatgcttttgagttgcagaagggtgttgagttggttggaggagtgaatgaccttggaggagtagtgattgatttggaaggtggaaactacaaaatcagcaaacccattgcattcccttcatctggtggtggcaatgttgtggtgaaaggaggaacgttgagagcatctgatacatttcctggtgatcgacatctaattgagttatggtcatcaaactccgggaaacttgagtcaaaagaacctctgaatgctgatgtcttcaaaagcatcaaagctcaaaacaatgcaatttactatgaagacataacgttccgggacatcctcttcgattcatcctacagaggaggaggaattttcattgttgattccgccagaacccgaatcagcaattgcttcttccttcatttcaccacagaaggaattctggtccaacaaggacacgagaccttcatatcaagttgttttcttgggcaacactccaccgttggcggagataaagctgagaaggacttctctggggttgccattgatcttgctagtaatgacaatgcagtcacagatgttgcaattttctcagcagcaattggtgttgtgctaaggggtcaagccaacattctaactggggtgcattgttataacaaggcaacatattttggtggcataggcatattagtgaaattggcaggtaattcactaactagaattgataactgttatctggattacactggaatagtcatggaagatcctgtgcaagttcatgtcactaatgggttgtttctaggggatgctaatattgtattgaagtctattaaaggtcaaattttaggcctgaatatagttgataatatgtttaatggtgaccccaataagaaggttcctattgtaaatctagatggggcatttagtagcattgatcaagtggtgattgatcacaacaatgtgaatggcatgagcttgagatcaacggttgggaagttaactgcgagcggaaatggcaccaagtgggtggctgatttttcatcagttttggtgtttcctaataggattagccattttcaatattcattttatgctcaagatgagcctaaatttgtagcactttctgtgaccaatgtgtcagataatgtcgttgttgtggagagtgagaaagaagctaaagggttcgtctccttcatagttgaacaattgagcaaggtgcttggggttgtcggaaatgaaaagatagtggaagaaagaacaacaaaggctaatccggctgatattgctcctcccatcaggcattttgctgaggcaacatgtccatctcatggttaa

SEQ ID NO: 13850 - DNA, 487 bp, Glycine max
  unsure (1)..(487): unsure at all n locations
  Clone ID: PAT_MRT3847_112513C.1
aaaaaaccaagggtgcatgcatatgacatgtactcctccttgtaaatttgagttttgctggctatgccgtggggcatggtcagacgatagtgagaggactgntggattttatgcttgcaatcgttatgaagcagctaaacaagagggagtgtatgatgaaactgaaagaagaagagaaatggcaaagaattcattggagagatacacacattattatgagcggtgggccagcaaccaatcttcaaggcaaaaagctcttgcagatctacaccagatgcaaactgttcatattgagaagcttagtgatacacagtgccagcctgaatcacagcttaagttcataacagaggcctggttacagatagttgaatgcaggaaggtgctgaaatggacatattcatatgggtactatttaccggagcatgaacatgctaaaaaacagttctttgagtacttacaagtgaggcagaatctggtttggagagac

SEQ ID NO: 13851 - DNA, 206 bp, Glycine max
  unsure (1)..(206): unsure at all n locations
  Clone ID: PAT_MRT3847_112514C.1
cggncagacgtcgcangcacgcgtacgtaagctcggaattcggctcganctcgagccgaatcggntcgagnggctcgagcggntcgagggacancngnctntcnttgaanaangnntgagaatnccgtgagnacntnannncnnncncantcaacgaanccanaanggnnnncntatnntccttaatagtanaccannggnatctg

SEQ ID NO: 13852 - DNA, 435 bp, Glycine max
  unsure (1)..(435): unsure at all n locations
  Clone ID: PAT_MRT3847_112515C.1
gcacgaggtttgaatctgcaacctggcaaagactttgtcttactctactcgaccaaccctttatgggttacctgcccttatttaagtaagctttactcttcactcctatcttttctctaactgacctctcctacttttccctcattttatgctccattggtcacggttacccttttttgttgtctctttgcttccataattttacatgttccttgctttcttttctggccattcataaaccaatacctctttgatttcaacgttccaattttctgtatcttacagtcgttgacccttcattttttttgtgcctactaaaatgctgacttttgtttctgatcaaactttttataagtatatgatataactgtttgaacttcatgtgcatcagtgagcctggtctggtgggttcttttcgttgaaactcangagctg

SEQ ID NO: 13853 - DNA, 249 bp, Glycine max
  Clone ID: PAT_MRT3847_112516C.1
ttttcgtccggtgacaacaggctcactgagaaaacaatttttacttgcacagttttggacatcttggttgttgattacacaatagccactcaatttagaaaatttctaccgctttccattcagtggtatctggataccttgttgatctacaatctaccatcttttatcactgctgaaagtaaatataaagcggaatttgagtaacattcatatttccggcttattttacgacggcagatacaaattctg

SEQ ID NO: 13854 - DNA, 469 bp, Glycine max
  unsure (1)..(469): unsure at all n locations
  Clone ID: PAT_MRT3847_112517C.1
atggaaagggaaacagaagtgtcgggtttgataaatgtgttgtttatattttatttaattttataaataagtgagatccacctagagaatattccgtgtacattgtgaatcataatatttttttaactttaatttctttgatgattgatgggatgcatatcactagctatggccttggtttgtaagtttagtattagatgcaaataatttagcagcacagttctgcttaatcattgtttctttaaatggtttagtttaggggactcattagtgctttagctttacaatttaaaaaaagaaaagaaaaataagtactatttttaatttattgcaaatgaaataatttaatttgcttttccatcctgtgaggttgtcttgcactgtctgaaatgttcttatcaaatggctntcttatccttactatcgtaatactgtctcagagaaccaatctcattaaatcttgctgata

SEQ ID NO: 13855 - DNA, 381 bp, Glycine max
  Clone ID: PAT_MRT3847_112518C.1
cgggcgacccacgcgtgcgctactcgtgttccaacgcgtagtgtcagattttataataaggacgcatactatgcattaccgggacgggtgaggcaattgagagtgttctgtctaaacaagctcaacctaagcaaaatagagaatgaccctttacatgaattttctatgactctgcggaaaacagcacacttgttttcatggtcgcaacattatctgaaccgtcattgtctttcaagtattatgagagaactgctgaacagcaatcatcattgggataccttgttggttccactcacattgaaggaactcatgatcaatcaccacaaaggggagaaatgactgctgatcaatttatgagagaacctcatggttcaatagggg

SEQ ID NO: 13856 - DNA, 592 bp, Glycine max
  Clone ID: PAT_MRT3847_112519C.1
tcgatgtgtaaaggatgatacattcacaattttggaggatacagggctgcttcaagtagtggcagtagaagctttgttaaagcaaatgcaccaatataatttgtaccaatcatctgatcatagccctcagcggtgactctaggtgatgttgcaagtattccagcattgtttatcagtatttgtatggagcagtgcaaatcagaatccaaaagccactgttgcagggacattttgaactttacgactgactcaattgatgacaggtcaacctgaaaagcttcgaggtgggcatcttcattccaatcttttatctttgttatggtctctgacaataattgctgtgaacgtccaacaagcacaacaaaatatccttccttggaaagttgataggcagcagctaatcctagaccagacgtagcaccagtgatgacgcagacaggcttaaaagtagttgtgaaaggggagcaccttggataggatacgagtttgtgagagaagagggaacatttctcatgaattagtggtttgaataattggtaataagaataaagaatagaaaaagtccagagcaacgccattctccagaattgtg

SEQ ID NO: 13857 - DNA, 179 bp, Glycine max
  Clone ID: PAT_MRT3847_11251C.1
tagttctgtcatttctcatcgcataaagcatggatttattgttggcgaaatccaccagtcgtctctagatacaaggtgaaggaccttttccagggcgagttcaggcgcctagagatcgagctcgccgaagattaaattcccggcctcatgggctacatgaccgaggtcggcccctccca

SEQ ID NO: 13858 - DNA, 364 bp, Glycine max
  unsure (1)..(364): unsure at all n locations
  Clone ID: PAT_MRT3847_112520C.1
atcattgccaccgaacaccaaccttgcttccccttctttctcttcatcctcttcttctcccagggaagaatggaatgttccttctcatgggaaaaattctccggcgaccaccactttacctacttctnctncgncgncgncttctncttcaccgncgncgnagttttgggaaactccggttgataaaagtgttacttttaggaatgagagtgaggagactccaaagccaaagttaaaagctttgcattgggataaagttaaggccagctcggacagggtcatggtttgggatcgcctgagaccaagttcttttcagttgaacgaggacatgattgaaacacttttcatggtaaataatcataat

SEQ ID NO: 13859 - DNA, 1711 bp, Glycine max
  Clone ID: PAT_MRT3847_112521C.1
aaccactactactcactcactgcagatctcaattgcatcgctgtccatggctaccatcgttagcatcaaggcccgccagatcttcgacagtcgtggcaatccaactgtcgaggtggatttgacttgctccgatggtacttttgccagacctttctgttggtttggctacgggtcaaattaagactggagctccatgcaggtctgagcgtcttgctaaatataaccagctcttgagaattgaggaggagcttggtgctgaagcagtgtacgccggagccaacttccgtacccccgttgaaccctactaaagttttcaagtggaaaaaacctggagatccacacgagtttgagcattgagatttgggtgcgcggtttttggtgtgatatataaggttgatagttggaacattagtcttggtatgataaagaccttgccaataatttgagttctgatttacagagctaggacagttatgtcttaagactttgaaaggtgtttaatgatatttagctttaatacttgaagcctacttacagtttattcaaacttgctatgcaggagtttatggttcttcctgtgggagcttcctcgttcaaggaagccatgaagatgggtgtagaagtgtatcacaatttgaagtctgtgattaagaagaaatatggtcaagatgcaataaatgttggtgacgaaggtggctttgcccctaacatccaggaaaacaaggaaggcttggaattgctgaaaactgccatcgccaaagctggttacacaggcaaagttgtcattggaatggatgttgcagcttctgaattctacaaggaagacaaaacatacgatttgaacttcaaggaagataacaatgatggctcccagaggatctctggagatgctttgaaagatctgtacaagtcatttgtgtcagagtacccaattgtttcaattgaggatccatttgaccaggatgactgggagcactatgctaagctaactgctgaggttggagccaatgtacaaattgttggtgatgatctcttggttaccaaccccaagagggttcagaaggcaattgatactaaagcatgcaatgctcttctcctcaaggtcaaccaaattggttctgtgactgagagtattgaagctgtcaggatgtccaaaaaagctggatggggtgtcatggccagtcacagaagtggagagactgaggataccttcattgctgacctttctgttggtttggctacgggtcaaattaagactggagctccatgcaggtctgagcgtcttgctaaatataaccagctcttgagaattgaggaggagcttggtgctgaagcagtgtacgccggagctaacttccgtacccccgttgaaccctactaaagttttcaagtggaaaaaacctggagatccacacgagtttgagcattgagatttgggtgcgcggtttttggtgtgatatataagttgatagttggaacattagtcttggtatgataaagaccttgccaataatttgagttctgattcacagagctaggacagttatgtcttaagactttgaaaggtgtttaatgatatttagctttaatacttgaagcctacttacagtttatttccaattttatgggctatccccaaatatttcttactcgttgcaaagttatttttattccttgatccgtgatatccccaatgctacgattttcagac

SEQ ID NO: 13860 - DNA, 723 bp, Glycine max
  Clone ID: PAT_MRT3847_112522C.1
gcacatcagtacagctcgatgtgtaaaggatgatacattcacaattttggaggatacagggctgctttcaagaagtggcagtagaagctttgtaaagcaaatgcaccaatataatttgtaccaatcatctgatcatagccctcagcggtgactctaggtgatgttgcaagtattccagcattgtttatcagtatttgtatggagcagtgcaaatcagaatccaaaagccactgttgcaaggatgttttgaactttacgactgactcaattgatgacaggtcaacctgaaaagcttcgaggtgggcatgttcattccgatctttgatttttgttatggtctcggacaataattgctgtgaacgtccaacaagcacaacaacatatccttccttggaaagttcataggcagcagctaatcccagaccagacgttgcaccagtgatgacgcagacaggcctaaaagtagttgtgaaaggggagcacctgggataggacacgagtttctgagagaagagggaacatttctcaggaattagaggtttgaaatactgggaatgggataaggaatctttgaacaattggtaataagaataaagaatagagaaagtccagagcaacgccattctccagaattgtagtgagcaaaggaaaaagaaagccctccacaactccttcaccaccgtaatcaatcccattttcgcaatttggttcttcccagagtgt

SEQ ID NO: 13861 - DNA, 425 bp, Glycine max
  Clone ID: PAT_MRT3847_112523C.1
tttttttttttttttttttttttttttttttttttttttttttttttttttttttttttttaaaagaaacccaccaaatcccatttatttttcctttttaaattcaaattaaagccccttttaaccttacaaggtaaaaagtcccggtgtggaatgaatgggttaaaaaaaaatttgggtttttattttggggaaaaccccatggatcccatacaatacaattggggggttggtttattggtgaaaaacttaaaaaaaaatcccaaaagcaagagccacgggggaagcccccggtgttgggacaaataaggggggagcctcccatgggggacttggagctggggaatttggaattgatgctgccatgatcaagatgggcctgaaaaaaaaaaaaagatttatttttaagggcctcattttttttt

SEQ ID NO: 13862 - DNA, 517 bp, Glycine max
  unsure (1)..(517): unsure at all n locations
  Clone ID: PAT_MRT3847_112524C.1
cccacgcgtgcgcggacgcgtggggcgcgagcggggcccttttttttttttttttcagacagagtgatgaacaaatattatagacgatagattaaaaaaaaacaaaacattcatctatctatgagacataaactatacctccctaagtttaattaacagtgctcaacagagcaatcaatacaaataagtggcaaaggtgggggggtttccaatcttcaaaaactccaaatcattctcaaagggggtgagattcaaatccaaaaccaaaactctcttgtggtgaggtttcttcttgggggaggaccatttctgtgctcttctccttgcctgtgtcctacccaataaccattaagacacttaactacacccctgttgccggtggatgtgtgcttattcttgtgggttcttactggttaatcagggggcgccggtggtttaaaggccctataaccaatatataaaagcacaagtgtgtttacatattgngtagccaatccaactcgttttgagcatgagt

SEQ ID NO: 13863 - DNA, 594 bp, Glycine max
  unsure (1)..(594): unsure at all n locations
  Clone ID: PAT_MRT3847_112525C.1
tggtacgcctgcaggacgggtgcggaggtcccgggggcaccgccgctcgctacggcggcngaggggagaacgagaagggggcgggagtgtgttgtgagctactaanctagtttactggtgaggggagtatgaggttgtgtgtgttctttgtggcggcgntagttttgggagcatgggcatgccatggggcangcgtaccaaagggccctctccnaatgagaactgggtatggggagcgtgcttcngaggggaaatgcgcaagttttagggcgtgctgtggaagcacacaacatccgagcctttaaaaccattcctgaggagtgcgtgnaaccaacaaaggagtacattaatggggaacaatttanatcagactctaaaacaggtaaccaacaagctttcttttatgctagtgagcgcgaantccatcacaacgacatatttatattcggcgtagataacaccggactctctaatatcccatactatgagaaacatggggtgtgggtgngaggagtttaatgagaccttatatgagtaatggggtaacaagggggacncaccggcattgccaaagactcttaaaaattacaacaa

SEQ ID NO: 13864 - DNA, 1569 bp, Glycine max
  Clone ID: PAT_MRT3847_112526C.1
cctttcgtccgcctatattgagcgacgcttagtcgggcctataaagaatacccgcggctcggccggcccacgcgcccgctcctcctcttcttcccaaccactactactcactcactgcagatctcaattgcatcgctgtccatggctaccatcgttagcatcaaggcccgccagatcttcgacagtcgtggcaatccaactgtcgaggtggatttgacttgctccgatggtacttttgccagagctgctgttccaagtggtgcatccactgggatttatgaggcccttgaattgagagatggaggatctgactaccttggaaagggtgtatcaaaggctgttgacaatgtgaacaccgtcattggccctgctttgattggcaaggacccaactgagcagactgctattgacaacttaatggttcaacagcttgatggaactgttaacgaatggggttggtgcaagcaaaagctaggagcaaatgccatattggcagtgtctcttgcagtctgcaaagctggtgctagcgtcctgaaaattcctctttacaagcatattgctaatatcgcgggtaacaaaaagttggttttgcctgttcctgctttcaatgtcattaatggtggatcacatgctggaaacaaacttgctatgcaggagtttatggttctttcctgtgggagcttcctcgttaaggtagacacaaacttgttatgcataggagtgtatcatcttttcaattggagcattactctttcatatggtcacagatgcaataaatgtgtgaggcaagtatggctttgcttctaacattctggtgaactaagaaagactttggtaattgctgaaaaatactgttggcgaagatagtgtctttagccaatgaagacccatggaatggaggaagcattcgactggcttataactggaatacaaaacataggattcgaacttcaagtgatacatggacggttggcacttagcggctgactcgatatgctttaaaagaacctgaacaagttagatgtggtcattttcattccaatctttcatctttgttatggactctgacaataattgctgtgaacgtccaacaagcacaacaacatatccttccttggaaagttcataggcagcagctaatcccagaccagacgttgcaccagtgatgacgcagacaggcctaaaagtagttgtgaaaggggagcacctgggataggacacgagtttctgagagaagagggaacatttctcaggaattagaggtttgaaatactgggaatgggataaggaatctttgaacaattggtaataagaataaagaatagagaaagtccagagcaacgccattctccagaattgtagtgagcaaaggaaaaagaaagccctccacaactccttcaccaccgtaatcaatcccattttcgcaatttggttcttccagagtgtggagattaagggagtgatgacgatgaagttgggtttgttttagtcattcgttgttatttgttggtgtcgtcgcctgctttcccgttcgcctattccgaacccattgaaaatcggacgcgtggg

SEQ ID NO: 13865 - DNA, 690 bp, Glycine max
  Clone ID: PAT_MRT3847_112529C.1
gaaacaaaagagaaataaattataatcaagtattccaaaaaataatcatgatcaaaacgagttggattggctagcaatatgtaaacaacttgtgcttttatatattggttatagggcctttaaaccaacggcgaccactgattaaccagtaagaaactacaagaataagcaaacatccaacggcaacaggggtgtagttaagtgtcttaatggttattgggtaggaaacaggcaaggagaagagtacagaaatggtcagcacccaaagaacagcaacccaacccacaacgacaccataacggcccaagttgaaaggcccactgacaaagtgtttccgtgccaaggtcacccttaagaatatagggaaggcataagcaatatagaggccaattgttgctatggacaccatggcctcaaatgctactatgcttccaagagactgcaatagatttacaattgagtaagaaacatagttttccacttttcaacaaatcagagaaaactaaatttgcaggttattataaaatataaatgatagcttatgagtaataaaatacatactgtcagtgccatgcaaaatgatatgaaaacagaaagccaaactgcatatatagggacctcctgcttgttaactttgtgccacaatgatgacaatggcatggccccatctctaaagaatgcataagccat

SEQ ID NO: 13866 - DNA, 611 bp, Glycine max
  Clone ID: PAT_MRT3847_11252C.1
ggtggaggaggaaagctggatgagttccaacctcatcccgtcaaggagcaacttcccggtgttgattactgtgttaccagctctccttcatggcctgaagggattattcttggctttcagcattacctcgttgtgcttgggtccattctcattctttccaccatccttgtccctctcatcggtggtggcaatgtggaaaaggctgaaacaattcagactctactttttgttgcggccattaacacactgctgcaaacatggtttggcacacgtcttccggtggttgtgggggcatcctatgcttttctcattcctgctttctccgttgctttttcctctagaatgagtatatttctagatccacatcagagatttaaacaatccatgagagccatacaaggggcccttattgttgcatccttttttcaaatcattgttggcttttttggcttttggaggatttttgccaggtttctcagcccacttagtgtggtcccccttgtcactctgaccggactaggactatttgtattaggatttccaaggttggcagattgtgttgaaattggtctccctgcattggttatcctggtcatcctgtcccagtacat

SEQ ID NO: 13867 - DNA, 1428 bp, Glycine max
  Clone ID: PAT_MRT3847_112530C.1
gcttttttgggaatcctcgacggcttcaatactctcagtcacagaaccaatttggttgaccttaagaagaagagcatggcatgcttttgtatcaattgccttctgaaccctcttggggttggtaaccaagagatcatcaccaacaatttgtacattggttccaacctcagcagtaagcttagcatagtgctcccagtcatcctggtcaaaaggatcctcaattgaaacaattggatactctgtcacaaatgacttgtatagatctttcaaagcatctccagagatcttctgtgagccatcattgttatcttccttgaagttcaaatcgtatgttttatcttccttgtagaattcagaagctgcaacatccattccaatgacaactttgcctgtgtaaccagctttggcaatggcagttttcagcaattccaaaccttccttgttttcctaaatgttggtgacgaaggtggctttgcccctaacatccaggaaaacaaggaaggcttggaattgctgaaaactgccatcgccaaagctggttacacaggcaaagttgtcattggaatggatgttgcagcttctgaattctacaaggaagacaaaacatacgatttgaacttcaaggaagataacaatgatggctcccagaggatctctggagatgctttgaaagatctgtacaagtcatttgtgtcagagtacccaattgtttcaattgaggatccatttgaccaggatgactgggagcactatgctaagctaactgctgaggttggagccaatgtacaaattgttggtgatgatctcttggttaccaaccccaagagggttcagaaggcaattgatactaaagcatgcaatgctcttctcctcaaggtcaaccaaattggttctgtgactgagagtattgaagctgtcaggatgtccaaaaaagctggatggggtgtcatggccagtcacagaagtggagagactgaggataccttcattgctgacctttctgttggtttggctacgggtcaaattaagactggagctccatgcaggtctgagcgtcttgctaaatataaccagctcttgagaattgaggaggagcttggtgctgaagcagtgtacgccggagctaacttccgtacccccgttgaaccctactaaagttttcaagtggaaaaaacctgcagatccacacgagtttgagcatcgagatttgtccgcgcggactttggcgtgatatataagatgatagttgtaacagtaagcgaggcatgagaaagagcttgccaataatttgagttctgattcacagagctaccagagtatatggcttaggactctgcactctgggatctgagattaaaccatatgactcgaggccaacttaaaattgacttacgatgatacggactatctacatgaattctgattctg

SEQ ID NO: 13868 - DNA, 1479 bp, Glycine max
  Clone ID: PAT_MRT3847_112531C.1
gtaagctcggaattcggctcgagctcgagccgtgaaaacctaaggaaagtggatggggatgataacacatgtataatagtgggaaaggtggtggtcaccaaaaatccttgccttcacccaggagacatcagagtccttgatgctatctacagtgaagaattagaggagaagggtttgagggattgccttgtatttccacaaaaaggacataggcctcatccaaatgaatgctctggaggtgatctcgatggagatttgtttttcataagttgggacaaagatctaatcccatgtcaaactgaggctccaatggactacacaggaaggaggccccgtataatggaccataaagtgaccctagaggaaatccaacaattctttgttgattacatgatcaatgatactttgggtgctatctctactgctcatctagttcacgctgaccgtgaacaagataaggccaagagtagaaaatgtctggaattggcagagcttcattccatggctgtcgactttgcaaagactggagcacctgctgcaatgcctagagttctgaaaccaagagagtttccagatttcatggagagggttgacaagcctatgtacatctccaagggggtactgggaaaactttatcgcgccataattgagtcacaaatgcaaataagatatagctttgtgtggtcagagaagcatgctgaagaagcatatgaccgtagccttgaagtgaatggttttgaggccttccttgagacagcatcaactcacaaagaaatgtatgcagagaagatgagcagtttaatggacttctatggtgcagagaccgaggatgaaatgctacttggtaacttgcaaaaccgtgcttcatatttgcagcgtgataacaggagatatggtgatatgaaggatcggattctgctctcagtgaagaaccttcagcgtgaagctaaagaatggtttgaaactagttgcgaaccgcatgaatataagcctatggcatctgcatggtatcatgtgacctatcaccccagctattattgccgggaaagcccatgctttctaagctttccatggatagttggtgagattttgctgcaaataaggtctgtgagcaaaggagttcacaaatgaaggcttcctctaatgctgtgtgcatttttattttgaaaaaagaagaaaaaatctgaagccgtttgtggtggataacatgtatatgcagatgttgattgaaggtaccaccttgtctgcgagagtttccttttgcaaaatattattgttatcaatatttggcattataaaaatttactagccgtatatgtgatgttgatgccagtggcttcatctataaccaggttcagcgaatcaagtgggttgggttactccaaaaccgtttcaccaaaattccgggtttgtaggatctggttacaccctgttcgagtttattaaagtcaatttaaaacgagtattgaaaagagtgtc

SEQ ID NO: 13869 - DNA, 377 bp, Glycine max
  Clone ID: PAT_MRT3847_112532C.1
gagcggccgattggtttttttttttttttaaaaatttttaaaaaaccacaaaaaaaaaaaaaaccgccgactttaaactgttagtttccccccccacctctaaaaattgaaccaaacaaaaccgacctacattcatcacttgaaaataaaatcctaattaattacttgactaaataattcaaaacttgtttaccacaaatatttatccgggtttaagaaacaaaaaaaaaacacctaattttccacactcaaactctactcactcactttttgcagcttcctccaacacgtaaaattggaaccggaaccttaaacgaggggacaacctttacctcacattttcctttgtttcgccgccataacctttttaacaaaac

SEQ ID NO: 13870 - DNA, 187 bp, Glycine max
  unsure (1)..(187): unsure at all n locations
  Clone ID: PAT_MRT3847_112533C.1
ccgcgtcgaaggcgtgacacgggtgaattccntcctgaacctccntagacnactgtcgggcgacaagcgatcgaccagctggaggaagcggcggtgaccggtgaggaagtctcctacaattctttgccgagttcaggtgggggttcatgcagangcgcgtgcaaaatccctttagggcttgttcgtt

SEQ ID NO: 13871 - DNA, 208 bp, Glycine max
  Clone ID: PAT_MRT3847_112534C.1
gttttatctttaatatggtgtttccataggttaagaagagatgtttataaattaatttttgtctcgactcctaaggatgttgtaccggaacaatatccattcaccattgttggatttaaaggtctattatttgtttgaaccacctatgcacaacataagctacttttggttacctacaattgttactaataaatttttattcacgcaa

SEQ ID NO: 13872 - DNA, 400 bp, Glycine max
  Clone ID: PAT_MRT3847_112535C.1
tgtttggtgcagttcaagagcatgatggaagacgcgaagccatggtgataaaggctgtagattatggggatccaaagtacactcaccacaatatccgcccaagattaaattatgtcggttactcccatggttattgaagattagtgataatttcatcatagcatcaaagtgatagaactcatggacttagctaaaaaaaaatgaaagacagagcatttctcttgcttcattttctctacctagaaatgtcacattaattagtcttacaatcacaaatcaaaatcataagggagagaaagagagagaaatagggagggagctagaggacacactaatcctgaaaagtttcttctgagtgaatcctgtaaatgaggatgatcagtactaaaaaaaaaaaaaa

SEQ ID NO: 13873 - DNA, 254 bp, Glycine max
  Clone ID: PAT_MRT3847_112536C.1
gcaaataaaagagccaaggtaaacaataaccccacaaagtggtcaggatagtgataaattacaaacagcgacgctaacagcgtatttctcaaggctaaaacacgacgccaatggaaaaggtcctaaaaactccctcaaaagccatataaagcccaatcgattaagggtagaccgaaaacaccccctctgcatcgttcaagttgccagggggaaaccctaaccataccgatacttggtgagggctgggaagacca

SEQ ID NO: 13874 - DNA, 932 bp, Glycine max
  Clone ID: PAT_MRT3847_112537C.1
tcctctagagcggccgcttttttttttttttttttttttttttttttccttaagattacgcaaagcttgccgaatcgtatcctcatcttgattgcagtatttcaggcatagcaagcgctgtgcaacatgatatgccttttgtattgaatgatgctgtaaacagttgacttccatcctcttaacttcctaatgtcaccagcaagtgcacataagatgttagtactggtttgtgtttgacaaatttgtctacaaaaacactattattatcaatggatataaaataacacgcatcaaacaaactctaacgtcctgagatggatttcacaatatcggtacgtatagatggtaatcttactgttcacagcttaataaaaattcagagctaatcaactcgttcgggcaactgttcataacgaactaaaagtgggcacgatacttaggaatgactttttccagtgcggttgacgaagtatttacattatgtataattatgtaaaaaaaaacaggtattgaataatcaaaccccttaaaatgaagtgatatttgaaatttccaccaagagtatttctaattttccgaatcaagcttgattatcttccttagtattgagagttgagatggaaaaaattaaaaaattaaaaccctttttttaataagttgtgtgaacaccttttctgaaatcctagatgtgatcattctggctgtctcaacaaccgaacttggtaatcctgccacttctgctaagagaaggccataatgggggatgcgtttcgatccttccttaagttgaaacttgaagtccaagtggttgttttttaactcgacatcaaagtgaagaattttcacgttgggatacattgttactaattccgatatgttctccatatgagtggcaaatacggtatacgttttaagtgacaaaagatgctcgc

SEQ ID NO: 13875 - DNA, 297 bp, Glycine max
  unsure (1)..(297): unsure at all n locations
  Clone ID: PAT_MRT3847_112538C.1
acgagattccatatagttgatgcaaaaggacatgtgaacaaaaggtgttgaatcgtttcctcctccccatggcagagagcacaagaatagtcttccgcttgtaacttgatttgtcttttcttaagtttgcctctggtttggattttgtcccgtataactttccacacaaagatagacacattngaggtaattggaatttcccaaagtcttgacatngagggtagtttttccatatggaattttccctgcaaagagataatagcactgtantagtaaaggatttgggatgttgacact

SEQ ID NO: 13876 - DNA, 565 bp, Glycine max
  Clone ID: PAT_MRT3847_112539C.1
ggctcatagagacccacctagcctgccaagcacaagatctttagaggatatatatgtaaggcaagttatctcatacaatgattcatgttgacatatatcattattcccctttctctagtaaagagacattatcaagatgttctagtatgtcaataccacaattacgtgcacttcacgatttgcgaggataagtcaatccatttctttttttacacagttgtttttgcaagtaacaatttagactccttaatgataaaaccacttatgcgattattgctaaataatgagacaccttcatacatctgttatcacattgtttgcttgaggagttgctcttcaagctccccaatcttactctagagtctagatgcttatagacaaggttcttacctcatttttttcctattaagattaactgcaaaaacattactggttctctttaacctcaagcacattccaaataacttagttccaaatatatacattagtacaaacttgtagtcccaaaccttgcaacacaacataccatagaataataccatccaagctatattttctcgagttt

SEQ ID NO: 13877 - DNA, 885 bp, Glycine max
  Clone ID: PAT_MRT3847_11253C.1
tccgggtcgacccagcgtccgtacggttgcgagaagacgctgcaactgcaaactagaaaggagaataaagaaatgggcgcaacgaagagtggacgagttaaacttggagcacaaggccttgaggtttcaaaattgggattcggatgtctgggtcttactggagcgtataatgagcctctcccggaacaggatggcatatctattatcaagtatgcattcagtaaaggaatcacattttttgataccgctgatgtttatggagccggtgctaatgaaattttgcttggaaaggctctgaagcagctacctagagaaaagatccagctagccacaaaatttggtattgcgagattagatttttctaacatgctgatcaagggttcgcctgaatatgtgcgctcatgctgcgaaactagcttgaaacgtcttgatgttgaatacattgatctctattatcagcatagagtggacacatctgtacctatagaggaaacagtgggtgaacttaagaaattggtcgaagagggtaaagtcaaatatattgggttatctgaagccagcccatatacaataaggagagcacacgcaattcatcccatcacagctgtgcaaatagagtggtctttgtggactcgtgacattgaagaagagatagtccctctctgcagggaacttggtattggaattgtaccatatagtcctcttggtcgtggcttttttggcggcaaaggagttgtggaaaatgtgcctacaaatagctccctggtatatagcattttagcatgtacataattctgctgcataccatggaattgttgataatgacaaattatcaaatagcaatgatcaattctcaatcttgagtgaaacattggttggtttgtt

SEQ ID NO: 13878 - DNA, 234 bp, Glycine max
  Clone ID: PAT_MRT3847_112540C.1
aaaaaaaaaaaaaaaaaaaaaaaaaaaaaaaaaaaaaaaaaaaaaaatataaaagatacgggctacaatactcctgcatcctacactaatatataatgtctcgtaacttcaaaattctgttatctggccaacaacttacaaccatggtaactgctattactaaggcaactctaatgctaattcacttcgtatccctttctcattttgccagctggcctaccaggtttaacccca

SEQ ID NO: 13879 - DNA, 2584 bp, Glycine max
  Clone ID: PAT_MRT3847_112541C.1
ccacgcgtccgaaccaccacccatttgaataatccaggatccccttctggtctcatatctttaatctgttttgggggtggaggatcgcgtcaatccattaggtgggatagcttgattctgatgcaaggacaaaggaggactgttgggtcgttcccagcaattgttagtatgatgcaagggcccagttctagtggcactgatatgaaccaccagtcttccttgaatcatgtgcaaaatgcagtagatttctgtttgtcagattataggggatcttctggtgagactgcatgtttacgtggtactggtcataatgttcagagcttcagtggctggaatactggtgaatctagttcaagactcaatctgatcaaccaagtcaatgatgaaggtctaaaatcagaacatgggctgtcttcttcgtataatgctgctaccgagaatgatccgctcaggtctgaggaaagacaattcgaaccaaataatgtaatttttcctgttagttcaaatactaatctacatggcaatcaatctagagtccacccttcctttttgcaagcttccagttctactcgtattagccagaatattagtctagatatggggcatgttactaatgctgctgatcgtgggaagggcaaagaagctggtagtagtgttaatgccaacaatactagtggaatagatagagaaaagacattgtttggcagtgcttcttgtaatcacacaggagcttcatctgaaagctctggatacatggcttggggtgatagtgctaattcaagttcttctttagttaattggggtccttcctgcaagagaaaggctcttgaaggtagttctaggcaactgtgttctggaggaagctcaagcactcttgtacaatccggaaatggttgctggcctactgatcctgttgatcttaatgcttccagcgacttaactgattctacacctatagaagatattcctgttactagtcctccattatttcagaatgcaacaaatgaagagcgacaagaagctcccaatggatttcctttgataagtattgcagaaaatgtggaaaggcctctaagaaacttcgatagaagaatgagccatctacagcatcaggaatctgtacctctcaatttaccatcaacagggagtgctaggcatcataatcattcttctctgcatcaagcacctggctctcactcaatcaatgattcgttggagttgaggttaacagctggagggacatcttctgctaattctggcgcttctctgaaccagtcacctgccttgcgcatccattcttttccttggaacagaactgccaatcctagaggggccagatcttcaacttcttataactctggagaaagagccgtgcgcgaagattttaatttgagaatgtttccaagagatagtacggaacaccccatgaatgtgcctgcatcttcaggacacgaacctattggttggcatacaccatctggtaatgtgaacaattctggaggtgcacctcctccatcctggattggatctagttcaaatgttcactctcccgctaaccgtagctggatttttaatcatgaagtcccagcagaaaatatgcagagtgtgtcagagttcagtccttggtccctttttccatcaattagctctgcatctggtgttcataatgcccattctgccccatcttcttctggtcctccttcatttacccagggttctagcagcaaccaatcatacgcaagaacagcattggtgatggaaagaaggggtggtgatgttctctctggtggtccccattcactgcgagcattaacctttgacaatgaggggagacgtcgactaatatctgagattcgccaagtcttgatggcaatgcggaggggtgagaacttacgagctgaggattatatggtctttgaccaccctttcttatatcatggcatggctgaaatgcacgacaggcacagagaaatgcgccttgatgtcgacaacatgtcttatgaggaattgttggcattggaggagcatataggagacgtgagcactggattgaatgaggatgtcatcattaagttgatgaaacagagaatttacgtgcgtgccattatcatgacagactcttatacagatctggaaccttgttgtatctgtcaggaggaattttctgatggggagaatgttggatcactggattgtgggcatgagtttcacagtggttgcattaagcagtggctaatgcagaagaacctgtgtcccatttgcaaaacaacagccttagctacatgatagggagaacctctatcttcttaagctggctctatctaaagctttttttactttataaacttttttcttaagaacaggacctctcatttgttgtgattggggacgacaatatgctccctaaaaagaagtaaacaaaaaacattggtgggtgatctatgaactattgtagagttttatttatacttttgtaatggattattacatgtggtttagataagctataagcactttgatattattaaatttcattataaaaaaaaaaaaaaaaaaaaaaaaaaaaaaaaaaaaaaaaaaagag

SEQ ID NO: 13880 - DNA, 321 bp, Glycine max
  Clone ID: PAT_MRT3847_112542C.1
agaaaaaaaaccttaagagggggggtcttgtaggatggaaaccaaacacgaacttatcggcgctccagttcctatgtgtgcacatcgccaccgagtacctacttgattgtgcacttatgggggactggatccatttttatgactgctctcagccagcagaggcacattaaactttatcttcgccatggtttccgatgagcctggtgcaaccaatgatgctatctacatgatgacgtggctttcctgtgatgagaacaattgtaactcttccacgcgaaggggatagagctgattacctgcctcaggatatatgcaacagct

SEQ ID NO: 13881 - DNA, 610 bp, Glycine max
  Clone ID: PAT_MRT3847_112543C.1
catttacacaatggccaaccatgcagctcgaagttttccttacgaccttcctcttgctaatcaccagcgccaaatcagacttattttcctttaacataccacgttttgagccaggtgctttaaacatactactcgatggtagtgccaagacaacaggtggagtgctacaactcaccaaaaaggacaaaagcggcaacccaacccaacacagcgttggcctctctgcattctatgcagcacttcatctctccgacgcaaaaaccgggagagtcgcaaacttcgccaccgagttctccttcgtcgtgaacacaaagggtgcaccactccacggcgacggcttcaccttctatcttgcatcactcgactttgatttcccagacaactcaagtggtggcttcttcggactcttcaacaaaaaaacagccttcaacacttctttaaaccaagttgttgctgttgagtttgatagttttgcaaacgaatgggaccctaactttccacagtctgattctcctcacataggaattgacatcaatccatttggtctgtggcaacagcgccatggggccactagatattcaaccacaaaggtcaataggaaaggcacgca

SEQ ID NO: 13882 - DNA, 695 bp, Glycine max
  unsure (1)..(695): unsure at all n locations
  Clone ID: PAT_MRT3847_112544C.1
gtttatgtgttcgaaactcgaccatcttcacatggcggggcttttgcattccgttacgatgttgaaatggtgcagctcactagaaacaaaagtttgacttcgggcggtggcgacgatgggaaaaatggattgctccgcggcgtttgtttcgaatcgatcaagatcgtgcacgacttgacccacgcgtccggtgcttttggccatccttcgcaatgcaaaccctcgagaaaattgcccattcgacgatgccattcacttcaggcggacagacaattacagatcggttcaatgcggccaaacattctttggccggctctcagttgggcaaaacaatttgcaaagcgacgaccgaagaattaatggcaccgaaaaagaagcacttggactatttgcttcactgtacgaatgagccgaacgtttcaattccgtctatggccaatttgctaattgaaaggacacaaaacccaaattgggtgggtcgtctacaaagcactactaaccatccacaatttgatgtgctacggcaacgagcgcttctcccaatatttggcctcctgcaacaccacgttcaacttggccaactttgtggacaagtccaacctgcagaacggcgccatcgctgccggttgtaatattgcgacgcacgtgcgttgctacnggaagtacgtctcggagaaaatccacacctacagact

SEQ ID NO: 13883 - DNA, 372 bp, Glycine max
  Clone ID: PAT_MRT3847_112545C.1
aaaaatttatataaatttttaaaaaaataaattaaaagtttaaagaaagaaaataataaattaaatttgggaaaaaaaaaaataaaaaaaaaaaaaaaaaaaaaagggggcggcccccatttattgactttttcaacccggaatttaattccgaaccgttacttgaaggcttacaaattttccttttagtgagtttttttaaagtttggcgtaataatggaaatagttttttcttttttaaaatttttttccgttaaaaattcaaaaaaaaatacaacccgaaagtttaaattttaaaccttggggttcttaataaggaacttaactaaatttaattgcttggccttaattgcccgttttcaattgggaaaa

SEQ ID NO: 13884 - DNA, 1177 bp, Glycine max
  Clone ID: PAT_MRT3847_112546C.1
aattcatatggccatgcctaacacattaaacacaaattaacaaatagatgacgagtattcaccaatagaagacgagtgcaggaacatagcctaaaaactaactgtagatgatataaaattgtaaattaactatgcaactgcaaagaatccagaaaagaaaccaaattacttaactcatttacatgcttgtaacatacaaggctgcatctagtacttccaattgcctctcatgttattccggaacgcgcagcaaccaacagagtacacaataatgaggaagacaaggaatatcacattgacaatcgtcaccttcttccagtcagtcttaaggttctgcaggaacccagccttgcaagattcgcaattgaagcacagaacattggaatcattgtcccaagcattacagtcagggttggaatgatttacaccatcagtcttgttccagacagatggaccctgatacgcaaaattacagtcgtttgatggcttacaacacccggactggagcgcggacaagttctccgcgtagaactgctgcgcggagtcgttggcaaattgagtttcgaatttgtcgcagagtttggccgactggaggcagctcttgatccggttccacgtgtgggggttggtcactctgttctgcaaccagtttgagtagtcgccaagccggtactccctgtaaccgcggttagaaactacctcgccagcgcccttgttggtgacaacgaatgcgaagacggtgaaggcggagacaacgatgatgaggatgaacatgacgaagaggtagagccagaggaggcacgagaggcggcaacacgccccgagaagacctgccagggacaccaccaagaggaaaacgcccaacacgatgaggggcttctccagccatctctcgcattccgtttccgcttgcttgtgcagccacacgccggttaccagaatgggtatcgacaggaggaaggagagcaggttcagcaaccctaccaggctgttgctcaagcgacaacacatcttctttctcacacaacgaaatgcgtaccactttgccttcgacaatgaatgcgcgcaagccgcaagcgtaagattaccaccctgccaatttcagagataataagtgagaaaaatataggtattaggatttcacatgaatagagagaaaagacgtgtaagattaaag

SEQ ID NO: 13885 - DNA, 421 bp, Glycine max
  Clone ID: PAT_MRT3847_112547C.1
ctatctatccagatagaaagccttaaaattgcacctcgtctatgcttcactctgggatccgtggtgaagagcattatgagccttcgcagtgagccctacatattttacctcgttactattaactttcgggcataataccaattctttgctcggaccccttatccgctgattatcgtttaaccgcgctcggagctctacctcgcgtgcgtcgactatggcagcctctgttacttgcgcatgtcagtactcggatcgaccgggtactatgtctgattatcagcaacatttactgggtcaaggtggattctctttggggacttatatggtcctcctgcactggtctggactagagtcggttatatagttggacctactggagcagcttcgatcctaaaactgaggtgcacattgatgatatgac

SEQ ID NO: 13886 - DNA, 496 bp, Glycine max
  Clone ID: PAT_MRT3847_112548C.1
cttgactgaacccaaaaaggcttattatgacggaaggtgacctttgcatgttgcaccatctataggatatgaagatatcacagttttccttattcaagaacgtggagatgtacacacccatatataacttgaaggacactcccttacttgtttcagatgggaatggacatgatcgggttgcttttttactagaaaaacaaggggcctctaggaacatcaaaaatggtgggaaaaaaccctttactgggggggcaaggggagattcagattataataaaggactgttactccttgggatggatcccaacttaaagattatcactactcttgtgctaaaaaccaaagcccccgctgaatgtttatacttcttggcgaagttgttattaaaaccctgaactagggggggaacacaaaacacatggggaattaccccttttgctgaagctcccacggggggaaaaaggaacccggtcaagctactggaagacgcttaatc

SEQ ID NO: 13887 - DNA, 571 bp, Glycine max
  Clone ID: PAT_MRT3847_112549C.1
ttgcgaccgcttcgcgtccggcgggaggacaacgaaatttctcaggtaattctctcttctctctctgattgcttcgcgatttcaaggttttgctccgatcaagttcaatttccttattctttttcttttcgtttgtgttttgaagaaattgaagggaaacaagttccaataaatgaaaaatctcgagcgatcgattttctttgctggtttttgtttgtaattctgcgaaattgattatttgcttgttgatgcttggaagctcatggatttggttctttcttgcttgtttggatttctaggttttgaaatttcattcaggctacgctttattttcttgttcctgttctttatctttttcttcttttatcgcttgaatattttattccgtaacaattgaacggatcttttgctcaaaggagtcaaaagagaggtggtgttgaatttcttgtttgagatctgacctttttcttttaatctcatttgttcttttaatgatgatcgatttacgttgttccatgggagaaaagagatgcgaaaattgcgaattctaaacaaaacatagccactattt

SEQ ID NO: 13888 - DNA, 2233 bp, Glycine max
  Clone ID: PAT_MRT3847_11254C.1
aaggaatcatgcagttggttgtgcggatgcactaacatgtcatgttcaaaatcacttgaggccagctgtgagggaaaatcttatggaaattatattccaaaaagctctcttaattgggaccagtattgctgtactcttctatatggagctcagagatagggcgacttacctttatttaaagtagatggctctacttgactttattgtgaccatagcagagaacggcacactgaacccaccattttcacaccaatccactaataaagtagctgctgggttgcaggtgcttcaagaaaagaacctcatccatagagatttaaaaccacagaatttactgttggcaactactgcagctacaccagttatgaaaataggggattttggttttgcaaggtctcttacaccccagggattggctgatacgctatgtggttcaccctattacatggctccagagataattgaaaatcagaagtatgatgccaaggctgatttatggagtgttggggcaatattgtatcaactagtgattgggaggccaccatttgacggaaatagtcaattgcagctttttcaaaatattttggcatctactgaactgcactttccaccagatgcattaaaagtgctacactctgattgcttggatctttgcagaaatcttttacgtcgaaacccagatgagagattaacattcaaggcattcttcaatcacaatttcctacgggaacccaggccaaccatgaatgttgagcagtttcaattacaccaatcagaaagattaacaaatcatcaattaggtggctctacctccgagaagatttctgaatcacattctaagtataatccaatggtagtcagttcagctgctgatgaaaccatgctgttgcaaagaaaggatggcaagattacagctggtactacgaatgctaaagtttcccatttaatggagtccatcgagaaagattatgtctttgtcaattcccatttcgcatcattggaggctttctctgactactttgaagcatctgtgcaagatagttcctcgcacaggatttctctgtttccttcaaagaggactaatatggaggttagagatgcaaaacaaacaaaggatctgccctcttcctccactgaaggattagaaaatttaaaaagcaataaacttgaggcatgtgcagcttcctgtgaatttgctgccttaaggaaagaacatcaaatttccccactgcacccttcaaacaggttacagttgttgcatcagtatgtgcagatcattgctgaactttcacaagaaaagtataacacaggactgtatctagagtctcttgcagttgagttggtggttttggctatatggaaacagactctagaaatttgtagctcttggatggcctcaattacaaagagtgagttgcctggaagcagttcagctaatgaatccatatctgccagagatattaacttgccacagtctacagaacagaaaataaattttagtgatccttcatctatctccctgtgggccaaacatgagtttattgatgcagttgatcgtgctgagaaactatcatgtcatgttcaaaatatggataaggcaactgagatgccagatgcaatggaaattatattccaaaaagctctcttaattgggacaagtggtgctgtagatgaatatatggagatcagagatagggctgctgcatcttactcaaaagcgatgcttctactttcatttattgtggcagaagcagagaaccttccactgaacccaccattttcacttgttgccactaataaggagcgaatctcacaatatattcacagcttgcagtctcgtaaagaatcttcatcagagtcctcttcaaagaaagtgcttatacttttatcaaagtaaattactggtttttatagtttgtctttgcatcaccacttttggaatcggtgaagcaatttgttgctgacatcaatgttgacttcctgtgatgagtgcggacgagagactacctttgacagataccatgttgtatatagatagatatatataacctatcatggccttgtcaggggactttgcctttactgcatgatttcatgtatagaatgttatttctttgacatggaatttgtaaatagtgtatagctcatagtcttttacaattttgaaaccactattatcaatcaattgaaatttcttaggggaaaaaaaaaaaaaaaaacgaagggcggccgc

SEQ ID NO: 13889 - DNA, 274 bp, Glycine max
  Clone ID: PAT_MRT3847_112550C.1
caaccagagaaagaatatcaaaatggcactctcttgaatcaatttactgacactaaaggtggttacaacatagtgtatttccaatctcagtcaacagagagcttccgacctcacgccaggattaaaggtgccctcaccacaactaacgatcatgcttcaatgaacaccattataaagaggacctatgtcctccccccattccaatcgctgaaacaagatcatcacatgaccacctgtcacccttgcaccactatcactagttgagaaaagcagc

SEQ ID NO: 13890 - DNA, 416 bp, Glycine max
  Clone ID: PAT_MRT3847_112551C.1
acggctgcgagaagacgacagaagggtaccaataagtaacaatcattttatctattattttttaaacaagggcttagactgtacgagataaagattatttatggttttcaggattattatggggtcccttaatttaaagtggaatcatcataaatcttcatggcctcttcaaaatgcctccgaaaactacttgaactctttcagcgccattagtgctccaaatctcagaacgtcttcgacccaataagagtcacaactcacaacatgaaaaggctgtgacatgtgtatgagtgcatctttttgggtgaatgaatttggattcattttttgttatcctttacttctagctttttaaaaaattgaaatgacctccttgcccttaatccatttccctgcttcccatatctaaatttaga

SEQ ID NO: 13891 - DNA, 467 bp, Glycine max
  unsure (1)..(467): unsure at all n locations
  Clone ID: PAT_MRT3847_112552C.1
gggaaaatcacagacatctcagctgctattcttcatgtttaaaatcccgtatgttatggtctgtagtgccattttgtgtggtcttagggcggaaatcccctccctttttctcttaatacaggaactttattttccccttcttcatttgcgtgcccaacaataatgaacctagaccatctcctgtccagcaaagccccgcctttctctggtgatattttcagccatctctggtgatatttcccacctgcctctgcctctatattggtctcttgtttaattcctttaagttattgatcagtatttagttaaatctaacttttgatcattaattatgaatatctctttaattttagatgtatattttaagttttcatcatgtgtgtgtgtcttaaaactntataaaagtggtcatctcatctcaccacctactatattgattttggggttggttgcttcacactgctatt

SEQ ID NO: 13892 - DNA, 1419 bp, Glycine max
  Clone ID: PAT_MRT3847_112553C.1
atgcacacgtcgtcgtttcgggccaccacgcccgcatcaccgcccaccttctctctctactttctctctcctcccccgttccgttcccgctccattactctctctccctcttcaactcaatcccgttccccaccgtctttgccttcaactccctcatccgctgccacgccaaagcgaactcaccaccctctctttctctttctctctactcttcaatgcgacgccgtttcctcaaccccaaccagcacaccttcaccttcgtgctgcacgcgtgcagtaagagcacaaacaccaacccggtgttcctgtgttgattctgccaagagggtgtttgcagaagacaccctttgcagcgacgtggtgacatggaactccatgttggccggtgcggtgagaaacggggaagttcgttttgcagagaagatgtttgatgaaatgcctgaaagggatgttgtgtcgtggagcaccatgataacggggtacgttcaaaatgggctcttggaggatgggttggagtgctttagagacatgacggagacaagggtcaggcctaacgaggcaatattggtgactttgctttcggtttcggcgcagctgggtttacttgggtatgggggggttgttcattctaccattgaggggttgaggtttccaatgactgttcctatagggactgctttggttgacatgtacgcaaagtgtggttgcattgaaaaagctaggatcttgtttgatgggatggtgaagaaggatgtgtggacgtggaatgtcatgatttgtgggctagcttcgcatgatcgtgcaaaggaggcactcacactgtttcagaggttcattgatgaaggttttcgtcccgtgaatgtgacgtttgtgggtgtgcttaatgcttgtagtagggccggtttggtgggtgaagggaggcattactttaagttgatggtggatggttatggcattcagccagagatggagcattatgggtgcatggttgatctcctggctcgtgctggtttagttgatgacgcagttcggttgattgagggaatgacagttgcgccggatcctgtgatgtgggcgacgctgcttgatgcgtgcaagcttcatggatatgcggagatgggggagaagattgggaataagttgatagagttggatccaacgcatgatgggcattatgtgcagttggctggaatatatgcaaaagcgagaaaatgggaagatgtaattaggattcggggattaatgagtgagaaaattgccagcaaagttgctgggtggagcttgattgaagtgcaggatagagttcatcgctttgttgcaggggacagagagcatgaatgttcttcagatatttacaaaatgcttgaaacaataggattgaggatagctgaagctggtttattcactaaagtatcttaa

SEQ ID NO: 13893 - DNA, 198 bp, Glycine max
  unsure (1)..(198): unsure at all n locations
  Clone ID: PAT_MRT3847_112554C.1
tcgcangcacgcgtacgtaagctcggaattcggctcgagnagcctgacagcctgcatgaggagagtgcctaaaagggaagtgacnttnggtctactctggatgcacntatttttgttccatgcgaccacctcggctcttgctatgagcggtactgcggtagcctgccccatggtggaggggaggtccaatgtctcctt

SEQ ID NO: 13894 - DNA, 456 bp, Glycine max
  Clone ID: PAT_MRT3847_112555C.1
gttgaggtttccaatgactgttcctatggggactgctttggttgacatgtatttaaagtgtggttgcgttgaaaaagctaggatcttgtttgatgggatggcaaagaaggatgtgtggatatggaatgtcatgatttgtgggctggcttcacatgatcatgccaaggaggcactcgcgctgtttcagaggttcgttggtgaaggttttcagcccgtgaatgtgacgtttgtgggtgtgcttaatgcttgtagtacggctggtttggttggtgatccgaggcattactttaagttaatggtggatggttatggcattcagccagagatggagcattatgggtgcatggttgatctcctggctcgggctggtttacagatcatgtgatgtgggcgacgctgcttgatgcatgtaagcttcatggttatgtggagatgggggagaagattgcgaataag

SEQ ID NO: 13895 - DNA, 1670 bp, Glycine max
  Clone ID: PAT_MRT3847_112556C.1
atgcgacgccgtttcctcaaccccaaccagcacaccttcaccttcgtgctgcacgcgtgcagtaagagcacaaacaccaacccgggtgttcaaattcatgcacacttgatcaagttcggctatgcatgccacgtgtttgttcggaacgcgctgattcacttgtattgcgagtgttcctgtgttgattctgccaagagggtgtttgcagaagacaccctttgcagcgacgtggtgacatggaactccatgttggccggtgcggtgagaaacggggaagttcgttttgcagagaagatgtttgatgaaatgcctgaaagggatgttgtgtcgtggagcaccatgataacggggtacgttcaaaatgggctcttggaggatgggttggagtgctttagagacatgacggagacaagggtcaggcctaacgaggcaatattggtgactttgctttcggtttcggcgcagctgggtttacttgggtatgggggggttgttcattctaccattgaggggttgaggtttccaatgactgttcctatagggactgctttggttgacatgtacgcaaagtgtggttgcattgaaaaagctaggatcttgtttgatgggatggtgaagaaggatgtgtggacgtggaatgtcatgatttgtgggctagcttcgcatgatcgtgcaaaggaggcactcacactgtttcagaggttcattgatgaaggttttcgtcccgtgaatgtgacgtttgtgggtgtgcttaatgcttgtagtagggccggtttggtgggtgaagggaggcattactttaagttgatggtggatggttatggcattcagccagagatggagcattatgggtgcatggttgatctcctggctcgtgctggtttagttgatgacgcagttcggttgattgagggaatgacagttgcgccggatcctgtgatgtgggcgacgctgcttgatgcgtgcaagcttcatggatatgcggagatgggggagaagattgggaataagttgatagagttggatccaacgcatgatgggcattatgtgcagttggctggaatatatgcaaaagcgagaaaatgggaagatgtaattaggattcggggattaatgagtgagaaaattgccagcaaagttgctgggtggagcttgattgaagtgcaggatagagttcatcgctttgttgcaggggacagagagcatgaatgttcttcagatatttacaaaatgcttgaaacaataggattgaggatagctgaagctggaaaagaagaaaaggttaggaagagcacacaatatttggtgattgcatcagatgatcagaattgtggagaatttgagagtttagtaggaccgttacgagtgatcaagattattatgtccaaactccgaagtgtttgacagagatacaaacagtttagagatggcagcaaatttcaccatttaaagaaagcacatatgtttccatcttagggtgtgtttggaaatttgttagagtggcattcaacggaagttttatactttccgatacataaaggataagcaatgtgactttggatcgagtggaatgtgggtttatttggacaaagctgatatccaaaaacactcttaattattgtaggacgtttattcaagtcaatccttcactttacccgctttttttctat

SEQ ID NO: 13896 - DNA, 870 bp, Glycine max
  Clone ID: PAT_MRT3847_112557C.1
cccaacccccaagcgctgcattggtcatccattgttggaacattctctgattaccaaacaatgagacccccgagaggcggtggacgcggcggcggattcagaggtggccgcgacggtggtggtcgcggcagaggtggttttggtcgcggcggaggtggttttggtcgcggcggcggcggcggatatcgtgacgaaggaccaccctccgaagtcgtagaggtgtcatcttttatgcatgcatgcgagggagatgcagtatgggagatgcagtgacaaagcttacaaatgagaaagttccctttttcaatgctcctatatatctgaaaaacatgactcagattgggaaagttgatgaaatatttggtcccatcaatgaagcttacttctcaattaagatgatggaagggattgttgctacttcttattcatctggcgacaagttttatattgatccaaggaaactgttgcctcttgcaagatttcttccacaacccaagggacaatcagctggtagaggtggtggtggaggtggtcgtggtggatgtagaggtggccgtggaggtggtggttttcgtggaagggggggtccaaggggtgggagaggtggtcctcccaggggtggtggtggtttcaggggaagggggagatcatagggcaattttatgtaatgtttttcacattgctgcagtttttttcctttggagataacatagatgttgaattgactttttatttcttatgcattgagttcatgttggttgattatgttgttatcattatggggaagtcgattgatttgtgtagtctctatagaaattgtgcttgattctatccctctcaaatcgaaatggaaagtggaaactggaaaaa

SEQ ID NO: 13897 - DNA, 778 bp, Glycine max
  Clone ID: PAT_MRT3847_112558C.1
ccccccccccctccaatcgctgcattggccatccattgtaggagcattctctgattaccaaacaatgagacccccgagaggcggtggacgcggcggtggattcagaggtggccgcgacggtggattcagaggtggccgcgacggtggcggtcgcggcagaggtggttttggtcgcggcggaggtggttttggtcgcggaggaggtggttttggtcgcggcggcggatttcgcgacgaaggaccaccctccgaagtcgtagaggtgtcatcatttatgcatgcatgcgagggagacgcagtgacaaagcttacaaatgagaaagttccctttttcaatgctcctatatatctgaaaaacatgactcagattggaaaagttgatgaaatatttggtcccatcaatgaagcttacttctcaattaagatgatggaagggattgttgctacttcttattcatctggcgacaagttttatattgatccaaggaaactgttgcctcttgcaagatttcttccacaacccaagggacaatcagctggtagaggtggaggtggaggaggtcgtggtggaggtagaggtggccgtggaggcggtggttttcgtggaaggggcggtccaaggggtgggagaggtggtcctcctaggggtggtggtttcaggggaagggggagatcatagggcaattttatgtaatgtttttcacattggctgcagttattttcctttggagataacatagatgttgaattggctttttatttcttatgcattgagttg

SEQ ID NO: 13898 - DNA, 243 bp, Glycine max
  unsure (1)..(243): unsure at all n locations
  Clone ID: PAT_MRT3847_112559C.1
cgcgataacaagnnaatttttccattacagaaaggcgcagccataatatgggaagcgggtgagggcaaaaacttaacacccgattttcaattaaaaaaaaatgggttttccaatataatggcaaaacaaacacccggggtcccattcgggacagaaagagaatatagtgccccccatcctttaatgtgtggttttgagcacatggttctcaaaacccatacagggttacagagagcaggtgta

SEQ ID NO: 13899 - DNA, 1609 bp, Glycine max
  unsure (1)..(1609): unsure at all n locations
  Clone ID: PAT_MRT3847_11255C.1
cccggtcgactgaaggctcgagggagaataaagaaatgggcgcaacgagcatttttctgaatcgtatgtggagattcctcgatggtttccgctgaatggagtggtccttatggagtcgtgacattgaggaataattcctcagcaggtgaaaggcagggacgagtcgacaagcccagattcaaccagttaaacttggaacccaaggctttgaggtacgcaaccaaaatgactcaagcccagattcaaccagttaaacttggaacccaaggctttgaggtttcaaaattgggattcggatgtatgggccttactggagcgtacaatgaccctctccaagaacaggatggcatatctgttatcaagtatgcgttcagtaagggaatcacattttttgatactgcggatgtttatggagccaatgctaatgaacttttggttggaaaggctttgaagcagctgcccagagaaaagattcagatagccacaaaatttggtattgcttcacgaggttttcctgatatgaagatcaagggttcgcctgaatatgtgcgatcatgctgtgaagctgtgaagtagcttgaagcgtcttgatgttgaatacattgatctctattatcagcacagagtggacacatctgtacctatagaggaaacagtgggtgaacttaagaaattggtcgaagagggtaaagtcaaatatattggattatctgaagccagcccagatacaataaggagagcacacgcaattcatcccatcacagctgtgcaaatagagtggtctttgtggactcgtgacattgaagaagagatagtccctctctgcagggaacttggtattggaattgtaccatatagtcctcttggtcgaggcttttttggcggcaaaggagttctggaaaatatgcctgcaagtacagtcctgactttacatcatcctcggttccaagcagagaacataaacaagaacaagagaatatatgaacaaatagaaagccttgctaagaaataccagagcactcctccccaattggcattagcttgggtacttcaccaaggcaacgatgttgttcctattcctggaacaactaagattaagaacctggatcaaaacatcggtgcattatcactgaaatttacagaaagtgacttgagagaaatttccgaggcagttcccatacatgatgtggcagggtctcaatacttctttggaaatgataaagattcttggaaatttgccaacacacctccaaaagatccgagggtctccacttgaagcactctaaatcctttttagttggataattttctattttgtgagcggtcatatgtcagatgcaaaagctagtacgactataagctactaatgcattctgttgatgtagtagataaggatattaataaacttcaatttgagtttcttttctgtttagcaaaaaaaaaaaaaaaaaattcaacttaaatttcactctcattttttcactaaataatttaatatgatgaaatatagcattntagcatgtacataattctgctgcataccatggaaattgttgatatgacanattatcaaatagcaatgatcaattctcaatcttgagtgaaacat

SEQ ID NO: 13900 - DNA, 458 bp, Glycine max
  Clone ID: PAT_MRT3847_112560C.1
ataattcccggtttccctagagagactatcaacgtccctcctttttacttttcttttttttaatctctttcacatttttttcaaccacttaagtccccttcataataaaatttcccaatatttcataatccatccaacctctaaaacaaataaattctaacaatcttgcccaatttataatttaaccaatcaaaaaatttcaacattttttacaacattttctttctctatccttaacaacttttttaaccctcaacaaaaaaacaacaacttcattcatacataaaaaaatacatttttacactctataatattccaaaaaaatctttacataatctatcaattaaattcattttatatacctttctaaacatttctttattacaaaaaattttttattaaccataatttattattttaataaatacattttaaaccatttttacatttttttttca

SEQ ID NO: 13901 - DNA, 231 bp, Glycine max
  Clone ID: PAT_MRT3847_112561C.1
aaaaaaaataaaaacgtcgtattggagtcgccggggacctctggaatgggaggtaaatcttcacacggggctttgcatatttttcgggatgggttgtggttttgtaatgaactttgtattaaagctgaacactgaaaacctaacatattacagctactcgttctggcgaatgcgataatctaaagaagaacccttaaaaatggataccaaagaactcgttcgttctttcat

SEQ ID NO: 13902 - DNA, 430 bp, Glycine max
  Clone ID: PAT_MRT3847_112562C.1
aaaacccaaaaaactggcattggaggaaataaaccccccggttttcccactttgttaaaaaaggattttaccaatttgggaccggggggggaaattttttccaaagcctttaaaaagggccttttttaaaaaaaccccaatagggcacccaaaacccgcccccgggggtaaaccgaagccgccccccctttttttttttttttttggcaatgaacccctgtttccccaaaaagggtttgccccctttcatgggtataaaaaaaaagcccgtttatctttgggccccaaatgaaaacccttgcttaaataaaccccccaacccccggggggagccggttggtaatagggggccttttccgtttcccgctcaaataaataaggggcctagggatttggtgggggacagggggtttcatacatttaaaggggg

SEQ ID NO: 13903 - DNA, 631 bp, Glycine max
  Clone ID: PAT_MRT3847_112563C.1
cacaactactacaagtacttccttacaatcaaaaccaacaacaactatggcaagttatcaaaagcactacgatgatcagggtcgcaaggttgacgagtatggcaacggatagaagcaaagagattgtggaatttgtgatcacacaacataagcatatatatagaaagatgtcaggggcacaaggagcacaaccaaaggagtcaaaaacagcaacaacatatgagtcagtagaaggaggagagaaccgaacaaggactgacttgctttcaagggaggatcaaggctgcattcaagtggaaaaacttcaggagaaggtccatgatcctgctggcaaaggtggtcctgtctttggtgctggcaaagatgaagacaaacaagaccttggagttactggcacaggctaattaacctactatatatattactactatatactatatagtgtatgagtatagtatatacccaaaaagtactagtctctcttgtgatcatggtgctgcttcaaaatctttgttttgggtttgagtttatgtaaattaatgaaactttagtttgagtcttccataccgtgtatgtagaccttgtatttaatggaataagaaagaagaaacaagttaatcgacagcaacgg

SEQ ID NO: 13904 - DNA, 426 bp, Glycine max
  Clone ID: PAT_MRT3847_112564C.1
ggaaccgaaaaaggaaacacttttattaaaactgcaactcgcaacttgcgagataagcaagacgcttcacttcgtataatgccttatagctctacactatccaagctccgcccagatgacattacactgtaggcaaacccttcattcacctttagctgagagatcttcggtgacgcccaaattattcttggacgcctctatgggtcaaccccggatggccccacgcccgggagctagaggcccagcgtgaatcttctcaggacctacgcccttggcggggtggatcccataagctgaattgtgcgctccaggagctgctgtaccagacggatcaagggtgttagaccaagctgcttccccctccacagatacggttgggctgcccgcaacactggccccttcatgaacagaggccctcgctggacc

SEQ ID NO: 13905 - DNA, 407 bp, Glycine max
  Clone ID: PAT_MRT3847_112565C.1
ggaattcaataatgctctcttcttactaaaatgtctttcttctaaaatttctcacttctctgaaactctgattcatataatgattatcatttgaaactctcaacagctagtatgttctacactcgcctcttaggaggatcttgtgtatcagaacgtcgaatattgatatcaattggtgtgttatctctttagtttatagatatcttgcatcaaagttatcataaactgcttaatgtcttgggtatggctcaacaacatatcggatatcctgagataatggatatctataatgcttcaaagagacaatccatacgcttggtataagttgctttcaaacgtttgccacgcgtaaggtagctttaatcaaacaacatagcatgtatacaccttaactttaagggtgtgtt

SEQ ID NO: 13906 - DNA, 337 bp, Glycine max
  Clone ID: PAT_MRT3847_112566C.1
ctcgagccgctcgagccgctcgagcggctcgagctctattcgtttcacttacagatttttcctttcgagggatgtcatatacaatcatgggggcgatccttaaagcatgtatcaacctaaatcacatgtttctgcgcagatgctgtcttaaaatccgacaataatttgcttccatttatcaaatttgcaagctctattgatagctttaactttatagaaagcaacaacatcaacaaatttagcataatcttttccctttttaactttaaaacgacattaaattcttttacccttgttaaaagcattgaatttaatgatctagatctagatgaatcta

SEQ ID NO: 13907 - DNA, 642 bp, Glycine max
  Clone ID: PAT_MRT3847_112567C.1
ccacgcgtccgaattaaacaagaggaaacagcagttgaagaggagaaaagcaaacaaagcaaagcaaaaaccctggcttcagttcagagcaaaaaaaaaaaaaaaaaacatgtccctccaccgccatgtttgcacaaccacctcaaagctctcagcagcagcagcagcagcgatccctttggaagtacaagaagttcgcgatagcacagggccagaagtccctcactgactacctccacgctactcgctgcatcccttacgcctacgctgacaaaatcgccaagaactccctcacatccctcaccaccctcatcaccactactctcggtggttccttctcccctccccacttcccccacaaccttaacaagttcctcaggtaccaccccatcaacgaattcgagttcttcttcgagagcatcggcattcatccctccaagctcggttctttgctgccccaagacaattttttttttctcagaagatgatacccttttgaatgctgctcgtgttctccatgaatttgggtttccctgggacaggcttgggattttgtatgtggagagtggctgttttttcaagtgcggggcttctgagttgaagggtaggctttgtgggttcaaaagtatggttttttgcatg

SEQ ID NO: 13908 - DNA, 412 bp, Glycine max
  Clone ID: PAT_MRT3847_112568C.1
tttttgttttttttttttttttttttttttttttttttgtttttttttgttggttttttgttttttaaaaaaccaaaatcctttttttttttttaagtaaaatttaattcccgcggccgggggaaagcccctcccaaggagatttcaaagtttttagcccccccttattttcgggttttttacaactcaagaagggtcaaatcccctcaattttccaaacccatatttataaggcatgggtccaaaaagttttttgttaaaaaattttaagggggtgcaaacacttttggttttgaaagttttagggctaatttgggtccaaacaggttttccacaatagctaatgcaaactcaaggggggttcctggacctttgttggtaataaaattgccttcaactaccaccctgtttt

SEQ ID NO: 13909 - DNA, 346 bp, Glycine max
  Clone ID: PAT_MRT3847_112569C.1
atcgctcctcagatctgaaccaacggacacgcacagcacttgtgagaggtaagaaaatagaatttcttactcgagtacatcctcactcagtcgctctactgtctgtgctgtttgacgttaagaatgaaattatgcgatataaccccactaacactatgctgacgcgaccttttgagagctgtcagactctaaaatctttgagagatcagagctctttggcatatgcgaactagcttaatggatgatctacactcaaataaagcgcattactatgtgcactgagcctggttgcatgttcttcccagtgactcatggaatccatgctgtgaggcttggcaatgatgcc

SEQ ID NO: 13910 - DNA, 1791 bp, Glycine max
  unsure (1)..(1791): unsure at all n locations
  Clone ID: PAT_MRT3847_11256C.1
ccacgcgtccgcccacgcgtccggacgtccggatgggccaatccgcacccaaaatgactcaagcccagattcaaccagttaaacttggaacccaaggctttgaggtactattaactacattacttgctcttattttgataattgatacaattaatctcattctaggtttcaaaattgggattcggatgtatgggccttactggagcgtacaatgaccctctccaagaacaggatggcatatctgttatcaagtatgcgttcagtaagggaatcacattttttgatactgcggatgtttatggagccaatgctaatgaacttttggttggaaaggctttgaagcagctgcccagagaaaagattcagatagccacaaaatttggtattgcttcacgaggttttcctgatatgaagatcaagggttcgcctgaatatgtgcgatcatgctgtgaagctagcttgaagcgtcttgatgttgaatacattgatctctattatcagcacagagtggacacatctgtacctatagaggaaacagtgggtgaacttaagaaattggtcgaagagggtaaagtcaaatatattggattatctgaagccagcccagatacaataaggagagcacacgcaattcatcccatcacagctgtgcaaatagagtggtctttgtggactcgtgacattgaagaagagatagtccctctctgcagggaacttggtattggaattgtaccatatagtcctcttggtcgtggcttttttggcggcaaaggagttgtggaaaatgtgcctacaaatagctccctgaaagcacatccacgctttcaagccgagaacttagacaagaacaagaatatatatgaacgaattgaaggccttgcaaagatgcatcaggccactcctgcccagttggcattagcatgggtacttcagcaaggcgaggatgttgtacctatccctggaacaactaagattaagaacctggatcagaatataggtgccttagcagtgaaactgtcagagaaggacctgagagaaatttctgaggcggttcccattggtgatgtagcaggcggaatacactactatggactggaacacattacctggaagtatgataacacacctccaaaagattcgagcatctcaacctgaagcactcaacattcaacttctgttagagaattccactaagtcgtgaatgaggctaacgaggctgacaaaggctaatatcagcaagctataaaaatatcaataatgtagcccaggtctctattcccctatgtcttgtgtaaagctaaaatttatgcttgattagatgatgccactgttatggttagttttacaaatattttgtttgtaacaaataaacctccaagataatgaagtatgtgcttcacttcattccaatatatttgtgtaggtgaagaactataacttaaaaaaaaaaaaaaaacaaaagatatattaggtgtgtataattaataagatacattagtgactataagaaacattagtgactacaagatacattaatgataattagcatcagccataacactaacgctataagagtttgtcaggccaacgttagctaaacacaacttttcgaataccattttgtttcactttttattttttaattaaataacattgaccatgactcactatatttttcggaaagtanttttttttttgtaattagtgttgaccttagtgacactaattataatttagaggtaaacaaaaagttagtgttgtctggcgttgaccacaacctcaggcatcaag

SEQ ID NO: 13911 - DNA, 595 bp, Glycine max
  Clone ID: PAT_MRT3847_112570C.1
actcgagccgattcggctcgaggaggaactcgagttcgtgatccaagacgagggccattttgcagatcctcctcgaaagagggccctgcgatgggactcttcgcggaggatctgagtcggaggtacttccatcaattgattttgtcgtcgagtactgccactcgcgcgacgtcttccagcgcgacctcaagccggagatctcctcctcgacgagaacggcgatttgagtgcggttaggcatcagaattcaaaacagacccgatggggattctctacacgctttgcgaaactccatggaggcggcgtggtttgtcctccactgagacgaggagagagaggatgagcataaacaagtttcagacaaattttgatttctgttgtgattctaattaggcatgacattaccatcaattatacaaaaatgaaccgaaacccaacgaaaagagccctagctctaaagagcaattcatgccttctcaaggagcacatttactctagtcgaagaacaagaaagatatcagatagaaactccctcgagattcctttggttaagctaccaataacattattgaatggcatttgtataaaatctcgt

SEQ ID NO: 13912 - DNA, 399 bp, Glycine max
  Clone ID: PAT_MRT3847_112571C.1
tcggctcaatggctctatttttccatttcatgatttattgtggcaaattccgaggatgctgtggtatgtgtgaaacttttttgggttgttatatcatgtagtatatgtactgcttacattacaagtactacatatactgtcacttgacgccagtagaatctgttgattggatttaggctctccctttgctaggattctagtttctttgcagagttacttatgctatattgtagctgttacttgcctcacatgaccaaaacacattttttagaattaaacattgtttttaacaatttaaatattagcttcaagttcaaaagcaatatggtcagtgagtcaatcaatgctttgacttaatgtacaacttgtttactaaagtcttaacttgtcttcaatggt

SEQ ID NO: 13913 - DNA, 617 bp, Glycine max
  Clone ID: PAT_MRT3847_112572C.1
aattcggctcgagggactgcacaaacttgcttactgcaataactggtgataactgctgcctcaattcttcagtttttgatcaattcattacgaatgaacctcagccaacagcaacaaagaacatgatgcacttggctcagattgttagaagtggggttctggcaaaattcaattacggaggaaaatctcctcaaatctataacctttccaatatcccccacgacctccctctcttcataagctatggtggcgaagatgcactcgctgatgtaattgatgttaggaatatgctagctgacttgaagttccacgatgaagacaaactaagtgttcagtacatcaaggaatatgctcatgtagactacattatgggagtcaatgccaaggacttagtgtacaatggtattacttcatttttcaagcatcatcattagttttaagacttgacgaggaggagcttagcttataatatataattgcactaatagcaacttagttaagatggaaagtcgtggaataaaataaactatcactaacatcaatccaagttattttcagacgatactacaccatgtatactatagttttgttacatttggaggggaagttacatttgt

SEQ ID NO: 13914 - DNA, 338 bp, Glycine max
  Clone ID: PAT_MRT3847_112573C.1
gaatgaaaggagtgatatattgtctttggaatttgactgtgttgtcttcttctttgtgactcactctctcttcagctcttgaatttgatccacctgtgttgcttttcccaccaaaccaaacaaaataacctgatattaacgtaatagtagttcttttatcgaacattgtgccatgacattcgacgaggtttccatggaacacggcaagagcttcatcttcgccttgcaggaacttaagaacctgaggcctcaactctattctgctgcagactactgtgagaaatcttatctcaatagtgataaaaaaccaatggtacttgacaacatgaaagattatg

SEQ ID NO: 13915 - DNA, 1208 bp, Glycine max
  Clone ID: PAT_MRT3847_112574C.1
tgcaaccctccactctcttgcattgtcctctccactctccaactcacttccagaagccgcactcatctgctgtcccatcttcagttgtgccttaaactacatcctcctcactcaatctcccactctcatgctggaaatggcaactctgcactctcttgcattgtcctctccactctccaactcacttcagaagccacgctcatgtgcagtcccatcttcaattgttcatcaaagtacaaactcttcattcaatggtcaaacattacacctgccgtgtttaaggttacctgtgctaagacaaaatactcccatgcacatgcctgttatcatgatggtcaaaccaaaaatacagttcatccagggaactgatgaacaaacaatacccgatgtgaggctgaccaaatcaagggatggaacaaatggcatggctatcttcacatttgatcaaccctcagttttcgattcttcgggtgaaataggcgatatcactggattttatatgattgatgaggaaggggtccttcagtcagttgatgtaagtgctaaatttgtcaatgggaagccctcaataattgaagccaagtatgtaatgcggagtccacgggactgggatagattcatgagattcatggagcgatactcaaatgcaaatggtttgcaattcatcaaaaaatgagttaatgtgctaactctgcccttctattcttttgcccttttcaggaagtttgtgttctacgatatagtcacatataaaacctgagtgaaatgctatattggcgtacatgtaacttcaattcacatactcatgcattttctgacaccccaagattttatgaaattttgcttgtcctgctgctgtttcgctatcatgtaactgttttcttatagacaagttggaaagctcatcacgaaatgacttccttctattatgttttgaataagcaaaaaactgtcaggaaatatagtacacccaacacgctgcatattaatattttagtatgttgtgtttcctttccgtttgttccgagagatatattaatcaattttgattctttttggatcaagatgtatggattcatggtctttgtgtttgtatagatcttgttcgcgggttaaatagatagatcatcaaagagtgttaaaccacctcttgtaaacaaatatctcaagtgatttgtcccaagggttatgaatgcaaattttagatc

SEQ ID NO: 13916 - DNA, 374 bp, Glycine max
  Clone ID: PAT_MRT3847_112575C.1
ctcgagcagcatcttgcggctgatgatcccatggagatcccaaggaaaccatctgcgggttctttattacgaatcagacattgggggagaatcattacatttccgtgaggttattcatcaaagtcatgcattggtgggtataacgttatccatgattattcatgctcagaatgaggaataggtttcctttcccctgcagatgtttggactttgtcatactgaatgactcaaagttcatatctgccatagtgagcattctgcaagatttatgaacagctttttcatgctatgaatatgttctactggtgaagctacacgaaatacgtcactttgcgcaacgtgccatcaattggtttacattcaattcagatgct

SEQ ID NO: 13917 - DNA, 321 bp, Glycine max
  Clone ID: PAT_MRT3847_112576C.1
cctccctttttttttttttttattcaaaaaaatgtcctaccgggcggaggtgataaatatttcaagagacagcatcttaccctaacaacacataccccagaatacccgcgacaactttcactactaaacccaaattattttgagatgtgacaagatcactatcaaccccatacaatttacatggcccactacgtgcaacatagatttgatgtccaaaagaactacttgctttacagcactcaatggtcaagactaaaggagagcctcacataaaaagccgctgcccaagtcagagctagaaaaccttttataaaaacggta

SEQ ID NO: 13918 - DNA, 337 bp, Glycine max
  unsure (1)..(337): unsure at all n locations
  Clone ID: PAT_MRT3847_112577C.1
tcctctagagcggccgctttttgttttttttttttttttttttnntgaggaataacatgggttaagttttaaccctcatcggcaacattgtgtgcaaccatagcaagcgaaaaacttaaaggcaagaggattcctattacataaaaaggattcccaacaagagtagcaaaaaaaaaaacatgtggtggggatgaccctaatttttttgcccctggaaaattattttttttttttttggtgaaaaagaaaaaactaaaccctgggtaaacctggttatgaatttaacaaactgaccaaagaaaacccctcccaagtttatatttaaggggtggggggg

SEQ ID NO: 13919 - DNA, 400 bp, Glycine max
  Clone ID: PAT_MRT3847_112578C.1
atctggtatggcagtccatgatgactgcaagttgcgtttttggagctgaagcaaaaaggacacaccgttcatagcttttaaaattgaggagcagcagaagcaagtcattgtggagaagcttggtgagcctgcccacggctatgaatatatcactgccagccttcctgctgacgagtgccgttatgctgtatatgattttgagtatctgactgaaaggaatgttcctaaatgcagaatttttgtcattgcatggtcccctgacacatcaagggtgaggagctagatgatttatgccagctccccatacagattctatatggagctggatggatatcaagtagagttgctagctactgatcctactgagatgggtcttgatgtgttcataagccgtgccaac

SEQ ID NO: 13920 - DNA, 587 bp, Glycine max
  Clone ID: PAT_MRT3847_112579C.1
ggctcgagatgagagtttcaatccctctgactcatttttctccgtgactgcaaatggtgttaccctcctctccaatttcagcgccacagccacttgtgaggccctctcacaggcctacattgatagagagtactcccttgcgccattgaattcagaagccttgactctcactttcaagccttctgataaatacaatggcactttcgcttttgtcaacggcattcagctcatcccgatgcccgagctgtttgattccggagaatcggtagggtatgctgaccaaaccacggatgtgaagagcttgaatctgcaaaccatgtttaggcttaacgttggtggacagtacatttctccaatccaagactctggccttacaaggatgtggtatgatgacaggccttacctttatggtggaagcactggtgtcaccaaccaagccgagaagaacgtcttaatcgactaccagaccatgccaaagtacattgctccttctgatgtctactccacatcaagatcaatggcgcctgacatggatgtcaacttgggcttaatctcacttgggtcttccaagtcgatcccaattccat

SEQ ID NO: 13921 - DNA, 462 bp, Glycine max
  Clone ID: PAT_MRT3847_11257C.1
ttggggggggggggggggatgcaagggagggtaggtagcgaagcgcaactagcgagggccattgtaaggaagttgggctaaaacaggtaaacccggattcggtacgacgtgaagtaacatactgagagttcaagggatcaaaatagaggtacaacagcgagttgcaaaggcagtcgggataactgaaaaataaaaacaaataaatacctgattaattatgtatgggtgcttgcctgttaaaggtagtggggcaacaggtaatactacagtagtgcaaggtaccgaaattggcgggcttctcgggcagagccgagcgctaagtgtgtcgctactggggagtggttggatgcgcagaaaactgccaggcggcctaagacttgcgttaaggacagccctatgggggctggtgtttgctctgtgcaggatacgagtggtgaggcgttgctgtacttggggtgataa

SEQ ID NO: 13922 - DNA, 207 bp, Glycine max
  Clone ID: PAT_MRT3847_112580C.1
gggtaaccctaaaacgggggccatttctcaaaagggcacattttttaaaccttcaagaactaaaacagggtttggattctttcaaaaaccaaatgggtcccgagggccctattaaaaaactaaaaggggcatttatccaaaaattttctcttccgggtaatccttcccccttccatgggcaaccaccaaaacaaggttatcgggcac

SEQ ID NO: 13923 - DNA, 610 bp, Glycine max
  Clone ID: PAT_MRT3847_112581C.1
cgtccacctattctgttcgagtgtctagcactccaagaccgtatttatttacaaatggctctacattgatggttcacctatcttacaaaccatcttggttcaatgcttgcacttattttgtaagccttatgcagctgttccaaatcaagaaaacaaaccatcgtacacaacatcataatcacatcttttctggctttagaccagaatcagcatgaagacaataacttcacttcccaaatcaattattagctttgctaaggtgaatctcctaactgcattaattgatcgaggtaagggaaacacaaaatctaaccttcggcgtgaaagcaaatgccaggcaacatcagactgaccacgcatatctcactgtgatatcatgataaatctgatcattgctgaactatactttatactcatccaaacttgcaagactttattttggctcgtatgagacaagaccaatccttagactttaactgggcaaccagacctgtaatgaatgtgtactgaatttccttatttgatacaaacttgctccatagcgtgaggatctctatcattcgctgccgttgctctatgttatcctctaacatgacagtgttcaatgcct

SEQ ID NO: 13924 - DNA, 703 bp, Glycine max
  Clone ID: PAT_MRT3847_112582C.1
tatcaatattggtgttggcgacttttcttccctgacaaaatttgcgcaggaaaataacatcaatttggttataccaggtcctgaacaaccacttgttgaaggtatcgagttagcctttaaaaagattggaattccatgttttggaccttcacctaaggctgctatgatagaaggatcaaaggcatttgcaaaagattttatgaaaaaacatcaaattccaacagcagcttatgagaatttttcagattacggaaaggcaaaggcatatctggaatcagtatctcataaagttgtcataaaggcttcgggtcttgctggtggtaagggagtcctaattcccgccgacaaacaagaagcattgtttgcattgaaagaaataatggctgataaaatatttggatcagcggggaatgaagtagttattgaggaatttcttgaaggtcaagaattaagtatattagcgttctcagatggttatactattgtccctcttcctcctgctcaggatcataaacgtatttttgatggtgatcaaggaccaaatactggtggaatgggatgttattgtccaacccctatcgccattcctgaacttattgctcaaattaagaatgagatcctacaacctactatagatggcatgcgacgtgatggtttcccatttgttggcatgctttttactgggcttatgataacaagttct

SEQ ID NO: 13925 - DNA, 2778 bp, Glycine max
  Clone ID: PAT_MRT3847_112583C.1
gtttaagaggggatatgatggtatcagttagcccgaatgtaagttttgggcaatttagtttactttgttataatagctgttttgagttgttcatgctggtagctttcaacattgttttaagctgtaactgcctgattctattttttgtagtcccctttatatcattcttgtttcttttgaatatatgatgagtttctcatgcagtacatgtaactgtttgatgtgttgccctgcaggatgagcatctggtagatcattttgttagaagcgactttctcaaaccaatagtagatgcctttgttgctaatggtaatcgctacaatctgctcaactctgctgttcttgaacttttcgagtatattagcaaggagaatctgaaattattattgaagtatttagttgattctttctgggaccagttagtgaaatttgagtatttggtttccattcattcactgaaagtaaaatatgagcagtgtttggataatgatgggacaaaaggtactgctattatgattgaccttcgaagacgacttgatgagcgtgctctggataaagaagaggaagactactttaatgacagtgacgaggaggatacaacctctgcatccatttcacataatcagaaagtgcagcaacaacaacctgtgctatccaatggagttgctgcaagctattcaaagttaagtccaaggcctggtggactggttgactatgatgatgatgaggatgaagattacaggccacccccaaagaggccagaagcttctgaagaggatgaagggataatggagtctctcaggcagaaaagaaaattgccttctgagaaccctgagcttgcaaagaagttgtcaaaaaactcaaaatcaaaagatagtgtttttgcttccttgtgttcaacattgagccagactgtgctgcctggtaagaaaccttcagtcaatgttcatactggtccttgtagagaagacaataaagaggagtcaaatgtttctagaaatttctgtgagaatagcaatgcaacggctgaagtgaaccatgtagagaaagagactgccgcctatagaaatttttctgatgggttgtacggcacttcagataatggacagttgggtggtgaggaacatacattggtttcaccaaaatcctccccagagatggccgtaaatggatcttaagattttcaaaccatacagaggaaggcagattgtttgtgctatttgacgtatatgcatttgctggtgctaagtggttgctgtgcttatgtgaaacaaaggattgcattctacaaagtggtaggttctgattattcattccttctgtggaggacatgtggaaatactgtacagtgccactgagaagtgggcaagatattatacagcaacttcaatctgcttttgtaggctttttgggcatggtaattgttgcttctgtgtaacattcaccagcaataattctcttttacctttccttctcaacctcttacagttcatttttcattctgcagaggattctgggttggggggttgatcctcttatcattttttacttatataagttatatttacttattgatagagggcgtcaatattcgccctacacaggtttttttttttcctacccaattttggtggtgaatgtgatatagggatttgtgcagtgagtttctagggccaatttttcgcaaatgtagtaaggagaaaacatgatccgatgtaaagctatattggattgtaacgtatgcattagacttcccatattgtcatcgtaactaaaatcgtgttggttcaaaaaatcaaaataaaaaaaaaatgtttttgctgccttgtgttcaacaatgagccaggctgggctacctcgtaagaaaccttcaatcaacgttcataccgatccttgtagagaagacaataaagaaaaggaaccaaatgtttctagaaattgctgtgagaatagcaatgcaacagctgaagcgaaccatgtagagaaagaaacttctgcctatagaaatttttctgatgggctgtacggcacttcagataatggacagttgggtggtgaggaacatacattggtttcaccgaaatcctccccagagatggccgtaaatggatcttaagattttcaaaccatacagaggaaggcagattgtttgtgttatttgacctatggatttgttggtgcaaagtggttgctgtgcctatgtgaaaaaaatgattgcattctacaaaggggtaggttttgattattccttctgtggaggacatgtggaaatagtgtacagtgccactgaaaggtgggcaagatattatacagcaacttcgatcctatgctttagtaggcttttcgggcttaaagcatggtaattgttgcttttgtgtaacattccccaccagtaattttctttttacctttccttttcaaccttttacagttcctttttcattttgcaaaggattttgggttggggggttgatcctcttatcattttttacttataatagttatattaacttattgatagagggcgccaatattcgccctatacaggttttactttttttcctccccaatttttgtggtggatgtgttatagggatatgtgcagtgagcttcaactttctagggccaatttttgcaaatgtagtaggggagaaaacacgatccgatgtaaatctatattagattgtaacttatgcgttggacttcccatacagttctgtcatcgtaactaaaattgcgttggttagttattattaattctatatttgggcatttcct

SEQ ID NO: 13926 - DNA, 373 bp, Glycine max
  Clone ID: PAT_MRT3847_112584C.1
gtctttttttagttgataaaatttgaagtgtgttggcttaatttgattgctttttgcatttgctttatgggatgttccaatgtttccgatattgaatgatcaaattgactgattgccaacgaaaattcctaatattttgaactgtactttgaatgtgtcgttacaataagccgaatgcatattaggatcgctctcacactcagggctgaccttactccagggactgtgttgatcctgctcactgagaacttcaagggaaagagggattgttctcctgaagcagctcccatatggatgtgttttagtaactagtccctataagatcaatgaggctactctcataatgctgaaccaatcacatgtcattggtaca

SEQ ID NO: 13927 - DNA, 561 bp, Glycine max
  Clone ID: PAT_MRT3847_112585C.1
caattcctactttctccttttatttcttcaaatactctttttttcctttggctttggcattctgttcttcaaactttgccacttttcttttttttttggtttttcccttttccccatagcttcgttttcatttaaaaggcatgataaacattgatattaaaaaaaaaaaaggaatcaacccactttatattgacaattatattttaaaaagggacccaaagataattcaaggtaggaattaggggtcccaaagaaaatcaaattcatatattcataaaataagaggctcaaagggggcaattagggggcataatataacaaagtctaggggggtaagaaagaaagcccaatttgccttgatcattttcaggcgagcacacaaaatatcaattcaccttgaaggttctagaagacataggcatcaaatattcaaatgaaattaatccgctactcatgtaatatgatgtaaaacaatacccatcaaataggtccaactctcacatttaggagcaaaaatcaataatgaaatttaaatcagggattttacactaattatcaatt

SEQ ID NO: 13928 - DNA, 599 bp, Glycine max
  Clone ID: PAT_MRT3847_112586C.1
ccacgcgtccgcatcttacatcatagcaagtaatcttgatgaccttccattgcagctagccttgccaacccttcttgtcactgttacttattggatgggagggctaaaagccaaagcttcaattttctttcgtactctagctgttgctcttctctattctttggtatcacaaggttttggccttgctattggagcattgctgataaataatcaaaaagtagctattacagttggaactgtggtcatgacattgtttcttctagttaatggcttctttgttcgaaatacgccagcatttgtgtcctggataaagtacctatctcatggctattattcctataagctcttgctaggatcacagtttaacggttatgacacttaccattgtggtcaaaatgtcacctgctcagctgtgaactatcctacaattaagcatgtgggcattgacaagcaaggtttatctgttgctgctttggtggcaatgcttgtaggctacagacttattgcctattttgcccttaggattggcactaaacttaactagagcccttctactgtagatgtcaaaatttcgtttaataaggaaatattggtttgtt

SEQ ID NO: 13929 - DNA, 2439 bp, Glycine max
  unsure (1)..(2439): unsure at all n locations
  Clone ID: PAT_MRT3847_112587C.1
attgttagttactcgttgggttttttcaggccatttaccgtttagtgatttatatgaatcattaatatttctttcatggactttttccattttttatatggttccttgcttcaaaaaatctaaaaactactatttaaatacaataataacaccaagtgttatttttacccaaggctttgctacttcggggcttttaacgaaaatgcatgaatcgttaatattagtacctgctttacagtcccattggttaatgatgcacgtaagtatgatgatattgggttatgcaactcttttatgcggatcattattatcagtggctattttagtcattacatttcaagaactcatacaaattattggtaaaagcaagaatttctattttttaaatgaatcattttcttttgctgaaatcaaatacatgaatatgactgataaaaataatgttttacaaaaaacttcttttttgtcttatagaaattattatagatctcaatttcttcaacaattggatcgttggggttaccgtactattagtctaggttttatctttttaacgataggtattatttcaggagcagtatgggctaatgaggcatggggatcatattggaattgggatccaaaggaaacttgggcttttattacttggactatattcgcgatttatttacatactagaaaaaataaaaaattggaagatctaaattcttcaatagtcgcctccataggttttcttataatttgggtatgttatttaggtataaatcttttaggaataggactacatagttatggttcatttacacctaattgaattaaaataagtaaagaacttcacaaataaaaatatcgaaaacataatatatatataataacaaagaaaacttcgaataaaatgattgagaaccccttgaatcactactacagtacttgattcaaggggttctcaaaacaacaaacatattcaattagaattcaaattcatttttatggaattaatataatacaaaagaaatataggtttttgtattgtgcataggatttcttttttattttagtttttatttattcgtgaaaactatctataaaaaattagatagaatagcttcaaccttgtcagccgaaaatgaaaaaataaaatctggataaatgccaatacttattacgggtataaggatagaaattgaaataaataattctcgtggccccgaatcaaaaaaataagaatttggtgtattaaaaagcttgtatccatagaacatttgacgtaacatagataatgaataaataggagttaatatcattccaattgctgttacaaaagttattagtatttttgtgattaaaagatatttttggctagtaattattcccaataagactatcaattctgcaacaaaaccgctcatgcccggcaatgcaagagaagccatcgataagatagtgaaaaccgtgaatatttttggcattgggatagccattccacccatttcgtcgagataaagaagacgtagtctatcataactcgttcccgccaagaaaaaaagcgcagcgccaataaatccgtgagatattatttgtaaaatagccccgttgagacctgtatcgcttatagaaccaattcctaaaagtaagaaacccatatgagatactgaagaataagctattcttttttttaaattgcgttgaccaagagatgttgaagctgcatagattatttgaattgaacctaatagtattaaccagggagaaaatatagaatgagcgcgagataagaattccatattaattcgaaccaacccatatgctcccatttttaataatattccggctaaaagcatacaagtgctgtaatgtgcctctccgtgggtgtctggtaaccatgtatgtaagggtataattggtgatttgacagcaaaagcaataagaaacccgatatagaatattatttccagtgccacgggatatgattgattagttaatgattcgaaatttaatgttggttcattagagctatagaaactcatacccagaattcccagtaataaaaaaacagaacttcccgcagtgtacaaaataaactttgtagctgaatacaaacgtttttttccaccccacatagataaaagtagataaacgggaattaattcgaattcccacatgatgaaaaaaagtaaaatgtcttgagaagaaaatgttcctatttgaccactatacattgctaacatcaggaaatagaataatttggattctctagtaaccggctgagccgctaacgtagnctnaacnngtagtgataaatcccgtcaataaaatgggtcctagagagagtccatctattccgaagctccagtaaaagtcaaaaaaattgatccatttataattttctgtcaattggattagtggatcatccagttcgaaatgacaaaaatcaggagg

SEQ ID NO: 13930 - DNA, 254 bp, Glycine max
  Clone ID: PAT_MRT3847_112588C.1
ggctcgaggtgggacttcgacctcattacgtggacaacagcaccaagaatctttgcgagaggcggtactgtttacaccgaccctcgctatcgaataccagagcaccaactggagctaccactgggcgggctcgccgggactgcccaatcgctgcagcaccaggaaatggtagaccactggaacggacaagaggaccggcaacaatagaggattagcccgcctcacagataacaaaaaaaaactcagggctaact

SEQ ID NO: 13931 - DNA, 329 bp, Glycine max
  Clone ID: PAT_MRT3847_112589C.1
ggctcgaggaaacaggcatagacaaaagaacattttcgcatttacgacagcaacaaccgggaaggggaagggggggcaccgaaaccggaccgcccgcgaagaacatggccaaggcaacaacgttaaccccactagcagtgagccggatatggaaaggtccgggaggaaccctattgcaacgcaatcacgaacagacacgtaactggaggaccaagcccaagaccgacgggatgctgacaaaaatgcagaagaatagtcgacttgcagagtgggaacgggtaccaaattaacgggtcaatgggggggaacaaaaaactgatgtggccgaa

SEQ ID NO: 13932 - DNA, 210 bp, Glycine max
  Clone ID: PAT_MRT3847_11258C.1
atcccaacactatccgaacatgattcatttatgctcaagcttgcacttatcagtgatgattacactgacgaggcggatgctcacataccttctatttacgactctgatacagatgctaaaagtaacaaaatcgaagaagttgatcaaatcttacttaatctctctatacttttttacaaacaatcattatacaaacaatctttttactat

SEQ ID NO: 13933 - DNA, 475 bp, Glycine max
  Clone ID: PAT_MRT3847_112590C.1
acccgaaatgtccgtgggcggaccacacccgtccggttgaccatggcggttgctttaccaagtccaggtgcaccactgaaactgtaaaatgttggggggggcaaaggtttgcagttgcgtaggtgtaaccttaatcttaataagctgaaggttttgggggggtttgggggttgtcctgaattgccaggggtttggtaaaaaagaaaaggaattggatggttagggttccgacattggcgagattatctattttctttgtatggtatcttttcggccaatgcttcctaactgtgtttttaaggcggctttatttgaatttccggtgtttaggtttattgtgcgtttatttatcttttttttaatttctctttttctctaaaatttgtttgtaattttttttccctttttctctaattttaaaagtatttttttatctgtatctctatttcttttctttttttttaagtttttttta

SEQ ID NO: 13934 - DNA, 285 bp, Glycine max
  Clone ID: PAT_MRT3847_112591C.1
aaaaataaaaaaaaaatgtgacctacaatataaaaaaaaaactatagaacaagaggcaggataatgatatgagaaacttgaaaagaatgaagagctgaaagtataaacagcaacaattgtattgaacgtttgacaaggtctactcacacatataaggctaatctcttgactttcaaggctaagcatggttacttgatttaccatagttcaagtaccaaaaggtggtcgtattaaaccatttccaaagggtattgtatatagtcagcctaccaaccaatgtgttac

SEQ ID NO: 13935 - DNA, 136 bp, Glycine max
  unsure (1)..(136): unsure at all n locations
  Clone ID: PAT_MRT3847_112592C.1
acacaaaattatactacattcattcatgttcctagaaaacagaatatgctccgctctatagcattagtgaagctgacgcatcctatgacacttgcaaatttataagcangcatatcattaacataaaacattcagc

SEQ ID NO: 13936 - DNA, 236 bp, Glycine max
  Clone ID: PAT_MRT3847_112593C.1
ctgtaaaacgttcttccttgtgatcttctaaaccccaacctcaatagttgctttcaacgcactaccgttagctgagccggttcacgtactaggcgacggcattggagagagaaatcatagcatgggacctcaccttggtccccacctaacactggcaccggatgtgtcagtgaggaccaaaggccttcccgcgctgggctccgaaattgatgaaattgcaatcactgaaaggattc

SEQ ID NO: 13937 - DNA, 358 bp, Glycine max
  Clone ID: PAT_MRT3847_112594C.1
atcaaacctttcaaaagttcgtctcaagttttaaactttcaaaacctcttaagaaacatcgtgacaacgtaaatagtcaataggaagccaactcaaaaaacaacacttcactaaaactctaaaaacatcccaaaatcctctctatctatataccactttacctcttaccttctaaaatgcaatttatcttcacttttaaaagccatccaatcatagaagccaacctatcaagtgattcagccaatcaactttaacccattcattgtaaacctccaaaccccacttacatacatcccttttatctcatgatactttttcaacctgtccgcatacagaaccacaatcagcccactactaa

SEQ ID NO: 13938 - DNA, 289 bp, Glycine max
  Clone ID: PAT_MRT3847_112595C.1
gaaaaccatttggaaaaaattttattaatgtattcctaaagcaagttgtaatacacgagtgtatactgtcacgaaatttttggcagactaaactagtcacgacttttacggggaagctaatccatctctacagaaacagaggtaccttaatcatccaactctgccatttggggagcatttaaaggcaaaaactggttaccagagaaggcttaaaggttaccaattgcaaaccgaaagaaaaaagggttggttacgaaaaccccagttttcaagctggtgcttccaaaac

SEQ ID NO: 13939 - DNA, 141 bp, Glycine max
  Clone ID: PAT_MRT3847_112596C.1
gatagaaaaatctcattgttagttgaacataatgatatatacctatgtttaaaaataactaccaaacctgaacatgacacctaccaagtgtaaagaataatcccattattgaatagaatgaacttggttcaacccacaccc

SEQ ID NO: 13940 - DNA, 346 bp, Glycine max
  Clone ID: PAT_MRT3847_112597C.1
cccacacgaccggtgagatctctggaaggatcgtgcgaaagatagaggggacaatggtggtgacgccgaagaatgtgccggactatgacgccgtctcctacgccataaaatgcagtgctaaaggcaccgctaccgacttcttgggcaaatgcttggacacatgatggcacgcatttggtgctgtcactgactttgttagtgatttcatttgccttcagattatcatggctactatcactgctgctcatactgaaggaaaaggtaaaagcaaagcctatttcgaaaaacattttgcgacccttcctacgatcgtagcaacgctggaagcattgcatgataactttga

SEQ ID NO: 13941 - DNA, 439 bp, Glycine max
  unsure (1)..(439): unsure at all n locations
  Clone ID: PAT_MRT3847_112598C.1
cctttcctgtgttagctttttttttttctttttttaaaacaacgccagatgacccctaatcttttcctatttcacacatgcataacaaacctaggtgggattttagagtactattattaatgggacacaattgaatacaacacaaaccgaaattatttcccaggggggggggtacccacccattaaacatcaaaggtattcaaatgtttagggaacacatnccacattacccaaccagcttaaaacccccctcggtgaccggcgacaaggggaagggatgaccccttctggctgttgcatccagagagggtccccccttcaccttaactgcttgccaccaaaaatgactctcagctcggcccgggggatgccctccctgccccaaatttttgccctcccctttggccaagggggcagagctctcccccccctgggaaat

SEQ ID NO: 13942 - DNA, 172 bp, Glycine max
  Clone ID: PAT_MRT3847_112599C.1
tatttagaatcactcattattaaaacactgtgcactacttcacaaggggggcatcaaatatcactatccgagctaacccctatctcaaacctcttttcagaaacctttacaaattagatccaaaaccttcttcaacaactctacttttcattaaaacgcaaccattaaaata

SEQ ID NO: 13943 - DNA, 681 bp, Glycine max
  Clone ID: PAT_MRT3847_11259C.1
gcgctacctactaatattccaggaagcaacactaaaacagttatcgaaaatgagttaaaggcagtcagttctgttgccacacagaatactgaattaccttcagcgagagcttggaaacctgctcctggtttcaaggcaaaatctctcttagaaattcaactggaagaacaaaaaaagtcactgacagaaaagcttgtatctgaggttgctactcctgtcaattccatgagctcaacaactccctgggttggagttgtcgccaatccagactctatgaaggtgtcaaatgatggccacagagaagcagaaaatactgaatatctggctaaagctgaaaaatctcaaaatagtaaaagcaagaaaagcccattacatgatctattggcagaagatcttgtaccaaaatctagtgaaagagatggcaaggttcctgacagtatgctcccctcacaaaatatagctgttcactcaaaactggtagatgatggagactttattgaagctaaagacactaaaagaagccggaaaaaatctgcaaagttgaagagttcaggagctaaggtttcaatgccagttgcctctagtgaagtacccataagcccaattcacattgaaaaggtaaaaagctcccgttctgttcagcaggagaaagaacaactgccttccattccttcaggaccc

SEQ ID NO: 13944 - DNA, 659 bp, Glycine max
  unsure (1)..(659): unsure at all n locations
  Clone ID: PAT_MRT3847_1125C.1
accaaaacatttaattttcatatattcacaacaaaaaacangacttttagnaanaatctgccaagaactaannnataacggttaccagncnncaaaaccttaaaggggtnnaaatttnnatcacgncnnagttatttaactggncattatgnnncaaacaanaagaaaataaaacaccatgcagnaaaattattagnaacnnctctacttacncnnataaattgcactttactggttgnnagcanncattgcacttcgntnntgaccagaaatggctcatcnnatcatcttcattcnnatatgcctcgcgaaatattgcnntgttgctgcttttncgtctcattctccttccttttaaagttganncatcatgcaaaagtggttcttccttcacaatcattccaagctccatttgtctgacanncatgcttgctgctcttttgagggtaaacacctttttccaagtaaactggcattggttcagggggaaaagaaaacccttgaggtctggggaaaattcaacatttaanactgggatgttaaagggcgaccntttcatggaaatggcctattgtgtttgggggcattccctcatcatttattgctttatattgacctggtttgatgactttcccaaggtttgatttgatcaatagttg

SEQ ID NO: 13945 - DNA, 582 bp, Glycine max
  Clone ID: PAT_MRT3847_112600C.1
tgttgacaaaaatctagcataatttaccaattgatacattgtcacaacacaataggctaactgtgcatagctcaaaatttgaaaaacctcgtgctcatactaagtaccgatttaaatgttcatattagactgcgtgctctttcctcaatacatagatctcaatcacgaggtgtccaaatgttaactaaaatatcaccttacgataatttccaatgactttagtgttaattgaaaaatagactcgatgcttacttagaaggcacctttgcaactgatggggagctttcaatttgtgagaatcactcggcagaaatcattggatcactgcgcccatctgggttgaacaaatccactgtctaattcatttatttaagtatgtgcctcttaggccttccctttacccacatactatttacatgacaactttggcccatggcatgattatcatgagaaacccgagctgatacaagacccttgggaccaatcaaggtgccataaaagccggcaaattctcaataaactttggggcaggctgagaaagacctcttcctaacttatctggattatcagccctaacagttt

SEQ ID NO: 13946 - DNA, 109 bp, Glycine max
  unsure (1)..(109): unsure at all n locations
  Clone ID: PAT_MRT3847_112601C.1
atggctgcaggccatgtccttggtggctgctatgttacatggttgacatagctggtgttacgagngctataacacccggaganctattcacgtgaagaagaccgcnnat

SEQ ID NO: 13947 - DNA, 1457 bp, Glycine max
  Clone ID: PAT_MRT3847_112602C.1
cccaacgtgagatattttttaacgaaaagcaataagcaaggccacccgaaccagtgaaccctaaacgccgtcgacgccgtggctggaagaatatggcttcatttgtttctacccactgtatccttcctagcggggttggatttgtgcatgaccaagatcgttcttgtggtagaactaacactttgcatcttcaaaatgctcctaaaagccctagctctctctcctttttgctctccgtgcgagaaagtagatcagatgccgttgttgttcagagcaagggtcgatcgtctttttctcaaacagctgctgtgaggcatcttacaggttctgttaccagagcccatggacttcgttttgctgtggttgttgctagatttaatgaaattgttaccaaaccgctcttggaaggtgctttgggtactttcaataattattcagttcaagatgaggatatcgatgttgtgtgggtacctggtagttttgaaattggtgttgttgcagaaaggcttggaaaatcaggcaaatatgatgcaatcgtatgcataggagctgtggtacgaggagatacaacccactatgatgcagttgctaattcagcagcatcaggagttctttcagccagtctaaactcaggtgttccatgcatatttggtgtcctaacatgtgatgatatggatcaggctctaaatagagctggtggaaagtctgggaataagggtgctgaggctgcattgactgctattgagatggcatctttgttcgagcaccatctgaagtagtcagtgttttaaccaatctcatagagcttttgttggaacggcatgaattcccaattttcatctccagactgcttttggttgtagttcgaaatatattcttgtatgttctcaaactattaaggctatgtttgaatatttaatggtgagtggaatagaatggagtggatggtggcagaattgaatggaataaattaaaaataaaaagtttcgttctatttagatattttatgatggtacagaataaatttccattctattacttcattgtataatgataattttattattcttatctccagatacaaacaaatcatgctcgagtattcagctgctgtctgttttcttgaaaataaaatatgcatgcaacattgttatgacaacttgtttatagaatctagaatcaagcctcttgaaatgttggaattattttaatatttaatgaaagatctttttaaaccagtaacgcaatacctgtgtaagttaactttaacattgctcttcacttaataaaatactgaaacttaatgtttcctctaagcttatcagtataagagagctcctgattttttttttccttttggtttttgattggggacatttattgctattgtcaggatttggtattcactctttttgtttttcatttaattccatcaacttggtaaataaagctttttg

SEQ ID NO: 13948 - DNA, 244 bp, Glycine max
  Clone ID: PAT_MRT3847_112603C.1
ttgccgaagcgctccatttcttcccgcagaaggttggaactctatgggatgaagcccgcctgacagatcaaagggctgttctaatgagctatcacgcaaatacggtgaaaaaggcagcaggagacttgtctctgaggatggtgtagagatgacatcgatcccgggtaccagtggggaagaggctgacagcaagctaatagctgtacttgatacaagtgctcctacatagcttggcattgaatgt

SEQ ID NO: 13949 - DNA, 662 bp, Glycine max
  unsure (1)..(662): unsure at all n locations
  Clone ID: PAT_MRT3847_112604C.1
tatgaaacgtcgcatggcacgncnngtacgtaagnncttggatccctctaagaacgnngccgcccnnttttttttnntttttttttnnttttttttnnttttttttttttttttntttttttntttttttttttttttttttttttttttttttttttttttttttttttttttttttttttttttttttttttttgggaaaaaggggggggccccaaaaattttatttggggaaaaaaaaaaacggggtaaaaataaaaaaagggggggcctaaaaaaaaaaaagggccccaaaaaactttattggccaaaaataaggggcccaaaaaagggaaaaaaaaaaggccccatgggcccaccccacttaatggggatggggaaaaaagggaaccccccctaaaaaaggaatttgggttggaaaaggccccaccccggaagggccaaaaaaaaagggttttgacacccgcaaaaaaacggaacggggcaaaaagggggggcccaaaaaaaaaaggggtcaggggcggggtgggaatgtaccccccaggaaaaacccttggaagggggggggggaaccaaacaaccccccttaaacctggaagggggccactgggaaaaaaaaaaaaaaaggggtggggggcccaaattgccccccaagaattggt

SEQ ID NO: 13950 - DNA, 314 bp, Glycine max
  Clone ID: PAT_MRT3847_112605C.1
agaccaccctggtgcagtacccataacctcctccccagggggaggatttaaggctttttgcggctggggttccaataatcctggtgggaccaaagttggaccttcaggaagataagcaatttttatatagaccaccctgttgcattaccaatacttccacacacggggaagaatttagaaaactcgattggggctcctgcgtacatagagtgtggttcaaaaacacagcggaatgtgtaagctgtctttgacgctgtcatcaaagagggtcttctaccaccaaagcgcaagagaaagaagagaaaagcacacaa

SEQ ID NO: 13951 - DNA, 399 bp, Glycine max
  Clone ID: PAT_MRT3847_112606C.1
gcgagctcatacctagttgatcatgcggaggatatgacgaacgttgcatacttcgctactgcagcagctatggtagcctggccatgccatggcgcacggtaccaaacggttccttctacaatgaaaaccggctattgtgcagccacttctgaagggaaaaacgcacgttttacgctcgctgtggcacacacaacatgccagccttttaaaccattcctgaagagggcgttgaaccaacacatgactacattaatgcgcgaacaacctaaaccagactctgaaacagctaaccaacaagctgtcttttatgctggtgaacagcctattcatcgcaacgacgtctttatattctgcgtagattacaccgcactctctaatatgccatactatgaaagacat

SEQ ID NO: 13952 - DNA, 663 bp, Glycine max
  Clone ID: PAT_MRT3847_112607C.1
aaaagaagattttaacagtattttcaaattaaacatctttatacaataagttacacaatcacaaaacccactatttgtttggcttctcctattttcttgtgccaaccatacacaaaagctcgggaggtggggattgatcctcttactcacgaaccttttaacaaacaagtctcatccaaagatagttcatcctctgaagagaatttgccacaagctgacaacactcatcaggttaaggaaagtgatagggttctcaactcaaaagaaaattctagctcatcagcagctgaaaattcttctggtgaagaatcccttttagtggaaagcgatgtgtctctaatgaacaccatgtggctggatgaaactcctctaatggacacattatgggacaatacacctaaactagagaatgcaaatagtaacatgggcttgccaatatgggaggataattgtgcttggttgttggactgccaggactttggtattcatgattttggtttcaattgtttcagcgagatcgaatcaaatgtactgcaatctataggcatggacagaaaagggctttaggatgcagtacatctggtaattaaagttagccgtccttaagaaacagagcatgcaatcaaacatgtgtatatgtgacaaaatgggaaaaatcctctc

SEQ ID NO: 13953 - DNA, 239 bp, Glycine max
  Clone ID: PAT_MRT3847_112608C.1
ggtggcccctttctctgtctcttctccctctgctcctgagtttaagactacgcagctttcatacacttcaatccctttttatgtgggcagctttcgcggcttcagagtgccacgacttcgttatccaagacgaagtcgcgtttctcttttcgggtttcggaatcaatcagtgtcgtgtttttagatactaggagctgcgttagcgacccttctcatagacttggtgatggtgtagcaag

SEQ ID NO: 13954 - DNA, 335 bp, Glycine max
  Clone ID: PAT_MRT3847_112609C.1
cgcctcccttcggatggtcgacgacgacggatagtggttacgagagattattattataacgtgattcgggaatgttgctgcaatagagcgggagacagaattcatagaacctcgcaaacaatgggctctgacaagtaacaccggatcgggattagtgatatccagaactgacccgattctggattccctttccgacacatcaaatgacgctactctgttctacgaacttcaacgaacatagtccgagctgctcctccaggcagagatacactacgtgccatttcaaactgtgtggatggcctctaacccatcatccaaacccgacttgacccgac

SEQ ID NO: 13955 - DNA, 129 bp, Glycine max
  Clone ID: PAT_MRT3847_11260C.1
tctgatcgagcgattattcatgtgattaagacctatctaggcatcatgcttttataggtattcaaatcatgctgcaatggggatgatgtaagctaccacataatcaagatatagaaatcacttatataa

SEQ ID NO: 13956 - DNA, 575 bp, Glycine max
  Clone ID: PAT_MRT3847_112610C.1
aaaccaaaagggggggcgggcatatcaaatcattataggagaaataaaccaaagcgggggcttttcaaacccccccgggggggggaacaaacccccttggccggaaccagcccccaaacatgaccgggtgggcccaaagcaattcataaaaaaaaaaaaaaattggggccttgccctagggcagggaaaacaacaaaaccctctggggcatctggtattccccaacccctcttcttaatggaaaccaaacctgcccaaagttttggaattgaccaacctcccaaagaaaccaacggggggaaaaagcatgcccccacaacaaaacccaaccagccccaaggcatccagggcatttccttcactggaatccgcccggaaaagggccaaaaagggaccccatttgttcccaaatccccttccacagggaaaacaaccaacgggggggaacatcttccccctcttttcagctcagaacccacaacaaaaccccccccttttttatattggtttttaagaggggagaaaagaattacccgaaaagaaaaaagaaccgaaaaaaatgcccaaataaaaag

SEQ ID NO: 13957 - DNA, 460 bp, Glycine max
  Clone ID: PAT_MRT3847_112611C.1
aagacccaccggcccggaaaccgagacgacccacgcgcgcgttgaccgtgggaccacgcgagggaaaaaacggagaccgggaaacaaaggagacacaccgcgagagacaaccgcaacaaaagcggaaaccggaaaaagccgccacaacgaaacgagccaaggcaacaacaacacccacaaaccgaccaacagaggcgcaagaccacaaggcaaaccacaccacaacagcaaggcacggcgagacgcggccaacgagagagcgaacgagaaaccccccaagaacgggcaaccgagcggaccgcaaccggacaccgaaaccgactgcacgcccgaagaggacgggcaaacagaccccgacacggccaagcccccgcaacaaacagaacgagcaccaaggaaacaaccagaccaagacacagggaagaccagcaaaggccgcaacaaccaaccaaaggggaaa

SEQ ID NO: 13958 - DNA, 176 bp, Glycine max
  Clone ID: PAT_MRT3847_112612C.1
tctcgagccgattcggctcgagatcataatcagtcatgtccaacaatataaggtctctgaattactcttccctaacccgttccaacatggcaacaacaggctcagaaccttggtccttttttctcatcttcgtcttgcctgggactgtttctgtctttcaaacataaagaaacaaa

SEQ ID NO: 13959 - DNA, 952 bp, Glycine max
  unsure (1)..(952): unsure at all n locations
  Clone ID: PAT_MRT3847_112613C.1
attagaaccagatgtccattaatattgtacagagaaagaaacaaattaaatagcattacctaggtaactaattatatatccttaattaccaagaaaaaaagacaagtaagatacttttcgaactaattaagcattgataatttgcatttgcataaaaaaaaaaaaaacacggcacgtttgcattttctcttgtcctctttttcttcattcttttttttttttcttttaattttctcctacttgaatgagtatcatgaaagttacgactacatgatgatcataaaatagtggaaaggcaaagttggtgatcgaggggaggagggaatagccagtaataagataaagggaagaggaggattgcagtaaataaaacaaaatgaaaatgaaaattctgtttgtttggtttttcgtttggcgtttgtttgttgatcaagatcgtgggtgagggaagaattgcgtaccgctaccaggcatgaaggagttaagaggagccggatacaaggaagaaggatcaactccgagtggctccgaaacaatggcaccagtggttaggttcaaggcaccaacaccggtggaagagctttccccagcagcagcaacagcatccatgtaattagtgttcataccttctggaccatagtcatataaaattcctttgaacacatgtcctgcaatgttcacagccgttgagtatgcgtactcctcctccgcctcctcgtccatggaactcacacgtacgcatctgaactccgcagcagacctcaccacagccgggcaattcacctcctctaacccttttttcatataaaataataataattaagnnntagaaaaaagaaaatagaaacgagttagaattaggtaaatagatgatagatgnngatgatgtatgtttnngagttgtgagagttaataaaagaaaggaaanngaatctangnnnagatactgaga

SEQ ID NO: 13960 - DNA, 167 bp, Glycine max
  unsure (1)..(167): unsure at all n locations
  Clone ID: PAT_MRT3847_112614C.1
gcaggtaccggtccggattattcccggtcgggatgcnnaaaaaaagactaatttttgaatagccattaagaagcaagattactaccagaatctatgcctgttatttttgagcacaaaaccttctttctttatgaaaaaaggcaacgaaaacttataaggaaatcttt

SEQ ID NO: 13961 - DNA, 225 bp, Glycine max
  Clone ID: PAT_MRT3847_112615C.1
gtagaggtaaatacaccattaatttaaaaaactcactgttaatactgcctaattcttgttgctcttttcatgcacggatgttgataaactgataatagacaacttaggagaagatactctcttatcggatggagacatcctatcactgctcataatattgtctttcgactttaatccaccttggattgatattgctgccgtccctgctctctaattgggttccaa

SEQ ID NO: 13962 - DNA, 272 bp, Glycine max
  Clone ID: PAT_MRT3847_112616C.1
acgccttttcgggcgcctggtagtacacgggtttcatatgtctgctctaacactagctcttgtactggggccggcagctcagaaattcacaccagctcgctgcaagattgcgatacaaggaaggtctgctgcgcacaaaagcaacccccatgcccagtgatccgactacatgttgagagacgttgatcttggaatatagtaagcccaccacctatcagtgggagatcacacgggttacttgatggactgacaccccaatgcaggatctgcaa

SEQ ID NO: 13963 - DNA, 271 bp, Glycine max
  Clone ID: PAT_MRT3847_112617C.1
gttcgctacggagtaaatacacaaatggaaggtaagaaagaatcgtcttttaacttcgtcctttgtctcgtgtttatcggtactatattggacagcatgcattctgacaatattggcagcaacatttatggatagatggtaaactatcaccatagccatagatatgacagtctacgaaacgtacaaaggcgccactcgataggatccagtgcttacgtaagcgtgcatgctacgtgataatgacttctaaagtgtgacgatctcatcaatt

SEQ ID NO: 13964 - DNA, 260 bp, Glycine max
  Clone ID: PAT_MRT3847_112618C.1
ggcttgaagtccctcgccgcgtagtctgctcgtctttcggctcgggtgtccgtgttgggggcttggtgcgtgtttgtcccttgggtgcgtgcctggtgcttgtgtgcttggtgtctggttgtcccccgtgctctttttgtgtgcttgtggtctcgttcctggtctctcgggttcgcgtttttttttttccttcctcattccttggggggcggtctgtttgttttctccggcgtccgtgtggccgctgttgctttttgttt

SEQ ID NO: 13965 - DNA, 436 bp, Glycine max
  unsure (1)..(436): unsure at all n locations
  Clone ID: PAT_MRT3847_112619C.1
acgagggattgcagaatcttagcatatcaggtcaatggaaagtagtcctcaaaccctaacaaccaaatacacttgattttcttgctttggtatcttttgccacccccaaaaaagatagcattcacaatgatgaatcctctccaccccaaggatcgttgtgctggtctttgggcagggttagtgtgccgagcactcgctccccgacctgaatgaagaccttctggccttggatgagcccctgatgcggatgcataaagaaactgaaagacaaagaaggcaagagatgggaaaactctgcgccacccttagatcgcttctgcctttagaatatattaagggaaaacgctcaacctctgattatgtgaatgaggctatgaattatatcaaccacctacaaaataaggtgaagcaattgcnagcaaagagggatgagtta

SEQ ID NO: 13966 - DNA, 508 bp, Glycine max
  Clone ID: PAT_MRT3847_11261C.1
gtgtttttgtggcaactttcttgactctcataccaagtttgatgccatacctagggatcatattttgtaccttgtgtatttattgttcaattggtgtacagatttttggtggaatcgttaatgctggaaaccccgaattggaattaacagctcttgctgaaaatgagtatcttttgataatctataaaattgtctcctttaagcctttcatggttggtttgatccagtaatagttactccctctggtctctattataagcaacaaaagtcacttattttttggtctcaaatataagcaaaagttaactaactttgccttattttatgagactatcttcaaaatgtccttcattcaatagggccaaagactttttaatgcttgatattaagttccaatgaatggcagtttaggggaaaaaaagcttatttttgttgtgggattaacagaatttaatgaaattaactaatttattgataagtgtgaaatcattttttttttttttgctat

SEQ ID NO: 13967 - DNA, 465 bp, Glycine max
  Clone ID: PAT_MRT3847_112620C.1
aagggggggaaaccccccccaagccacaattaaagtttcaggggaaccccccaaaaacaaaggggaaaggccccggacccaaccaaaaaaaaaaaaagtttttgccttggggggaaaatgggaaaatcgggccctcccaatggggcaaccggaagggaaaaactaaaaccccacttaggccaaaggcaacccccccaaaatttttggaaaggggaaaaccttacaaacagctcccaaagggggaaaaaaaggccctaaaaaaacaaaaaaaattttttgggcaggggcggaaggggaaacccaacagttggggcaaaaacccccaaaaaccgggtaaacggggggaaaaaaagggccccgatttctttaaaaaagggccttaaaagcccccctatttgcccaaaaaaccccccaacctttgaaaagggaccctggaccaaagggcccccccccaaaatggggggg

SEQ ID NO: 13968 - DNA, 313 bp, Glycine max
  unsure (1)..(313): unsure at all n locations
  Clone ID: PAT_MRT3847_112621C.1
ttcgcatgcacgcgtacgtagntcggaattcggctcgaggtacttcttncaancaaaccnccacccgncnccnntgcncacngngccttaatccncccncngccngccangganangttgangcaagttcttcngtcnntgcgcgcatntacnctacgacnnccangcaaaaactaagcttgaagtcactntaattccacgantnannggngaaatnagctgnggatttagnnatanaccnatgtnattctgaacgtgaatgatgccacnntgtataaggatggctntanggtcganaaaanaannncaaaag

SEQ ID NO: 13969 - DNA, 464 bp, Glycine max
  Clone ID: PAT_MRT3847_112622C.1
cggtccggttttccctggttcgcccactcgtccgatttttgtttttttttatagtggggaaggatgtctggttgctaaagaattgcttatttctcatagaactatgctcaatatgtctgcttctcttacaatagatggaagatcatcttctgtctggacgatcctccgtcctttgtaagtctactctgatgtacttctccctacattaaatgtacagtctctttacttcatagcatttggaaatatggctgatgacaccattaatctttgaggcttttccccacatgctggtgcagttcggagagattcaggaaaaagtttgtatttgaaattttcacaagaggaaattcttacagcttggtcaactcatgagcgccctgcaacatctattgtaggctgatgggtgtccatatttcgtatgctttggtgcatgatagctcaacgtctacaatcccaggtgattt

SEQ ID NO: 13970 - DNA, 303 bp, Glycine max
  Clone ID: PAT_MRT3847_112623C.1
gcgcgagttggtgtctagatctacatatctagaagcagtgtcaggaaactgaaagtactggctctgtctgttgctcaatgctgtagcatggcaatgccatgcgttactatatatgcgctctccattgaacactgctatactgccagataggccttgaaatgctcaagttgtgcgcttgatgcgtacgaacacaatatcttggggtacgataccatagctgaataatgcattgaagcaactccggagtacattgatgccgaacaatgtctatcagactacggaacacctaagcaacacgcttac

SEQ ID NO: 13971 - DNA, 337 bp, Glycine max
  Clone ID: PAT_MRT3847_112624C.1
attggatcctctttgaacactattattttttaattgattatcttttttgacacccggaaaagggggattaagaaacccccaaaaaaaaaggataacaattcattagggggaaaaccctgggacagaaatatcaagccataggggaaaatttagcgggggaagcaaacccccccagggcggggataagcaggcaacaggctcacttcaagaaaaaaggacggagggagcggaaaaaggatcagcactcccaaaaagaacgggaatgggtacttgctgggctgctttgccataggaagaacctcttttgaagggaacctgaaaagcataatcaagagca

SEQ ID NO: 13972 - DNA, 323 bp, Glycine max
  Clone ID: PAT_MRT3847_112625C.1
gttttccatacatttgtagttaaatcccaaggacctgatcagctgacaaaggataagttgattgcgttgttttccaaagaatccagcaccataaagacattatgatatggagaattgcaattaacacagcccttaagcatgatacatatagaagagccaaatatctatttcatcttcagaaattttgttataccatagagaatctaaaagtaaagtagtgggcatttagagacgtagaataatagcttctattaaccctctagggcagccagtttatgtttgtctataatatacacagtttatcataagaagtattattcctg

SEQ ID NO: 13973 - DNA, 450 bp, Glycine max
  unsure (1)..(450): unsure at all n locations
  Clone ID: PAT_MRT3847_112626C.1
aagggaagttgctgattagnatancgaggcggaangttcgccggcgtcgacctagcaatctagtctggaggcctgttcttcataatcaatagttccattgacaatgnttcaaccgacagatagcctattgtgaggtgtggggacacactgatgactaccattgaagtcttgggcactagcaatgtagcagtctgcacaggaggtgcattgaaaacaccaacaagggacttttatgtggggctgctaccgggggcatataagatacaaagacagattccttatagactccacgatcgttgtaatgaaaattgttgacagcccatgatcattactatgcgggagcttttgcgtcttaatgagatatcagggctgccgctgaccaggcttatctctgataccgcctttttttggatatgacagagggaggggcttataacattttccaaagca

SEQ ID NO: 13974 - DNA, 447 bp, Glycine max
  Clone ID: PAT_MRT3847_112627C.1
cgggtgccttggaagaggactcagtctgctgtgtggaggaggaggaagaggaggaggaggaagcagtggtgacagaagacagggatgcagccttgggaggccccagggagcatgccctggactgggactctggcttctcggaggtgtcaggcagcacatggcgagaggaagaactgcctgtatcccagcgcccagcaccctcagcacagccccttcgtaggcagtgcctctcagtcagtggcctccccatgcccagcagggcccctgtagccagtgtaccacctgtccaccatccacggcccaagtccaccccagacgcctgcctggagcactggcagggactggaagcagaggactggacagcagccctactgaacaggggtcgcagtcgccagcccctggtactaggggacaattgctttgctgacttggtgcacaactggatgg

SEQ ID NO: 13975 - DNA, 227 bp, Glycine max
  Clone ID: PAT_MRT3847_112628C.1
gagagatagtactccaactccaagtcacattggtgacaaattaaacaggaaagaagagatggcaggaaagaaaatccaatgtgttgctgaattcagacacaaaatgccagtttaggcatgggaacttatggagaatctcataatgagaccttgtttatctatgttgaaccatgagtgggttaccgcttttgacctgtgcaggttgaacaagaagccataggcctagc

SEQ ID NO: 13976 - DNA, 204 bp, Glycine max
  unsure (1)..(204): unsure at all n locations
  Clone ID: PAT_MRT3847_112629C.1
aaagcaatatattgctattgggtttaatacacaatagcatgcgagggaattcttacaaaggcgagactaatcagctattctatcgctaataaaattgaaattaagaaacaaaaatagcttcctagangcaaaatttacaacttgggttctccactaaattcaacagaaaaataaccctaggaaaacacttcaccatatatattt

SEQ ID NO: 13977 - DNA, 737 bp, Glycine max
  Clone ID: PAT_MRT3847_11262C.1
cacacatatatacaagcttctactactactactactactactcttctccctcaaagcttaattaaacttgaacaaacagatctatctaagagcctgtacctgtgaacaggtcacttctccactatctctctctctcactcactcactttttccactttgatgtttttgttaggttgttccatgattctctcaccccaccattttttagcttgccacaaatctctcggcttcaaatttaaatgccaaactagaaataattctggatagatgactactggtgctgagagataccctgatttcttcaaagtcttccttcccgagcggcactctgaaagaatgcttataccaaatgcttttgtgaggttgccacagtcacaaggaaggatccctgaggatgtaatcctcagaaatataagtgggagagtgtggcaggtcaaaacacgctatatcggagagaaactatattttgatgatggatggaatgctttccacgaagaaaactgcttaggacatgcagactttcttgtcttcaagcatgaccgaagtaatgagttcaaggtactcatccttgaatcataacacagtgtcaaaaacctgtggtaaagaatggaggaagagaatgaacaagaagcagcagcagcgcaacatgctgaggactgtgatatagagggaggaggaagacagttcttccaagatgagaactatgatgacgacagcgatgacagtgattttgatga

SEQ ID NO: 13978 - DNA, 539 bp, Glycine max
  Clone ID: PAT_MRT3847_112630C.1
gcattgagatctccttgttgggtgccaagatgcccattgatgatgagtattgaagtttccttctagaatagctcccccaacatggaaaattgtgtgtgtcacaattggattggtactacatgcactcagactaagagggaccaaggtccatacaccttaattagccctggctcgggggcaggggaaaaaaaagttatttgccccattagagggactccggtggcactagggggaatctcgcctatgaccaattgaccacccttgtagaacaggtagatatttattttctcaaatggtcgcgatcctgccaggataggacccgatacctgtgagtgggacctcttgctgagaaccaacacttcaaatcctccataactgaagagggataatattcccaccccttgcatagatcacagaagctgcatataccttgtgcacgtggatctagaattctataacatcccattgaccataacctgcaggcctgaccccagctgtgcaagatcagtgcacagatgcctgattgtccaagcttaccg

SEQ ID NO: 13979 - DNA, 529 bp, Glycine max
  Clone ID: PAT_MRT3847_112631C.1
ttgatcggtttgtgactcctccttctcctcgtgtgcagtgaccaggagagggttaattatgaacgacttaatgatctcgctctggatttctatgcgaggacatccagcattggtgcagagggtgtaagacgtgcatgtgctagccttattgaagcatgtgagaggaaagataagaatggttgctccctggctttatactggaccaagaacaggttttcttatttgagaggcagatttgaaacccttgtgaagatggagaggaatattatctatcttgagaatatgctgtgaaaagaatggatcattatgatatctacagatgaagcatatctggttgaaatttctgatgacttgccttggggtagtgaacaatcaacttagttggatatattctctgaaaaatactgggaaaccagattgcactgcacagccgattggaacacattttgcagatgtagttttagtttttctgactactacttctatatctacagtcatattccgaaagttgacttctgtaagcttggtt

SEQ ID NO: 13980 - DNA, 432 bp, Glycine max
  Clone ID: PAT_MRT3847_112632C.1
atctgttttaatctgaggactgtaatgcatgttggctttatttttattagtcatgtcatgtgcttttatttgtctgcttaatatatgttgactaactttgacaaattttgactgtgttcgtatatcttacacgctatatgattgctgattttaccagggtagtgatagttcgccggatgatctcgcgcaccattctgtctgttcttgttgaacgttatgtcaggtcatttcaaaattctctctcttttgtaaattgtgactttggttatgttgattgagttaacctgcactgaaataaagctgttgataattgaatatctttcatccataaccaaaatggagacatttatcattgggagttatctatcgggttggatatttgcatctctgcgatattatattgcacgagtcaagaacacttgagatgaacaa

SEQ ID NO: 13981 - DNA, 131 bp, Glycine max
  Clone ID: PAT_MRT3847_112633C.1
ctcatctgttcgatactatagtttataccaaggattcttcctaagaatatgcctaagaggaggtcacagatgtgaacgaagattggaatgctattgagaacgctctcagagaccttttcacaggcggtggg

SEQ ID NO: 13982 - DNA, 421 bp, Glycine max
  Clone ID: PAT_MRT3847_112634C.1
cgatctcgagtcgaatcggctcgaggatagaggataggtgaacgtaatgcaaggcgcagtaactgcagctatggttgtgtgcctcttcttgaccgtgggtttgaacactctcataaaagcaaacatgtctaaaggaatgagcaatttcgttttcgttgcgtattcaaaccttctcgcgttcgtttttctgctactagcaaccacaatccgccacaggttcgttgcctcagatccaaagttccaaaccactcttaggaacatgtctgttttcaaacataacatggctctttgatgcgatttacaagaaccagggctcctacaccaatacttatttcaatttgcttaaaatcttttgttataacctgggtaaggtttagggaattgcccaaaaaattaaaaatggtgggtttttccttccgat

SEQ ID NO: 13983 - DNA, 1013 bp, Glycine max
  Clone ID: PAT_MRT3847_112635C.1
cccaagctgaggaagaaagaacctttcttcgctatagtcagataccgagccgtcacctccattcattcatgccttcatgggggacactggcatggaatgctctttatgactcgctcttggaacgttgctgttgattcttgattgttttctatctcaactttacgtctgaagtgtcttttgagcaaggtgatgggtctggaaaagaatcctcttgtgtttttcgatgtctcaattgatggggaccctgtggaaagaattgttattcagctttttgccagtatagttcctaggacagcagagaattttcgggcactctgtacaggtgagaagggcattggagaattgacggggaaacctttgcattataaaggaacaagctttcatcgtataattagaggttttatggctcaaggtggtgatttttcaaggggtaatggcacaggtggagaaagtatatatggagggaaatttgtagatgaaaatttcaaactaacacatgatggacctggtgttctttctatggctaatagcggtcctaacacaaatgtatctcagtttctatggataatagtggtcctaacacaaatggatctcagttctttattacattcaagcgccaacctcatcttgacgggaaacatgttgtttttggaaaagttgtcaacggaatagacattttgaagaaaattgagcaggtgggaacatctgatgggaaacctacccagccagttaaaattattgattgtggtgaagtctctgaaacaaaaattcagcatactgcagagaaggagaaaggaaaaaggagaaaatctgggaagtccttatcttctgatgatggttctgacaaaaaatcaaggggaaaaaggaaaaaatcttccaaagacacaaggaagagaaggaggagatactcaacatctgatagtgatagctattcctcagattctgagtcagattcagattctgaatcggattcatcagtttctgattctagttcctctagtgatgggaaacac

SEQ ID NO: 13984 - DNA, 746 bp, Glycine max
  Clone ID: PAT_MRT3847_112636C.1
gagacaacaaaattcgacgttatctcatatatgatattgggcttttttctccttacggctgcgagaagacgacagaagggggtgaaagaaaatctaacacttttccaaagggacaaaggaacaacataacgttaacaataacatggtttggttttcttccattcctcacatttgagactttcatgctctctcttggtgtctggatttccttgccaaagtttgaacctttttccttagaatttgacacccagataagattttcttcattaccaaattctgggtctttctctctctttctacaaccctttttgtgataaaaccaaagggaaatttccttcactttcaaatctgagttgggttgtccttgtctcctctctgagttgggatttgtgtcagcagaaacaaatcctgatttggagagaagggtggtggtgcatttgtattgaaagtgttgagattctctgaatccaagccaatttgacaagaggagaacccagttgatttttcagtaattcaactttgaggttttgagcttgttttcttatagcttctaccactgttgtttatcttggttatgttgttcttttatcaatctgagtgttgtatcttttacattatttccttctgttatgttcataggcttgtgtgaagctctttcctactaaattgtcttttttaatggaggagggctttgtgtttgtgtttgtgattggattggttatcttgtgagagcaattgattcgttg

SEQ ID NO: 13985 - DNA, 498 bp, Glycine max
  Clone ID: PAT_MRT3847_112637C.1
caaaaagaagggcgggaggaaaaaaaccacccatcacaaggtggctggccaaaggaggaaagtaataaaaaaaaggtccaaccctaatttctccttggcctaaattcaaaatggacaaaaaatggcggaaccttaaaaaaaagcaaatggccttcaacattcggaaacttcatgcccaaaaaccctttttcccttaaaggaaaaaggagttactgtctgcccaatcataaaggcaaatcctttaagcaggacaaaaacttgccccaaaaaatggaatgggggggagaaaaaaaaaaggcttgtccaaggcaaaaccaatcagggggatttgaagttttaaaagggccctagccttgaaccaaatagggacctggggaaacaggattccacacccttaacttgatgacccacccttatgggaaaccccatttttgggcctttggggggatataatttcaaaaaaggagccacctggtggccctgccaaactactgggga

SEQ ID NO: 13986 - DNA, 608 bp, Glycine max
  unsure (1)..(608): unsure at all n locations
  Clone ID: PAT_MRT3847_112638C.1
gtcttttattcnggatgagctacaatgattcaggttggatcagttgccgtatttgtattgaggcacaaagaccttgtgggaggtggtaaaaaaaatttacagcacatagcccaagtaattgccctcaatatggttattgggctattatccactgggattgacaactggggacatttaggagggttggttggtggcgttgctgcatcatggtttattggaccggcatggaaacatgaatccacatcaagggatggaagaagacttttcattgacactgcaccaatgtataaactcttcaagattaaaagagtacctaagcaatggaaatagaaacatttcattatttatggaatggaactcataattaattcattgctcgttgtttataggtaaaatgattcactgctgtgagcttctcttaaaatacttagattgtggggttgtagtattactagtacctgacacgtctgaattattttgtatacttcaataaccttcacactgggacattgtatttgtaaattgtaattgtgtttggtatccttcattttccctcttaaaaaaaaaaaaaaaaaaaaaaaaaaaaagcggccgctctacaggatcca

SEQ ID NO: 13987 - DNA, 201 bp, Glycine max
  Clone ID: PAT_MRT3847_112639C.1
ccacgcgtgcgtcaacctccatacgcccaatcgatgttagctgcaaaccccacgttaaaaatcgaagctgtatgatcaccaccctaatgttagtgtggcgatgaatgctatgagcagctagagttcttgtctgttcatgttaatcagcttgtgggtgctgcatgcgtacttcgctttggcaaatgtggacatactacctag

SEQ ID NO: 13988 - DNA, 487 bp, Glycine max
  Clone ID: PAT_MRT3847_11263C.1
aattcggctcgagcggctccgagaagacgacagaagggcaccctcagaaagatcgaacctttttggttacacaaagacataaacaaaagcaaaccaacataccgaaatagtctaccccaaacgttaaagttttgaaaaaaataacaaaatgttggaactgggagtaaatgcaaaataatcgaacacagggacaaccacaaaaagatcgaacctttttggttgaacaaagtcataaattgcacagagaagggaaaccatgccgacaaaggtcaagagcacccaaaaataatcgaacgcaggaggtacccacatgaaaatacatacttgggcaacaaaagaatgccgagaaacacaaagctcacaaagctaaacacaaaggtcacaactttagtgatcgagaggaacataaatgtcatagccacagttatggagaggaatggaaagctctgaaccatggataggaatggacaggaacgaaaatgacaaa

SEQ ID NO: 13989 - DNA, 470 bp, Glycine max
  Clone ID: PAT_MRT3847_112640C.1
cttgagtttactttttcttaaatttttactttttttttgtcctggggggattaaaaatgcttgtgtgtttcaaggctgatttgctatataacacattaaacacagggataacaaaaagctgatttacttgggaaaaagaacgagggtgggagcgcgaccttgaggacccctaaacgggtggtgacaaacttgtccatcgaatggggccgccttttctggtgaccctcatgccatattttcataggaaacggctgctatctgtgaggaagatgaaacaggcgtggatccaactatattgctacggggtccatggagtccaaaccagtttaagaatttttaccaaatctagaggggttaaaacaacgaccctgatgttgcggactttacacccgttttgcgggggggggaactttattttgctggagcatttctttaggttaagctgcaattggttttgtggagcttgactc

SEQ ID NO: 13990 - DNA, 216 bp, Glycine max
  Clone ID: PAT_MRT3847_112641C.1
ttaacaaccaagggaccggttaccagatcctctattgcatgtgcagataaacggacggccaaggcctcccggttaatgcaaaggaatagtaccacccgtggccccctaaattggggcggcctaatatttaacggattttaaaggtggtttttctaatccaatggacttcaattattaatttaacacaatagtttggaggctggatatttttcaggg

SEQ ID NO: 13991 - DNA, 1326 bp, Glycine max
  Clone ID: PAT_MRT3847_112642C.1
agactcggaatgcggacgtagaagacgacagaagggggagagaaataggttagggaccaaagcaaagcaaagagagaaaaatagaagaaagagagatcaaatattcattttcataatggtgagagacatgatgggcacaacaacaacaacatcatcaggagggtgtggtgggggaggagacatgaatatgaatatgaatgagaagcctgcatggctagagaggttgatggctgagacattctttggtgcttgtggggtccaccaggatcgcaggaagaacgagaagaacgtcttttgcttgcactgttgccttagcatctgcccccactgcctctcttcccaccgctctcaccctctcctccaggtgcgaaggtatgtttaccacgacgtgattcgattagatgatctggaaaaactcattgattgttccaatattcagccctatactataaacagcgccaaagtaatattcttaaatcagaggccacaatcaaggacatgcaaaggtcctgccaactcttgcttcacctgtgacaggattcttcaggagccatttcatttctgttctctatcatgcaaggttgattacatggtgtacgcgggtcaaagcttgggcagcattttacatcgattcgatgaatctgattttgcaatttcccagttcgagggtctaagagtggatggctcagaggtaattgatgaagatacccaatttgcccctagttcctcctactccaacactgaggccactagcaattcggtaatttcatgcgaacctaataacaacgtgaagaagggcaaggccaacaggttccttcctgggatcgtcctctctcttggcagcagaagaaagggtgctcctcatagggcccctctctcctaaatatcattattattataattataataaaagcggtgaatttttaattaataatatattaatatgtataaagttatgaccaaaataaaaaatttgagttttaattataatttgtgatatatgtatggggaagaaaaaactatatatttgtaatatgtgcttttctttactagatttcctttaagggcgtggttagttttaagagcttttttatgaatgaaattatggtatttaaatcatgcatagttaggattttccattgacatctttggcggttgttgaaaccaccgattttgtattgggtgctaatggaaatttggcttatgcattgtttacgatatgtattgttgtataaatggaaaaatacaattcccccccttgtcttaaccaaaaaaaaaaaaaaaaaaaaaaaacggccgcggcctaggactcatgtgagctcctcg

SEQ ID NO: 13992 - DNA, 910 bp, Glycine max
  Clone ID: PAT_MRT3847_112643C.1
gttttcatgatcccaccgcaccctcaccaatctctaacattagggtacgcacagcgcggcggccaagccatctcaagccggagctgctcttcacccttcctcctactcggtacaacacaacaacatttgttgtggagtgaatgggtgcgacggaggccaacacgacacttcaagctcgtcccgaaacgacgtcggagaatatcgaagcattgcttgatgctgcaagatacgatgacatggatgatgttaagagcttagaagccagtggtgttcctcttgattccaaggatgaacaagggaggacagctcttcatatggctgcagctaatggacatattgatattgtggagtatttaatcagtagaggggtggatcttaattcaccaaatgaggaaaagaatacacctcttcattgggcatgtctcaatgggcatgtggaggctgtgaagaaattaatcatggctggagctaatgttagtgtcttaaacagtcacgagaggactccaatggatgaagcagtgagtgggggaaagccagaagtgatggatgcgattaatgaagcagtggcactagttgaacttcgtggtgctatggtttttgcacaggaaacttgaagtttatgctacactaactagcttgtaatatgagaaatctgtgatggttatacatgttttcctataatgggtattttgttagttcgaacaagatcatgagtgttttggtatcctcctccctcccaagtttccattatggaattcctcttcggaaaatggaattgaaggagttggaatgaagtggatagttttacttttgaagttaattagttattttttttcctggaaaatcaatgaaatgccatacactcgaatatgagaaattaacattttatttatccatttctttaatcctc

SEQ ID NO: 13993 - DNA, 445 bp, Glycine max
  Clone ID: PAT_MRT3847_112644C.1
tttctcgggctcttcggctttcctatggtcggagggcagttggtccgtggattcggccctgacgtgatgttgcttagcctattgagcgcgaccgctcttaatgcggtgctagcaacccgcctcggccaaagcacatctgatccgtctcattttaggaaggagctcacacatgctgaccgaggcgcaacaatcgaaatggaataaggatggataccttcgattggagaagttcttcgatccagccaagcgcgacaagatttctcgttacgttgaggaagttgcacgttgggatgtaagctccgacaagtggatgttgtggttcgagaagacgagtgacagcagaaaaattatttccaaggccgagaacttcttagactaccatgcccctctacgggacgcgctcctggccgatggccgcattcgtatagcggtcgagacactcttc

SEQ ID NO: 13994 - DNA, 1365 bp, Glycine max
  Clone ID: PAT_MRT3847_112645C.1
ctttcttttcttaagcccctcatgcatggtggcccgttcagtcccatcaatttttctctccttttttatcatcatccaaatgctgcctaaaccttaatgctttctcttccatcatggccttgattttcttgttatttccattcccctcggaacggtagttaacgagaagagaaaaacaatggatgaaactaaaattctcttagagttgaagtccgtttcgtccttatgtgttcatagcttcatcaaccttctatgcgaagaaactatttcttttctctcagtgttctcttcagatcctctgtttcattgcatcgtggcgttttgcaccttggttttcctctatttgccacaccttttcttgaaaataattctatctccagtgcccattctcactgcgattctccttctctctattctccgtctcggtgcaattcaaaggttacaacatgaaagaagggagaatcatgtgaaacacgaagaacaacccatcgtttacgaagaaaacaagggaagtaaatacaagggagagaaacagagtccatgtaccattgaacctgacgaaacaaagtccgtagaacaagtgcaccaatgggtccattcagaaacagaggtcatttccgacatgggttttgaatcaagttctcgttttgttgaatggaacgtgaaagcaccgttggaagtgatatatgaagagtatggtgaaggtgaagaagcaggggatgatgcaaacgagaacgtgggtattatgaggtacccttcgttgtcgcgtttttacccggaatcggattccgatagcgaatcggagagtgagtttccggcgatcggagattgggactcgccggaggaccttgagtttcgctggggtgaagaagaagaagaagatgatgggtatgatgatgatgaagaagaagaagacagagaagggttgattgagatagctctcgatggatgcaagaggaagaggaacttggaatttaactttgatgaagagaatttgattgagatcgatatttctccgtcgaggtacagagaactttccggcgacgacgaggtgttttccggtgagatcagctacaactaatgtgacattaattcgagattgacgtagtggattattgtgttttttgaggttggtgaaaagggaaaccagatgataggaatctgtgtttttattatttcttattgtaaaaaaatttagtgggattttggtgcttgcctgttttggacgtggttaccgttttattaaatttatgatgcatgtacaataatttactaaacccaaactctcaaaggtttctgtttcattgataatgtactattcttgtataaaaaaagagcactgcactccaatgtgttttggaattc

SEQ ID NO: 13995 - DNA, 151 bp, Glycine max
  Clone ID: PAT_MRT3847_112646C.1
ctacggctgcgagaagacgacagaaggggaaaagaggttgctctaattgggttcacagaagtcttgacctttatactttgctctaaaaaggaaaactttgccatgcttaaccgcaaacatcataaacctaaagcccctattattgtaaacc

SEQ ID NO: 13996 - DNA, 358 bp, Glycine max
  Clone ID: PAT_MRT3847_112647C.1
ggctcgagaactcgacgctttacccaccatccagaaaatgctaggtgctactgcgtggcacttgtctctgcggcatacgcaggccgtgccacttcccgacagctacatgagtcctctgacactgttcccaatttttcggaataactttcaacttatcaacgtttcgcacgtcttacacggactacgctcatgacctctgtattagggaagcttcattatcgctctcggcggctaacgctacctcaagctagctgaaattggccttaaatgtaacactagatacgttgttgcgaccctgcgaattcagcgatgatactgttagagctatgatcgacaatagtccacgggagcatgtggc

SEQ ID NO: 13997 - DNA, 278 bp, Glycine max
  unsure (1)..(278): unsure at all n locations
  Clone ID: PAT_MRT3847_112648C.1
atgaaagagaatccgaggcgaagagaagagaaaaattaagatggaggggaaggagcaggatgtgtcgctgggagngaanaagttcccngagagacagccgattgggacggcggcgcagagccaagaacacggcaannantancaggagccggcgccggcgccactggttgacccgacggatttacgtcatggtcttttacagagcagggatagcagagtttgtggccattttctgtttctatanatcactgtcttaaccgtcatgggagtcgcggggc

SEQ ID NO: 13998 - DNA, 471 bp, Glycine max
  Clone ID: PAT_MRT3847_112649C.1
cttttacgtccggatggtagccagattgatgccaggattctttgctgtatacactgaggttcactctcacatggtaacactgccgcttgatgtgtctatagctgctgaagaatctactataggtctcatgatggatcttactacttctgaacttaccattgcccttgccagaggcacaattgtgggtaccattctgcgggctgatctattggcaaatgtcttgccagagggcagtgttagagcacgcgttgctcagcagcgcactggtcggattaaagggatgatcacaatggcggccacagctggtactcctgtgatattcaggctgtgcattggtctgtgctatgagggggctcttcagggggcgcgccagctccgttagctacaccatctgctataaagactgcgctgcttgacacctgcttggactatggcaatgactatgtcattgagtccagacccgtgttctgt

SEQ ID NO: 13999 - DNA, 193 bp, Glycine max
  Clone ID: PAT_MRT3847_11264C.1
ccacgcgtccgatcagcatcttctgaactgcctcctgaaggtattgtctagtcgatgaaccttcaagatgcgtatggcatttctattaaccatatatttgacccaatcatatggttaatggagatgccatacgattgggtaaaatatataatttgggcgggcgctctaaaggatccaaacttaacatacacgg

SEQ ID NO: 14000 - DNA, 323 bp, Glycine max
  unsure (1)..(323): unsure at all n locations
  Clone ID: PAT_MRT3847_112650C.1
gggcaatagtgaccagccatggaccctttcaccaattttgaaggtggcagtgcttatggcgcagaagacgatgccacctcattttattcgaccgcgatctctcaggcgcctgtccccagtgggagtggcaatgggcatggcggtggacaccaaaatggccgcaacggagcgagggccgatactgcgacggtggcggctgcgttggaagacatgtcgttggcttctgcgacgggggctctggacgatgagaatgcangccagatccacgccgctgtccgcaatggatacgaggaggactttgaggatgtcgatggtctgttgaa

SEQ ID NO: 14001 - DNA, 463 bp, Glycine max
  Clone ID: PAT_MRT3847_112651C.1
gaagaaatttctctacaaatggaggatgtaacaagcaaacccatgccttctgtacaccaaggatatgaaaaggaatcagagtttgcagacaaaacttcttccattcaaagattagagactacttctccccctacaactgtcagcaaaatgttaccgaattctgctggtagtaatagggagtccaagtctgaaataattggaggcaagaagactcctaagttaaatggttctgttaaaaaggggaaggttcatgctaatcctccaaatggccttaaaactgaggtgacagccaatcgattacaggtgtcatctataaaacacaaaaaagtagaaggttcttccaatggacggtttgaagcagttcaggagaaacttaatgagttgctggatggagatggtggattagccaaaagaaaagatgccaccaaagggtacttgaagcttttgtttctcaatgtggcat

SEQ ID NO: 14002 - DNA, 448 bp, Glycine max
  Clone ID: PAT_MRT3847_112652C.1
caaaaaggcagaaaatattgatggaaaaacactcaaggggatctcttgctagggaagatagagaagcaaggatgcaagaaaaggaaaagaggaaaaaaattaaggaaaatagggtctccaaaaaggattcagcaaggaaccaaagtcaatcaaattcacacattacaaggccacaatatcaacctcaagaaacaaatgtacccattaatccagaaaagccagaatttccatctcgaaattcaggtttatctgccaacataaggaaagaaacatcctctattgtacataaaccagcagctgtaactggacaccatgttgattctaaaactttaggaagaacctcatttactgacaatatgcataatcagcaagcttggagcacaggtgactgtaggaatatttctgatattggtcacatgaggaggggagctgatcatagtgcatacta

SEQ ID NO: 14003 - DNA, 372 bp, Glycine max
  Clone ID: PAT_MRT3847_112653C.1
tgttacagcgaagcagacccgtgggcttaaaaccggttacataggccacagtgactcgacagaacactctctagattgctatcgactattcagggtccgatgaatgatggggcagaagacacatctgtggacagggcacagacttattgaataacacagtctttcactgttaggacaactgctgaacactatactataagacttaggacaacttgctaaatgaaaaccttacatgcatattcataagcagtacaaataataacgagaactagctggatggataaaagcttattactgccactctactatatggtatgaatcacgtaaccacgaacaaaatactagtttgctaactttgactcactatttgtg

SEQ ID NO: 14004 - DNA, 276 bp, Glycine max
  unsure (1)..(276): unsure at all n locations
  Clone ID: PAT_MRT3847_112654C.1
gggagtagagaaccaaagttccaattttttggtttggggatagatagagtgatacacattcacattttctcaangtnnnnnnnnnnnnnnnnnnnnnnnnnnnnnnnnnnnnnnnnnnnnnnnnctactcccacctaggattccgacgccaccaacgttacccgctgatctgctttgccttctctgcctcctcgcggcaccaacactaaaaccatttgctcttatcttgcctcaaccacttctcagtgtcccgaaaatcttctctgcttcaganca

SEQ ID NO: 14005 - DNA, 333 bp, Glycine max
  Clone ID: PAT_MRT3847_112655C.1
aactgtacacttaaaaaaacaaaatcacggtgggctgattaatgacaaccggaactagctaaaatgaaacaagggacaaaggcaaccctgtgattaaacataatgctacacagtgtgcgaacattaatcaaacaatatcgcgtgaaattccctatatatcaaatagccggaggtatgctggccataaccaaaaagaccagacaaaaccttgtatttaacaaactcccttaagagcaagcttatgctattctgttgagtacatgaacagaagaacatatacttgataaaaggactcactggtcgaaatcctacacgcagcaactagatacaaaa

SEQ ID NO: 14006 - DNA, 1245 bp, Glycine max
  Clone ID: PAT_MRT3847_112656C.1
tagattttcggctcgcattgaaatgcatgccaagacagactcggaggtaacaagcctggatgcgtcgtccagcacaaggtctcctcggcgagcagtgtactacgttcagagcccttcccacgatggggagaaaacgacgacgtcgttgcactccacccctgttctcagccccatgggttcccctcctcactctcactcctcctccagccgcttctccgcttcacgccaccgcaataaccataataataaatcttggaagggcatcgacgtcatcgaagaagagggtcttctccaatccgaattagatcgccaacattctctctctcgtcgatactatttcctcgccttcctcctcggcttcttccttctcttctctctcttctctctcatcctctggtgtgccagccgacccatgaagcccaaaatcctcatcaagagtataaaatttgaccatctcagagttcaagctggttccgattccagcggagtagccaccgacatgatcaccatgaattccaccgtcaaattcacttatcgcaacactggaacattctttggggtccatgtcacatccacacctttcgatctctcctattcagatattgtaattgctacgggaaatttgaagaagttctatcagtcaaggaagagtcagagattagtgagtgtggcggtgatggggaacaagatcccgttgtatggaggaggtgctagcttgagtagctcaaccggtgtgcccacgctgcctgttcctttgaatttgacctttgtcattcgatccagagcttacgtgcttgggagattggtgaagcccaagtactacaaaagggttcaatgttccatcaatttggatcccaagaagattaatgttccaatttccctcaagcattcttgcacctatgattgattgagtcgcaagtgaggaaaggaattaagaagcagcacatgggaaagaaaaatatttttttttactactattccttcatgattcgttggttttctatcttggctgaggaaagtaatgtgtatacagctcatagggcaggattggaaggacgcgtgcgtcctttgttttttttgcacatttttggctgcctcaatagtatgcacagacgtgatggatactgaagataattaaaggcatgttggattttttctttaaataattttgtcccatcatgtaaaaggaagaaataatgttattatgtagtacttaatcttcaatgttgttttcatttttcagat

SEQ ID NO: 14007 - DNA, 1301 bp, Glycine max
  Clone ID: PAT_MRT3847_112657C.1
cccacgcgtccgtagcaatgaaaagaaaaggagttgtgtaatctaggttttggttgattgcgggatggaagtggaggcagtgcaacaacagcgcaaaggagcgcacctgaagaagagggctctgaagaacaaagctttgggcatcactttcaacgagaaagatctcactgactacgtcaccggctttcacaagcgcaagaagaagagaagaaaggaagcccagaagcaacagaacgaggctctgcgccgcaaacgcaccgaggaacgcaaaaggaggaagttggaaagagaacatgttcttaatggaggcgtgccaccacctgatgaaattgatggggaccaagaagaaaccgaggagcaagttgaatctattgctgaaacaaagacatacgagaatgatgatctgaaagtcactgttgtaacaagtgagatcaaccctgaggacggtagttatcctagtgagaggaaggaggcagcagtgatccctccttctgttgtgtctgataaaaggcaaggggtacctataagtaataagaaatctttcaagaaggttgcaaaacagaggtctcggccaaggccatcaagtaagagagataagaagaaaggaaagaagcagggcaagaagtaatggaagctaagcatcttgcatcttcagaacattccaagtctacgatgaagtgtgtttttgtggaggtgctttttaagtgcagtaatttggcttcctagaagtgaaaactcatgctttcatattgcaggatttggacgtgtttcatctagttggttacctaactggttcctaatgtccatgacaggagtttcttcttcagggctattcctgactttccattttggggattcaagagttatggaagaaacacctaatttttctccttttcttttggttaatcggtaatctattgtgtattatacatttacttcattcacatattttaattattagtttttcatttcttttctctttttatagtatcaaatattaatttaaaagaaggctttcagtttcttttggggcgctatgattcgtttttacatggagagtcaaaatcagctttcttggagaagctaaatgagagagtttctacaaattaggttatacataagcttaatgagagaactaggacctaagccatggattcgtgttgtgcttaagatttactgggacataagtaacttctagacttgtagtgtgtttggataacttacaagaatcaattttatcccacacaatcatggcgatactatgaatgtaaaagtagaactaactatgtggtgcagtacct

SEQ ID NO: 14008 - DNA, 629 bp, Glycine max
  unsure (1)..(629): unsure at all n locations
  Clone ID: PAT_MRT3847_112658C.1
ctaggttttggttgattgcgggatggaagtggaggcagtgcaacaacagcgcaaaggagcgcacctgaagaagagggctctgaagaacaaagctttggcatcactttcaacgagaaagatctcactgactacgtcaccggctttcacaagcgcaagaagaagagaagaaaggaagcccagaagcaacagaacgaggctctgcgcctgtatacgcaccgaggaacgcaaaagggtactctccctttgctatcatattattagggtttctagaaatttggatttttattttattttgtttagttttgctatctgtttttattggacttattttgcagaggaagttggaaagagaacatgttcttaatggaggcgtgccaccacctgatgaaattgatggggaccaagaagaaaccgaggagcaagttgaatctattgctgaaacaaagacatacgagaatgatgatctgaaagtcactgttgtaacaagtgagatcaaccctgaggacggtagttatcctagtgagaggaaggaggcagcagtgatccctccttctggtgtgtctgataaagggcaggggtacctantagtaataagaaatctttcaagaaggttgcaaaacagaagtctc

SEQ ID NO: 14009 - DNA, 131 bp, Glycine max
  Clone ID: PAT_MRT3847_112659C.1
gccacgcatcctaaaacacaatctcatccagattttcttaaacacttccatcaccgtgattagtttcatactctattaccttcctttcacctgctacttttaccaacagatctctatattaaaacacacat

SEQ ID NO: 14010 - DNA, 782 bp, Glycine max
  unsure (1)..(782): unsure at all n locations
  Clone ID: PAT_MRT3847_11265C.1
ttttttttttttttttttttttttttttttttttttttttttttttttttttttttttttttttttttttttttttagaaacccgggggccaaccggggaaaccagccgggaaaccggggggggacccagggggcccaaaagggggcccaaaaaaaggggggaaaaaacaggggcaaaacagggcccaaagaaaaatatttgggaaaaaaaaatcccccccaaaaaaccacccaaaaacaaaaggggaaacccggggggggccaaaggggggggccaaaagagggaattgggggggctcaaagggcccggtccaaagggggaaaaccgggggaccaacccgaaaaaaaaaaggggaaaaaacacggggaaaggggggcgaaaaagggcccccagggggtgtccccaaggaaccattgacagcggcaaaagaaagggcctcatgaggggggggccccaaaaaaaggcccagaagggggcccccctgggggccccccccggggaaaccccccggaggaaagactcaacggggggaaaaacgggggggttacgggggggggactccccgcgaccgaggaactctccccggatccccccccaccccggaaaagggccctgatttgcccccccaaattgggaaaaaagggagaaaaaaaaaggtgaaaaaaaaactgggggccaaaaaaagaaaatgcacaagtgttttttgacaaaaggggggagaaaaaaaaaagcgaaaaaatacccaacccggaaaaacaccctttacangtttctcggggcc

SEQ ID NO: 14011 - DNA, 398 bp, Glycine max
  Clone ID: PAT_MRT3847_112660C.1
cccacgcgtccgcttttaatccttttagctgtgtcctcacacctttattttggcatgcttgaactgcgacacatttcatggtctttcctctcctaggggccttggggcagatatctaacattctcctcaagtcagaagcaacacatgacaaagatcaagatgacaacagtggatccataaatacaaaagtggaaaatagtcaactggaaggtttctatgtagacctatcaattaccaaggaagttattgtcgaaaactctatcagtgtctccattaggaagtgctctgagacagctaagaatattttatatttagaaacagatatacctggagatattctccttcactggggtgtttgtagggatgatttgaagtggtgggaaattccacctgttccc

SEQ ID NO: 14012 - DNA, 693 bp, Glycine max
  Clone ID: PAT_MRT3847_112661C.1
ttcttgcatagacttgggcttgctttgatgatgggtaggcttgtcgtgcttttgcccccctatctaatcaaggggctttcatcgaggctggaagaccaagatgtgaattacatgcttatcaaatcaaaaatggaatcattttcagggtttcagagataagatagtgaggctttgcctatacgaagaataggccttccctatagtactggggctactaggcaatcggacttttcccactaccgggacgactatttacttccttactaaaggacttaatgatccagggaggaagctagtctagagagaagcagaaaatcaaataaataaggtatagagcaccctacataccttgctcagagagaggcaaagacaagtgctgttgaggtaccggttcaaccaagtgcccaagcagcaacaataacttaaatacggcggaagacatctatttcacccgtgcccagaaaagaatcttacattaagtccaaagatccggggtagggatgattgacacgttgattttagtaccccttaaatgatagggtaggttcgtatgtttttgtgaaagctcggctcctgttattgctgatgtccagtcatccacatttgaattccttggaaaagaaggctaactgcttgttggctgggagcgagcgggaagtccattagttcgatgattcttcttcgcctttattt

SEQ ID NO: 14013 - DNA, 1756 bp, Glycine max
  unsure (1)..(1756): unsure at all n locations
  Clone ID: PAT_MRT3847_112662C.1
gcccgagggtgaagatgccttcatagacattgggcaagcattggcttctattaatctgcagcagttagcctcctagcccaggttacctgtgatcaggtctctagagcaagtgaatgtgaatggcagtttttatcatcttagtcattcaactagcggtgtatccattacactgaactgcggactggtattagggatggacttccaactgatttagccaaaccattatatgttggacaacgtgtaattgctcttcatccaaaaacaagagagattcatgatggtagtgtgcttaccgttgactatgacaagtgcaggattcagtttgaccgtcctgaattaggtgttgaatttgtaatggacattgattgcatgcctttgaatccatcagataatatgccagaagctctgaggaggcatattggttcccaaaaagcctctttcatgaataaagaaccacaaattaatggaaattcaaattttgggggctgcgaaatgcattcctttcccgtgaaggcaaaggttgctaccgttgataacctctgtgcacaagctggttgtgctcaaccatgtaaagtaacacaccatcaagctaaggaagctgacatacatgcagtttctgaattaaagcgtgctctagataaaaaggagacattgttgatggagcttcgaagtgcaaatagcgacatattggaaaaccaaaatggcatagaatgcttaaaagattctgaggttttcaagaagcattatgcgacggtttctgatgctatgctacaactgaggcaacgcaatacttacagaggaaactctctgccatcctggatgaagccacaagcaagtttcaatgttcatgatgatcttcccagtatgttggatagttctctgacacaagagttagggtcaactgttgttcaagttattaaaggatccaggctaagggcacatgcaatggtagatgctgcatttcaggcattgtctttggcaaaggaaggtgaagatgctttcataaagattgggcaagcattggattctataaatcatcagcagttagcctcccagtctaggttacccgtgatcaggtctcaagagcaagtgaacgcgaatggcagtttttatcatcttaatcattcaactagcggtgtatcagaacctatacttaatgatccatcgcttccaaaaccacataattgttctgacaaatttgatactgaacttccatcagatcttatcacttcgtgtgttgctacattaatcatgattcagacttgtactgaacggcaataccctccagctgatgtggctcagatattagattctgccgttaccagtctgcatccatgctgttctcaaaaccttcctatttatagagaaattcaaatgtgcatgggaagaatcaaaacgcagatgttagctctcatccctacttgacttacatcttttcttctgcagatctctctctaatgtagctgctgctgtacatatgatgctgaagctgaactattagttcagaacttcagatcacatacgggctcgtcgcctaccttgtaatgtctttattgagaggtacaataatttatttcttttactccacaccgatagggtcaaacggtggtattagaaatcatgtaattcactaccgtgtctttttttatctttggtgtcaaatggtggtacttaataaaaatgattatttaatattttgatgattcaaaaattaataaaaagcactaaaggttattttttgtttcaaaaaanaaaa

SEQ ID NO: 14014 - DNA, 583 bp, Glycine max
  Clone ID: PAT_MRT3847_112663C.1
gatacccctacttgtgctaggctttggacattgttcaacgaaaattcagtacacccaacaatttacaaagaatcagccctcgcttttccaagtcccaacccctaagatgaaggtaagattccttgctttgttcctactcatttcaggcattcaagccatatcaacctcagaaggtaaaggcctaatccagagcaatggacaagcacaagaacttcttgggaagttatatggaagcatagaagagtcaataaggttgaacgacaaagttgaggaaactaaagacgggtacaaagaagaaatacttaatactacaagaaaagcacaaggtggaggaagttcaggaggcacaggaagtagaggaaagacaggagctggtggcactgctgatgttaatcgccggccacgtcaaagttctgcaccatcagagcctctcttttgggtctcaatatttaatccatttgtaagcttggctttagtcatattgtttcccttccacttggtttgatgtaatccatggttaccatatgtttctcttgtttaatcattaatgcctctaaatagtggcaacttatttttcaaaacc

SEQ ID NO: 14015 - DNA, 392 bp, Glycine max
  Clone ID: PAT_MRT3847_112664C.1
ctcaatgttaagctcttggggggggcatttattaacaagtacaaaatacaaacacaacttgtgatctttgttcgttaaacagtctgcatctaaaacaaaaattgtcttgccctagcggcacattagaatcccaccatcccctgaaataaacagaaacaaattaataaacctagaacccagactgttacacctaacatggacaaactaaagtaccctggttagaagtctcatgaaacgcaccatttcactaaaagggaagaaaataaataaagtccccccccccctttcccctctagcattctatacacctgaaaccctttcccaaactccctagttttactctttcaataagcctctagcaatcattgtttcgagaaatttctctggcttat

SEQ ID NO: 14016 - DNA, 361 bp, Glycine max
  Clone ID: PAT_MRT3847_112665C.1
tttttttttttttttttttttttttttttttttttttttttttttttttttaaaaaaaccacccttggggggtaaaaattaaaattttgcaacttttgcccaaaccctttaaagaatttcttagaaaacttcaaaagggccatttgattttgccccctttcacaaggcaggcggttggggctcttaccttattattggtaaagggaattgggtggcccccatttttgaaatggacctggttttaattccggagtttgaatggaaacaaacagggcattattcacgtgtttgtttttagggcctaaaaagtaagtcaaaattatacacagtttcttgttttttgttacaggggttggggaac

SEQ ID NO: 14017 - DNA, 566 bp, Glycine max
  Clone ID: PAT_MRT3847_112666C.1
cataaagtatgttaaagggtcagagggaaaaatgaatgccttcaaagcttgtgttgttaaagtgggcagtgttgatacaaaggttggtttgtgtttgggtgttcctactaggtggaactccacatttgtgatgcttcaaagtgtacttgcataccgatgtgtttttaatactcttgctattgaagatgcaaattatgtgacttgtcctacagctgaagaatgagtaagagctgaaaagatatgtgaatttttgaagccattttttcatatcactgagttgatgtatggttcttcctatccaacatctaatttgttttttttcacaagtgtggcaaattgaatgttggttggaaaaacatactaggcatgaagattagaagattagggaaatggtagataaaatgaaagacaagtttgataaatattggaatgattatagtgatgtgcttgctcttgggaccattcttgatccttgttataagatgtcatttttgaagttctgttatacaaaacttggtcttagtgaagtatcttgccaagcaaaaatgaaagtcttgaagcacaag

SEQ ID NO: 14018 - DNA, 249 bp, Glycine max
  Clone ID: PAT_MRT3847_112667C.1
cccacgcgtccgaccacgcgtgcgtgcggctgctagaagacgacataaggggaatcataatcccgttgtacttccaaagaatgctctacaaccacactttctcgagtgggttggcttccccattggacctgaatactatgttttttcgcctgacgcacaaatcttcttttgcttttccccggcggggcttgaattcagcggcttttccaacagttatgccgctgaattacagcccctctgcatcactct

SEQ ID NO: 14019 - DNA, 318 bp, Glycine max
  Clone ID: PAT_MRT3847_112668C.1
cattattaaatgtatagataccctggaaggacggggcgatatctaacagccgtacctgttcattactactaactaaatggtcggaactatgcctatggtccaatgtgtaagggaatgatagcactaaaggactggggtatgggaaccgaacttgaatgaattgtcctgggcaaagccggtgcctgagacaaatagataaacgttggcaattgcacacagcacacgagccgtacggtaaaagagtacagcctggagtgccattggagcgatctaactcacattagtagcgatatactcacagaccattttggagaaaga

SEQ ID NO: 14020 - DNA, 522 bp, Glycine max
  Clone ID: PAT_MRT3847_112669C.1
gatgcggcagaaagatgtgtgactataacactaagatcttgggtctcacccctactactactgttctaagagcacccttctcttattcaatggtctaatcttaacaaaaaaatacagagtccgttttttttttcacccggaaaataatacacgattttccgtagcatgtaattccaccaagacaatgtatgagcttaccatacctcttttggcgaattcttcgagccgagacaccacacactcatgtaatgaaaatatcattcactttgaatcctgtgtgtagaggccacgattgatactgccgagagccttcttacgcccacttggggctgcctccatggaccacttctttttttcattatcagccttgatttctagaagattgggcacctctacgtacgagcttgcgcacctcccgactataaaatttagctacctgagctgaagtaaattggattcggaattacagtgcccttactgatcaaaccatcaaaccacctccctactggactgtcagcccaa

SEQ ID NO: 14021 - DNA, 193 bp, Glycine max
  Clone ID: PAT_MRT3847_11266C.1
agggctgctaattaacgcgatcattaatcactgaaaatgtactttgcaaaaacagaacccgcttggcatacattttgtgggcactcaacaaacctatttatttcccacccattttgggaccaagaattttaaaagtggcaggggctttacgaaaaaagtctgtttttacttgcaaccccccgggttcttaaaa

SEQ ID NO: 14022 - DNA, 705 bp, Glycine max
  unsure (1)..(705): unsure at all n locations
  Clone ID: PAT_MRT3847_112670C.1
gacagcgattgccagtaacgctcgcccgccgcgtcatcgtacaggccttcccagcgcgccacgaccaccaccgccagggcattgccgacgatattcagcgcggtgcgggccatgtccatgatgcggtccacgccggcaatgaacgccaggccttcgaggggaatgccgacgctgcccaaggtggccagcagcaccacgaatgacactcccggcaccccggcgatgcccttggatgtcaccatcagggtcagcaccagggtgatctgctgaccgagggacaggtcgatcccgtacaactgggcaatgaacactgccgcaatgctctggtacagggtcgaaccgtcgaggttgaaggaatagccggtgggcaccacaaaacggctgatggcccgtggcgcgccgaaggcctccatcttttcgatgatccgtggcagcacggtttccgaactggcggtggagaaaccgaggatcagttcggccttgaggatacggatcagtcggaacaccgagaagccgcagatccgcgccaccagcccgaacaccaccacgccgaanaatgcgatggcggcgtacaccagggtcaccaggcgcgccagcggccacagcgaggcgaagcccgagttggncacagtcaccgaaatcagggcgaaaaccccgagcgggggcgtagcgcatgatcatatggggtgacctttgacatgcttt

SEQ ID NO: 14023 - DNA, 465 bp, Glycine max
  Clone ID: PAT_MRT3847_112671C.1
gcacgagaggccacgggcaaccaaccccaacccaccaccaccgcgcgcgtgatcttcttatagactagatccgcgaccaccaccattgtcgcaccacacacgccgaccaagccccaccagctctgctccacccaatcgccgatgcacaccaccaccaacaccctccacgctgacgtgtgacccaacccctgcaccatcactaaatccaccactaaagacctaactccattcgagttcgtacgtccttgacaccttcaaagcgtgtccccgttggcacccaaacgataacaccgttattgctacgattcatgatgatgccacgagagcgtgatagagggtgcagtaattaacaatgggaagcatcaaatggggagggattggattctaagattgattggttttgtggaaaagtcttcttcgtatttatttatggacgagagaatttaaaattctgaaaaattataa

SEQ ID NO: 14024 - DNA, 449 bp, Glycine max
  Clone ID: PAT_MRT3847_112672C.1
atcatttactgaactaggagtaccacacttttacacacgatacggagtcaatgaatctcagggaagtaccagaggcacatcaaaccttggacttgcacatgccaagggcatcgcattcttgatgatgggtgaacgttggacatgtatcataactaacactgatgggcctgacgctggcacagattccgatcaatgtggtgaaaatggcacctgtaccattgagggcgaaccagagacacaagaattgaatgatcacactgatgttgtgagcaacactgacaccgcagcatactgcaagtgtgctgaagggtggcgtcgtgtcatcttcaggactgactgccctgatgcaagctctggcaaggactatgctgaatgcgctcgacagagtgcttgcactatagatgatccatcgagctaagatatgcgatcaatgcatctatgatataatc

SEQ ID NO: 14025 - DNA, 373 bp, Glycine max
  Clone ID: PAT_MRT3847_112673C.1
gatggaattttgctacgagaagttcagaatgatattttgttgaggcgctattctgtcttaattcttgatgaggctcatgagaggagcttgaacacagacattctgattgggatgctctcacgtgtaattaaaacccgccaaatgatttattatgaacagaagaagatgatactttctggggaaagagtaagtcctgaaaaaatgatttttccattaaaacttgtgcttatgagtgccaccttgcgagtacaagacttcacttctggaaagttattccatactactccaccagtgatagaagttcctacaaggcaatttccagtaacagcgtattttgcaaagaaaacagagaaaacagattacattggagaag

SEQ ID NO: 14026 - DNA, 403 bp, Glycine max
  Clone ID: PAT_MRT3847_112674C.1
ccctaaatgggccgtatccaagtttttttggcccggaaaaaaaaatcccggggcccaacactcatgaaggcattcctccacaggagtaaaaataggggaataaaaagaaaaaaaaaaaagggggtagtgggggggccaagggaaagaccgtttatccgggggtaaaagggggctttgaaaacagagggcaaaggttgtaccccgagattaacgggcttatagcaagggcaccaaaagccagaaggggcaacccaattgaagcactcgccatttttgggaaaacattttttccccaattggatggccagtcataaacgcgggtagcaccaaatgatgcacccgatcccaaaagatcccccaaaacctggtccctgaaaaaatcaaagggggaacccaggggggg

SEQ ID NO: 14027 - DNA, 585 bp, Glycine max
  Clone ID: PAT_MRT3847_112675C.1
ttgccgtctacatcgttagtagtaccacctgcttggggggggggggggggggggggggggggggggttgcaagagggcggactggcggggaaaatataagaagtaaggacgccgttgggcaccggcgcctagtaaaacaaccaaatcgtatacgggagaccgatatggataaagcgcaatagagggatgggcataaaataattgcagcatattgcagcaggagcactgcagacgtatatgggagaagcagaatgtggccacaataaacatagataacggtacggcagaaaagcctacctgactgggataaacggcgttggacaaaggcgattattaaagaaagaatgcttaccacgacgctaagtgccgagctagttgcggcaaaatgcgtcgtttgtgccaacaatggccggccagtattgcaaccagtgccagatagtgttaacggtgtggggggccggcataggggatgatgtaaaggtggactatgcgtatttaaagtgggcatacaggtaatactactaaacacactatcgcagcgttacaaaaagcttgcactatgactacagcaactgcagaacgttt

SEQ ID NO: 14028 - DNA, 525 bp, Glycine max
  Clone ID: PAT_MRT3847_112676C.1
ccctcaagcagaaccatgccgatccgtcagttccaagtcgttggccgcaaggcccccaccgagaaggagccgaacccgccggcttaccgcatgaagctgttcgcccccaacccggtgctggctcagtcgcgcttctggtacttcctgcaccagatgaagaagatgaagaagaccacgggcgagatcctggacatcaacgagctgacggagaagaaccgccgcgtcgtcaacaactacggcatctggatccgctacaactcgcgcagcggcacccacaacatgtacaaggagtaccgtgacgtgaccctgtgcaaggccgtggagcagatgtactcggagctggctggccgccaccgcgcccgcccacgctcgatccagatcatgcgcaccgccatcgtggctgccaaggacacgcagaagacgaacgtgcagcagttccacgactccaagatctcgttcccgctgtcgcaccgcctgccgcgcgccgccgagaagaccacaagacggtcttcaaggcctcgcgcc

SEQ ID NO: 14029 - DNA, 424 bp, Glycine max
  unsure (1)..(424): unsure at all n locations
  Clone ID: PAT_MRT3847_112677C.1
tacggctgcgagaagacgacagaaggggaagagagagaggagagagagcttaactcgaaccttggtggccctttttactgactcatattcanagcgtacggctcttatcctaaatgaacaggaattcttgctataagcccatatccctaccttgtacgagccccttgcttaatatgctctatggttggagcgggtccatgaatatacggtgttgccttatacatatacccatctttcaggaagagttccttcatcccattttatttttctcgggagagaaacattagccttcgtcatatcagtgataaacaaagttgtttctcctttttgaggttttaacaggactctatatgcacaagtattcatgaccttgtactggatcctatatattaaggctgctgggattgatccttctttcatgtca

SEQ ID NO: 14030 - DNA, 314 bp, Glycine max
  Clone ID: PAT_MRT3847_112678C.1
ggattgtgcaatctggactatatctatcttttcttggaagatggtgtccaaaaaagggcagtgcacacgagctggtctggttcaacattgattcctggaggctgggactcaactgaagcctgctcccaggtgattatgatcgccgagcatgtttttggaacctaacgggacaccaatactgctgtcgctggggaactcgacctgtgaatggccatagccccagccatgcttactgatgatcccaccgacaagcttgtgctcctggatgcaaagcctgacaaactgcgtggcaagatgcttgacctccagcacgc

SEQ ID NO: 14031 - DNA, 346 bp, Glycine max
  Clone ID: PAT_MRT3847_112679C.1
ggtcgactctagatgataccctcggggaattccaattccacattttcaagaactaatgaggcaaaaatgttcatatatgaattggtaatatttgttttcttattaaggctatcctgaagccacaggaaatgagatcggtattcctcggggaattccatttcacaatttcagaaagtatagaggcaaaaatgttcatatatcaattggcattaattgttttcctattaggcctagccggaagccatgggaaacgatatttgaaatcctcggagatttccaattccacattttcaagaaataaggaggcaaaaatgttcaaatatgaattcgaagtatttgttttcgt

SEQ ID NO: 14032 - DNA, 202 bp, Glycine max
  unsure (1)..(202): unsure at all n locations
  Clone ID: PAT_MRT3847_11267C.1
agtcgcangcacgcgtacgtaagctcggaattcggctcgagnncttntcatncncantangatgnaacngtacntangtccggtattcctattantccttatcnttctcgnncaatccatntcggcgagtgnngcgattantatnaatggtctgataaacaaatatgcacanattataaagaggcccccgagcancaanttt

SEQ ID NO: 14033 - DNA, 678 bp, Glycine max
  unsure (1)..(678): unsure at all n locations
  Clone ID: PAT_MRT3847_112680C.1
ccacgcgtccgcttgttttagccgctcgttgttgncagcttcccccaatgacaactgcagaatgtaatggcacactcattttccctttgagattcccagagatataatgtgacaaagcttcgtgtgtgttgaagaagaaaatttgtatcaatcattcagagacaaagcaaggtatgcttgagacaaacctgaggaactggtggtgagcaggtaaaggtttacaacaattaaatgagagaatcaagtgagtgtaaatcatcattcatcagttaccatttcctgagtttagtagttactcgcattgtaatccttggcttatagcatttccctctctcaaacgccaaaacccggttttaattatcgtcaataacgaaccgggcgagggggtgggccatctcggatatggtcacctttaacggctccgtgacgccgcttgctcttctcgccgacggccgtctatgngtgatcggatggactcccacggtgtttngtcgatcgaaaaggacgtcctcggggatcgtgggcctgtgggccctacatcaaaatcaagagncctcgtggagacccgagacggatgcttcatcagcagttcccctgcagggctcgttaaaacgacgtcgtctttatgccctcctncgaggaatcccccaggcttctggtgccaaaagcttgggtcgt

SEQ ID NO: 14034 - DNA, 442 bp, Glycine max
  Clone ID: PAT_MRT3847_112681C.1
agggaggccaaaggttattggtaacaggtaagattaccatgaaaaaattacaaagaaacttggattctcggattttagctaaaaaaaaaaaaaacctaaattagttggaagaggggtttttgtccttggagcattttcaaaaaggggggggcctcataaccttgacctcctagttttagcaaaaaatggacactttccaactccaaaatgcttgggtgcactctgtgaatggaaataaataaaagaaaactaagggcctaaaagggtggtggggaaaaaattttgggacccgggtcattatgtttggttggggccccctgcagaaaagggcccaagacaaatttttaacaaaacagaacctattaaatgggcaaaaagggcttttagacttggcctacaccagctttttgaaagaaggggtcccaaaaaggtccacctgggg

SEQ ID NO: 14035 - DNA, 2333 bp, Glycine max
  Clone ID: PAT_MRT3847_112682C.1
cccgcgcatgggctcgcctcttccggcctggggtgggccccctgtgcaggtcgtcgctttttcctcttggcagcttgctcgctccggcgccatcttcctgcatcatgctctggctctggccgatgcgaattcaaagtccctctcccgtttgctcgtatcatatcattcttccgatttcagaagtcagagagagagaagatgaagagcgaaagcgaattggttggattctgcattgaggcagcatgtgagagcagagaaagcgtggataaatggcggatgcagagccgcagtctcgatcgcttgccttctcatctcgccgactctctcctccgccgcctcatcgcccgccgcctcctttacccctctctcctcgaggttttcaaacatagtgctgaagaggttgatgtgagaggggacaactccgtggacgcagaatggatggcgtatttgggagcatatcgtcacttgcgctacttgaacctctccgattgtcatcgagtctccacttcagctctttggccaattacaggaatgagtagccttcaggagttggatctatctagatgcttcaaggtcaacgatgctggaattaaccatattctttccattcctaatctggagaggctacgtatttcagaaacaagcgtcactgcaaaaggagtcaagcttctcgcctcgcttaaaaacttgtctcttcttgacttgggtggtttgcctgttgatgacgtcgcattaacttcattgcagtaaaatatcaaacaaaggtgcttctgttctcaatacattcccaaagttgacctatctcaatcttgcttggaccagtgtcacaaaattgcctaaattatcatttcttgaatacctgaacatgagtaactgtactattgattctatacttgaagatgataaagctcctttggcaaagcttattctctctggggccatgttcatgaatgaagctgaagctttgttatatgcaaatacaaatttcctatcctttttggacgtggccaattccagctttcacagattcttcttcttaagtaaaatgaaagtgatagaacatctcaatctcagctcatgcatgatgggggatgattcagttgagatggttgcgtgcgctggtggaaacttgaaaagtctgaatttgagtggtaccagggttagttctgctggattagggattttagctggacatgttcccggccttgaaattctgtcattatctcagacaccagtggatgacactgccatctcatttatcagtatgatgccttcattaaaggatgttgacctgagcaatacaaatattaaaggttttctgcaccaaggaaggactgatgtgaactccctgctctctctaatggctctgcaaaatcttaaattagaaaggttgaatttggagcatacgcaagttagggatgaagcgttataccctttgtcaagcttccaagagctgagatatttatctcttaaaagtgcttcacttgcagacatctcactttactatttatcatcaattcctaaattgacaaatcttagtatttgtgatgcggtattgacaaattatgggcttgatatgtttaaggctcctgaaactctgaaactgctggacctcaaaggttgttggctcttaactgaagacactatcttgtcattctgtagaaatcatccacaagttgaagtcaggcatgaacttggtaccttatttcctgtcaatcaaaacggacttaatcattcctctccatctcgatcaacttccaagactatgcaaatgactaagaagaaagatcaaattcccttatctccatattttgttgatcaaagattgaagtatagcagggacgagttacttgcattgcagtttacatctttgccccttgcatctagtagtgagagtggcaattcaatatttgagaaacaattgggttgagtggagaaatctccttccatataattgtttgcactcatggcgttgggaagggaatgcgatttgaacagagattgcctcaggattaacagcccaagtatgatgttattcaatgtttcataagtatggcttctcaccaaaaggaaaggtgcaactcgaatgcacaagctcaaagctgaatcacgtttctgatagagaaatcgaatgatatgccttgactccaacttagtaaacatgtagatatgcaatgtggttaaagaaaggctttttagtaattttattgcatgatttggctgacacgttattctttttccagtgcaatggtgaacacatcacacatggaatgtgaaagattgctggttcttagttaaaaaaaaaaaaaaaaaaactcgagactagttctctc

SEQ ID NO: 14036 - DNA, 1847 bp, Glycine max
  Clone ID: PAT_MRT3847_112683C.1
cagcggagaaacaaggcaaagcaccacaagttgacagagagagcttatatattattaccgtcaattcttataataacacttgcaaatagagcattatcaactttcacctttcataggtatagtaaagtgatcattcagggaatagaagcctgatcaggtaaaggcacaatcaatcatcaggttgattatgctgtttgattgattttaaaatgttatggactcatatatatatatatggtgcttataaagagtacttaattataagtggcttttgcaggttgaatgtacagtactcatcagcaacatcaaggaaagaacattcactcttcttcttcttcttccagaatgccaatcccttctgagaggcatatgttccttcaaacaggaaatggctctggtgattctggacttgttctctcaactgatgctaagcctagattgaaatggacacctgatcttcatgcaaggtttatagaagctgtgcaacaattaggaggagctgacaaggcaactccaaaaacggtaatgaaactcatggggattccagggcttaccttgtatcatctgaagagccatctccagaaatacagattgagcaagagtctgcatggacaaagtaacaatgtgacacacaaaataaccataaattcaggtgcagcaacagatgaaagactcagagaaaacaacgaaactcatatgaatagtttaaaccttgcccctcagtctaacaacaagtaaaaaaatttcagttttcacacatgctttcttaagaactttctaatttctatcactaaaggttttatactgacattcattaacttcccttgtacctggcagagatttatacataagtgaggcactgcatatgcaaatagaggagcggagaagactaaatgagcaacttgaggtgcaaagacttctgcagctacgtatagaggctcaaggaaaataccttcaggctgtgttggagaaagctcaagaaacacttggaagacagaatttgggagcagtaggacttgaagctaccaaacttcaactctcagagctagtgtcaaaagtgtcctctcagtgtctgaattcagcattttcagatcggctgaaggagatacaaggatttagcccccaccaacaaacacaaaaccaaccagccaaatacaaatgactgttccatggacagttgcctcacatcttgtgagggatcacaaaaggagcaagagatacaaaatggagggatgagcttaagacccttcaatgttcacacattcatggaaagaaaggaagtcatagagggtccaaatcttaataatctaccaaacactgacctcaattggtgtgatccagtgaagaagaataccttccttaccccattgagcatgcatgcagataaaagaagtccaagcaacttgtctagcattggattacttgaaggagaaacaactgagaatagaagcaccattgttaggacagaatcaattaaaccagctgtggctgagaaagtttctcaagattatggattgccatctaactactttgctgcttcaaaactggaccaaaccactgaagataataaagacactaaaactagttgcaaacaactggacttgaatggattcagttggaactgatgagaagagaaagcacaatggaagcacacagaaagcaaagttactccaatttctggcaggaaacaatgtatttactgtaaacaatgtatcagcttctgtttctttcagctcatggtggtcatgactagccaaatatgagttacttttagtagaatgcaaagttgcaactaacaaatttgtaagcagtaattataatggatatagagtatctcgttttattcc

SEQ ID NO: 14037 - DNA, 348 bp, Glycine max
  Clone ID: PAT_MRT3847_112684C.1
ggctcgaggtcgactaaagcattgagttgaggggattgcatattaaagaatattgacttatgtacagtaaacaaattattgttgcaatggtttgtatcaatttggtccttattgtgacaaaaactactttgatccgtgcaaagcttatttacgtgcgcgttaatatatactcgccttaattaaaactaggcgtggcatctattaaaaagaaagtgtttaaaaataactgctcaaccacgctttacattctttgagtaaagattgggttcatgagcattttgcatgtgatgccctgagcgaggatacaccctatctatatcttggacacgtgcggatatgcttttacat

SEQ ID NO: 14038 - DNA, 411 bp, Glycine max
  unsure (1)..(411): unsure at all n locations
  Clone ID: PAT_MRT3847_112685C.1
agccaggatgctctagatttgccgcgctggggaagccttttttaagaagnaacttctggtattggcgggttcatcattcacatttttaaaaatttattctaaaattcaaagcataagctttgacaaaacagaaaagaaaaggtatataatcgtgaaactgaatgnaagcaggatccctttcncatggggntgtttggaagccaaaacaagccgggggggaggaaaaaccaccccacacgggggggggggggcaccgcccccacccaaagcccccaacgccaaaggagccgccagcagcccggaaaggagcagcgccccaaacgggggacccaggcncggggagccagcaaccacggcaaccgccaggccagagacagacaggccagggacacgcggccgagggagccggac

SEQ ID NO: 14039 - DNA, 206 bp, Glycine max
  Clone ID: PAT_MRT3847_112686C.1
atgaatacaacacacacttgacacatcatttcaacatgttaaaagaggttgtggaaattttcatataggcatagaatacttaacaagagggtcctgcttaattgactttatgggatttaaacaaacgcaacatgcttctgaaaacccgagttccagatcatgcagaggatttcgaattttcagatgatcttgtcactatcctgtgg

SEQ ID NO: 14040 - DNA, 304 bp, Glycine max
  Clone ID: PAT_MRT3847_112687C.1
ctcacggacataagtcacgcgcccggatcgccattcatcgcgttcgccacaccaactccgagcaatcatcatcaactgaacaaactcgcacccaatgccaatgctgtcaccaacgtcaaacgcgcgcacaccaactgtttcacgctccacgccagaacacagctacccccaagcgcgactaacccaccggagactacagaggtcacgcccaacacaggcaggaagaaggacaccagcaacctcaagatgcaaactgctttgccgggggagcgtgcacggaacagctcccacgaaacaaccaaga

SEQ ID NO: 14041 - DNA, 333 bp, Glycine max
  unsure (1)..(333): unsure at all n locations
  Clone ID: PAT_MRT3847_112688C.1
actagtcagccgcctcccttttttttttttttttttctctaatttcttaaacncaancaataaactccagacaaaagtttttttacaaatacaaattatccaatatcactcatacaaactcaaccaactaaatcctgccctattaataaatcttcagatcgatcatacaatattttaacaccactccttattctcccccttaaaaaaaacaaaaaaatctttacctaatctaaataacaaacactatatcacaaagatcctttcctatattctccttacacaataaatcccaattacacccttctatccatatttaacaccaactccttccca

SEQ ID NO: 14042 - DNA, 211 bp, Glycine max
  Clone ID: PAT_MRT3847_112689C.1
cgtcagatctttcaccggcctcgctcctcttaaccccatcttgctctcacgtccttcttcaaaatataccggatgagatcactcttttaccattaatgacaatggtggtctagtcactgacttgatacatgagaggcgaatgccctaactcaacaggcccactgatcaacgtgatacagtgatacgaggaattacgacacagcaaattaag

SEQ ID NO: 14043 - DNA, 226 bp, Glycine max
  Clone ID: PAT_MRT3847_11268C.1
ctcagaatcctatgaaataacgtatatattgtgaaagcattgctgaaattattggaccaattttgacatactagctattacaaagacccgctatatcacacaacttcatacctcttgcaacacatcgcgctttccaacagtttggctgtatgtacataccaatagataacacgttcttctgaaacattatgatgactgattatataaatatactctcgctgtttct

SEQ ID NO: 14044 - DNA, 246 bp, Glycine max
  Clone ID: PAT_MRT3847_112690C.1
cggctcggaagcccttttaattgtcactttcaaactccaatttgtttctcttcaacatgaagttcaaatcccccctgcaattgctcaacaatcccttcagggttttattcaatttaggttctactactttctgcttgcttcttccaaaccaacaaagaaagggctttttggcccaaacacaaagaaaaaaacaccccttcacccaaatttaccattcaagaattaaagttttcaaggggtggtttg

SEQ ID NO: 14045 - DNA, 380 bp, Glycine max
  Clone ID: PAT_MRT3847_112691C.1
ccggggccggaatatcccgggtgcgacccacgcgtccgcttgaattttgcgccagctccaccccggatctttggcggacgtgtgacagacaatttttcttccgcgcagaggcaaaaggcgctagtctgcatcatatatttattattatctgtctcactgcctcgaactcttgctattatataaaggaactcatcaccttctctttctctctctctgtctctgtggctcaaaaccagcagccccacgcgtgcatgcgttcaagaacttcttctttgagaccaaactaaaacctcgcgagttattgttacatggaggcacaaacaggccgcaatatcaccaccgccccgacatggagtggaaggagcctcttcagtcagaga

SEQ ID NO: 14046 - DNA, 279 bp, Glycine max
  Clone ID: PAT_MRT3847_112692C.1
tgccccaggaaagaacgttggggtaaaatttacgaattgaaattatgatttgtttgcatcttattcttgttgttggtctctgtgtatcaaatctttgatgttatcctagtagtttatattggttttaagattttcatgagtttaatttctatgatggattattagtgagccaactaataagaagggggcgcagtatggcattttttatgccttccccgtctatactgttcatgtaacagtgctcattttttaatggcttccaacagttcatgtaacagt

SEQ ID NO: 14047 - DNA, 120 bp, Glycine max
  Clone ID: PAT_MRT3847_112693C.1
gctagtgactacctatccatctcctgctcgagacaatgatgctgcacccaaaagggtaccccacacaaacatgaccagcactggagtgaactcccatcttactgatcacccagttgttgg

SEQ ID NO: 14048 - DNA, 414 bp, Glycine max
  Clone ID: PAT_MRT3847_112694C.1
ggacaacaccgggggggaaaagaaaaaaaaaggggggggaaaaaaaaggaaaaagtgcatggaaaaaagaaactgcaaaggcacaaagaacaccaaatggaagcaccaaagaagccaccagagaaatgaccctggggcgaccaaagggtaaagaagacagaaaaggagcggcaacaccacggagaaggaactgaactccgagtggacaaaaaacgatgcccaaaaacagaaggaaaaaagccgaaaaccgacggaaagaaacaggaacatcgaggcctccacacgcattggccgatccgaaaaaaacaaaacaaaggaaaatcaaggcatgaaccccaacaaaaagagaaatgctacagcccaaacggaaaaacacccacacacaaaataaaaaagggagcaaacgaagaggag

SEQ ID NO: 14049 - DNA, 1201 bp, Glycine max
  Clone ID: PAT_MRT3847_112695C.1
ggctcgaggcaagaataagaaagtctggacaaaagcgtgccaggcgtgagaccattgttggccctgctattgataagggtgtggctcatgagtctgttggagtaaaaccagccaccttggttccaaaggaaatccctgtgataaaaaagaaccatgtcttaaagataaacattgttcccaaagcaacagtgaaagaacataaagatgatgacacaacacatgagttacaagagccagaaaaagatgttccggatcctaacaaatttttgactccagatgaattggagagaggaaagttgcctcctgaggaaatcttatcccttccaatgtttaagaactatacagctggaaatcctgctcctgtgttgtatattaagaatttggcaaaagatgtgattgctgatgatttctattttatatttggctcctttgttggaagaattgatgctgctaagtctggtcttcaagtcaaactgatgctttatggaattatgaggggtcaaccgtcaaatacgttgatcctcttggttaaattaagacggaaatacaaatctttttggttgatatgtattaaaaaaccaaaaaatgatcaaacttggatccagacaacgtaacacaattaaggcaacgaaaacaaaggctccgacgaattggacattgcatgagtgctagttaatttttttgttaatgatgcattcttcgttcactccttggtgaggactctgcattagaccactgccaccaccacattctggaatgtcagtgatatggatgctggcatgtacattctccttggatttatggatgaaaaatgaatctagagtcacattgctggcaagaggcgttggaaatgcagaccaaggtcattgcagaaaacgtcgtatatagtaacaattttttttttaatgtattgtacattcaactaagaggatcctcttggttaaattaagcatataggaaatacatgattttttggttcattttcggctgtggacacaaaaatataggaaacttggatccagcaacgttggacaattatggttctgacaacaatggctccggcatggacattacattaggtttagataatcttttgttatcagactagtaattggacacatttttttccaaggaaaatctagtgagttgcagcttgtcattgccaacatatattcaaagttatcaaactcgagagtttatg

SEQ ID NO: 14050 - DNA, 507 bp, Glycine max
  Clone ID: PAT_MRT3847_112696C.1
ctatctcgatcgaactgtccaaggtcctgtcacgtttaaacttcagatggttggggtaacgtggggtgtgtgtgtgtgtgtgagaagaaccaggtggtttgtgtttggtgtgtgtgtgtgtgacaatggtcgttgtttgtgctggtgggtgggtggacggctactctcaggctgctagtcgttgctaagaccactgtctcctgacccaattttgaatatcctcctaatgacaccgcggtccggcaactgtacagtactcacctactactaatttctatggtgtgctcggttgttgtgtacgtgttcgaatttgaatgtgtctgtattgtcttcttgtaaaggttcaacatcatgtgtgtgatatctgcaaatccacttgtgtccatttgcataatcggtgttcactgcccagtttatgtgtcggcgttttcggatggccggttatcgtattgctaattaccataattcacgtatgtcacgccagtggccgaatgtgaattgagtcca

SEQ ID NO: 14051 - DNA, 341 bp, Glycine max
  Clone ID: PAT_MRT3847_112697C.1
gacacacaaaggaaaaaacagagaaaccatgtcttctccaagcacgcggcaagagatggactggatgggactgttaatccaccacttcttctgtcttccttttaccttctatttacattaaagttatactcttattatatctaattgggtgtctaaatttgactattgattctgattctgatattagctacacatctaattaataggatgatgagtaactacaatgtgcatataattaatgatataatgcacaagttttatgtacatatgaattgacccaatgcgagatcttattaaccacgattgttaaaagtgacggttgaactgccatatgcttatcc

SEQ ID NO: 14052 - DNA, 869 bp, Glycine max
  Clone ID: PAT_MRT3847_112698C.1
aaaaaagaaagtggaataaaatacgaagccgcagcagaaagcaaagaaaacgacgcagtttaatttggtatttagcgaaggcaacgaagaagaaaacgatgttggcggagagcgatcactacagggtggagttcagagcgtgcaaggacgacgcgtggtacacggcgcgcgtttcgctggagggagaaactctgacagtgaagtacttgaacctccctgacgaatacgacaacgcgtttcgagcctccgagtttggggaacgcttcagacccctctccaaacaggttcaggacagcgagtgtcgttcactcccgtacctctcttgttgtcgtttacttgcgtcattaaataaatagattggcaacacgcgtaatttggaagtatgaacttgttttcttatcacccaaaaggaaacatttttcttcttcttttgattgtgtagtgtagcttttattaggaagtagggaccatcttgctatagcactatagcagtcaaaatcacatgtcaacatttaggatcatatgattttgtttactagacttgtacaattgagtcatattctaaatgattggctacaagtaggactgtgtcaagtaaatttgacattgtcccattgccatggtaaattgttggagttacaactcacaatgtggttaacaaaatggcctcttggcctattgattttatggatgggctgagttgagacacaatttgaatggactgatgggtgtctggcttgaaatgaaaaatatggtccatctagacctggcaacttgtgttttatgcatttaggttgattgagtattagattttcttctctgatctgaccagtttcttttacgaagaattgctgtgctctttatttttg

SEQ ID NO: 14053 - DNA, 189 bp, Glycine max
  Clone ID: PAT_MRT3847_112699C.1
aaactgtggtttgcaatttgcaaatttacatacatactcttatctattttgcatagctatcactttgtgcgatcaccatgatcatctatttgtaaaccatttaatacaagtatattgtttcttgcatgatacatgacttgtatcctaatacttttaataagttaatccttatcaaggcttacgtaaaaa

SEQ ID NO: 14054 - DNA, 351 bp, Glycine max
  Clone ID: PAT_MRT3847_11269C.1
aaagggcccccaaatttaatttttagagggttggaaatttttccaaaagttttttattttttgattggaaaaactcaacccctgggtattttcctcacggtgcaaaagggggggttcccttaattaaattccggggaaaggggggatcattttttttttgggaacaaaacaaatttccggggttttttttgggcactaaaaatttttttttaaaattccaaaagaattttgggttttttcccccagaaaggaaagcccccgcccccttaacctttatttgggaagccccggaaacaaaaaattttaccattttgtttgccaagcccccttttttccgggcccgggggtgcc

SEQ ID NO: 14055 - DNA, 430 bp, Glycine max
  Clone ID: PAT_MRT3847_1126C.1
gttccttggttttgaacaaactgtatagaatgccttatgaccatactaattcctaggagcatctggcggaagctacactgatcctacaggaagaactgatattgagatgatgcgattttgccaaaactttatgagccaaatgtatccattcctggggcctgacacagaccttttctatgaggagatgagtatcagtactcgagagatggtgtatcttcctgcacagtatgggcttgttgcacgacatgctcagggatgctacacaagaccaaggatattttggtctgtgtccactcttctacctcaagctactggctatgggctggtgatcaatgtcaagctcatgctggctgacatgactaaagaactgcaaagattaatatgtgctgtgagtggatctagacagattgacatgcatgtctcagagaag

SEQ ID NO: 14056 - DNA, 527 bp, Glycine max
  unsure (1)..(527): unsure at all n locations
  Clone ID: PAT_MRT3847_112700C.1
cactgagcatcgtctagctatctcgatcgaactgtccaaggtcctgtcacccacgcgagaagtgcactcagcgtaccagtggcaccatggtttggcgtgttttgaaccaccgaaccaaccagggcccagcccatgaggggtcggtacagggtcagccgagttggcggagggggcagccgttggtttagtgttggtattagggagggttggatagattggccccagcgaacagtgcacgccaacgttgagaacatctcgtacaaccaatagcagcacaagcgcaacaaccggagtaaatcgtgtaaatacaccaagttagtaaaccagccgtgcngtgcgattgtgtcgacgtttgccagctgcggcccaggtccaatcggcatgagaacacactttcgtaggggcaacggcagggcgtgctgggttcaagcgatggcacagtcataaacaatccagcaggctaacacggcacttttgacgtaatagcccgtacagtactacgcgcatgcgatttagcaagtgggttt

SEQ ID NO: 14057 - DNA, 1613 bp, Glycine max
  Clone ID: PAT_MRT3847_112701C.1
gcgggtgccacccccgcccccgcgcggtccgcagcctacgcccgctccgcggcgccctctccggtgccgcccgccgcggcccccgcccccgccgccgcctcatgtcaaaacaatcccccgaaacgcgccccatcatcgcccaagcaggcgcaatcccctacatcgcagaaaccctctattcctcttcgcacccctcccaagaagacgccgctgccacactcctcaacctctccatcaccctaaaggagcccctcatgtccacacgtggcgtcctcgacgccatcgcccacgtcatctctcaccaccacaccacctcctctccccctgcggttcagtccgccgccgccaccatccacagcctcctctcctcggtcgactcctaccgccccgttgtcggctccaagcgcgagattgtctactccctcatcgacatcctccgctgccacctctcgtcacctccccgcactatcaaggattcgttaaaggcgttattcgccatcgcgcttcatccgattaacagatctacgatgattaaccttggtgcggttcccgcgcttttttcgctggtgttgaaggacggtagggttgggattgtggaggacccgacggcggtgatcgcgcaggtcgcgggatgcgaggacgccgtggatgcctttcgcaagccagttgatttaggtttagtgattgccgatttgtgtaaaaattcgaccgccgccagcatgttcaccaaggagaatatcgtctcggcgctgctcaatttggtacggtgcgggggtgacaaggtcgccgccaacgtgcgcgacgtcgtggcgtttggagcgctggatggaattgcggatgtgagggatgggggtagtgtaaaggggaagaacaaggctgctgaattgatgaaggttttgctcggtcaaaacaatggcgatgttgttgtgtttaacagtgatacttgttcttcgtttggttccaccaggaatcatgattcggaatgaatttgattcgtgtttggttggaattttatgattctttttgttctttgtagactggaaatagattctatacattgacacattcgttcaggcattcatgaattggaacggttgaatgaaagataagatggttcacattttggatacatatgttaagtttgttacatttaggatgaaaacctagatgcagcttcttatgcgcttttggcgatgttttccaatcagaattagaggtttaccttggtaatttatgttgctgacatttatttcgaatctatatatatattatgctaattactgaggtgaatctccaattctgacgggagaataacgctgataccactgaagatttgtatattcattcaattgttctgaatagctgaatgtgtgaattctggagtttcctggttgtagggaattctggtcgatttaggtttagataagcggatttggtgtacaaattaggtgataatttttgttgttttgatgatattctattgattatcgggttatgatatgaacaataccatgatgtgttgtacaaacttacagtgttgattacctaccttgatgatattctattgattatcgggctctgatatgaacaatatcatgatgcgtagaacaaaa

SEQ ID NO: 14058 - DNA, 576 bp, Glycine max
  Clone ID: PAT_MRT3847_112702C.1
tcttctgtattctcttgtgtttctatttctctttgttattgttcttcttatttatatttgttttattatttcttttgttattcattttcattgtgttttttgtctacattgcattcattgtacttgctttactcgttcggtttgcttcatcagcgcatgtgaaaaacaagtaacattcctgcgagattctaaatcaatgcacaagttgctgattttggtcccggcccacagttgatgaaaccaaaaaaacttgctaccatgaaagcggaggcaggcacattcggatatattgctccacaatatgctcaaacaactagaggcattgtgaagatagagtgcaccccccctggagtagaactattggaactgtcaacaggaaaacacccctttccgcaaaaaaaaaattatgaactcgcggaatgggccccgcgccccactcatatagggaccgagggagaggacattttggacgaggaaacaagggaggcaagctcatggaaaaaagtttcccatcttcaaacttgttgttatacgcaccgcgaccccgacagacagaagaccccccatgaaggaagc

SEQ ID NO: 14059 - DNA, 128 bp, Glycine max
  Clone ID: PAT_MRT3847_112703C.1
cggacgcgtgggactaagacagaatgggacacctacgtgagctactacgcctatggagcgttcagggatcgaaagatctacgagattgtccttgggaaccattatgtgctgccgaacttcttgcggtt

SEQ ID NO: 14060 - DNA, 634 bp, Glycine max
  Clone ID: PAT_MRT3847_112704C.1
ggctcgagcacaatttctgattcctctctctctctctctctcactctaatctaatgttttcttttcatacacacagagtcagactcaaacattcattcaagacacagtgcacaaaaagcttatgctatcccccctaggcccaggaactaggaactaggaaaatgccccattcacaaaaaccctaataactaacctttttcagacccaccaaaccaatcactaccctcaattcccctctttacttattccctcccaaacatcaatctctttcgatttttctcctaaagctacttcctttcgcctttttttctcttctgggtacacctccaccacttcctttcttttccctctttggttcaaatcacgttcttccgttctgatctcaaacacccaccttttttgtttctcaaattgttttccaccagtttcgtgctcaatccgtcagatcagtgttcactgtttgttgattttgaattttgatctaattagtgtttgtttggttgcacaaattcactcttttttacctaagggggtgtgtttttctgtgtcggataaatttgaaggataagaagatcctcttttgatcttcgaatttgcacggggtttttgtggggtgggtgaatagttctctact

SEQ ID NO: 14061 - DNA, 562 bp, Glycine max
  Clone ID: PAT_MRT3847_112705C.1
ctccgccgcccaaggtgactctgactccctttccctctcttgtctcatccacggtttcctcgaacaagacaccaccaacgacgactctgactcagtaattcatgactcggactgggacccagtcgactcagtggacgactcccccgactcgccgagcaactcgccgagtctctctttcttacactccaacaatgcggacccttacagaaacttacttatcgcgcacgtttcggaggcgttggagagcctcgcgtttcttcgggagcgaaacgcgtcgctcttccggcggagcgtggcggcgttcctccgggagagaaggcacgacgccgcggtgtgcgagaccgcgcgggactcctccggcggaagccacgagttcatcgacgtggtccagaccggatccgccacatgcaggtatttcgtggacctcgacttccgcgcgcagttcgagatcgcgcgcccgacgcggcggttctcggaggcgctggccgccgttcccggcgtgttcgtcgggggcgcggaggagctgaaacgcaccgtttcgacggcgtgcgacgccgcgagg

SEQ ID NO: 14062 - DNA, 711 bp, Glycine max
  Clone ID: PAT_MRT3847_112706C.1
attcaccagaatgaaatgtaatcatatctcatatcaatgaacacacgcctaatccaggaacattatcaatttatcatcactcaatacataccaactttccatcccgtgttgttcaaattaagcaacagcacagatagatatatatgagtatcatatcattgttgagcattagttaaggcgaatctcatccaagctacttttatcttgtaatcgtgacttctgctgaatttggaagtaatctcggtatttaatgcttctgaacaatggcttataattctgcagtagctccggcaaaggtccaatttccttatctagcgcaggtccattcgccagcacaacactgatcctagtgtctgcattgttgagtattgctcggtgcatcaccctagcgtacttcccattactcacaacctcgagttgatctgaaagcaaaacaattatgcagttgggaaggggattgacattgacccatttgccattgtgcttaacctgaagcccgcctgtgccaccccgcgtgggcctggtcgctaaaccttcggccggttgggaaggcggcccccgtgcaccctgcggccgtggtcctggtggatacaggttcacaacaaacagctgatggccagagtcaaaatcagtggactcgattatggaattggattctaatcccaaactctctgatattccttcaagcaacttccttgtcacacctctgat

SEQ ID NO: 14063 - DNA, 405 bp, Glycine max
  Clone ID: PAT_MRT3847_112707C.1
gatactcgtccgtccacgcgtccgaccacgcctgggtgattttgaggctgcaaccgacatgctggcgcagttaggagagattcaggaaaaagttgtatcgaaatttgcacaagaggaaacacctacagcttggtcaacgtcaggcgcgtcctgcaacaactctgctggctgatgggtggccatatttgcatgctatggtgcatgatagttcagagtctacaataccaggcgattttgacattggtgtgcagttggctaccataaacagtatgtgtgcatatgggctcaatcctgatattacatgatctcgacatttgggcaccattcctcagaccatgtgacaacaaactgtttggaattaaatggcaacagagagaacaccattgaatattgatcctagcaagc

SEQ ID NO: 14064 - DNA, 2703 bp, Glycine max
  Clone ID: PAT_MRT3847_112708C.1
aattcggtttgagcagcactccagttgaagctcgaaaccgattagattagaggcttcaaacaagaggctccaaaacccaaaccctattctggtttgctttaaatcatggtttcttacaactcttctcgtttgagttcagcgaccaatttgaatattcagagcgaaatatacttgtattctaagcgtgataagagagacgaagcaaagctttaaaacatacctacctattcgaaaagtaatgaacaaagaaaagtgcgatcttttccaacccatggaaatttctatgttgcatttcatattcgttcaaaggttaagatttattcctaaatactcttcgatttcaacaatatcaaccttttataggccaaatttagtatcttattattgtgttgcctctaattctccattgtcctaataatgtatctgtctctctttcctaacccagtcaccaccgttatgcttgtgccgtatggttaaagcaacaattattgcaatgttaaatttcgtgcgacacggcatcgactacccctactgatctagcaatgcccgctccttctgcatcaacctggtggcaaacattgcagcttggaaacatttccgtttgctcatatcgcaaatggtaataaccttggaaggacattgatgtggtgcaggtgttgtcatcctcccccaaagagtcatcatagcaagaatctgcataacctcattcaccaaccctagcgttcaccataaccttacggtcccgatccgcatatgttttagcccaatttcagatttatgtcatctaatttatccattgaagtgcctgagtttgggtcacccatgttgtggaccagctctttgactcccatctctagaaccttttcacggaaattagggccatttcttggacaaggatagaaaagaacatcaagatccaaaatggcaacaatttctctaacactttcggcaaaatggacagctctcaaattcatatatttcaataggcttctctgggcgagggcctaattttgctgtttcttttatggtaacgccattaagttccaaagcatattcgtctgtaggaatttcatccttagaaacaattgaaaaagaatacccagaaacgaaaactccagtggcaaaacgaaagatcaaaggaagcaaagctccaaacacttcactggtcttatcaggcctaattgcaaagcgtttaggctcagggggcttgaagttagggggaggagcaattgtcactgaagaagcattatcagaagttggttgttcttgttgggtgctcacagaagaagtggaagaggtttctgacatgcccctaatgcaaaagcttcttctgggtagtcttcttttgggcaaagaaacagacccacgaacagggaattgggagagactcaaagcccatagccatgactctggaaaaaaggacacacagacacaagttcctccaagttccaacccttagcgcggttgttaccaagcgtttattaggtggggatagtggttgattgcgacaccgatcaaaattcacagaggttttcgagctcagtgacaaaaattcaaagaagattttgaattcagattaatgaatgagaagttcaaataggatgaagtatggggtcatcttggtaaaagtaagtctcattcaaaagataataacgaggaagaaaatgcctttgatgaagattaccaagatgaagataatgacgatgtatcaaacattgaggttaagcctgtttataacaaggacgacttctttgactcgctctcttccaacatgcatggtaatgcttcacagaatggaaggactcgatactccgaacaaatcaagattgatactgagacgtttggcgattatgtgaggtaccatggtggtcgtgggggccgtggccctggccgtggtggacgtactcgaggtggttattatggaagaggaggagggtatggctactctggacgagggaggggacgcggcatgccaagtcgcactttgtaggtggcagttaatgtttagtcatgaacatggtggagaacaagagcctaggtagccttccattaaagaaccataagtatgttagagattatgcttcattgttgtgttgcctgttatgtgtttgtttcacagaataagtaggacatttttttttctctcgtcatattaccctcttgttactcctctaccacttggtttgatggaaagatgtttgtacaacatattattttagcttatatcaacaggcagaagtttagactaatttattgcaggattgttgtttatgcatgtaattattagctagttattattcgctcatccattgagtctggtattccgctccgaccgactctagtgttcgtttgggtcagactttgacgctaaagagcttcgagaattcatggattggaactaaagttggggtttcgccatgcagtctcaatcttagacctgtcgtgtccgtttcccggcggcgcccgctcgctgctaccgtctccttcagcctccccaccgcaaagccagagcgtgcttctactggccaagaaattcccaagtgagtagtatcgcccaaatgtgtttgtcggactctacttttttctcggtggccccttgctaattgtgtttgatgaaagcaagatggttttccaaggctataaaatcatttgcaatgtctgaattggaggcaagaaaactgaagtatctgaccactggcactg

SEQ ID NO: 14065 - DNA, 477 bp, Glycine max
  Clone ID: PAT_MRT3847_112709C.1
tgtcttagacattaatttagcaataagtcatggggggttatttgctccattacagggtatttctgggcttggtccacggaaggctgcatccttacagagatcccttgtaagagctggtgcaatttttactcggaaggactttctgactgaacataaacttggtaaaaaggtgtttgtcaatgcggttggtttcttgcgtgtccggcgaagtggtttagctgctagcagcagccaatttatcgatttgctggatgatacaagaattcatcctgaatcttatattcttgcacaagagttggccaaagatgtgtatgaagaagatggcacaggtgatgcaaatgatgatgatgatgcactggagatggccatagagcatgtgagagacgacctagttatttgaaaaaccttgatgttgaggaatatgcttctgggaaaaaacgtcagaacaaatacaaactttctatgacataaaaagag

SEQ ID NO: 14066 - DNA, 219 bp, Glycine max
  Clone ID: PAT_MRT3847_11270C.1
atcgtgccgtgcggtgtacttcattagaattagaaagagaatgagacagatggggggtcttgtccgcttcaaaccgaacacgaccttatcggcgatccagtttctatctgtgcacattcgcaaccctacctacttgcttctgcatttctggtggactggatccattttcatcacagtactcagtaagcagaggcacatcacacaataactttgacatgg

SEQ ID NO: 14067 - DNA, 230 bp, Glycine max
  unsure (1)..(230): unsure at all n locations
  Clone ID: PAT_MRT3847_112710C.1
cgnganacagannnnnnngncannnnngngnncgagaccccggggngcncaannnaangaggnnnnnaggacanngngncanngnnnnnggcagngnggangnnancgnggancgacnggcngcgncaaanagnancnnnanngcaaagngcaagaangngaaccaggnnncggnanagcncacancgnaacgcnnnagagggaaaccanncgganagnncnnaccacgg

SEQ ID NO: 14068 - DNA, 303 bp, Glycine max
  Clone ID: PAT_MRT3847_112711C.1
gctgactacctgaagtacaagagcgagggcagaattgttcctgatggtgtcaacgcaaagctgctcggcaaccacggcagacttgagaagcgtgctcctgggaaggctttcctcgatgccgatgcttaagtgcggatgcgaatcctgacgttttgctttagcgtatcttactttgcttcgtggaacatgaatttcaagtgttttgagggtattacagtgccttatgtgaacttgcctatcttgtgctgaacatcggaatgtatccttcgagtatgtttaatcgcattattttattgggaaaaa

SEQ ID NO: 14069 - DNA, 1624 bp, Glycine max
  Clone ID: PAT_MRT3847_112712C.1
gtagatccgcacaaacgccggtgcggcgttcctccggaccagtcttatgggggccccatgagtgtcgcggtggcgccccgatttgggcgggtgcctagcctcttgcgtcgtgccaccttcctagccgtccacacgctttcgctttctttctctcactgtttctctggagtttgtgatctgagtataaagatggagctgagtagcatcaaagatgcatttgatcgtgtagccaagaagcaaaaattatcctcttccaagtctcaagaagttgttgaccaggtggggcgtgaaattgagcaagcattggcaacaattcagtcatcacatgacccctcagctcctgttgaccagaaatctgttctcacagaacttaagtttaagcttaatgctattggaccacttcaacagttggaaggatcaaataaggaattgaacataagtcttaccaagtatcaaaaactccttgaaaaattgttaaaccctgatatatcaaaggcatacagaaatgtggactttgatactcatattgtcgatcagataattgcaaaccacttttaccgtcaaggtttgtttgatcttggagatagcatcataaatgaggctggagagcctgatgcagctgcacttagatctcaatttttggaaatgcatcagattattggagctatgagagagagaaaccttcagcctgctctcacatgggtgtctgctaatcgagagaaacttgtccagattggttccaatcttgagcttaagattcacacgctgcagtttgtagaggtcctgcaaaatggaacccgagctgatgccttaaaatatgcccgaacttaccttgctccttttgcttccctcaacaagggtgagttcccaaagcttatgggttgcctcttgtatgcaggaaggctggagagctctccttattctgagctgttgtccccaattcattgggagatgacaactgaagagctcacacggcagttctgcactctcctgggtcagtcctatgagaacccactgagtgtagcagttgcagcaggagttgaggggttgcctacactgttaaagcttgcaaatgtaatggcagcaaagaagcaggagtggcaggaaatgaagcagttgccggtgccggttgaattgggtaaggagtttcagttccattcgatttttgtttgccctgtgagtagggatcaaggaagtgaagaaaatcctccaatgctgctaccatgcttgcatgtcctttgcaagcaatcaattatgaagctatcaaaaaacagcacccgaacattcaagtgtccatattgtccagccgaagctactgttgcaaactgcaaacagctgtatttctgaatgatgtttgtgtatttctctcttccatacatttcatttgtgcaatacagcatttacagctttctggttgtatataaatattttaaaaatctttacattctgataagaccaacgagtaaataaaaattgaaagatcctgtccattctcgttcttgcttttctccgtcaggagaattaaaaaaaaaaaaaaaaaaaaaaaaaaaaaaaaaaaaaaccaaaaaaaaaaaaaaaaaaaaaaaaaaaaaaaaaaaaaaaaaaaaaaaaaaaaaaaaaaaaa

SEQ ID NO: 14070 - DNA, 203 bp, Glycine max
  Clone ID: PAT_MRT3847_112713C.1
aaaaagcaaaagaattttggttaaccctccccaatttcacgtaacaggtttttcacaggccctacaaacccaactaagggaaaaggttcaaataccacccaaaggccgaaaaaaaaaaaactttaacaataggctagaaaaagggacgaggcacaaaaaaaacttttttttttaaaagggggaggaaaaggggcaaatgaggg

SEQ ID NO: 14071 - DNA, 392 bp, Glycine max
  Clone ID: PAT_MRT3847_112714C.1
ggggggggagctagagtagtgttcaatatttgctaggaatatgaatatgatagagcagagagagtggagagaaggggcattaataaagaggatgggtcaactaccctgctgccccaaagagatcaataaaggtgcttgactctcagaaaaaagatgaatccctctccaaatatggctacatccatggataaggaaaatggcagaaggactcccaaaatgcagatttaaagcgataaggaaagagatgcataaaaagatgcctgaattatccgaagcccagtataaaaagaagccacatcatctgcagataaagaggatatcgattataagacttgagcgtcttcttagtaacagatgggcattgattgcctagatgctacctgaacgaacag

SEQ ID NO: 14072 - DNA, 497 bp, Glycine max
  Clone ID: PAT_MRT3847_112715C.1
tctggatcagcaaaatgcatttctgttgaccttcctggtcatggaaaatcaatattacatggtgtaaagggtgctggtgaagaaccattgttgtcactggagacaattgctgatttggtgcataaattaattcatcacattgctccagaaaaagttacactagttgggtattcaatgggcgcaagaattgcattgtatatggcactgaaattttgcactaagacaaagggtgctgtattaatatctgggagtcctggtttgaaagatgaattatctagagaaatgcgtactgctaaagatgattctagagcacttgcagtcattgcacatggtttagaactttttgtcagttactggtatgcaggagagctgtggaaaagcctaagaagtcatccccattgcaatcgaatcattgctagtcgcttgcagcatgatgacatgcagaatcttgcacagatgctgtctggataagcatatgaggcagtcgtcatgtggga

SEQ ID NO: 14073 - DNA, 617 bp, Glycine max
  Clone ID: PAT_MRT3847_112716C.1
ataacccttctgccttttgcacccattaatttgctcgctcaaagtgctaaaaaaatgcctcacatcctgcccgatttctcaaactcagtaaagctcaagtatgcgaaacttagctaccaatacctcgtgaatcacatcaaaaccctaaccctaatccccatcatgcttggcatctccatagagacacttcgcctaggcccagatgagatcctcaacctttggaactctctccacgttaaccttgtccaaatcttcttatccaccttcctcctcatcatcatagccaccatctacttcatgtcaaagccacgcacgatcttcctagtggactacgcgtgcttcaagccccccgtcacgtgccgcgtccctttcgccacattcatggaacactcaagactcatcctcaaaaacaatcccaaaagcgtggagttccaaatgagaattttagaacgatcgggcctcggagaagaaacgtgcctccccccagcaatccattacattccaccaaaaccaaccatggaagccgcgagaggcgaagcagaacacgtggtcttctcagcagtggactcgttgttcaagaaacgggtctcaaaccaaggacatagacattcttatag

SEQ ID NO: 14074 - DNA, 874 bp, Glycine max
  Clone ID: PAT_MRT3847_112717C.1
agcgagaagacgacagaaggggatcgtgtgagatcattcaaactacaaaggcacatatctatagcatcctagctatatctgttgatgtgttgaagggtgaagaagcaaaatgaaaatgaggcttgtggtaattgcactaacaatattgatgcttgcaagttcttctatggctatccatgtgaagactttggtggccaacaacatgctacaagagaaggagggagaacacagtaatggtaataataatgagcatcaaatccctctgaaccgctatagtgatatccatgaaattcctggaacgggtggacctggcgaacgtacagtcagtggccacatggaatataccaaaccagctagcccgaataggaatggttaattagtagacgaagggtatatatatataagtgtgtgtatatgtgtgtttgtgaattaacaagaggttgttggtacaagtgaaatttgactcaatttctttaaataagattttgagtttaagttgtttgaatgaaaaatatgattaaaatgattagtattaaaagtggtcaattaaattcttcaataaaaaataaagttaatagatattttgtataataagatgattatccaaaatatatatgtaatgtgttgacgttggtaagctgcatgtacgtgcataataatgcatgcaaggaattgctggggaactacgttcctacctatgtccacagttgtacccatataagctagctacatacatatgtgatgcctcaagggtcacccaatgcctgtgagtattattgtgcctgttgcaccaccatatgttgttgagataataataaagaagatttggtttgtttccaaaaaaaaaaaaaaaaaaggtcggctctccgactag

SEQ ID NO: 14075 - DNA, 328 bp, Glycine max
  Clone ID: PAT_MRT3847_112718C.1
gggggaacgggccctgtttccaccaatttattcacaatttataaatttttttctaaacattggcgggccctattaattaattaaaatatcttcatccaaaaaaaaaaaaatctgctttgtgggttttctaacaactactacttggcaccggcatttaacgttggccacagggacttttaaattttaaatccagaggggggatgctataataagaaataattggaacagccaaattcaaaaatggggaattgggaactgtatcgagtttccactttttgatgacattaatcaaccaccattacgggtttttaaaaacctaggggggttt

SEQ ID NO: 14076 - DNA, 160 bp, Glycine max
  Clone ID: PAT_MRT3847_112719C.1
atcaaaatatgcggcgggtaaattattggaagtgaatatatacaaaaaagtttttgaaagtaataactcatacatgaattactcctattcccatgaatgcagtacaaccattgtttgaacttcctaccattctattgtcatatgtactaatgttttactt

SEQ ID NO: 14077 - DNA, 958 bp, Glycine max
  Clone ID: PAT_MRT3847_11271C.1
acccacttgccccttattaaggaaatcaccacaacaccaccaccaccaccacgcgacgtggttcttaaaacacgtgagaaaatcccatgcaagctcgtgtcgaagacttccatttcccacgatgtgaggctcttccgtttgggcttaccctcaaaagaccagctcctaggtttacccgtggggaagcatattttcctatgtgccaccatcaatgagaagctatgcatgcgagcctacactccaacaagtagtgtggacgaagtagggttcttcgatcttgccataaaggtttacttcaaaggggtgcaccccaagttcccaaggggaggactcatgtctcagcatttggactccctctccattgggtctgtgttggacgtgaaaggcccattgggccacatagagtacaccggaagaggcaacttcttggttcatggaaagcaaagattcgcaaagaggctagccatgttggctggtggaactgggatcacacccatttaccaagtggcacaagcgattctgaaggacccagaggaccccacagagatgcatgtggtctatgcaaacaaaactgaggatgatattttgttgaaggaagaaatgatgtgtggcgaagaacaatgtgaccgattcaaggtggtggtacgtgtggaaactgctagggaaggatgggaatacagtgttgggttcatcacagaaagtatcatgagggagcaccttccagaaacgtcgacggatgccttagctttgacatgtgggccaccacctatgattcaatttgcagtgcagcctaatttggagaagatgggatatgatatcaaggccgatctacttgtgttttagggcatgtttgtgtattgctattgttgtgtggttaatgtatgtgtattattattgttgcttgtgtatcaacaattattcgaatatttcatgaataaatatatatgtgaaaagacga

SEQ ID NO: 14078 - DNA, 1186 bp, Glycine max
  Clone ID: PAT_MRT3847_112720C.1
tagagcgcgacaatgtggtagaggtcgcgagcgagcatcttcgagttgcatttcgcagtgtgtgtgagaagaagagaaaaatggagaaaatgatgcgactgagaccactgttccgatcactgagtttcagataaaaaaaaggagacgaaaaggaaaaaacagaagaacagtgttcgaagatggagaaaatgatgcgactgagaccattgttccgatcactgagttgcagatcttatcatttcgttcttcgtccttctcttctctctcgctctcccaatcctcttccttctccttcaccctcagaatgcaggtctcctctctcaatgggtttagggagtatgagattctatagtgaagatgtgacccacatgcccaatattaaggaccctgtgctttacaatgctttcaaggatttgatggcggtaagttggagtgagcttccggattctgtcatatctgatgttaagaatgcactgtctaaaaacactgatgacaaagctggcaaggaggttgtggaaaatgtgttctgtgcagccaaggctattgaggagtttggcgggattctaatctccttgaaattggaatttgatgacagcattggaatgagtggcgaggatgtaaagccattgcctgatcatataaaaaatgctctgcataccatttttgatcgctactccacctatttgaattcctttggacccgacgagagctatctacggaagaaggtggagacagagttgggtgcaaagatgattcacttaaaaatgagatgcagtggccttggtgccgagtggggaaaggttacggttcttggaacttctggacttgcaggttcatatgttgagcaaagagcataaaagcaatattttagaaacagtgcatgtaattgtttgtctctgttttatatcatgcttttgaggatgcctgtagactctttgatttgtttttgcctgacctttttgttcccaagcgtttgatagcatggaaataagagcgcttgactttgttagctgggattatccttaaacagcatttctctttcgttctcaatgtcattttccaaagttaacaagtagcaatgctggtcaagttttaaggacttgtatatatcttattgatcatatgaaaatgacaagtcaagaagttaattatattgagctactcaattgtatctgaaaaaaaaaaa

SEQ ID NO: 14079 - DNA, 786 bp, Glycine max
  Clone ID: PAT_MRT3847_112721C.1
tttcaaaagaaggtttttgagaggtcgcgagcgagcatcttcgagttgcatttcgcagtgtgtgtgagaagaagagaaaaatggagaaaatgatgcgactgagaccactgttccgatcactgagttgcagatcttatcatgccttcccattcatcaaccatgtcgttcttcgaccttctcttatctctcgctctcccaatcctcttccttctccttcacactcagaatgcatgtctcctttctcgatgggtttagggagcatgcgattctatagtgaagatttgacccacgtgcccaatattaaggaccctgcactttacaatgctttcaaggatttgatggcagtaagttggagtgagcttccggattctgttgtatctgatgttaagaatgtgttgtctaaaaacactgatgacaaagctggcaaggaggctgtggaaaatgtgtttcgcgcagccgaggctattgaggagtttggtgggattctagtctccttgaaattggaatttgatgacagcattggattaagtggcgaggatgtaaagccattgcctgatcatataaaaaatgctctgtgtaccacttttgatcgctactccacctatttgaattcctttggacctgatgagaactacctgcggaagaaggtggagacggaattgggtgcaaagatgattcacctaaaaatgagatgcagtggccttggtgctgaatggggaaaggtacgggtcctggcacctctggacttgaggttcatatgttgagcaaaagcatagagcaacaatt

SEQ ID NO: 14080 - DNA, 533 bp, Glycine max
  unsure (1)..(533): unsure at all n locations
  Clone ID: PAT_MRT3847_112722C.1
catgccgctgcactcgctccgagttcggctcgaggtaaagcacagggtccttaatattgggcatgtgggtcacaatgctttcaaggatttgatggcggtaagttggagtgagcttccggattctgtcatatctgatgttaagaatgcactgtctaaaaacactgatgacaaagctggcaaggaggttgtggaaaatgtgttctgtgcagccaaggctattgaggagtttggcgggattctaatctccttgaaattggaatttgatgacagcattggaatgagtggcgaggatgtaaagccattgcctgatcatataaaaaatgctctgcataccatttttgatcgctactccacctatttgaattcctttggacccgacgagagctatctacggaagaaggtggagacagagttgggtgcaaagatgattcacttaaaaatgagatgcagtggccttggtgccgagtggggaaaggttacggttcttggaacttctggacttgcaggttcatatgttgagcanagagcataaa

SEQ ID NO: 14081 - DNA, 274 bp, Glycine max
  unsure (1)..(274): unsure at all n locations
  Clone ID: PAT_MRT3847_112723C.1
ggggctgttttgggtttccttgtgtttgcttgtggggtccctcttcgccctctccttctattgtgcggcaaaaccaactcggcctgcgtgttgttcctgccctccccctngttccccgcgcggagactcgtgggtccccctgntccttccttggttcagggggggtggccttgtttnccngccccccggggctggggcctttaccgctcagattggcgggtgttcctcgctctcgtggcctgcatcgcggccggccccagtggtcccgttccct

SEQ ID NO: 14082 - DNA, 151 bp, Glycine max
  Clone ID: PAT_MRT3847_112724C.1
acataaactaacaatcacactctactacacattataatcataaacaacatcaccacctaggcatatcacattatcgctttactcataaactacccatatcaactaaataccacataattcaaaccttataacaaaaaccaaatcctaatcc

SEQ ID NO: 14083 - DNA, 386 bp, Glycine max
  Clone ID: PAT_MRT3847_112725C.1
ggctccctctgatgctaaacaacaagcaaattatgttcaggttcagaaaatggatgaagctccattctcttggagatccaattcttaaaatccaggttttggagcgaaataacttcttcaaatcagcaacaactacttgcggatgcatcagactggggtggcctgtccttgaaaatgttctttttaacaccctttgagccctcggctatgaggctaggtgtatccagaatctgcacacacccaaaggaaaaacaaacaaagcaataccatggtcatcacaattcaaaaaatgcaatccatttcaatgtgccccctaaactaaattttctttagttctcaacttctgtctattatatcttatatatcgtcaaccatttaacttgcgc

SEQ ID NO: 14084 - DNA, 703 bp, Glycine max
  Clone ID: PAT_MRT3847_112726C.1
actccatatagagtctctgagtgagcaattgttccttaatctacatcataatagtacttgaatagagaacagaatatcaatactaaacatcaacgaaagaaggtgagagtaggtgacacacgccaacaacaaaaaggagagatgtcgcatgaaccatatcttcagacacttgatacactggaagatccgacgaaatcagtgcttccatgcaatacgcactcacataccatagacttcaccacatataacgaatgcatgcacacagcctagccacatcgtacatcatcctcactacataaatctcatagcattactgcgtgcatcagtcgtactgatcacagacggagacatatagtatcctaaaggacacagatcactcgcaagagaatccttacatgtgtgcttacatggcaacatcttcgtacgctacggaatacatgacggcgtcagacgtatcataggtaccaaaagaggctgcatcatagtgcatataggaacggcctcaactgaagcaaaatatctacacactccgattgtatgcacaaccagcgacgccgagatgcctgatactgagtacgaattgaccaaagaagtagacgcttctacgcatatgtgaagagagcatatgaaggaccaactaggtaactattgcatgcgatcacgcattgttcgtcatggtcaaggattatgactgatgaacaac

SEQ ID NO: 14085 - DNA, 286 bp, Glycine max
  Clone ID: PAT_MRT3847_112727C.1
ctctagctcacgttctcagactctggaagatggacatgatcgctgtcgtgacagaactggagcgtcaagaacagatttgtctcgctctcatgaggtttaatgtgatgcagaagcaagatttgtacaatccggatgcatacctctataaggacttgatcattgcagtggcaatggcttgtataatgcatggagtattgcaattgttggaaagcatgagagaggaaaatctgttccccgattcccagacttatactgaagttataaggggcttcttgaactatggatc

SEQ ID NO: 14086 - DNA, 265 bp, Glycine max
  Clone ID: PAT_MRT3847_112728C.1
aagacgacagaagggggacacacttcatgttcctctacccaacaggagttcccatcagtcttctgttcaggttgtggagaaaaacaaggttgatgctgctcggtttgcccccttttggaatgaggtcataaggaatctaagggaggaggattacgtaaccaacttcgagatggagttgcttttaatgcctaagaattctggggatcttcctttggttcaatggccactttttctacttgcaagcaagatatctttggctagggat

SEQ ID NO: 14087 - DNA, 108 bp, Glycine max
  Clone ID: PAT_MRT3847_112729C.1
caacaaggacggaccgcattggtgtctccaccggaattttacggacttatcgtattctctgaacacgacattgtcaagcttgttgacatcttgcctggccaatccatt

SEQ ID NO: 14088 - DNA, 411 bp, Glycine max
  Clone ID: PAT_MRT3847_11272C.1
ccaggataaaaaatataaatcatttcaggttataacaatggcccattactaaaaaaacaaagttttttttttgacctacaaaggaaccctccccttaataggaggggggggagaaaaacatattcggcccaacataaaaaaaatcttgtaaattgaaatgggcccctatttgccggggggctgcagaaatttgttgaataaaaaaccatgacctttaagggctttacccaggggaaagattgcccaaaaggatccatttggaactacttggaaccgttaacggcccccattttccaccaaaccttaaatccttgcactccctcaaatgggggaaaaaaaaaacaatatcattcatgggctctccgttgcagaaatgcttggaaggcatataaaaccaaggctctgttaaaa

SEQ ID NO: 14089 - DNA, 510 bp, Glycine max
  unsure (1)..(510): unsure at all n locations
  Clone ID: PAT_MRT3847_112730C.1
caggggcgtgcgatctgtccccgtctacctatagagtggcaaatgaccactctgtcagtagatcgatggacacttcatgatgactctcttagagaatctatctcacagaatcatcgactgacttccaagccaagaacatgaaatgtgtagacaccattgcctacgagtgagctgctaaactatgatccccatgaaggtcactggccgctattgagtctgtaaacctgtccagcctcctcgtcccatgatgaagacttcgctgcttgagaatccccatcacgttggagaggctgagaagatatgattgtactacatgaatcttgcagcctctgagagccctaccccgaccgagactgtgagaaatgcactaggcaagacatattatgcctgtctagcctgtgaagcagccatcaaacagatggctacggtcttgtgacccagngctcagcatggcaggtaagttccctacactagcgacatatcaagaatatctcgcagtcaaggctcatg

SEQ ID NO: 14090 - DNA, 248 bp, Glycine max
  Clone ID: PAT_MRT3847_112731C.1
tctgcctgcaaattttcttccactcaatagaatatttctcatgtggtgttagtgttgcacctcaagcacccctgagattcgatcgcaaaaagcttaataagaacatggaataaagataatattctacgttattatttcatttcaatttcgttttcgttttcgttttctgcaaagatttgatcttccaatggcgtccgatggctttatcgataagaagaccgtgttcagaaagctcatggcgtagtctg

SEQ ID NO: 14091 - DNA, 271 bp, Glycine max
  Clone ID: PAT_MRT3847_112732C.1
atctctaccccgtcatcatcaatcatcacctccagtgctgcctcaccctctttccttctcctcctcccaaaaaaacagcaaacaaagaaaaaagcaagagagactcagtgagtttctcagagcaaattaaccaaagcaatgaagaaactaaaacactactattcccaccaccacaactcctcagaacaacaaagacaatgtattttcccagtaataaccatgatctctcttttcggacagttcttcctcctcctcttcgctctcacactaa

SEQ ID NO: 14092 - DNA, 297 bp, Glycine max
  unsure (1)..(297): unsure at all n locations
  Clone ID: PAT_MRT3847_112733C.1
ggaggggaagcaacgancgnagcggtggcgggagcncnaggannnngaaggnggcnagngcagcngccgcnacagccgccgnngccggcggnnaaaangccanacgaacaaccacaacctctgctagcacngaganggaagtgccgggngaganggcacggcgagtttgctgctttcgngacganggnggcnccgggncncaaccgcgggagggngccaccacggacagccgcnggaagaaaccngaganngggcgggcgaagccgaacgggganggcggacgcgacccanacaaaa

SEQ ID NO: 14093 - DNA, 170 bp, Glycine max
  Clone ID: PAT_MRT3847_112734C.1
agggctaatttgggcggcattgggaccaaggaatctgggatgcattacaggacaggcggggtgggtttggctattgcagtcccaaccttgaggttttcacggctggctgaccggagactttggcctggtttttaaactggagagtcaagattgcacccagacgtttatgt

SEQ ID NO: 14094 - DNA, 416 bp, Glycine max
  Clone ID: PAT_MRT3847_112735C.1
gagaaagcggaaaattgtgctaatgaacattgcaaccgggaaccttcaatttccaaggccttcaacctcgaacggcctcattttctactgtaattaccatatattgagaactaaatgacacgactggccaatgacgaaaaatggctaacgactcaggttccgctttgtccctgtgcctaaccctggccttcactatggctaccaccattaccgtctcctagaagtgctagccgctgttaccactggcttgcaactacccatatcctgggcgaacccaaccgtgtgctcctaaatgtaatcacttaaatccttgcctacatagccgcaaacgctcgacagaactaaaccgagtgctgctatactcactgaccatttgcgcacgtgttcgagggaacttttcacccttgtactgtgcc

SEQ ID NO: 14095 - DNA, 161 bp, Glycine max
  Clone ID: PAT_MRT3847_112736C.1
gactgctcatggtgctccgaaatatgggtgcctggctcaattgaattgaagcatgacttacaatagtccatccccgcgtttcgggaacctatgctgggccaacatcgtgagaaaagcggctacggccattgctctcgctccgaacgccactctatgcgcca

SEQ ID NO: 14096 - DNA, 2697 bp, Glycine max
  Clone ID: PAT_MRT3847_112737C.1
gaaagattgacgctacctgggtcctgggagtttgtaatgtaacaccttgtatgtgttgtgttgtttacgtatgcaaattgagaagaaatcaagcaaagccaaggaaatgaaggggctttgacatttccaattttctaatatttaatattcgctcattccaattttctaatatttaatattcgctcattccaattttcatctgagtggcactatcgaaggatggactattctgactatgcaagatatttaacaaacacacactactacaccaaaaaccgaagcaaagcaagcgaagcaagccaatcaagactctacttcgtgttccaatcagaggatatagagagagaattatgagttggttgaacaaaaataaaagtacttgtagtgatggtagtgccaataatgaatcttcttcaagtggaataattggagaaagggataatcatcttgatcatgaaattgcacagctcacaaaacttaggtcaagtcctcatgagcttttgggttgtgttgttcctggtaggatgaggttacctgcatctactgtgagaatgaaagataatagagaaggtaattattctggaagagggagattttcatcagcagatggatgccatgtgttaagccgctatttgcctaccaaaggtccttggattgtggatcggatgaaaagccgtgcgtatgtttcacagttttctgctgatggttctcttttaattgctggattccagggaagccacatcaggatctatgatgttgaccggggctggaaagttaaaaaggacatctctgctagaatgttacggtggacagtaactgatacatctctctcgccagatcaactctatcttgtttatgccagtatgtcaccaattatccatattgttaccgtgggatctggcacaacagaatcaatagcaaatgttacagaaattcactatggattaaatttctcttctgataatggtgatgatgaatttggaattttctctgtcaaattttcaacggatgggcgagagcttgtggctggaactagtgattgctcgatatgtgtatatgatcttggagcagataagctgagccttagaattcctgctcaccagtctgatgttaacactgtctgctttgctgatgaatctggccatctaatattttccggtagtgatgatagttttatcaaggtgtgggataggcgttgttttgtcgccaaaggacaaccagctggtatcttaatgggacatttagaaggcattacattcattgatagccgtggggatggtcgatatttaatttctaatggaaaagatcaaactaccaaattatgggatataaggaagatgtcttctaatgcaataaatctgggccttggagatgatgagtgggactatcgatggatggactaccctgaatatgcaagaaatttaaagcatcctcatgatcagtcattagcaacatataaaggtcactcagtgttgcgtactttagtgcgctgttatttctctccttcgtatagcactggtcaaaagtacatttacacagggtctagtgattcatctgtttacatatatgacctggtgagtggtgcacaagttgcaaaacttgatcatcatgaggcacctgtaagggattgtagttggcacccctattatccaatgatgatctcttcggcttgggatggtgatgttgtcaggtgggaatttcctgggagtgatgaagcccctgcttctccaaataaaagagaaggtcgaattcataggagaaatttgctttatctatagttcatgctctttgtacatatgtgtctggatccatactatattttgctagttacatgggattcatgtctctttctttttacttcttctattttcctacttacagaaagggtcccaaaaaaaaatgttacattgatttataccttgttctttacgttttgtaatcctatcatggatgaacataaagccttggttaatgcataatgttgtcccctattaaacgagcccaaaaaaaaaaaaaaaacaaattttccactcttcctcaccgattgctagaatggaatttcgatgctcagtcatctcttttaccattctcttctctcttgctcttgcaggagagagccatgtccatgcatcgctacctgaggaagattattggggagctgtttggccaaacactcccattcccactgcactgcgaggccttctaaagcatgagcctgctattccctaagtcgataatttcctcttcattgttgatgttaaatagtaatcctctggttctcaattacatagctttggtttttctgcttgcaattgctcgttggaggaattccacaaaaagctgttgtgaccttgtgcaggtgtgggataggcgttgttttgtcgccaaaggacaaccagctggtatcttaatgggacatttagaaggcattacattcattgatagccgtggggatggtcgatatttaatttctaatggaaaagatcaaactaccaaattatgggatataaggaagatgtcttttaatgcaataaagtaaatctgttttatctctccctttgttatgtagattcatagttatgctaatgaattctattgtttccctctataacctacttgaaatgcttttatgttagagtaggtatttcaaagagaaataagtagaaggaagaaagaatatacagagacatgaatcgt

SEQ ID NO: 14097 - DNA, 147 bp, Glycine max
  Clone ID: PAT_MRT3847_112738C.1
ggctttccaacattatgggaacctactttcccacttcgtcataaacatggctcatgctacagagatttctaagtggcctgcgcactcaagagagagcctgcttcggctattgaggagtgctaacctgcttacatgatgctaacccac

SEQ ID NO: 14098 - DNA, 223 bp, Glycine max
  Clone ID: PAT_MRT3847_112739C.1
ctcaaatcctatctcgtatcaaaggaacaaaacaaccacccaactaaccctaattcaacttttccgatctgatcacttcgagtaaaaattccaaatgagtcgggcacaggatgcaaaccaatcattcttcccttttggaaatccttttaggatgatatcacctaaaagccctaaaatttcttcacagctgttgttaattctacatgcttttgaagcaactttg

SEQ ID NO: 14099 - DNA, 371 bp, Glycine max
  Clone ID: PAT_MRT3847_11273C.1
actggtaaatatatatattcttatatgtatataccttacagatacaagacaggagggaaacttcatttcactatcaaatcccaattaagattatttgacagaaaaagaaccttgcttatgcgacgcaattattctaagccgttcaatttttcacactagaaaacatgcatgcaacacacatggtacctagataatgatgtatgtatcctcctatttaattaagtccaaaattttgtttcaaacttgctcttcagggccttaatgcttccaaatagaatataatcgggttacctttgggccaatccctgagcttaaaaagcactatatcactcatcccacacaggaattcattagcagcactggaccccacc

SEQ ID NO: 14100 - DNA, 448 bp, Glycine max
  Clone ID: PAT_MRT3847_112740C.1
ccctgggggggattaaaaaaaaaaaaaaaggcctcagggaaacaaagggcccttttttaccggggccggaaaccaaaaaaccggaagggaaatttccccctttccccaaccaaataccttacatttaaaggggggaaataacatgaccaaaacattttttcccagtaaaaaaaaaaatggaaaaaaccggaccttccttccagggttggggttttccttaccaaaaacccggtaaaaaataaaaaaaaattcattttcaagtaaccccccaacactggaggttttttttgggggaacccccattttttcagggttaaaaaacttttaaaaagaccttttaacccttttgtaaaaaaggggcccaacccccaaaaataaaactgcagcttcaccaattaagggggccgaaggaatgggaaacaaaaaaaattgggggaaaaacccccca

SEQ ID NO: 14101 - DNA, 335 bp, Glycine max
  unsure (1)..(335): unsure at all n locations
  Clone ID: PAT_MRT3847_112741C.1
tcnttgtgtttgtttaggcggtngctattacaaacctttttatctcaaacatgtacatgattgacaaataaaaccaatatatatcccaggaacacatgaaatacccttctcaccttttccttacactgcatggaaaacaaatttttaaaaaggaaagtcgtcggagaagttgtttgaancaccaacncnanggagaatncaattatttttcttccaagggggggggcgggggggctatttttatgcgaccattcttggagactataagatcggactcgtgagtgaatcttccggcggccacaacattcccaagatcgtacgcccccccacccccc

SEQ ID NO: 14102 - DNA, 538 bp, Glycine max
  Clone ID: PAT_MRT3847_112742C.1
caagggctccccaaaataaaaagggaacccaaaaaaaacaaatccaaaaccaaaaaaaaggagaaaagcataacctataacaacaccaaacccaaagggaaggcggtttcccccacttttgtttttacccaaaaataggcccaaaaggagaatacccgtaaaccaaaagaaaaaggaaaaaatggttaattgccccttttaaccccaaggaaaagaaaaaccttggcaaaaagaacaaacttttttaaaaaacacccccttccaaaggcaccccacagggaaatcaggcccacaagctttaagggccccaacatggcccatgttttggatttctcccaggcaaatggcacaaccttttttttttggacttggccaaaaaaaacagaaaatggtttcggcaaaaacctggaaaaaaaaaccctaaaacaacccggggcccacagggccaattctctccccaagggcaagaagccccccaaaaccaagggggccaaggcccacccccaggcctctaggccaaccaaccatatcccaaggc

SEQ ID NO: 14103 - DNA, 337 bp, Glycine max
  Clone ID: PAT_MRT3847_112743C.1
ggctcgagggtctaccagtctttaaattacagactaaaatcggactcaggatggtacaatttggagacattgctatgaggaaagtccatgatcctgacgaggacagaattgcaggcgtaaactctttttaggacacaaacaaggtactcgcctgtttcacgcgtaaatggctgctcggcaacccattggtatatcgatgggcatacacgataagtgtcacaggcaccttaaggagaggaaatcatttggagcaccatttgaaggttttcaaattacccaacaaaaacttgctcagaagcttgggatggttaagctatgacacttgttggttggcgcc

SEQ ID NO: 14104 - DNA, 268 bp, Glycine max
  Clone ID: PAT_MRT3847_112744C.1
attagaattacagatataccctttattgataataaaaatgttatgtttacatggtagacaattatgatgctttatgaggttgcctacccttacactttggaaccttggaaatcattaatcacagattgagttttgttgatgcaacaatcgaacccatactttgatggtttgagatcttataaccacaaaggcatgagtgcaagggacacatgggggtgtaataaaaactggatgactaataaagcgtaggtgggtagtaataaataaa

SEQ ID NO: 14105 - DNA, 1386 bp, Glycine max
  Clone ID: PAT_MRT3847_112745C.1
ccacaggctcgcgggagtcgcctcgtgtttccgtttccgtttcaatttcctctcacaggctttaaccttaccagctcgagataagacatggaccggatcaaaggcccatggagtccggaggaggacgaggctctgcagaagctggtggagaaacacgggcccaggaactggtctctgatcagcaagtccatcccgggccggtccggcaagtcctgcaggctccggtggtgcaaccagctgtccccccaggtggagcaccgggccttcacggccgaagaggacgacaccataatccgggcccatgcccgcttcggcaacaagtgggccaccatagcccgcctcctccacggcagaaccgacaacgctatcaaaaaccactggaactccaccttgaagcgcaagtgctcttcaaccatgatcgacgacaacacccaaccgctgaaaagatccgtgagtgccggcgcggctattccagtctctactggactctacatgaacccgcccactccgggtagtccctccggatccgatgtgagcgagtccagcttaccggttgcatcctcttcgcatgtgttccgtcccgtgcctagaactgtcaaggttctaccacccgtagaaaccacgtcgtcctccaatgaccctccaacttcactttctctatcactccccggtgttggtgttgttgactcatccgaagtctccaatcggacaactgagccgattcatgttacaccgccactgccacatcggtcgaatactatgcctttgctcccaatgatgacgtcggtttcagcgacggtgatggcgccgtttaattttagcgcagagtttcgggcggtgatgcaggaaatgataaggaaggaggtgaggagttatatggagttgcacaatcagaatgggatgtgttttcaggctgcggtgaatgatgggtttaggaacgcttcggtgaagcgtattggaattagcagggttgattcgtaaatattatcatcgaagaatagaatgttcatttgctcctcctaatgaggaaaaaaactaagaatctgtttttttccctgtttttttttaatcaatgttcttaggcaataattttggttgatgtacagcgagacagaactctcgatccctaaagaggctgaatggaaattggaacgaaagagggagatagatgttacccattagataaaatctgaaatctctgttgtaactttttgtatctgaaactctgttgtaactttttttatcctctctattggtcctgttctcttttgaaaacaaaaagaaaaaataatcttggaataaacaaattcctccaaatctccttgtaataataaatctattttcttctttctaaacataaatttcaatctcgaattggttcggatt

SEQ ID NO: 14106 - DNA, 922 bp, Glycine max
  Clone ID: PAT_MRT3847_112746C.1
tcctccaatgaccctccaacttcactttctctatcactccccggtgttggtgttgttgactcatccgaagtctccaatcggacaattgagccgattcattttacaccgccaatgccacatcggtcgaatactatgcctttgctgccaatgatgacgtcggtttcagcgacggtgatggcgccgtttaattttagcgcagagtttcggtcggtgatgcaggaaatgataaggaaggaggtgaggagttatatagagttgcacaatcagaatgggatgtgttttcaggctgcggtgaatgatgggtttaggaacgcttccgtcaagcgtattggaattagcagggttgattcgtaaatagtatcatcggagaaaagaatgttcatttgctcctcctaatgggaaaaaaataagaagaatctgtttttttccctgttcttttttatttttaatcaatgtttttaggcaataattatggttaatgtacagtgagacataactcgatcgatccgaaggagaatggtaatcggaagaaagagggagatagataggtgttattacccattagataaaatctgaaatctatgttgtaactttttttttttttttaatcctctcttggtcatgttctccagtgaaaacaaaaagaaaatacaattttatattaaacaaaatcttctattttcttgctttcaaaacatatatttcaatctggaattggttcggattaaaagaaatttaggctcatgatgtttgacgcggcagggtaaccgagtagcaggatttgaaagtagataaaaatagtttagtgaagggaatattactgaatcgatgctggtttcagttttgatgcacttcccgtgtcgggacccaaaatagtcagattgaattatagtgttgttattggttgaatgagtaaaatttg

SEQ ID NO: 14107 - DNA, 233 bp, Glycine max
  Clone ID: PAT_MRT3847_112747C.1
ccgcttgtacgaacacgccagagggggcctccaaaaccacttattaaggttacgtttgaggaccaccttgggggtcctaaaggttatttggtggctcattttcctggtggggtttcaagtttaccccttgaacctaacttttttaaaaattgttcattcataaattatgactgattataagtattcaaacccatgctgtgatctttgattttccaaatcttaaatgcttctta

SEQ ID NO: 14108 - DNA, 379 bp, Glycine max
  unsure (1)..(379): unsure at all n locations
  Clone ID: PAT_MRT3847_112748C.1
attttagtctctttatagattcagcactacgcatgatcttggcatcaatttagttctatactatgattaatgaaacatgattgtgaccaatnaaaaaaaaaaaaaaaaaaaaaaaaaaaaaaaaaaaaaaaaaaaaaaaaaaaaaaaaaaaaaaaaaaaaaaanaaagggggnnnngatttaaaaggatcaaagattaataaatagtgcttgtaaatttaaaatatattgaatagagaaaattgggggttagtttatggggggaacaatttataacaccgggaaaggaaaaaccttggctttttaaaatttaatgccctttgataaacattcccctttttgacagaaaggggaaaaaagggaaaaggcctgcaccaaat

SEQ ID NO: 14109 - DNA, 288 bp, Glycine max
  unsure (1)..(288): unsure at all n locations
  Clone ID: PAT_MRT3847_112749C.1
aaagaaacttcctacggcctgtctttcttcaagccacagcctgggaacttcgagaaaaacttctcggtaaacttatataaagttaccgggcagttcccatggagctcacttcgggagacggacagaggagtgtctgctgagtacagttttccactatgcaagaccagtcacactgtcatctgggagggtgtgtggcgggaactgggctgnctcgcgcggactgcgtcattcgctgtgcggaaggaaagtggacactcattgaagtcgtctctctcgcatgccatggtc

SEQ ID NO: 14110 - DNA, 213 bp, Glycine max
  Clone ID: PAT_MRT3847_11274C.1
ccggacacttgggcagacccgggggtggcctccgaaatttccaactgtgacccgcaggcgagccaggtttaattatggtgagaggtattaaaggtgggaaaaagtagggccatagctgttccctggggaaaatgaaaacccggcaaaaattccacacaatatactggccgaagacttaaattgttaaccttggggggcttaaggagagtgcca

SEQ ID NO: 14111 - DNA, 392 bp, Glycine max
  Clone ID: PAT_MRT3847_112750C.1
gatggaagatagaaatgtatttgtcgttctggtttttccagcatataagtgacttgtacttggtgaaaatacaaagttacaagcaacacaacacgcctcatactgacttaagcttaaccactcccttaaaacaaggtctttcattcaatttcacctactacatgttgactaatactaacttatatcagaaacataacagcaacatattttaataccaaaataacaagaaaagtctcaattctaacactcctccttgagagttttcttgtgcactccaagtcttgatcttagtagcatttcaaactttcccttgggaaagtgcttttgtcattatgtcagcaatctgttcttcagagctgcaatgctccaagctgatttctcttgacttcaca

SEQ ID NO: 14112 - DNA, 401 bp, Glycine max
  unsure (1)..(401): unsure at all n locations
  Clone ID: PAT_MRT3847_112751C.1
gacccacgcangcgagatnnnccaatccaccaactttttttttgataccaaaaanagcagacgggcccgcacctttcttattcattatcctctccttcccttcccttggcccaattgacaaatgaattccaacttcaatttctatttctatctcatcatcgtatccaacctttccaaatctcttaactaccagaaaaaccccaaaccaactttctcctattccttttcccaacccacatggacccaccgacccttccccactcataccacctactttccctgttggcccccttacatgttcctagacatcttttacaacatttcctcaaccccttaattatcttcctctttcaaaaacattcttatctttaattataaccctaactctttcctacattcct

SEQ ID NO: 14113 - DNA, 670 bp, Glycine max
  unsure (1)..(670): unsure at all n locations
  Clone ID: PAT_MRT3847_112752C.1
gaaacatatgaaattcggcatgttatcatcaaattctccttggataattgaattgctcttttactacagcctacagggaacaattgatattagtggcgtaatcattacattacgttctgaaatgttaatacaggtatacatccaaaactgatgagcttcatcagctttcaacctcatcatatggatgaatgctggattgttggttggtgatgtctcttgtcatggaacttgtcaaggtatttctcaaagatactcctaagagaagccagaggatggttctagatggtacttttctaggaagaagattgaaagaaaactcaccatgacaccatccgaacaagatggcatagatttgaagaaagacactcacctatgcaaatcataatgtttgggctgttatcggactatctgtagctgtcttaatgctcaaaatgttcaatttttcacggtggggtgtgtgttggtctagaggctttaatgatttaatttttgaatccaactctaaaacaaacaccaggttgattcttttttttttttttgtaagcnangatattcctnnnnnnngaaagatagaatcaattttcttagatnnngagatcncatttaaagagttgtcctacctctgttgtctcagatgattcactctattagaaaaattgttcggaggggt

SEQ ID NO: 14114 - DNA, 159 bp, Glycine max
  Clone ID: PAT_MRT3847_112753C.1
gacccctaggcggaattcatatggtaggagatgggcttctattcttgcaagattaccacatctttggattagacaggttttttagaatatctcccgtataacatgttttaacaccaccattactactgatgctttcaacgttctccacacacttgtttt

SEQ ID NO: 14115 - DNA, 805 bp, Glycine max
  Clone ID: PAT_MRT3847_112754C.1
tttcccacagagagagacggtgttgatgtaattctgttactgacataggatatctatctaccaacgagcgagataaaccctatgctctctgtgagtaagagaacggattcagatcacgaattccactatttcgacgaggtggtccagatcaaccataccaaggatggctggctcatcctcttcgctcagttgaacgatgacacccctttcttggaggaccatcccagcagtgatgaggagttggtctctgcatgcttgaaagatgataccaaagactttgaagatgagatctgcaacgactcaggtaaagatatgaagcaagacaactacattgcatactatcatgcatcaaccggcgcacttctacggaatatgttccacctcatgaagcttatgacaaatgctgacaaaagtcctagaataagtgagcaaaccacacgcgatgtcaagattgctctgcatgatcgtgggcaagaactcagatcttcgacacctcgtaaacgaggcaactgaagatgcgaactccattgctgagaaggaaggtgtatacttcatggaacacctccgttctgcaagttactaatgaatagaatgcctctgccgaaagtctgactcccgccaatcacattgttcccaccaaaatagcaaaccgcgagtcaaacagcacccatatgtgttgttggctaaacccagaccccccccctgattcatgccaatcccgcccctaaacaattaaatccagcaaaataccccattaaaccatatccccccccctcttgtcccccccccccccccacccctatat

SEQ ID NO: 14116 - DNA, 267 bp, Glycine max
  unsure (1)..(267): unsure at all n locations
  Clone ID: PAT_MRT3847_112755C.1
aggtgatttcagtgagtgatcggtgttcacttgatctcatcataatcgtcagcgtcaattgaagaagatgccgatcagaaacatcgccgtcggaaggcctgaagaggcgactcaccccgacacgttgaaggcggctttggctgagttcatctcaaccatcaatctcgagntcgccggcataggcactcggcaactccaataacaagcacatcgacaacggcgcagctaccccagctggccacaatctgtcaccatcgctcagcatcg

SEQ ID NO: 14117 - DNA, 236 bp, Glycine max
  Clone ID: PAT_MRT3847_112756C.1
cactcgtccgcggacgcgtgggctcagtgctgctaacacgtctgttgcgcttacggtgcaagctgctgccacggctgctttagcggataatactacttgagaagactcttacgatgttattcgttctcaaattctgtatctatcataggttatgttgaactctctgggttctattttgaacaccatttccgccataaatatgaaaagctttgttaaaaaaacaatactaggactgt

SEQ ID NO: 14118 - DNA, 1236 bp, Glycine max
  Clone ID: PAT_MRT3847_112757C.1
ggtaacaagagattattattatcttgtgattcgtgaatggtgtatagtgcgggagacagtagcacagagaaccaagcaaacaatgggtactgacaagccaaaccgggtcgggtcgttgatatccataactgatccgattcgtgatttcctctccggcgcatcaaaagacgcgactctctccgacgagcttcgacgaacatcctccgatctgctcctccagtcggagataccctacgcgccacttcgcgctgtgtggatggcctctgatccatccaccagacccgacttgacccgactcttttcgggcacccgcttcatcttctccagccctaagcccagggaaaagagtgaagaattgaaggcgaggctgaaaaagttggaagacatagcggagagaaaagcgtatcaagagcttgtgaaggatattacgccgcctaaggatgttcaggaaccgttctcttcttacaaggatcaattaggctttggtttgcatgttgtggttaccatgtttactggctatcttctcggatatgcagcatttagagcattgttcaatcacagtcctgccatgaatgctgctggaggaattctggggttggttggtgccatgtttgtggaaactttccttttcattattagaagttccaatgcagatgccaacaaaacaagaaaatccagtcagaaggcgagatcatccttttcaacatccgggattaagaaaaaccagtagacatgatcaggttggttattttccggttttacattgggtagaaaaacaaaatcatataatgtagtcccttgtaattgtaaacactgttctcatttataaataatgaagatccaagaagtatggacacttctaaccaaaaagaagatgcatgtaaaaactaagtgagatacatatccatgtcagatactgcataaacacttccatacatctaattgcaattataattgtatactttctattcccccaccttctttgactaaaagaagatgcagaagctaaagctagtaacttgaaaatttttatgtcaaatctacctccgaaagcgtttccaaacaaagtctgtaaccctaactttttgttatactaaaactcgaatgctttccacctgctggcatacatgactttgttaggtcttcatattttggaaatctagtatgaacttttcttttgagtggttggctacagctgtttgttgataggaactgatgaagagccttcaattttag

SEQ ID NO: 14119 - DNA, 495 bp, Glycine max
  Clone ID: PAT_MRT3847_112758C.1
ctcagatgtattttgtcattatatttccttctactggattgattatgtacattatcatttgaagtaaaaaattgaagataatgatttgtgatcctaagaaaaaaaaaaaaaataaaaaaaaagcacctgcatataatagtaaaaccaaacttacttactcctgcatgtgaataaataaaaagacgaaaagtataaaaaatgggcggccgttttaaaggtcccaacctaacctccgctgctttgcaacccaataccttttttaaggggaaccccaaagcaaatcaactgcccgacttttaacaaccctgcgattggaaaaaccttgggctatcccacttaaatccctttgcacaacatccctttttgacaagatggcgtaatagaaaaagggccccaacaagtacgcctttctaaacagttaacaaacctaaaggcgaaatgggacctcccctgaagcgcctcattaacccccgcggatgtggtggttacccccag

SEQ ID NO: 14120 - DNA, 952 bp, Glycine max
  Clone ID: PAT_MRT3847_112759C.1
cggctcctttcacgcgtccgccgccgagtcgtgaaaacagaaaagaagagaggcggaagagatcgcaggttgcgcgcctcggagagtgaaagccaacgcaacgcaagagaagagggtcctgctaccataccaacatccacacccttttgtaatttttatcgcaaacccttctgccatcacaaaccctaactcattatttctttcttttaatcttgttatttctctggcctcttttttttaattttcgaaacaatttcatccataacccataccgatttattaatttatctgtccatgcttttctttatacactgatcaatcaataataatctgtctctgtgaaaccggaaaccctaatcggcaatggttaccaccaccgttgattcttcctctaaccattactcacccactgctgctactgctgccgctgacacctctaataatttcccgcgaaaaaacctgccatccccgtgggcccaggtagttcgcggtgctgacgctgaacctaacgatcaatcgccgccatcttcttcctcttcctcgtccctcgattccattaattctaacggtcccgccgttcaaacaagcgatatcgccgtgaaacctgcgtggaagaaaccggaggccaatggcgtcgccgaagttgggcctgtaatgggcgctcattcttggcccgatttatccgagtccaccaagcccaccgctaaattgacatctgactcctctgttaagactgctgctgatgaagagtcaaccaccactcctcagggtcctgttacttcagacccccctcagaaacaagccactgctaatgcaaaacctagtcctactcctgcaatgaactatggtatggctaatagacaaagatcaatgaagcagcgtggaggggcaaatggcaataatgttgggtctggtcctgttcagaacaacttctctggtactaccccaaatc

SEQ ID NO: 14121 - DNA, 451 bp, Glycine max
  Clone ID: PAT_MRT3847_11275C.1
cctcgtgccgaacggcacgagggttaccctcgctcttctcaactctgaaaattctttctattaccttattgcagaaaacgttcaattttctcgtcttaaatacgttgttcaagatggtattactgatgttactcctaatcaagattatttgattgttatgtatgttcctggtagaaccaattatgcttctagagcaatcaccctcatcagatacccaactaaccatccttaaatcaaaatcgatgtctttattcaagtttgttagtaatatttaaataaactctatacaaattttaaaaaaaaaaaaaaaaaagagagagagagagagagagagagagagagagagagagagagagagagagagagagagagagagagagagagagagagagagagagagagagagagagagagagagagagagagagagagagagagagagagagagaga

SEQ ID NO: 14122 - DNA, 213 bp, Glycine max
  unsure (1)..(213): unsure at all n locations
  Clone ID: PAT_MRT3847_112760C.1
acanctctcgccattgccgtnggagagcacttcaattttctctccaataagacaatcgtcttccttctcaattcggcgagttctccaatctnnacttntctgcaacttatgctcagatcngactgaatgnctgacctcgttgcatgggcaactgttggttnaggttatggaacgggtccaattaaattgcatgngggnggcaattatacggcc

SEQ ID NO: 14123 - DNA, 375 bp, Glycine max
  Clone ID: PAT_MRT3847_112761C.1
ccacgcgtccggggaatatgactggcatgggaaaatactataaccacatcgggacgctcagttgaaccctaagctatcctatttggatcgacaaccaataccgaagcagaggaatggcgactcaggcaacatgtagagagataacaaacgaggaacaggagtaacgctgatgatggtactataccacataaaacccaccaaatgataagggcgatagaacaccttctataatggtttcgcaacagatccaattgcagagaaactcagaagtgagcattacagccaatatatatagctataagcatcctagatctgccatgttatcacgcagattgtatgaacgcacgtacatactgggaacggttgggcccaagc

SEQ ID NO: 14124 - DNA, 1147 bp, Glycine max
  Clone ID: PAT_MRT3847_112762C.1
ggctcgagcggctcgagcggctcgagaaagcaggctcgagcaaaaaagtaacaaaaagtgagcatgggaaattccttggtcttcttattgttcctcatcacattgttgtttgtgggcaatgttcaatgcaacccaaactacagagaagcattggctaaatccttattgtttttccaagggcagaggtcaggaaggcttccttctgaccaacaaatcaaatggagatccaattctggtctctttgatggtcgccttgccaatgtggatttaagtggagggtactatgatgcaggagacaatgtgaaattcaactttccaatggcctacaccaccagcatgctgtcatgggccacaattgaatatgggaagagaatgggaccccaaataaaagaggcaagagctgcaattcgttgggccacagactacctcctaaagtgtgccacatccacacctggtaggctctatgttggtgttggagacccaaatgtggaccacaaatgctgggagaggccagaggacatggacactgtcagaactgtctattgggtctctcccaataaccctggctctgatgtggctgctgaaaccgctgctgcacttgctgctgcatctattgttttcagaaggcttgacccaacatactctaacaagttgttaagaactgcccaacaggtctaccactttgctttgcagtatcaaggttcttatagtcattcacttggatcagctgtttgcccattttattgctcatattccggtttcaaggatgagctgttgtggggagctgcatggcttttcagagcaacaaatgctgtttcctactataattttggtgaagtccttgggagctgatgatcaaccagatatcttcagctgggacaacaaatatgctggtgcacacgtccttctctccaggagagcattgctgaatggtgataagaattttgatcaatacaagcaagaagctgagaattttatgtgcaagatccttcccaactctccctcttcaagtacacaatatacacaagggggactcatgtacaagcttcctgaaagcaacctccagtatgtgacatctataacattcttgctcacaacctattcaaagtatatgtcagctaaaaagcacacatttaactgcggcaat

SEQ ID NO: 14125 - DNA, 299 bp, Glycine max
  Clone ID: PAT_MRT3847_112763C.1
ccatccacaccactaataattaaatttgtggggacaattttgttcttgttaccacttatttttttttttctttaaaaaaacaaaaaaaaaagggttcgaaaaagatttcactgggaacaagggggtatgtcttttaagaaaaagggtacccaaaaattgtgttcaaaaaaacattttatggccgagggaaaatttgggggccaaccgcccaacgatttgggcataaacagtcccatcccagggttaaaaggtctttaaagtggccccttcgcctgaaatgggcccctaaatacaattaa

SEQ ID NO: 14126 - DNA, 327 bp, Glycine max
  Clone ID: PAT_MRT3847_112764C.1
attataaagattgagattggtgcaaccatgagttggaaccagagcctgttaacgctggaacaccccaaaagactttttttggcccataggagaaagaaggggagcaaaaaattgccccgggaaaaaaaaaagggaaaaaatactgttcttcctcctgttgaaaagaccgctgtattttaaaatcccccaacttttggggaaatttgggaaaccctcgggggcaaaaaaaaaaaaatacttccgattgggaggggccttccttttgagtaggcgctccgtattcataaaagggaacttttccctacctggggggctcccttagggaaa

SEQ ID NO: 14127 - DNA, 1367 bp, Glycine max
  Clone ID: PAT_MRT3847_112765C.1
ccacgcgtccgcccacacttcctctcggtagctcatcgaaaatgcaagcgtttcgacgaagaatctcaacagcgacaatctccacggcgaagcaattcaacgctcttccatccattattgccggtgaatttccggcaacgagacggcggtggtcgagccgcaagtcccggagcggcgaggacgagtggaacgaggcgtgggagacggcgtggcttccggatgacctgacgccgaagacgcaagcgccgtgggagagcgacgtcaacttcccttcctcctcctcctcctcctccgccgccgccgccaatgacggagacggcgacgaggagacgaaggcgttcgtggcggagatgaacgagaattggaacgagcggcggaaaggatcgaaggagaaggagaagaaggaagagaacggcgcgctttacagcgtggagaatatgaagaaggattatcggttgaagaagcagagaatgcacgctggcttgtggatgaaggagattgagaagcttgaggaagcgaaattgggcgattctgatgttgctggtgatgatgacattcagagattgcttgatagttgctccggcatttttgaccctggcaataatgatctcaacaatgtgcaagttcaaacttctgagttcaaaaacatgcctgatggatgggaaacaatatcaaaaaatcaagaaggaaatgtgtgggagatgtcacagagagaagaagatatacttctccaggaatttgaacgacgtattgcctatagcaaatttcagattgctagttttatcaagactcatatatttagccggaggaggccaattgatgggtggaaatatatgattgagttggtgggaccaaatgctaagagagggaagggtagtgtttctagagtaccaagtctatctgatccctctacccaaccattcaaggaggagaaaaattcagttgataagacatatgttccccgtgagagaaggtagcttggtcatgtggtgttgtgtaatcactttaattgtgctgagttgctgctacttagcctttactgacaacagatgctctccatggaatctcggttaaggttcaaaaccctgcatgaaggataaaagcaagtgacaatgtgacccaggatgaatgtgatactaattattggtctaaaagcaaaaggaattttcttatttgcgatattaagagttactcctaaatctggagtaattgaacgaagatattaaacaggggatcccaaattttaacaggtgtttaatgtctgtagctatatttttgtttacttgtcctaatcacatgaaggatgcaagagaggtttcatcaaggatatcaaaatatgaaaatggctgatggctatattatatttc

SEQ ID NO: 14128 - DNA, 901 bp, Glycine max
  unsure (1)..(901): unsure at all n locations
  Clone ID: PAT_MRT3847_112766C.1
atatcatcatcctccttcctcacctcttttttttttttaattttcatttctctccactttcttcttctttgttaaccttctcacatggaaatggaggaccatcatcagtatggcatcgctgatctgaggcagctggtgaacggcccacggcccacccatttccccgccatgcctccgcagcccaaggcggagctgttcccaggcggcggcggcggccacccaaacctgcaggcggcgacacaacaacactacgagatgatgatgtttggtcgtcaagtggcggacataatacctcgttgtcttcacgacttcgcccccactgattccgccaccaacatcgccgttgccactcccaccaccaccactagcgcctctactcctccgcttagttgcttagaggccgagaccgcaggatgcatcggtggagacgcctccactggaagatggcccagacaagagactctcactctccttgagatcagatctcgcctcgactctaaattcaaagaggctaatcaaaaaggccccctatgggttgaagtttctaggtaccatttcaaacactactctcttctgttttcaactttaacatctgaaaattataattatttatttggttggttctttgcttgggattgaagaagtaaaacaattcaatgtttgtgtagctaccttcttgacggtttcctactaagatgactgcacttaattggttttaatttggttactagttgtagtgatgctactttctggaaactccagtaattgctggaagtgactgtactataatacacgggtcgtggtctcgctactcaatttttcgattattgatcgtgtacgtgtacttccaagtgctagctntaagttcatataccaatattagtacgtctctaccactgtc

SEQ ID NO: 14129 - DNA, 728 bp, Glycine max
  unsure (1)..(728): unsure at all n locations
  Clone ID: PAT_MRT3847_112767C.1
tctacctcgcgttcgaagtgagagtgagagagaaggatcaatctaaataatgagaagtgaatatctctcatagtgtcgtacagcatacaccacacgcatacatttgtacacagacatgggaccatttctctgcgtttaaattttgatctttttggtggacgacaggatccgagtctgccgcttccctctccatatcatcatcctcctccttcaccttttcttttcatctctctctctctcattctcttcttcttcttcgttaaccttctcctatggaaatggaggaccatcatcgtcaccatcatcagtatggcatcactgatctgaggcaactcgttaacggccctcggccgactcatttccccaccatgccgccaccgcccaaggcggagctgttccccggcgactccaacctgcaggctgcgacacaacaacactacgagatgatgatgtttggtcgtcaagtagccgacataatgcctcctcgttgtcttcatgacttcgcctccaccgattccgccaccaacatcgccgttgccactcccaccaccacccctagcgccttcactcctncgcttagttgcttagaggccgagaccgcaggatgcattggtggagacgcctccactggaagatggcccagacaagagactctcactctccttgagatcagatctcgcctcgactctaaattcaaagaggctaattcaaaggtcccttatgggatg

SEQ ID NO: 14130 - DNA, 687 bp, Glycine max
  Clone ID: PAT_MRT3847_112768C.1
ttttttttcacaagaatataaattttttaaatttctataaatattagtattttacaatgatttttgcaacggccaacaaactgattactgtatattacattttgggcctccacaacaaatttgacatgcaatccacataccagaaaaggcatgggcatcagcgatatacacgaatcactaaggtttgtagtatacatcttactcaacaattcatgcagaaattactaattaaagaaaggtggctagcaacaactaacccaaactacactaaattcactcatccttggactcttcctaccactcctttttttttttttacctttcctattgtattttcctcactttcggatatatatagttggcaatgctcttgaaacagtgcatagaccaaaaccgaactcaaaaaaataaaagataaattaaaaattttgaaaaaaaatcaatttatccttgtactgttccttcttccccaccactttttcttcattttctcaagtgcgccatcttcgcttccaagtttatttataataacttttgtttcacgcagtcttgccccataatcctttttccaagcttcaaacatctgttttaaccttctaagctcttgatctgggttcaaacttgcttctacctgaccagattttacctcaaccaagaacttggcatcatcaccaaatacttgactcc

SEQ ID NO: 14131 - DNA, 297 bp, Glycine max
  Clone ID: PAT_MRT3847_112769C.1
acccgtccgcggacgcgtttggttttactacaactaacagaagacgccacgctactggggcaatatattaagcatattttacaaacctgaaaggctaaagatgagtgggtacctccgcggaagcaagaactgagcaagacatgtgtgaacaaaccgtgccatgcccgagtaatccatataaaaaccaatatgagaagggggagagaaaaaggcgatattactattcaacaacagaacgtatccaactaccataatcagaagacaacgtaaaagggcgaaccgcaaaaaaaagcgggg

SEQ ID NO: 14132 - DNA, 481 bp, Glycine max
  Clone ID: PAT_MRT3847_11276C.1
cgaatatcaggggcgtactgttaagatagtaattttagcaccacacgatgatatccgagataacttaaataaccagcgtgacaggtattaacggcgcgggcagcactactacttaatgtatgctgctactgccagccaattggcgatcgtcagagcctatcgggtactcttggctgaccaaactacagactcgtgcacttgaccctggccggtagaattatccgagcgtcagcatggcaccgcgcggagtacacagtgcacgatatgccttacgagggaaggtccaaaggaaactcacacgagcgtctggagatcgcgaacctagggatcacataacatattgactacgttttgccctacaaaggaatgaccaagatactgcacatatagagggctgaggtgaaaccttatatgcagggacgacatatgattaggctagctactactgcaactgtgaagatctctcgcttttggcataccc

SEQ ID NO: 14133 - DNA, 370 bp, Glycine max
  unsure (1)..(370): unsure at all n locations
  Clone ID: PAT_MRT3847_112770C.1
ggaaagcccccaccccggccgggaccggaacggaaggcccgganccacccacgcgatggatcacgcagacgacacagaaccaaagggaggggccaaaggaaaggcgccccccccaacacaaagacacaangggcaaagaaagaagcacccgcgcgcaaccaccccacaccacaacgacacccgcagaggcagaaaaanacggaaacagacaagaacaagccacgaacaaacagaacaagcccaccaagnacagaggaaaagcacaaacagagaggagcgagacgcgaggagaggagcacgcccaagaaggcaacgagcacacccaagaggggcncaaagagaaagagagaaccgagaggccaccaggaca

SEQ ID NO: 14134 - DNA, 376 bp, Glycine max
  Clone ID: PAT_MRT3847_112771C.1
aaaccaaaagagagtatgtcattagacgaggggcaaaagccagctggccctatggagttgaagtgggctggccctatggagctgagggggtacaggctattacgactttgtatacgtcgaaggggaagaatgcgtacggtgcgtgagcgccgcaacgcgagcgagcgagtctagataatctataataaacgagccgatgtaaacagagatcaccagttccgaatgggaaccgcaaaaactccttacaactcctcgtgaatgaagaccttctcgtcgcgcttgcgccgggccatgcggtcctttttgagcttttggagctcaaaggccgacttcttcttctcctttttgacccatggcaaaagggttgccaaacgcg

SEQ ID NO: 14135 - DNA, 604 bp, Glycine max
  Clone ID: PAT_MRT3847_112772C.1
cttggggggggggggggggggggaagagagaaagtaggggaagggtaggggagagtagggagagagggtgaggggatgaagggagaaggaaagggtagaaaggaaggataaaaaaaaaaaggcgaaaggaaggggaagagttagaggtgaaaaaaaacaaagcgggcaaaggcgtaagtgttgggcctaagaataataaaaatagtactaagccattagaggtggcctactcatggggcacaacccggcagaagactgtcagtggccggacttacctcagacttcagaataagtgtcgggtggcgatcattttgaagtaggagagtagacaaatatatggtggttggcgtaaagaaagataatgtgctgctgggtcgatatagtgtcggttttgttgtgctaaagaaggttgtaacaatatccggaagggctggcgtggtgcttattaggctgacgcttagctgaattactgtaggacagaatatagaagtatgcaggtggcatatacatatgacagggtgacgttgacaagtgaaaagggtatgaaggagaaggcaggcaatgcaactggctgctagcgtatccagttaacacgcgcacacaa

SEQ ID NO: 14136 - DNA, 754 bp, Glycine max
  Clone ID: PAT_MRT3847_112773C.1
cttcacttcacattcacagcacacatccttcgggtcgaccaacacacatatccattctctctcatggcttcttcttccatttccgcaccaacgctcaccttcccgacgcagaagcttgccgttccgttccccgcgccccggacgccctcgctcctcccgttcccatcgcaacccccctgccgctgcctcgcctctgcctcctccgacgaccgctgttccggcgccaaacgcagcggctgggactccgtgctgcaccagttctccgaggtcgccaagcgagtcgattcctactggaagtccctcgggaacgccgccgctgacgatcgcgtccgcgtcgtcggtggcgacgaggattgggattgggatcgctggcgccggcatttcgaggaaatcgacgagcaagagcgcctcctctcgattttcaagtctcagttaagccgtgccgtgtatttggagaattatgaagatgctgccaggcttaaggttgcatttgcagctacagctaacaacgacagtgttggaagagtgatgtcttatctcaatagagccataaaagaggagcggtatggtgatgcagctttcttaagagataaagctggcgctggacttgtgggttggtggtctggtatttcagaaggtgtagatgatccacatggtctaattattcgcataactcctgagcatggaagatatgtggcgaggagttatagtcacaggcaacttgcaacttctggaggaggcattcctctttttg

SEQ ID NO: 14137 - DNA, 527 bp, Glycine max
  unsure (1)..(527): unsure at all n locations
  Clone ID: PAT_MRT3847_112774C.1
tacgagcttggaccttagagtttcggctgtgttaggctttttttagnnaaaataaaatnaaagggtaatgtttttaaacgaaagaagaaacgagttttaaacgactaacatgagtgcacatcgtgagccgatattaacggtccatgcaaagagggccatgtccgngttttatatttaggggggggggagacccctcaagtgcagccagcaaaaccaccacttcaacgagggggggtgggggggggcagcagccttggtcaccttggcaccggttgggaccttattctccacgaacttgaagacgccgacagccaccgtgtgcctcatgtnacgcacggcaaaacgaccaagaggaggctactcagagaaggtctccacaaccatgggctaggggggaagcatcttaaccatagccaacccacggttcttgaggaacttgggntacttnancagctccttgccggaacgactggagatcttgggcacaaacctaacgaaattggcggggatgggtgaggaggggcccc

SEQ ID NO: 14138 - DNA, 424 bp, Glycine max
  unsure (1)..(424): unsure at all n locations
  Clone ID: PAT_MRT3847_112775C.1
aaaattgggttgattgatgtgcatgatgtcgtgagaagatgatcagaggggcttccctcagatacgataacggggcggggcgaggaggggcaccgctcatttaacttgtgatttcgatctttctaatacgcctttacatctgcatttgacatctgatagaccaaaacccaccactctacttttgcatttaccgggcactgggcacctttgattctgctttgcattagacctaaaccagaaaaacgcccccccccgcaaagaaaacaccaaaaacccgaccccagaaaaaaacaaaccgaccgccaaatacccacccccaatcatccacacgccaacaaacccaccacagtgtccgcgctcataaaaactgccaagaaaaagacaccaaaccacgcaaaanaaaaaaaaaaaaggaaaaacaaaa

SEQ ID NO: 14139 - DNA, 383 bp, Glycine max
  Clone ID: PAT_MRT3847_112776C.1
atcaattgaaatttcttaaatttcaaattctaagtttggacaccacaattcactgtatgcaaaattttgtttttaaatatatatttaaaaaattgaaatttcaatattaaacctactaaagataaccattagccaattttaaaataatcaataattcaaaaataatttaaatattaaataacatttaatcatttaaaaataattttaaatatttgatgattcataaaaatattgataagttttacatcaatattgatagagagaagagaaacagcctaaagttatacagaaggaagagaaagaaagaacatatagagtgaatgaatattaaattttcacttttcttaaatagaattcgaaattctataattttatgaatttaa

SEQ ID NO: 14140 - DNA, 493 bp, Glycine max
  Clone ID: PAT_MRT3847_112777C.1
gggggaaaccccatttttttaaattaggccggaaaaaatgaatcccgcgtttgggtttgaaaccaaaaggattatttcatccagtttggaaaaaaaaaacgtttaaagaaaattttttattgggggaaaaaaaacaaagttaaggaccaaacttaaaaagtaatgggggtgggaaaaatttttaaaaaaagaagggggggccgggtttttggggggtaaatccggctttggccgaccaattacgttcggaccaaaaatatgaggcctttgtttagaagggccaaaaaaatttttaagtttttccatcccctggaaaggcagcatttcaatcattttgggatcggggactgggttttttttgcggattgggggggcaaaggaggagcggatttcggaaacgaaaacaacctataagaggttgtaaatttctataacggggggaagggatctgcaggccgttttaaaaaataaaaaaactcggggacccccttcc

SEQ ID NO: 14141 - DNA, 368 bp, Glycine max
  Clone ID: PAT_MRT3847_112778C.1
ccaaaagcaaaaaaacgggggctattctatacggttatagaaataccaactgcatataatcgggatgaaaggaaaatgaccataccgacccattctaaacactgttgcgcactaaacacacacatatctattatatatacctttttgacacaacatgaaaaccccctctgacgaataacgctaactctcacttttgtctagttttctatcagactcaacttgtcattctgaagaggactcttctgctgctacactagactgtgcacgtcttctgaaccctaccacaatcatggccatgtcatcccattctttaccactggcaggttatggagccgaaatccgatcaagctctcttacacacaccgtaa

SEQ ID NO: 14142 - DNA, 478 bp, Glycine max
  Clone ID: PAT_MRT3847_112779C.1
tacggctgcgagaagacgacagagggttcccattcagagcatgagagcaattgtgtcaagtgcaaatcaatattgtttaatgaaaaaagcaaaacctgcatgtattgttattttttttcatagctagcggagcttaagcaacatacgttgctcaatttgatttaggcaatcacatatgttccctttgataatgtgcttcttctctacagactcaataatatatatacgacatcaattttcattttagaatcaatctgattcagtaagtcatacacaagatatcagcaaaatgtgagtcagaagtttgtgtatctcaactgcttacattatctggctttaatttcataactgttttcatttttagttctttcacaaataaataaaccaaaggaaactttatgtggtattattatgaatagggttaaataggtttttagtccctccaaacaagacaatgttccattttagtatctgaaaa

SEQ ID NO: 14143 - DNA, 489 bp, Glycine max
  Clone ID: PAT_MRT3847_11277C.1
ttcgttccaggaaggtttcccgtcatcactgtatgacgtcctccttctttgggggggggggggggacgggggtacttaatttaaagagagagagagagagaaaacatagcagaggacggtgcccctcaactaggagccggagaaagtaagccagattatgacgccgtcacgtattgggcgtacgtataaagcgtggacaaaggggtgggcagccccgtataatggctatagtagagcggttaggaaatttgtgcaacggcgaggcattggctgtagtaatagcattatcttgaggataacgttatgtggcgggaacacagaacaattggggtttacttgtaggcagcgtattggtgcgtaggtattaacgcgcaaggcgtttgatgtagaaataatgtttaaaagttttatagtaggagcttgggtattcgacgagcacttagcctggtctcgactagaatggtaacagtagtgctgtgaatagaggta

SEQ ID NO: 14144 - DNA, 762 bp, Glycine max
  Clone ID: PAT_MRT3847_112780C.1
tacggctgcgagaagacgacagaaggggacagcacagatattttctcaaagggaaatagcaccatttggcattttacaatttccaagctatggccaaatcaactgggtcacttgtctttctctctattttcactttgctcctttcttgcaacttaggagggcacttaaagtttgctaatggaatgctagaccaggaaagttggtgcgtagcaaaaccttcaacaagtgatgttgcactgaatgataacattcaatatggttgcattgccttgggtgattgcaaaatgatccaaccaggtggatcctgcttctacccaaacactctgttaaaccatgcctctgttgtcatgaatcagtactatgcagctaatggtagaaacacttggaactgtttcttctctggctctggtctctttgttgtcagtgacccaagttacgctaactgcacctatgcttagcgggaataaaccggaaaaaagatgtcttgtttagagatatttttactattttactctataggctacgtttgatttccaaagcttattactacattctactaggtgctgtaaggaataggaagtttattattcactgttgtggtctttgtatttcatgaagattagtactttgttatttcattacctaatgaaaatatactaggtttcaattataagattacttttatggctatattgttgtctctttatttcatgtttactttgtctataaaaaaaaaaaaaaaaaaaaaaaaaaaaaaaaaaa

SEQ ID NO: 14145 - DNA, 500 bp, Glycine max
  Clone ID: PAT_MRT3847_112781C.1
aaacccgccccaaaggtaaaaagggcttttttggccttcgggtccaaaattaattcccccgaatttttaaagggaaaataattccatatttccctaaaaaacgggggggaaacaaaaaacccttttgcgcaaaaaaatgggaccaaaaaaggaacccctaccccttaagctccaaaaatataaacggggggggaaaaaggggattagggccctaaaacccacttaaaacctttgaaaaaagagtcccaacgtttttacaatatcctttaaaaaaaaaaaacctgggttttttctccagcaacaaacccttggcccccaaaaaaaaatatgcgggggggctcacggggggggggggaaaactcaccaacccaacaggggcctttttggagtttttaaaaatgggcaaattgagcttaaccgccgggaaaaaaaatttttaaccctgtttttaattcacaaccacgggtttgccatttgccataaaaggagacccttttttt

SEQ ID NO: 14146 - DNA, 1468 bp, Glycine max
  Clone ID: PAT_MRT3847_112782C.1
cccacgcgttcgtacggctgcgagaagacgacagaagggggtccctgtccatgttgagcgcgtttgttcacgcgccttcaatttgttcttccaacaccctcagtcattgtgtgagtccgaagctcaacctctctcgctcttcaatggccgtatcctctattcgaatcgccgtcgtcggtgatgtgcatgattgctggaaccttgaacaagattcgaaagcacttgagctcttgcagccagatttggtgctgtttacaggtgattttggtgaagaaaatcttgaagtcattaagagtgttgtgaatcttgaatttgctaaagcagttatattgggaaaccacgatgcctggtttactaaacagttttctggaagcaaggagaaggataaagttcagcttcagctagaatgccttggtaaggagcacgtggcttatcaacgttcagacttccctcagataaaagtaagcgttgttggtggacgaccattttctattgggggtaaaccaatgtttcggaaaaagcttcttttggcaagatacggagtcaaagacatggatgagagtgctaagagaatccagaaagctgctcttggaacaccagaggaccattttcttatattacttgcacataatggacccacaggccttggttctgattcaaatgatatatgtggaaaggattgggaatttgagggtgatggtgatcatggtgacccagatctagcacaagcaatatccttgctaaaggagaacaatcagatatccattccattggttgtgttcggtcacatgcacaaagagctggcatatggcaatggctttaggaaaatgattgtggttggcgctgataacaccatatacttgaatggggcaattgttccaagggtcaaaaggttgggtggtgatgaagacaagaaaagcttagatgatgaaagtgcccttgcctcaccagaggccaaaggtacaagaagagcctttactttagttgagatttcggaaggaagagttgccaagattgcagaaagttgggtctcggttgtcgaagataggaccacattagaagaagagcacatactatttgagagcagctaggatcctcatcctccacatataggttcctgcttcagtcacatggattttaatgcgcatagataaatgcagccaggggtgaattatgtctcgatactcatgaatacatcgtatttaatgttagtaactactgtatagacttgataaatggtacatgctctgataccaattcccccttatctaggtggtgatttattgcttgtaccgctcctccattctatgtggcaattcaaatgtgcagggttcgtgccattattttctttctagcatagaggacacctatttcttttgcttgtccttgcacagttggatagatgttgaatgatgtaggtgggtctattggattacccaggctgttccaaaaagaaaactttagaaaa

SEQ ID NO: 14147 - DNA, 740 bp, Glycine max
  unsure (1)..(740): unsure at all n locations
  Clone ID: PAT_MRT3847_112783C.1
ccacgcgtccgccgtggttctcgcgcgtggttgactaccgtcaaaggtcattttccaggcctgggtcgtccttgtcgttgacagccattgtactgtgaatacaagtggtagagctccatttcatcacgctgactcaagttgttggcttcgatcaagaattggagccactccctgaattaaaaatatttgatgagataaggaagttccatgaacttacagaattgagttctcgaagggaacactttgaaaatcccgtgaaactcccatctctttctctcgttgtatggcaaacagcaaatatgagtatgtcaagtgttttgaagttgaggatgaggccatgtttcccaatatcatccttgtttggatcaaggctagtaaactccataaacctcatgattcaaataccttgaaattgatgaactcttgtgctgttgaagttcttgaagagtatgcagatgtagtctttgcatatgggttcagtgatgagtatacttttgttttcaagaagacctccaagttccacgaaaggcgtgcaagcaaagtgctatccatcattacttcttttttctcatctgtctttgtgagaaaatgggatgaattctttccacacaaggaactacaatgtcatccttccctacatgggcgggtcatagcttgtgcgtncataaaagctctccaagcttatctttttgtggcggcagactatttgtcatttgagtaatcaacatgagcaatgcctt

SEQ ID NO: 14148 - DNA, 256 bp, Glycine max
  Clone ID: PAT_MRT3847_112784C.1
cgccctccagaaaccctaattcccgatgttcgacttcagtatcatcatcctccatcttctccttcacccccaaaaccctaaccacacccccacatcaatctcgtttcaccgtccgggccctcgccgcgctcaagtccctcctccagcagaagctcgagctcggagaagacgacgaagcggtctccatcctcaagcgttttttcgccgcgcaggccgacgccgacgactggaagttcctggcggcgcggctgcgccc

SEQ ID NO: 14149 - DNA, 771 bp, Glycine max
  unsure (1)..(771): unsure at all n locations
  Clone ID: PAT_MRT3847_112785C.1
cggccgtccggatcgtcgtgaaggctttccagcacctccgtggttctcgcgcgtggttgactaccgtcaaaggtcattttccaggcctgggtcgtccttgtcgttgacagtcattgtactgtgaatacaagtggtagagctccatttcatcacgctgactcaagttgttggcttcgatcaagaattggagccactccctgaattaaaaatatttgatgagataaggaagttccatgaactgtaccttgaacactttgaaaataatgtatcgatttttaatttattgtgaagtgtaccttgaactgtgcctttattttggttttacagtacagaattgagttctcgaagggaacactttgaaaatcccgtgaaactcccatctctttctctcgttgtatggcaaacagcaaatatgagtatgtcaagtgtgttgaagttgaggatgaggccatgtttcccaatatcatcctatgcatatatcaaggctagtaaactccataaacctcatgattcaaataccttgaaattgatgaactcttgtgctgnntgaagttcttgaagagtatgcagatgtagtctttgcatatgggttcagtgatgagtatactttttgttttcaagaagaccttccagttccacgaaaggcgtgcaagcaaagtgctatccatcattactttcttttttctcatctgncctttgtgagaaaatggggatgaaattctttccacacaaggaaactacatgtcatncttccctacatgggcgggtcat

SEQ ID NO: 14150 - DNA, 501 bp, Glycine max
  unsure (1)..(501): unsure at all n locations
  Clone ID: PAT_MRT3847_112786C.1
ccgcgtgcttgtaccggtcctttttcctgggccaacccacttctctcttatncaaacaaggaggcaaagggggaggtttacttgatcgtcgtttgtttttcaagcgccttgttctagtcatcctttctcttttttttcttttaatttatggacatttttcttcttttgaaaatggagncttgctctttttcaattgtcttgctttgtttacgggcctttattttctttttatttctgctgatttcatgcttacctgggatactcactaaatcatttgcatggttaatttattcattttctttttacttttttcatcaattttattttatggctcccttttttttatttttgtttttccatcttactctttctttactctgttacctttttttctttaatatatattttttttttttttcactatctttattcctccatttcttccctttattttccttttttcatccatcttttcttgtttttctcttcttcactaacttt

SEQ ID NO: 14151 - DNA, 456 bp, Glycine max
  Clone ID: PAT_MRT3847_112787C.1
atcaagaggctagctatttgatttgagaaaacattttttatttgcacttcaaattacaaaaacaatgctaggtcccttgttttcactttttttctatacaaacttttgaaaatagaaaataaagtgacatttttgtaattaaaaataaaaaatgttttcaaaccaatattttagttaattggattcattttcatttcagaaccgacttaagaagttataagtagtgttttgattttccaaagagcttcacttgaaattgtgttattttttattttcattctgtttcatggtttataggtcaaagtgattgtttaaattatgcgtccacttattatgtacctgctttctctatttgtgcaaaatcttatataatcttagcagctcatattgaatatttcatcgttttgtacaacttcttttgataagacattcaaataatgattgataaggctatag

SEQ ID NO: 14152 - DNA, 602 bp, Glycine max
  Clone ID: PAT_MRT3847_112788C.1
caaaacccccccccccccccccccccccccccccccccccccccttacaagaattcataattttttctttctttctttttttggtttgtaacaaaattcagaaaccccaaaaccaataattgggggggggaaattatttacgtcccccaaaactttttatggggggggaaaaaaaaaaatttttttttaaccccccctaagaaagaaggggggaacaattttttttttttacacaggaccccccaaaaaaggggcctgcctttattaaaaaacttggggggccccaacaccggggtttgggggccaaaaaccccccgaggggcccccccccccccttttagggccccctgggcctttgtccgcttttagggggccccaaagcaccccctttgggcggaacccccctcttgggcctaaccaaggaggccttttaaccataggatcccccagggccctgggggggggggggcccatgggggaggaaacacccggccaggggaggttggagcgccccaggggaaccctccaccggtgcataacccctttggggggccccaaaaccccttttttaaagggtgacaacaaggttaaaaaaggaaaac

SEQ ID NO: 14153 - DNA, 163 bp, Glycine max
  Clone ID: PAT_MRT3847_112789C.1
catacggttggagatatccttgttgcagatgggaatttctgttgaccctgcacgtatggatccaatggctcgtagaaaatcggagctgggtgagattcgaacactatatgcgtgcgccattgtctgtccgctcaagatcgtgaatgacgactcctatgtgcta

SEQ ID NO: 14154 - DNA, 415 bp, Glycine max
  unsure (1)..(415): unsure at all n locations
  Clone ID: PAT_MRT3847_11278C.1
gtcgggtgtcatttgggccgacgttgtttcaaaaatctattaagacgggtggaagatgcacccgttgttgcttttaaaaatttcaacatcgggcttacgcacacccgtcattgttgaaggaaggtataaagacgggtcttggaacgaccgtcgttgttggagaacgctataaagacgagtcgactaacgaccgtcgttgttttataaggctataaagacgggtcgactaacgaccgtcgttgttttagttgccctgcttacaaaactgggttataccattcacgcagaaagtataattatattaggaaataaactaaaataaacataaagtgtaatttgggttataccaagttatccatcagttgcaagatcagcttatttttacatgaaattcactgaaaatcacanaatccag

SEQ ID NO: 14155 - DNA, 1039 bp, Glycine max
  Clone ID: PAT_MRT3847_112790C.1
tttaaacctaatatcttaattaagatgattatcaaataaataaaaaatgtaaattaagttttggaattcattcattcatagtatttaatacacgttatacttggccccaaaaataatagtaaacgaaatcgaaacgaaaaacaaacagaaggaaggcagcaacgcaacggaagggagggaaatgtcatacggcgagtgagatatcacccagctcaagctgagcagcaatatcctcaagctgcttcctgacgctcatgtcaatcaacttagagcccgaatacctgacagtgaaacccgccaccaaactagggtcaaggagcgtcttaattctcacgttcttcgtcccagtgagcttctgaacctgcttcgcgatctgcgccaggtgctgcgactccagcttcaccaccgacgtcaccaccgccagctccgtttcggtcaaggaattgtaaaccagttcgaactcttttgctatctcgttgatgaggtctatcctctgcgcgtccacgaggatgtagaggaagtttctcgtgtggggctggaactccgaggattccgcaatctcgtctatcagctggcgcttcttctccacggccagggtggggtccgcgaagtagtccgacacctgcgggtccgagaagatttcgtcgattttctcgatgtccgcggttgtcgcgtcgagggtgttgttcgcggccgccacgtcggcgagggccgcggcgtagctggaggctgcggtagctgacattctggctcccgtggcgccggtggagcggcgggtggcggcggcggcggtggtggtggtggtaacgccgaatttgagcttgaggggggtgaaggtggtaccatggagggagaggttgaggatgggtttctgggagagggtatttcgggggattaggatgtgtttggattggagggaagctgtggggtgctgcaaagacgccatttttgtgcgggagtggaagaatgaggaatgagtgtgttgtgggattgaaacgaagggtctttgtgctgtctcttggtgtcatcaaccaagaga

SEQ ID NO: 14156 - DNA, 455 bp, Glycine max
  Clone ID: PAT_MRT3847_112791C.1
tcaaaaacaggcccacccagctccgggattctttcctgaaactttactctcacacacatggctcgctcagtgcctttggtttcaaccatttttgtcttgcttcttcttctgatagccaccgagatggggccaacaatggtggcagaagcaagaacttgtgagtctcagagccatcgtttcaaggggccatgtttaagtgacaccaactgtggctctgtttgccgaaccgaaggtttctctggaggacactgccgtggcttcagtcgcagatgcttctgcaccaaagaatgtaataaaaataataataattaagagtgctttgatagaagatgatagatccatcacctttctactcgtgtttgagaataaagggttacccattctactaagggtttgtctcttattttatttagttagatctttttatgatatgagtgagtgtgaaggaattatgg

SEQ ID NO: 14157 - DNA, 1362 bp, Glycine max
  Clone ID: PAT_MRT3847_112792C.1
ctcttaaaatttggaaattaaagtgtgattgctcatagttggtgtctcattgccatcaagaaaaggaagaaagaaaaagctcaaaccaatattaaacgcgagcaagctattatataaggttgtacacagttttcgaattcattcattcatattccatacacattatacttagccccaaaaataatagtgaaaggaaaccgaatagaaaacgcagcaacgcaaggtagagagggaaggaaagctcatacggcgagagagatatcacccaactcaagctgagcagcaatatcctcaagctgctttctcacactcatgtcaatcaatttggagccggaatacctgacagtgaaacccgcgaccaaactagggtcaagtagcgtcttaatcctcacgttcttcgtcccagtgagcttctgaacctgcttcgcgatctgcgccaggtgctgcgactccagcttcaccaccgacgtcaccaccgccagctccgtgtcggtcaaggaattgtaaaccaattcgaactcttttgcgatctcgttgatgaggtcgatcctctgcgcgtccacgaggatgtagaggaagtttctcgtgtggggctggaaccccgaagattccgcaatctcatctatcagcttccgcttcttctccacggccaaggtggggttggcgaagtagtccgacacctgcgcctccgagaatatctcgtcgattttctcgatgtccgcggttgtcgcgtcgagcgtgttgttcgcggcagccacgtcggccagggcagccgcgtagctggaggctgcggtggctgacattctggctcccgaggcgccggtggagcggcggacggcgccgccgctgaagaatttgagcttgaggggggtgaaggtggtgcccgggagggaggagaggttgaggatgggtttctgggtaagagtgtttcgggggattaggacgtgtttggattggagggaagctgtggggtgctgcaaagacgccatttttgtgcgggagtggaagaatgaggaatgagtgtgttgtgggattgaaacgaagggtctttgtgctgtctcttggtgtcatcaaccaagagaggctgtgaatgtgatacgaaggattgagaggatcaccgttgccttatctcgcggataagataataaactttggatacgtggacgcctatgtgtggaaggagggtttttttttggttttctgatttggatttttatattttagtgttggactaagtttattgaaaattctaccaaagagaaaaggagataagaaatgagttggattgaatcaatgtgtagtagtatcttgttttgattcagtatatactaggaagtggcccgcaagcattgcacgttcagt

SEQ ID NO: 14158 - DNA, 2227 bp, Glycine max
  unsure (1)..(2227): unsure at all n locations
  Clone ID: PAT_MRT3847_112793C.1
cgaagatctcatcagaagatctcatcaccaccatcctgacataaagtcacctcaaaccacaacttctttgcatctaacacaacactctctctctctcttctctttctctgcgtttctctgaaaaaccaaaacaagctctggagaaaccgccacaaaaaaaagaaaagaaaacgcaaacctaaccgcaaacggtaaccccattatgccatgcttcacaccacacccctctcttctcttccttcttctcacccttctctctatttccttcttctctccttccaccgctgcaagaacctcttctttccattccttacgtatttcagatggagtcgaggatggtggtgagggagagtactaccacgaggtactaccatggaaaacgaggagatccatggctgaagaagaggccacgagcaacacgtctctgatattggctcagagaagaaccacaaggaaggaccctttggataactacaaccattacaccggtggctggaacatcagcaatcgccactacattgcttcagttgttttcactgcggttcccttctttgttgttgctgcggtctggtttgtggtttttggactcagtttatccttcatatgcttgtgttactgctgttgtccaagagagccttatggctattcacgtttggcctatgctttgtccttgatcttcctcgttctcttcacccttgcagcaatagttggatgtgttcttctttacactgctcaggggaagtttcatgggagcaccacaaacacgctgaaatccttggtgagtcaggctgacttcaccgccgaaaacctcaggaacgtgtcagattatcttgatgcagctcagaagatcggagtcgaagcggtttttttaccagccgatgttcagaagaacattgatgaagttcagatgaagattaattcttctgctgcagatctttccagcaagactaaagaaaattcagagacaattaaagatgtcatagatgcaatgagacgggatctggttattgttgctgctgttatgctctttcttgcatttcttggattcttattttcaatatttgggctgcaaggtcttgtatactttttggttattgtcgggtggattcttgttgctggcacatttatactttgtggtgtatttctctttcttcacaatgtcgttgcagatacatgtgttgccatggatggctgggtgcagaaccctactgcacatacagccttggatgaaattcttccttgtgtggataatgcaactgcccatgaaaccttgttacgaaccagggatgtgacacaccaacttgttaacttagttgacaacattgtttccaatgtcacaaatagaaatctcccccctgctgctggacccttgtattacaatcaatcaggccccttgatgcctcctctgtgcaatccatttaacagtgatctcacaaatcggtcatgtgcagatggggaagtttcattggacaacgctgctgaggtgtggaagaactatacttgtgaggtttcttcctcaggcatttgcaagacgcctggtcggatgaccccgaccatttatggccaaatggaggctgcagtgaatgtaagctatggcttatatcattatggtccattcttggttgatctacaagactgcactttcgtgcggaaaacattcacagacatcagcaatgatcactgccctggtctgcagagaaacagtcaattgatttatattggattggttttggtatcagctgctgtaatgctgtctttgatcttttgggtcatctacgcaagagagcggcggcaccgtgtttatactaaacagttcattgagggctaaatgtgttgggacttaaactacattatggttctcatgtatatttgagttatagattgtattccgagctgggtttgtgatgtagagttattcatcttacaaaatacctatatacttgagtagatatatattgaagtattcagggaaacagttttatatggtgcaaaaannnnnnnnnnnnnnnnnnnnnnnnnnnggnnnnnnnnnnnnnnnnnnggnnnnnnnnnncnnnnnnnngnngnnnnnnnnnnnnngnnnnnnnaannnttttnggggcgcggnngntttncctttnnggngggnnnntnnnnnnnnnncccgcncgnnnnnnannnnngnggnggggaaaannnnngnnnncnncnnnnnnnnnnnnnnnnnnccncncnntgnnnggggggg

SEQ ID NO: 14159 - DNA, 191 bp, Glycine max
  Clone ID: PAT_MRT3847_112794C.1
acggctgctagaagacgacagaagggtggtgttctgggcagtaatgagagaagtaacaataatggttatggtagtactaggcaagaagtggtgaagacaatactcgtgataccaacaattggtccctgatttggatggataaaaatagaagggagttaaaggaaaacgtttaaaaattagtctagatctca

SEQ ID NO: 14160 - DNA, 576 bp, Glycine max
  Clone ID: PAT_MRT3847_112795C.1
gacgacagaaggggattcatcgctaaagagtacaagaaaataaagtttatcaataacaacatggacatgaagttgaatattccagcaattaatgttttattcttattgctagctatttctagtacaactcaatcggttgacattaatataaaaaaatttggcggaggtgcagatataacacaggctttgacaaaagcttgggaagaggcatgcgcagcaacaagtgcaagcaaaattgtgattcctggtgggtcatacaagatggaagcagttgatttaaaaggtccttgcatggctcccattgaaattcagtttgatggcacacttcaagcaccggctgacccgaatgcactcgacggggctgatgaatggctcaaagtacaacatgttaacttttttaccttatcaggtaaaggtgtttttgatggtcaaggtgcaactgcttggaaacaaaatgattgtggaactaacaagaattgcaagaaacgttccaagaattttggtttcaatttcctggacaattctatggttcgggacataacttctaaagatagcaaaactttcatgtaaatgttt

SEQ ID NO: 14161 - DNA, 228 bp, Glycine max
  Clone ID: PAT_MRT3847_112796C.1
aaaacaaacaaacaccgggcgacttttaaaaaccagagcggaaaccccccaggcccatccacagagtctaccattgcacattcgctatcatctattagttcacgcgcggcaattggagaattactctccaccatggacttttcattgagcctccctatatactcccaatcaagcgctttctccgccggctcctcgcagtcccagccttcgatcgcgacgccggcgttt

SEQ ID NO: 14162 - DNA, 280 bp, Glycine max
  unsure (1)..(280): unsure at all n locations
  Clone ID: PAT_MRT3847_112797C.1
tcggtggatgggaatcaacttggtgacctataacatcagccttggcgtaccggaataatgcaaattgtgaaacctcaaagaactctccgtggttagaaacctcaatatgatatgggagcatgtgaccangaaggtcatgctcaagtgactcacttgaatagatattgcagtacttgatagcaatatggactgccttcttgatacattcttcatttgcagggtggaagactgagtcatagaatcagcgatggtgctcatacgacaacgacatgcggaaacc

SEQ ID NO: 14163 - DNA, 367 bp, Glycine max
  Clone ID: PAT_MRT3847_112798C.1
cggactggcccggacttcccacgccgacccactcgtccgggctttgtttattctctccttactcttgcttcatttcgtgtcatctgccactgcttgagatcgctgcttgtatcaatccacggcttcctattactccaaagctcctgctctatcatgtaataaacaccattgatgactattattatctctaatatcaggccaactataaatcgaccatactcaatgattctttatgggaatcagaaattgaattagctggggcacgagcatatgcatattggtcactagacataacatgagtacaccctacagctgttgtggatgctctcttgaaaaatgtagcacggtggggtacctgctttcaggt

SEQ ID NO: 14164 - DNA, 249 bp, Glycine max
  Clone ID: PAT_MRT3847_112799C.1
ccacccgcgcgcgtacgtttgagagaagacacgatggggtctcgttgtctcaagaaatggactaatttaacttgtgctgccgcggagtacctccttggtgaccgatggtatcgggcgccttccgctcacttctgcgcagcgaccgtgatagactagtgcatttgcttcttctgatagcggggaggatgaaatcgttgaaactttattttttatcactgggagaactcgtggtgggttggcaactgatgg

SEQ ID NO: 14165 - DNA, 253 bp, Glycine max
  Clone ID: PAT_MRT3847_11279C.1
ctctaaagtctcaactttcagagtttttaattttagggtttgtttctgcgttttgggtatgcctcatttgtggcgattgacgcgtcaatttactgattacctgtgctctgaaccctgtgggtactgtgtatgagctgacgctatagtaatccctttctgcaatctcctttgtgctgtttttatatcagtttccattgcagagtaggaaaattctctgctgctttaaaaaagttctcaaattgctcttttgttc

SEQ ID NO: 14166 - DNA, 275 bp, Glycine max
  Clone ID: PAT_MRT3847_1127C.1
agtccaagcgtccggtcggtatccatctattcccagaatcaccaggtgcaatcaacttctgtccctgactcaacatcggtaccgtatccacccgcgacattgacctcgagaattaaaggaacacatctcataaagatccggctcaaacttccgaatgccatggctcgctcttctcaccatgcgcactcaatcatatctcgtcataatacgcctgtgatgaactccgactacacatgtgaatagacacggcgtccaagtaaagtatattctccccg

SEQ ID NO: 14167 - DNA, 345 bp, Glycine max
  Clone ID: PAT_MRT3847_112800C.1
gtttgtactaatgttgtgcataggaggacgaatttgtgggtgttggtgggttcaactgttggaggaattggtgtcttgtttttagttagaacttattaagtactttgtaacatttgccaggagatttatcttaaactaaggacaattcaaagttgttgttgaacatttatgagttatgatggagtgtagaaattatatttgattctggaaaactggttattatggtcttttttagctgaatttagttttatttttaaaggtattatttttaaataattttgttagatttttgatatttatgtttgtattttgttgtgatatttttatgaatttttttttttgtta

SEQ ID NO: 14168 - DNA, 367 bp, Glycine max
  unsure (1)..(367): unsure at all n locations
  Clone ID: PAT_MRT3847_112801C.1
aacaacacataaacanactttattccaaccccancaatctttaataatcgtcggctttatcaaaaaacaatccccaccccacacaaaccaacnnacaaaaccaacataaaatactttaatctcaacctaacaaatcaaatatacttaacatcctaccttctttttatatataatttaagaacatcatcacttcacacactccaaatctaccacacttaacttatctattttataaacataataaaatcatatacatttctattaccctcaacttcaactcacttcccctctaaatataccaactaacattcaatattacatatatcataataaaacatttaatgtatctcctcttttaaaatcaaaa

SEQ ID NO: 14169 - DNA, 540 bp, Glycine max
  Clone ID: PAT_MRT3847_112802C.1
gagagtgatgcatattggagctgccaaaacaacaaaagatggcaaatcttgttcctggggtgcttctcaaacttatgcagcacatgaacacagatgtgaaagtagctggtgagcataggtcctctcttttacaagttgtgagcattgttccagcacttgcagggggtgagttgttcccaaatcaaggcttttatctcaaggtttctgattccttgcatgccacctatgtctctctccctgatgaacatgatgatctcatcctcagtgacaagattcaattggggcagtttgttttcgtcgatcgtttggaggcagcttcaccggttcctattcttcatggggttaggcctgttcctgggagacacccttgggttggaacccctgaggacattgttgcaacaactcactcacttgggttccttagtaacggcaaggctagcaagaaaagtccttgttctggtcccttggacttagagaggtccaagtctccgaggaaagtgttgagcaatcaccatgttggggagaaggagaagaaggaga

SEQ ID NO: 14170 - DNA, 349 bp, Glycine max
  Clone ID: PAT_MRT3847_112803C.1
atggaattgagcacgagctcgagaagactacacacaagtgctgctgctataaaactacattttatgaaaaccctctatccccactagattggctttacactacatcacggatagtccaatccttactatcataactttaatacctactttcatactaacaattcctctttatgaaacaattctacttatgtcactatttcactacatacatatcttgctttttcaatgattaaccaaacaaaatattttccatcaacaacacacaaaatcctactttctttacttaatttactagacccatcgactaacccatttttctttatgtcccccacacactaatcaataaact

SEQ ID NO: 14171 - DNA, 252 bp, Glycine max
  Clone ID: PAT_MRT3847_112804C.1
tataagcctcaccaacctctcctacatcagaatctccattggatgaggatgatggcatttcttccaaagatggtggtcttgagttgtaagttataagcctcacttcgtcctctatggagaaattttttggtacacaacttcatttctacatttttgagtcttggacaatcatatatcccttggctcaattaataagttgctttatctaaaagaatgacccaaacagcttcagagaagcaaatgcattgcatt

SEQ ID NO: 14172 - DNA, 438 bp, Glycine max
  Clone ID: PAT_MRT3847_112805C.1
tgaaaaaacataactatacgagttcaaaattcataaatctcaacagtttgatcatccgcagcaccagcagctcagagtagcaaagcatttaaactgggtactcaaaatatctgccacaaaactcaggacaagtacagaaactgggaaagctatcaggtgaggttcgattgaattctgatggcctaggccttgagcttgccgaagaacctctgcttctcgtcggtggtctggaagcgaccgtgcccgaacttggacgaggtgtcaatgaacttgagcttgatctcctccagggcgagccgccaggtctgcttcagcagcgactggcggagggtgacgactctcttcttcggaccgacgcagcaacccttgatcatgagggagtcgcccttcaccacaccgtattgcgggaagccgtcatcgggggtgatgtccttctca

SEQ ID NO: 14173 - DNA, 165 bp, Glycine max
  Clone ID: PAT_MRT3847_112806C.1
ctgaaatgctattgtacacatgaatcatgatctttttagacattttttttcctgccaaatcattaacttagcagtttgatgacaaatacagcaatagatatgcaaaatatgtgacaaatggctacaatatttgtatacatgaccaccttaaacactagtaaacta

SEQ ID NO: 14174 - DNA, 456 bp, Glycine max
  Clone ID: PAT_MRT3847_112807C.1
cttttacagttttcccccttcccattcatcaattcttttattgtatatgtttgcacaatagttaacaataccaaatagtggcattgagtgacgtatcccaaaattgagacagtgggtagtggattggttgctttgctgaggatcatatattatatattcaagataaataatttcataatttgtagtatagaatacacaaatgcttaaaaataaaatattatctaaaattaaagatataatcataattcttaaccaaaaagttatagtctaataaatattcaccattaatttgagctataattaacattgtgagaaatgagattataggaaattaaaagaaaataggaagatgatggaattcatagaaaaacggatggccacgacgggaaagttagtgaaattttatgcaccatagagcacactacacaaataatcaaagatagtcttggatgtctt

SEQ ID NO: 14175 - DNA, 501 bp, Glycine max
  Clone ID: PAT_MRT3847_112808C.1
gtttttagtttttcttttttatttattttctttttttctttttctttttctttttgctttttttttgttgttttttttgtttctttttttatttctcttttcttggggggagaaaaagaagaatttttgcggtggggcaccaccccccctttataaaaggggaagtatggtcccctatacgcgccacaaaattaagggggggcgcgggggggacactccctctggggggagcgaagcgcctcctccttcttttttaaaaggaaggcggggaataatcgggggagagctttacaaccaccgttgggcccttttgcgtcccccccaaaaagaccccttgggggggggggggggggaacctggggccaccccccttatggaacagggggccccccatcgttctttggggggggacgccaccctccttggggccgggtggttttttctggtcccgggggttccccccccatgggtgcccacaaacactggccggggggggccccc

SEQ ID NO: 14176 - DNA, 405 bp, Glycine max
  Clone ID: PAT_MRT3847_112809C.1
ggctcgaggtagagtggtgagcatgccaaaatcctcgcgaagggcaacctcactgactctcgagaccgacaaagtctgaggctccgactatgattccgaacacaagggcttgccctgcaaaggtgacctacacctcaagctccttcctggtgaccacggtaccgcattcactggctatcatcaagcttctgtgcagactactcatgaccatataggctaagagcacacgtgagactagctaggcgacacatacgtctctacaccccaagcaggttcttcgttggaccggcaacccagaacaaccattacatctatggttctagcccaccatggacatcgacacatactccgtacaatggactactgcaatcatactattctctgcggacggtacccctatatggg

SEQ ID NO: 14177 - DNA, 2942 bp, Glycine max
  Clone ID: PAT_MRT3847_11280C.1
gattattaatcgtatcagtgaaagaagtaagaagagagagaagtgaagttagtagtataaatgtacaaactctcctctatccagtgtgtggcgccgtttacgatctcactctgcactctctccttctcatcctcttctcttcgcttctctgttcgtgccacttcttctcgagcaatggcatctcatattgttggttatccacgcatgggacccaagagagaacttaagtttgctttggaatctttttgggatggaaagagtagtgctgatgatctgcagaaggttgctgctgaccttaggtcagccatctggaagcagatggctgatgctggaataaagtatattcctagcaacactttctcatactatgatcaagtactggacacaacagccatgcttggggcagttccatctagatataattggaatggtggggagattgggtttgatgtttacttctcgatggcaagagggaattcatctgtaccagctatggaaatgaccaagtggtttgacacaaactatcattacattgttcctgaattgggtccagatgttaagttctcctatgcatcacacaaggttgtggatgaatacaaagaggctaaagttctgggaattaatactgtacctgtgcttgtgggacctgtttcttacttgttgctgtcaaaaccagcttctttccctaattgacaattttcccttctttccctaattgacaagatccttcctgtctaccagcaagttctagttgaactgagtgcggcggagttaccttggatccagtttgatgaacctacccttgtgaaggatctcaatgcccacctgttacacgcatttacccatgcctacgcagagttagagtcaagtttatctggtttgaatgttctgattgagacatactttgctgatgtccctgctgaagcgtacaaaacactcacctctttgaaggctgttactgcatatgggtttgacattgttcgtggaacaaagacccttgatttgataaagcaaggatttccatctggaaaatttctttttgctggtgttgttgatggaagaaatatttgggccaataattttgcatcttctctgaacacccttcaggcacttggagacattgttggaaatgacaaggttgtggtttccacgtcgtgttctcttcttcacactgcagttgatctggtgaatgagaccaaattggaccaagagattaagtcttggcttgcatttgcagcacaaaaagttgttgaagtaaatgccttggccaaggcattgtctggacagaaggatgaggttttcttttctgctaatgctgctgccttggcttcaaggaagtcctccccaagggtgataaatgaggctgtccaaaaagccgctgctgctctgaagggctctgatcatcggagggccacaaatgttagtgccaggttggatgctcaacagaagaaattgaatctttctgttcttccaacaactacaattggatctttccctcaaactgccgatcttagaagagttcgtcgtgaattcaaggctaacaagatctccgaggaagattatatccgtttcattaaggaggaaatttacaatgttgtaaagctccaggaagaacttgacattgatgtcttggtgcatggagagcctgagaggaatgacatggttgagtactttggagagcaattatctggctttgcttttactgccaacgggtgggtgcaatcacatttactgccaatgggtgggtgcaatcatatggatcccgctgtgtcaaacctcccatcatctatggtgatgtgagccgtcccaagcccatgactgttttctggtcttcaactgctcaaagtttgaccaaacgaccaatgaagggaatgcttactggccctgttactattctgaactggtcctttgttagagatgaccaaccaagatttgaaacatgttaccagattgctttggctatcaaggatgaggttgaggatcttgagaaagctggtattactgtcatccagattgatgaagctgctctaagagaagggtttacctctgaggaagtctgaggaggctttctatctaaactgggctgttcactcatttaggattaccaactgtggtgtggaggacactactcagattcacactcacatgtgctactccaacttcaatgacatcattcactcaatcatagacatggatgctgatgtgatcaccattgagaactccagatcagatgagaagttactttcagtcttccgtgagggagtgaaatatggtgccggcattggtcctggcgtttatgatattcactcacccaggattcctcccacagaagaaattgctgacaggatcaacaagatgcttgcagttcttgaaagcagcattctctgggtcaacccagattgtggccttaagacacgcaaatacactgaggtcaaacctgccctcaccaatatggttgctgctgccaaacttattcgcaaccagttatagctagtaccaagtgagttgagaatgagccaataaggtcatccatgtgagataatgtactcatgttgaaaatccgaatgctttgtatttccaataatgtcttcataaaagattttgtcctttcttctcccgaatgatctttttctgctcttgtaggcaatgcttttcagtatatgattttgcttatgaataaacggttttatgtgctattttgtttttctggtttatcttacacatttgattgaactgtgggagaattgttttatttttattttttgaactttggaggagtgctattgtcatgctcagaaccctcagaaggatatccttgcaagctatagtaatagggtctgtttctttttgtggatttggaggtgtaagtagctttattctatctcatgatctccaaacatttgttgaatattatagacttaaatatgtttttgattcttact

SEQ ID NO: 14178 - DNA, 516 bp, Glycine max
  Clone ID: PAT_MRT3847_112810C.1
ccatgtaagatctacaggtgtataatagtagtaagtggagaacaaacaagggttggaaaaaattatttctgaaaaagtaaaaagattgacttttttttttctgaaagggccgaaacacagactcagggaatatttgtggctttccttttctgggcttgggactagggcgagaatacttaaaatatccatcccaaggaacctttttaagcccagcccgatgggagattatgtctctaactctttctgcaaattcaatgggggtctctcctggcttaaaattttgtggctccaagtaccaaacattacaaattacagcccaagatgtgtttaattgcaagaaatgagtggagaatgattgttttctactattccaaaaagcatcgacgaaaattttatttgacttgatcgcacctgggcaaattgtgcagccaagttaaaatgcgccctttttgaacatgacagagttgtgattttttacacaagctccttcatgaaatatagaggagggtttttgtt

SEQ ID NO: 14179 - DNA, 774 bp, Glycine max
  Clone ID: PAT_MRT3847_112811C.1
ccacgcgtccgaaaaaacattgttttcatcgacctagttccaaggcttctactcacgcggcccccattatctacccacaatctaacacagaaggccaagttttgccgtttgcatttcctcttcaaactctgtctctccagatctaggtgctctgccttcattttacatttggacaagatggcaacaacaacagtttccaacttgccaattgctatgtcaagacccaagattccttcatcacaaaggattgcaaatgtatgtcctgcaattcttggaggtagatctaaggttggttcatgttataaactggcaagtgtttgtcatgttgcatcagcacaacctttccatcagggcttggcaatgacatcaggtgctgcaaaatatggcaaaatcctaacaaaggcaatgtccgagtctagttcaaacaaggaagttgcaggactgccaattgatttgaaaggtaaaagggctttcattgctggtgtggctgatgacaatggatatggctgggcaatagcaaaatctctcgcagcagcaggagctgaaattcttgtcggcacatgggtacctgctttaaatatatttgagtccagtttacgacgtggaaaatttgacgagtcacgcaaattacaagatggttcgttaatggagattgctaaagtgtatcctttggatgcagtatatgacaatcctgaagatgtcccggaagatgtgaaagctaacaaacgctatgctggagccacaattggactgtacagaaattgctgaatctgt

SEQ ID NO: 14180 - DNA, 397 bp, Glycine max
  Clone ID: PAT_MRT3847_112812C.1
tttttgttttgtacaaatggaaaactgtgcgcagggtgcacttaattttgcacaaaacaaaggaagtatcaatattttacatttgcataagaaaataccgctcctctgaatttttatacctgggaaagaccttttttttttccattacgatattcacatctatttatatatttacaccaactcaaaacttaccaatcttattacataaaaagcaaaagctcatacacaaaatatagtgtgactttacaattgaaagaaaaacatttgtttcctacttcccaccacccaacggtgaagaaaaccttctaaatagattaactaactttacttttcgagactaccaacctttcactttatatccaacttaatgaggcttaattgcaaccacccattggtg

SEQ ID NO: 14181 - DNA, 328 bp, Glycine max
  unsure (1)..(328): unsure at all n locations
  Clone ID: PAT_MRT3847_112813C.1
caaaagagtanaatctaaactcgagttgtggagaagcttgaaatttgtcatgtctaaggatatgaaatgcaagttcaacaagacatgagttgggtacgatttagaggtganaaattggggattacgtcattgcacaagtaacattgtttatgcatctgtggatctatattacaacatcacagggatgtcaacataggatttgagtgataatctataactggatgaagtgaatanatgcntcacatgcaattttacataatatagganngtaggtgtactttccaaattganaggctgtagacataatcaatgctgacctgggggaagt

SEQ ID NO: 14182 - DNA, 350 bp, Glycine max
  Clone ID: PAT_MRT3847_112814C.1
ggagaacagagggactcacctctccctcgcctagcgcttcagatgggaagctttcttgggttaactccaaaaggtggtctctcggtgctggagcgggggactgacaatgggtatcactgttcgcatctgaggggccaccttccctcttaacaaggtacagaggagggtgggcttttagtgggctacgcccgaacaaccattccttgggttatgacggtgttggtggcctctgggtgaacccaccgcttccagggccttttaggatggaattacacccaccccaccaatgtgactagaggcgaaagtgggaagcgtctggcctgcgccatctttgtgggttgagcgcccac

SEQ ID NO: 14183 - DNA, 402 bp, Glycine max
  Clone ID: PAT_MRT3847_112815C.1
gccgccaccgttgttgcccccaaagtatatatatatttttaatttataattctaattttgtttttatattatataaaaatataaaaattagaggaattgaaagtttgtttttaatgtgctgcatttctaatggtatggaaagggtgagtagtagagtaagggcatgttttgatgaacttattcagaagcccttgtaggagaagaaaatgaaatgagtttcttcgtaagttgaaattagcttatgcatgagtaaaaaatcacctttttgtagaagctcacttgtataacttctctaaattagcttatgagaagttataattttttttcctcatttttttctgcgccaggtgcttcttcatcttgataagtttatccaaacatgccgtaaggttcttaattaag

SEQ ID NO: 14184 - DNA, 2378 bp, Glycine max
  Clone ID: PAT_MRT3847_112816C.1
aagggcaactgtacaaggaacttaacagtttaatttcatattgcctgaaacgggtaacatccatactacgagatacggtcttccatttccattaaaatgcactcgtcattaaaattacatgcatacataccaacgaacataagttccgtcagctagtcccatctgctgcttgcaacaaatggattggaaaatgatcaataactcagcattctaaatgaacaaccttagtaaaaagtacgactaaattaaaatttcatcatccgctataatcaaaaagtcaaaacttcctcgacaaagaattttaatacattaacaggtcctatttgtattctggtacagcctggtgaagtctgatgttttctacatcacatctgcaacaaagttaccgataccctcctcttcctcttccacgaccaccccagccccggcctctgcccctcataccccctctcccaccaccagacaatccttccagcgctctattgacaagttgattttgcaaaccaccagcacctcgacctttctttgagacaatattgttggacccattggcagcattagcaggccgttttgctccagcagccggtgcagtagatgctgcttttgttgcttctttccaagaaagattgattctcttatctccaataaaagaaggcactttggcgtgcaatggctttgtcattgtcaaaatgttattacaagtccgcaacccagttgtagcattctgctttttagttttaattttttccttttcttcatcagttttagcaccggccatagatttgttgttttcatccattccttgagttaatttcttgattgtagcccgggtgaactcctcaacattattcaatctctcagtaaaatcattataatgctctgaaaagtcctctccaagcctatcagatggctggccagtaacaattttgtatccacataaactatttgtcgcattaggaaccttatgagctaagtgatgaaatgtgtacaacaagcactcaacataggtaaagttcatctcttctccagtcttcttccaagtcatgtatttcttaagcaactgaacaatagaaggaagcatttggcgtgaatcttgtggtgttgtataaggtgaaaattctgcaaggcttctgagtaaatctactttccgttctccaggaagctggtcaaaaacaggtattatatatttgtttatatagttgagaaatttgttgcttgatgcacccctcactacaaatggaagtgccatatgaaggcatgatatcaacctgtcaatatgatctgcatctgatacattgaactgtgcatctaaatcagcttgcccttcaatgattccaataagctctttcatccgctcagccggagccttttctccaaataggctcaaactcttcagaaaatccataaacattcgaaattctatgccagtaacatcttctaaactctttttaatgagatcagttatgtgtctttccatttcctcctggggtttcaacaattcagcttttgatagggaaaacccttatctcgaacaaaggtttataactttctcacgaataacatcatccgtgcttggctcttcaacactgccaatgtgcttaacaaagcccgtcaaagaagctttgacatcctgcctcagcaaagacataagagccttatgtactgcatcacgctccacaaattcctcagacccaagaatttgcacaagaatatcaaccatcttcccaatattctcaggtgtatccttacaaaaaagaggcagacctctaattgcttgcactcgaaccccgagttcttcagcctcaaccaaatcaagatgtgcatcgagagcagggctagaaaggtcaggaaagaacttgtagagcctgggaatcagctgtgcagcgagctgcttcgccttcacactcgtcttcgccgcatctatgattccctggtaatcctgcacattctgcgacttgtccttggcattgttgagttgctcgccgtattcgtagagcttctcgatgaaagcagcctcttcggcaggatcagacattggaacgcacgtttctaactagtgaatggagacgatagtgttgttgagttgaattagtagggaacgattccctggtgcgaggtcaagtaagctcttcgatggggacgagtttcccttacctcactgaacacgccacacgacacaacgtaaacacactcgagccgggctcgagcaatttgcgattgcgattgtaacgtcgatttggaaattgaagaacaaaatcaacgcgaaaagggaaaataaaaagagggttttgtgaagtgttttgagggaatatatatatatatatatatatatatatatatatagagagagagagagagagagagagagagagagagag

SEQ ID NO: 14185 - DNA, 480 bp, Glycine max
  Clone ID: PAT_MRT3847_112817C.1
gctcgagcggctcgagacggctgcgagaagacgacagaagggggacatttgttttggcctatactcaaaagctgagggcggagttctctgtttcttttccatctcacaagaaatgggaaggtgaaaaaaaaggttcctatcattaacttgacacataaagatatcacatttcgggtttgccaaactatagatagaaacgccaaaggagggcgttttagctcaatagcttattacactagtggtatttgattcattgtgtaagcaaaaaaagcaacagagactagctatctgatataaagtttttaggaatgggagcagaagaaaatggatttctggccagaatttcttgcaagcggttcgggaagagagtttgtagcaggtggctttggaggcattgctggtataatttcaggttatccacttgatactcttcgaatcagattacaaaactcgaaaaatggctctgcattcacaatcctt

SEQ ID NO: 14186 - DNA, 438 bp, Glycine max
  Clone ID: PAT_MRT3847_112818C.1
tcggaattcggctcgagagtcgagatctggtgattgtttttactttatagtgataggatgtcgatacctatagccagacatagaaattgaatgtggtggatgtgtacttttacttggcgaaggcctgggttcaactcctgacaatgattgctgttcgtgcccggctctagatcatgacggcggcaacctgatatgtcaggttcaccgacctggactggggctccgggccaactctggttgtggctcttgaccacgtgtctgagctcctgacgggctacggcttgactctactgctgtcattgcgagctgtgctcattaatggtgggattgtgactgtgccactggctacgagctgagactgtgagtagtgaagcctaggatagtattgactttaggtcccactgggctgacatctgatgattagcctgatgctatgca

SEQ ID NO: 14187 - DNA, 907 bp, Glycine max
  Clone ID: PAT_MRT3847_112819C.1
gcggaaccgtggcgagggatttcacctactatgacgacattgtgaaggggtgtttaggggctttggataccgcgaagaaaagtaccgggagtgggggcaagaaaaaagggcctgctcaatttagggtttttaatttggggaatacttccccctgtgcctgtgagtgagcttgtggcgattctggagaagcttcttaaggtgaaggccaagaagaaggtgcttccaatgcccaccaatggagatgtgaagttcactcatgctaatattagtttggctcacagggaccttgggtataggcccaccactgatttggagactgggcttagaaagtttgtgaagtggtaccttgaattttactccaagaagagctcttggtgaatgttgatgtgattcttttgctttgctgcccctattcttttcgctctgcttgtaatttggaggatagaggttttaccgttgtgttaggggttacggatgaccttgcatcatgttctgttctgttctgtgctgtctttttttttcatcttcgactgtatgcctgccttttaggttagcctctgtacattctttagttgagagttgagacatcgaattgatatttttagttatttgtgcttatggactcgatttgctttgccttttgggtttaaaactgcttgccatttggttatgaatttgcctgcttcctgcgtgtactgctaataaatactattgcttctcttaattggaaatcattcttgtgggcatggtctgatttggacttggggagtgtcacttggtatagcctctctggttttcttattccattttgtggctgcaactttgggttgatgactgagtaattgacagctgattgttgttatgctaaatgtgtatttggtcatggatgacactagttaggtgagct

SEQ ID NO: 14188 - DNA, 543 bp, Glycine max
  unsure (1)..(543): unsure at all n locations
  Clone ID: PAT_MRT3847_11281C.1
tagcttcattctgtccaacctcaaccccaacaaccgatgcaaatgcttccttatcagcagcctcatcctcaaatgcagcattcacaaccacaaattcaacaaccggttcagaagtatcctgttcctcaatctcaagttcatgcacaactgcaacctaatgctccaattcaacatcactctcagctccccgtgcctcctcaccagcctgtgactcctaatgtccagactccagtgcaaaatgcaatgtcgcattcagtgacagggcatcactcttatccccaacctctgcctcacccaaatatgcaacccagagtccctcaacatactatgcacatgcatcctcaaagtgggcatcaaccccaggcccaacatcctgtccagatgcagaatcagtttcctccacaaattccaacagcacgtnctaatcaatctcatgctatgtttcctaaccagcaacagccagctttgttgccttcttcagttcagggccaaactacccctccttttgcacaacagtcactatatacccataatcaacaacct

SEQ ID NO: 14189 - DNA, 1486 bp, Glycine max
  Clone ID: PAT_MRT3847_112820C.1
actctccaagctcacactctggtcctccttcttcctcgcattcatcctcttcctcttcattctgtctccgccgtcgccctccgcctctccccgccgctccctcggcgactcctggggcggtccccactgggagaagcgcgtggccaagtccgcccgccgctcctccccctccagcctctccgtcctcgtcaccggcgccgccggcttcgttggctcccacgtctccctctccctcaagcgccgcggcgacggcgtcctcggcatcgacaacttcaaccgctactacgaccccgccctcaagcgcgcccgccaacgcctcctcgaccgcgccggcgtcttcgtcgtcgacgccgacctcaacgatgccgccctcctccgcaagctcttcgacgtcgtccccttcacccacgacatgcacctcgccgcccaggccggcgtccgctacgccatgcaaaaccctcaatcctacatccacagcaacatcgccgccttcatcaaccttctagaagcttccaaatccgctaaccctcaaccctccatcgtctgggcctcttccagctccgtctacggcctcaattccaaagtccccttctccgaaaaggaccgtacggatcaacccgcgagcctctacgccgccacaaagaaagcaggggaagaaatcgctcacagctataaccacatctacgggctctccattaccgggcttcgcttcttcactgtttacgggccctggggcaggcccgacatggcgtacttcttcttcacgaaggacattctcaaggggaagcagattgcgatattcgaatctcccgatgggggaaccgtggcgagggatttcacctacattgacgacattgtgaaggggtgtttgggggctttggataccgcgaagaagagtactgggagtggggggaagaagaaagggcctgcgcaatttagggtttttaatttggggaatacttcccctgtgcctgtgactgagcttgtggcgattctggagaagcttcttaaggtgaaggccaagaagaaggtgcttccaatgcctacaaatggagatgtgaagttcactcatgctaatattagtttggctcacagggaccttgggtacaggcccaccactgatttggagactgggctcaggaagtttgtgaagtggtaccttgaattttactccaagaagacctcttggtgaatgttgatgtcattcttttgctttactgcccctattcttttcgctctgctttgtaatttggaggatggaggttttaccgttgtattaggggttacggatgacctagcatcatgttctgttgtcttctttttcttgtatttttttttttcatcttcaattgtatgcctgccttttaggttagccgctgtaaattttttagttgagttgagacattgaattgatattttagttatttgtgcttatggactcgatttgctgtgctgttggtttaaaactgattctcatttggttatg

SEQ ID NO: 14190 - DNA, 511 bp, Glycine max
  Clone ID: PAT_MRT3847_112821C.1
gaaacttcggttgctgttcctttcacatgggaggcacaacctggtaccccaaaacaccctttgtcggagacatctttgcctcctcttacacccccaccttcctatttttcaaacaaaaagtcccacaatgccaagagtagaaactactccaaagccagcaacatattttcaagcattttgccaaggcgtgtagggtcaagaaattctcatcctgtgtcaccagcatcgtcatcttggtcactttcttcatcgtcttcgtcttcttcttcgtggtctttggcgcattacaataataattattcatcgccctcgttttccatgagagacaaaggtccagctccttcgaaacacaacaaatgttctaatggatttagaggctgctatccctttggcaacacgaggaacgcaaatgtaaaccatggtactgtggactagttaatttaatctattctgcatgatttcaatattttttgtagagatcttcgaaagtttatatagccgctaagtgtat

SEQ ID NO: 14191 - DNA, 161 bp, Glycine max
  unsure (1)..(161): unsure at all n locations
  Clone ID: PAT_MRT3847_112822C.1
cgcatggaaaaactccttgaaaccacataaactttcttctccggttctctcacgttcgttagaacactccctagggttccccaccataatgacgcttggtgttgtnttaaagccattctttatcccgctcaatctaatccaaaggctgcttttgcggagct

SEQ ID NO: 14192 - DNA, 491 bp, Glycine max
  Clone ID: PAT_MRT3847_112823C.1
tatctcctgacatcaggaggtagcattactaaggcagatcattaatgcattaatgagtgcaagttcatgagcttgtgtatctaaatatacataatgaaattgcttttgttgtaggagtggaatctttgcttttgttttctgtaaggatcaaagcatattgttagcttcaatatttctcttgcttattctgactgaaagtaaagttttgcagatcttgattgtatcctatctccaatgagtgggctaagtgagaagaggtatggatgggtggtgcttgcaaaagctactcatcttccatagagagggacttagtggagataatcttctcctattcattacttcatatgatcagtctcgtgtaaactttctgaatgaacttggtggagtttggttcgatcatattccagatactctaataacagaattcgcaagctgtaaaagagttcttgaacaatctttccaatataaagatcccttttttatgttggagc

SEQ ID NO: 14193 - DNA, 465 bp, Glycine max
  Clone ID: PAT_MRT3847_112824C.1
tgtcttcgcgtccgtggacgcgtggggaaatttcgattaaccgcgatcacaggttgccgcaccttaaaaccggtaacagaagcaatggttacttgattgcaggaatcttccaatttcttgctacgtcttggtgaacgatttcttaagggaaagaaaatcactctgtgtgctggccacagactttgggaatcattcattttgccactcttagttgattgagttgaacactctcctatttgatataggactgcgcgtcagattcaaactttatctgcttgtttttcagtgtgtctgcttaatttgaggttcaagctggtgaaattttggattagtgctcccactctcctatttgggataggacttcccgggtagactattctatttctgtgctttcattcactctgtatggctgactgatccgcattgccgttaaaagtggtgttatttgaaaaacacttgggcgat

SEQ ID NO: 14194 - DNA, 396 bp, Glycine max
  Clone ID: PAT_MRT3847_112825C.1
gttgcttccccataggaatcttactaatgggcatggggacaacttatagcgtcgtggattaagacgaagtattaggtgcacctcaattgccacattagtctcccttacttataatttctaggttttctcatatccttccgactagagagcaaggttcattcccttggggctattggtccttgaacgaacatgcccacaaggacccgcgaacgcgattgtactgccctgctactggacccccgcacactaagagggtgatgctccctttgctattattgctatgtagcagcccctaaccttgctgcttttgcagtggctattgtctctggctcacgcgaaatttatttctttatcaaacccaattgtagcagggggtgcatgggcatcgaggtggac

SEQ ID NO: 14195 - DNA, 289 bp, Glycine max
  Clone ID: PAT_MRT3847_112826C.1
cccacgcgtccgatttcgcttactgtcgcacatccttataaatagatactgatgaacgggacgcacatgtggcgcatcttacgttgctttactttcttgtgcagatcaatgctcttaacattgttattatggtcgctttgacgctcagatgagcactactctatggctctgcgcaaacgctgattatcgctggcaaaattgtatagatggccgtgtacatttgctaaatttgtacattagccccatgcatattaatgttggctcttgatgatactggcggagctttaaa

SEQ ID NO: 14196 - DNA, 618 bp, Glycine max
  Clone ID: PAT_MRT3847_112827C.1
ggttctatatcaattaacttctccttcatttcttctccataaacaccacctcctttagccttcaatattatttactttctcatccccccttttgaattaatttgtccatggcacatttcactcgcacttgcttgctctttgtactattgttcctatcatatgaactcctttgcatagaaggaaggggtttgaaagcaaccactaagtcaccaaaatctgtctccgttaaggcaatgagcaccacaaaaggtgctgttgcaaaacctagccagttagagactattgctaaaagtttgaatggatttgttgaagcttttcgacccacaactcccggccatagccctggtgttggccattctgttaacaactaaccaataagtaacatgcaaatgcaacagctacaagtgctcttatatctatgttgctatccttattataatgctatttcatttcaatatgttagcgttaggcatattttgtggtcgccgcaatccatatatccgccctaaggttacctaattattacgcccgcccgctttatcccccgactgctattttatttcttcccacctccccccccccccccccctcttccattcacttccaactccccccccc

SEQ ID NO: 14197 - DNA, 783 bp, Glycine max
  unsure (1)..(783): unsure at all n locations
  Clone ID: PAT_MRT3847_112828C.1
ttgcatagcctgcagcttgaaacgccaccttaagcctggagcatcttataatcctccaataccagcacggcttaactgagactgtaaagcacaaaatcatgtcagtaattaattctcactaaaccaaaaggtcagtcaatgattttacttacataaacattcaaagaaatcctacttaaagagtggcatgagatttaccatggacatgcaaagtaagtttgatagcatcaacaatagttctcttcatgtaacattaagaacttaccattaaactttgacaaaaactccttcaaaactattaactgttaactgaaagcaagcaaattcataatcatattaacgatttccattcattgattaaaagaaatatcaaagcttaggagaaacacgcgagttcctattttaagcgaaacagtgtcaaaagtaaaacatgcaagagttgcgaaatactaaagctttgaacgttgtcgttgtttccacataagaaaattcctcagaaatactaataaaattgaatcaagaaccgcattaacatcgattcagaaaaataacttgcacacaaaccacgataaaagcacgtaagaagacgcaaattggaaacaaaacccgaggcacgtggcggagtaccttgagagtcgagaggaggcgctcttgctcgtcgatttcctcgaaatgccggcgccagcgatcccaatcccaatcctcatcgccgccgccgccgcggccgnngatcgtcgttcggcgttcccgagggacttccagaaggaatcgacgcgtttcgcg

SEQ ID NO: 14198 - DNA, 388 bp, Glycine max
  Clone ID: PAT_MRT3847_112829C.1
accttgggatttccctcacgagctcccacgcaaaaggggtgattaaggcaaaaggggactcgctcccggggatggtgaaaagaaaacaactgctccctggaaccacggatgaagaggcttactccaagccctaaggtgaactagagaaaagtgttcctacattggttggcatagaatgccccaaggatgagaaacttgctcgacacagaatatttgacaaacctaagacgcgctgcttcactattctccctacggaagataacactgcggaactcatgaagttgtaaatgctgtgaggtttcattataaagaactgggacaagcgacatgtgcaagccggtatcaacccacactccatggattggactgatccggactaccggtcaca

SEQ ID NO: 14199 - DNA, 881 bp, Glycine max
  Clone ID: PAT_MRT3847_11282C.1
cttggaacttctgatgcagttagttacagaacctttggcgtggcatggactcgtaatccagtcttgtctgagatcctgttttccatctggtaaaaagaaaaagaaaagcggatcagcttatcagtctagtgcgaatctggctcatgcaatcacagattctgtcatgcatttatttcatgtgttagaggttgttttgaaatggataactgaatggaacaaaagacctgaagatgagcatctggagaacattcttttgcttcttcggagagatgggcataatgatggaccggggaaggtctttcacattttagaaacattcatttcctctgtgaatgatgtggaactcggtgaccgcatctcccaatctctcaagtcttggagtcctgctgacgttgccaggaaaatgatgactgggaagctaaaagtactgacggaattttctgccatctgtgggtcaaaattgaagctatttaagtctatgaaacagcagatagctcaactgtgaagaatcatccatcatttactagtgctgaagttttatttcagcttgacaaacggctcttcaatttcaacagatatatatcttcaatgcaaggggttgagaaaatgtgcttctgctctgctgttattttcatcttcaacaataccttgtcggatttagaacagtcatcacagtttgttgctaggttattgttggctctagtttttgttggtcattttcctgtaaaattttctgcagtgtacgttaaacattttcccccttttgagctgttgccggattttttttcagaaatgtagctgtttgtctgagcaggaattttggcagtgtatcattggtttgattttttatttatttatttaatggaagtttttttttaaaa

SEQ ID NO: 14200 - DNA, 2766 bp, Glycine max
  Clone ID: PAT_MRT3847_112830C.1
caggggagaatgttgtgatgcggacaatgcatgaatattttagttattgagaaactgaatttgttgatgcaaacaaatgctccactggaggaagtgcgcaagaatatttggttggtggactcaaaggtttgggtaaaacccaatttagctccacctgtatgtatatatgaagccaattctcatctcccatctgataaataggttattccttgccgccaacgcagataatgcccctagatttcatcactgcatccttgtgttggtgaagcttggaagaaatatggcagcatctttatgcatcctcagggtcttaatataagtttgaaagagaagggaaagatccgtgaagtactaaggaattggcctgagaagaacattcaagtcatagttgtaactgatggagaacggatcctgggtcttggggatcttggttgtcaggggatgggaataccagtgggaaaactttctttatatacagcacttggaggagtccgcccttcagcttgtttacccattacaattgatgtgggcacaaacaatgagaagctgctgaatgatgaattatatattgggctaaagcaaagacgagcaactgggcaggaatatgctgaacttatgcacgaatttatgacagcagtcaagcaaacttatggggaaaaggtcctaattcagttagaagactttgcggaccacaatgcttttaatctttttgagaaatatagatctacacatctggtctttaatgtagatattcagggaacagcatccgtggttcttgctggactagttgcatctctgaagttggttgggggtaacttagctgatcacagattcttattccttggtgctggagaggctggcactggcatagcagaactcatagcacttgaaacatcaaaacagacaaatgctccactggaggaagtgcgcaagaatatttggctggtggactcaaagggattgattgtcagttctcgcaaagattcgctccaacattttaagaagccctgggctcatgagcatgaacctgttaaaaatcttctagatgctgttaataaaattaagccaacagtgttgattggaacatcgggacaaggaagaacttttactaaagaagtgattgaggcaatggcttctattaacaagagacctattattctttctctttccaaccctacgtcacagtcagaatgcactgctgaagaagcttacaagtggagccagggacgtgccatttttgcaagtggggagtccatttcccccctgttgagtacgagggcaaagtgtttgtgcctggccaggccaataatgcaaacatattccctggatttggtctcggtttaataatgtctgggcccattcgagtgcatgatgacctgcttctggctgcctctgaggctttggctgcccaagtgagccaagagaactttgataagggattcatataccccccattcaccaacatcagaaagatttcagcccccatagctgccaatgttgctgctaaggcttatgaacttggcttggccactcgccttcctcaacctaaagatttagtgaagtttgcagagagctgtatgtataccccagcctacagaagctaccgatgaaaagtgataataataaataggcgcttttttctttttcatttatcatgatatcatttcattgtcaattttttaattttttaccttctttatgttcctagaatttttataagggattcatatactcaccattcaccaacataagaaagatttcagcacacatagctgccaatgttgctgctaaggcttatgagcttggcttggccactcgccttcctcaacctaaagatttggtgaagtttgcagagagctgtatgtataccccatcctaccgaagctaccggtgaagcgataataaatagcctatttttctttttccttttcgttttatcattttattgtcaattatttaatttttttaccttctttatgttgctgttctgttcttgtaagttatttgttgggttagtaggttaggacggtggtagttggactaaaaaggtagcttgaaaatttgtgttctgctataaatgttatgtgacagtaatctaaattagaaaaggaagcatttctaaagtccgcatagtatataaaatgcttgaaaagttgaagaaaaaaaaagaaaatctaaaagagcgaaacagaaggatcctcaacccctccctgttggggtcctgcatctccggcttcggctatcggcttcggggctggagccctggctgctttggcttccgcttggtgtccttttctcgctgctcaggcttacggcgtgggggctgcgtcctttcctgcttgtgcaagatgtgtcccaccaggctatttagaaaagggctgtctgaaaagcttccatggccacaatcatgtccaagaacaaacagagcccagaacattgttccttgaatgggccaatagattagccagagaagccagttgttgaagtgacttgcagcagccatcaatgcagcaattacaagcacatccctgagaacataactgagggatctccatggattcttgacccagcaatgttttggtattgcaactctgatttctgcaatcttaaacggtggaggagcactgggatcaaaagcttccttttggtatccattattagcagcataggctaaaggctttgtgtctttaaccattgctgctttggctttggcttagtgtgtttttctctcttttcagggatacgtggtgggtggtgcgtaataac

SEQ ID NO: 14201 - DNA, 313 bp, Glycine max
  Clone ID: PAT_MRT3847_112831C.1
caagcatctataatagggggtgttatagtattcatcaaggagctacaccaagttcttcaagctttggagtcccagaaaagaagaaagagtttgagccctagccctggcccgagcccacgaacacttcagccaatgtttcatcaacttgatagcccctccatgattgggaccaattctttcaaggaactaggagcaagctgcatctctcctgttgcggatgttgaagtgaaaatctcgggttcatatgtgatcttgaaagtcatttgccacagaattccaggtcaagttgcaaagatcataactgttttggaga

SEQ ID NO: 14202 - DNA, 1476 bp, Glycine max
  Clone ID: PAT_MRT3847_112832C.1
gattgattgtcagttcccgcaaagattcgctccaacattttaagaagccctgggctcatgagcatgaacctgttagaaatcttgtagatgctgttaatgtatgatttcttatctttctgttcattacaccacacatacacagcagaaggttacaatgttcatacatggtcaatgttatcttctcagaaaattaagccaacagtgttgattggaacatctggacaaggaagaacttttactaaagaggtgattgaggcaatggcttctattaacgagagacctattattctttctctttccaaccctacgtcacagtcagaatgcactgctgaagaagcttacaagtggagccagggacgtgccatttttgcaagtgggagcccatttcctcctgttgagtatgaggggaaagtgtttgtgcctggccaggccaataatgcatacatatttcctggatttggtcttggtttaataatgtggcggaccattcgagtgcatgatgacctgcttctggctgcctgtaagtgctcaagacacttgcgaacattaatttcaaacttatgtttgggacaggtgaaaataggatcatggtaggaatgaaatatacatttggaattaatacaatgtcatattatttgattttgatggaacagctgaggctttggctgcacaagtgagccaagagaactttgataagggactcatatacccaccattcaccaacatcagaaagatttcagcacacatagctgccaatgttgctgctaaggcttatgaacttggtaagctcttggtttaatgggaggttctatggttgcacttttttttttttttctttaaaattttaaatattaaaagaaaatcttataaaagtgagtttgtgtttttgtcaggcttggccactcgccttcctcaacctaaagatttagtgaagtttgcagagagctgtatgtataccccagcctacagaagctaccgatgaaaagtgataataataaataggcgcttttttctttttcatttatcatgatatcatttcattgtcaattttttaattttttaccttctttatgttcctgttatgttttttgtaagttatttgtattgggtgggttagtaggttaggacggtggtggtagtgaagtggtacttggaccaaaaggtagcttgaaaatttgtgtttcgctataaatgttgtgacagtaatctaaattagaaaaggaagcatttctgctaatttcaaataaatattccatgtctctctatgcaagtaatttgcaagttgttcagaaaacgttaaactccaaaaaacataacattaaaaaaaaagtaatttgagtagctagaatccaataaataataacccaaaaagtttgaaactcagtctcgttgcgagtggaggagcagacacatcagtctgataataagcaacatctccagtgtcacttatgaagtggtcttgtccggacgcgtggg

SEQ ID NO: 14203 - DNA, 336 bp, Glycine max
  Clone ID: PAT_MRT3847_112833C.1
atcagttgagaggagtgataaaacgagtccccataccagtagtatcgtgtgtgcagtgctcaccaatacagtactatgatttcaagtggactgaatccgatgcactggaacgacagccattcgctcttcagtctctccaaatcccaacaacccacagatccaattatagtcccatgctgcctaaccaacaccaacaatatcatctcttctacattctacattcgtgtgaatccgcctttcccataccggagccccaagattacactattatgagcaccgctgcactctctagattccctgacacccgatccttgctctgtctcgacccagatggag

SEQ ID NO: 14204 - DNA, 521 bp, Glycine max
  Clone ID: PAT_MRT3847_112834C.1
atcttgccgagttagttagccaagagatgaaattcacattcaactcaaaagaacattctgaaattgaaagtgaaactgaatatgcaactggaagtgaagctgaatatgaagttggaagtgaagatgaatatgaaactgaatatgactgattctgatgaagcttcttcagtttcatgttgaggttgttgaaatactgtacaaagatgaatacgaatgcagttttgttcaggttagtttcagtgctttaaattcgtagatgaaaatctacagattcaaaatgtagaattggatttcagaaatctaatatcctttctcactgctgacaggaagaagggatgatatatattggaagagcattaacccaaattgacaagaattgaggtcaattatggcctgtgatgtagagattggactattttcagtcctttcttgtaggttcgtactaatactgtgtttgtacaacatgcttagggggaaatagctgagggaagccaatttgaatgctttgagatgctatggaa

SEQ ID NO: 14205 - DNA, 228 bp, Glycine max
  Clone ID: PAT_MRT3847_112835C.1
ggaaaaccatagcacaatacctcacgtgcctctggataacttgcatcttgggcaaatcacaattttaacaacggtaacgggacccgtcaacggcctacgacgaccggaaagctacctatttttctctttttgtaaacacacgcgcgctggcttttggggtgaattttacgatttggtggtccctgtggtgggatccctttcttgttttggccgaaccgacaaggtttt

SEQ ID NO: 14206 - DNA, 696 bp, Glycine max
  Clone ID: PAT_MRT3847_112836C.1
cccaggcttgggctggaggtaaaaacctgccatgacagtaataacaatgcctcctttcttatcttactctcttctttccctcgcgttcttcttcactctcaagtaccttttccaaagaagcagaaaagtacgaaacctgccacctggtccgactcctcttcctataatcggcaaccttaacctcgttgaacaacctatacaccgtttcttccaccgcatgtcccaaaaatatggaaacatcatatccctttggtttgggtcacgtcttgttgtggttgtttcatcacccacagcgtaccaagaatgtttcactaaacatgatgttaccttggccaacagggtacgctccctctcgggaaaatacatattctacgacaacaccaccgtagggtcttgctcccacggcgagcactggcgcaacctccgccgcataacctctctcgacgttctatcgacgcagcgcgtccactccttctccggaatccggagcgacgagacgaaaaggttgatacacaggctggccagggactccgggaaagattttgcgcgcgtggagatgacctccaagtttgctgacttgacgtacaacaacatcatgaggatgatttcggtgaagcggttttaccgagaagagagtgaacttaacaacgtttaggaagcgaaagagttcacagacactgtgaatgagatgctgcc

SEQ ID NO: 14207 - DNA, 137 bp, Glycine max
  Clone ID: PAT_MRT3847_112837C.1
cccacgcgggcggcgtaaggtgggacggatagatgctaactagagagggacgatgaccccacagagagagacgtctccaagtctgctacacgggaggaggagagttactcgcgcgcagaggctgaccagggttgggg

SEQ ID NO: 14208 - DNA, 223 bp, Glycine max
  Clone ID: PAT_MRT3847_112838C.1
tgctctctccttcacctaggttagctccacatatgtgccatactacccacccccctaatctctaaaacaccctcctgtcccaaagccaccttctccaatgcaagcatgttgccccaaggacactattaactttgctgtgtgtgctgatgtgttatgtatgatcaacgtgcagcttgggaagccaccccataccccatgctccaacctcattgatggtctctct

SEQ ID NO: 14209 - DNA, 371 bp, Glycine max
  Clone ID: PAT_MRT3847_112839C.1
aaaaaaaaaaaaaaaaaaaaaaaaaaaaaaaaaaaaaaaaaaaaaaaaaaaaaaaaaaaggaaaaaaaaaaaaaaaaaaaaaaaaaaaaaaaaaaaaaaaaaaaaataaaaaaaaaaaaaaaaaaaaaaaaaaaaaaaacaataacaaaaaaacaaaaaaaaaaaaaaaaaatgaaaaaatgaataaaaacaaaaaacataaaaaaaagacaagaacaaaaaaaaatgatactgacaaaaaaaaagctaatttacatgtaggtggacaagtacaaagatgcaaattattaagcggatttaacaacagatgttcctgaagtataaaaacatagacatcatctggaaacacataaacatatgtgctccatgta

SEQ ID NO: 14210 - DNA, 458 bp, Glycine max
  unsure (1)..(458): unsure at all n locations
  Clone ID: PAT_MRT3847_11283C.1
gttaaaaatttagtcttgaagacagaggtaatgccagattgaaatttgaaacaggagacactggtttgtgtcatatacttagattagattagatatctttggattaaatggaagatgatacaacaatgcctcaagatgatcaaagaaattctgatggtactagaggcattgggggtcttaatagatcttctaagaagtcaaagcagacaaaagtgccacaaaggggacttggtgtggcacagcttgaaaagataagactagaagaacaacaaaagagagatgtaggtgcaattttaccatctcctagtactttatcatcaaccaaaccaccctatctgcctctcccagttaagaattttcatgactccaacctatccccttccacaccacttttaccttgtgagccatcatctgaatntaggtcccctttgtcactgcaacagcaacaacaacaacaa

SEQ ID NO: 14211 - DNA, 284 bp, Glycine max
  Clone ID: PAT_MRT3847_112840C.1
caattaattgtattaccaatttttttttttattgtttttgtgttcggagacaaaaatttaaatggcgcccagctattaattaaacgcacacccgtttaaaacagagtgtgataatttttaaacgctagcggggagaattcgtctaaaagtttggagactgtccttttgaattgggtgaaaaacgcattacttaaataactgtggggaataatgctagttcttgggattaatcagtgggaatgaaaaaagggctcaattggggccagaaaaaccctcaccgcttt

SEQ ID NO: 14212 - DNA, 384 bp, Glycine max
  Clone ID: PAT_MRT3847_112841C.1
cttttgttttttttcttttttttttttttttttttttttcttttttttttggacgctttaaaatgcaaacgccaaaaactttttttagcgaatgggccctttcagttttgcctggaaagacctggaagggacaaaaaaaagagctctcttttcaacacctcctactttatggggttggggcagaaaacacactgcagggggctttactgcctattacacacaactttagccttaagggtatattccaagtgacaaaaccggcggtggaggtggtgatgctttcttcaccctctggggggtgactggtgcacgatcgaacttgccccgggcggtttatgtagatcccgagcccactcctattgttggggactggtctggcactta

SEQ ID NO: 14213 - DNA, 1102 bp, Glycine max
  Clone ID: PAT_MRT3847_112842C.1
gcaggtaccgtttccggattcaccggtcgaccctcgcgtccgcccacgctccgcccacgcgtccgaaatccctccattttccctttcagtcttgttctgattcattttccttctttcccaaacccataaaccctagcaagccaccatcacctcaccatggagtggaaccctcagaccctccaattcctctcggaatgcttcctccacactctctccccctcgccggagccccgccgccgcgccgagtcctccctcgccgaggccgccgaccgccccaactacgccctcgccgtcctccgcctcgtcgccgagccctccatcgacgatcagatccgccaggccgccgcagtcaacttcaagaaccacctccgcctccgctgggcctccgacgactcccccgtccccgaccccgagaaagaccagatcaaaaccctaatcgtccccctcatgctctccgccacccccaaaatccaatctcaactcagcgaagccctcgccctaatcggtcaccacgatttccccaaatcctggccctctcttctccctgaactcatcgcaaatctccaaaaggcttcccagtcctccgattacgcctccattaacggtattctcggcaccgctaactctattttcaagaaatttaggtttcagtataaaaccaatgacctattactggacttaaagtactgtctcgacaacttcgcctctcctttgttggagattttcctcaagacggcgtcgttgattgacgctggcgccatgaacctgcgcccgctctttgagtcgcagaggctgtgctgcaggatattctactcgctgaattttcaggagctgcctgagtttttcgaggatcacatgaaagagtggatgggtgagtttaggaagtatctcaccactagctaccctgctcttgagagcagtggtgctgatggtgttgcgcttgttgacgagcttcgggccgcggtttgcgagaatattaacctctacatggagaagaatgaggaggagtttcagggggtcttgaatgattttgctcttgcttgtgtggactttgcttgggaaatgtgtcacaagtcgtccagcccggaccggcttgcgatta

SEQ ID NO: 14214 - DNA, 256 bp, Glycine max
  Clone ID: PAT_MRT3847_112843C.1
gccgcccttttttttttttttaaatttaaacaaaattatcttattggccaaaaatgaattctggctaaaaactacttagggtattaaattgctaggttttaacatctaagtaatttgaggcaagggtagaaaaatatcctccccaattggaaaaccccggtcttaaaatcttatactcaaacctccggggaaaatcaattgcatttttaaaatgggccccccttgtcttcggtcggggggaacactttttgaaacc

SEQ ID NO: 14215 - DNA, 167 bp, Glycine max
  Clone ID: PAT_MRT3847_112844C.1
tacggttgcaagaagacgccagaagggggcagagtggcaagcagagaccatcaagcactgatgcgattgtagtcgagacagctcacaggtagagcgagcaacggccatccgatttcgatgtcacgcaatcgtgagtcacgtgcaataccacgggtaacagcggtcca

SEQ ID NO: 14216 - DNA, 366 bp, Glycine max
  Clone ID: PAT_MRT3847_112845C.1
cgaaactttatagttcaatgagaggaagacatagcatgaagttcacagactcgccggcgatctagcttgcggtgaacgacgccgttctgtctcttcagccagacaacggtgacatgcgcgtgggaatcatcgggttgggcatgctcctctgtactcgtcaaattcggggagcggtggggcccaccctctgacaacaacccctacgctcgcgtgctctacttccaaggatagcggtcccgtgagctcggcacgggctgtcgcgaggcgggaatgggcctttaactgttggggctgacggacctgttcctaaccgacatcgcacccgtcatgccggccctgaagcgcaacctgaaggtaaacagcccc

SEQ ID NO: 14217 - DNA, 409 bp, Glycine max
  Clone ID: PAT_MRT3847_112846C.1
tagacctacaacatctgggaatcggatgaatttaattctctggtgtagaagttcggtgtttagagagttgaaaagatatcagagagatttttatagctggtgtggagaatgcaaacagaagaaggcggagagagtgtgtttgtcagttatggccaccaaacaggaattactgaagagcgaaatataattggcctcgtgaactttcacatgcaaattatgttttattcggctggtgtggagaatgcagacggaagaaggagctacatgtaggaacaacgaccaagatttattgttaatgttgtcatcttccatggaactaattgtgtcttcaatttgctggaaacacaacattgagtttctttattgaagagggaaatgcaattggcctcgtgaaccagttgattcacat

SEQ ID NO: 14218 - DNA, 1404 bp, Glycine max
  Clone ID: PAT_MRT3847_112847C.1
ccacgcgtccgcttggttgtgcctattttgataatgatacatctgctatgtatgttagtgggttttatggaagcttaatattctcaagcgttggagtctgaatgacatggatttctgtctgcaattgtcatagaaaaatgtcataacatgttatttggttacttgtattaaaaattacttgttaacctaagaaggtgagataaatgagcagtgtttgttgtattgttgatagcaagttttacttagtatgacagtaaatatatgtttattttcttttttcctggtttttcgattggttttgttggtcactcttttgagttttagttattctatgttggattgaacagattcaaaaacacaaggaatacaggcacaggatcatgctgaactatccaccgctatgtaagcagatatatagtatggatgctgagaaatttttcacaccctcatttctcagagcagttgaagaaaacacagaagcaagttttagaagtataatggctgaaccttgtaaaggagtttatacatttgaaatgcttcaaccgcaattttgtgagaaactgatgtctgaggtggatcattttgaaagatgggtccatggtaccaaactcaaaatcatgcgtcctaatgcaatgaataaaaataaacatggtgttatccttgatgattttgcctttgaagccatgcttgacagatttatgtgtgatttcatacgtcctatatctcaagttttctaccctgaacttggtggatcctcattggactctcaccatggttttgttgttgaatatggaattaataaggatgtggaacttggcttacatgaggatgaggcagaagtcaccttaaatgtttgcttgggaaaagaattttctggtggagaactgttcttccagggtgttcgatgtgatgcacatgtaacatcaaatgcgcaaccagaggaggccttcaattattcccatgttccaggacacgcaattcttcatcctggtcgtaaccggcatggtgctagacctacaacatctgggaatcggatgaatttaattctctggtgtagaaggcatagttctggtcaattacttagtgcatcagccttcatgttgtcacacagttcggtgtttagagagttgaaaagatatcagagagatttttatagctggtgtggagaatgcaaacagaagaaggcggagagagtgtgtttgtcagttatggccaccaaacaggaattactgaagagcgaaatataattggcctcgtgaactttcacatgcaaattatgtttgtatagtttattcccaccattgaacttcttttctgtttctagattatggattatttttaacaaaatgaaatatattgaagttgcaagttatagacatgatgaacttgatacccgacccaaaa

SEQ ID NO: 14219 - DNA, 415 bp, Glycine max
  Clone ID: PAT_MRT3847_112848C.1
aacttgagaaagtacaaccggttgatttgcgcagagcatataaatgcgaaataatgctctctaaaatcaaaaatcctttgccagatatgcttaaagcagacctggcattggattctgcagttctggatattgatcagggagagaatctcatcaagttctgtcctacaaaggaagagatggagatgttaaagaattatacaggaaacaaggaaatgcttgtaaagtgtgaacagttttttatggagctcatgaaggttccacgtgtggaatccaaattaagggtttttgcttataaaatcaactgttcttctcaggtgaatgatctgaagttaaatttgaacacaatcaacaatgcaggccgagaggtgaaagaatctggtgaattgcgctaaataatgcagaccattcttacact

SEQ ID NO: 14220 - DNA, 550 bp, Glycine max
  Clone ID: PAT_MRT3847_112849C.1
aaaaccttgatttttaaacattgaaaattggggggcgatatattataccactttgacaaaggtcccttgagcgcttggaaagctgggtgatggtaaagggcttataccccctgcatgaggttactaacaaattttttttcggcggcaaaacagaaagcaaagccctttatgaatcaggctgatcatacctaaatgccctgaatcttgacatcctttggagcctttgatcctagaggacagaaagagggttgaacattatcaaacacaccgatatcctaagctgtataaggctaggacttgtcgactcttaaggtgtttttgcccttggatgaaaaggcatttgttttgataaacttggcaaggtctttataccatcctcttccaccaagatggaaacttgctgatttgtaataacctgtggaagaccctttttccttggggttcaagatagacctctctctgtaggttgggactacttgctcccccataaagctttttggattgcctgacgccaccaactggttggggactaacaaaaagggcacacgtt

SEQ ID NO: 14221 - DNA, 611 bp, Glycine max
  Clone ID: PAT_MRT3847_11284C.1
ggcatttctcaaccacttattcatcttctaagcagagtagctcatgcaataaaccatcttgcctatgaaaataccatcattcagacccttctcaggtttttctctttttttacataccttaaaataatcctcttgttgaattgcttgaattcaaggacaccaaggtacaggttccagctgcaatggccttgggaactcttgcttttcagaatgatgacaataaaaatcagattgttgaatgcaaggcattacccactcttgtactaatgcttcgatcagaggatattacaatacattacgtggcggttgatgtgattagaaaactggtcaactcttctccaaatattaagaaagaagttcttctagccagggatttacaacctgtcctttgtttacttagttcccgctgttcggagatccaaacaatggcagcctttttactatgccaatttgcaacagattcagattgtaaggttcatgtttcacaaagaggagctattccactattggttgacttgcttaagtctccaaatgcactacttcaggaagtgtcaacttttgcacttttgaggttggcaaatgactcacataatcaagccagtattgctcat

SEQ ID NO: 14222 - DNA, 804 bp, Glycine max
  Clone ID: PAT_MRT3847_112850C.1
gcaagggtggttcctgcacaggagaaagtgtattaaatttttgcaggatagcagatatgttccggttaagttggcaccatcaggatttgtgcttctcagagacttgcatcctactgagccagaagtgcttgctctaactgacacgccctcatctaccagttctgctgctggtgggtcagcaacaggattgcagagttcttcatcagccatggctgtggatgaggaacctcaacctcctcaaccatttgaatacacctcatgagtttggacctgattccactaagttcaaatattcgatattcgtcatggtgcttatgaaaattggttcttctgaggagagtagctacctacgtgtgaatggatcaactctactgctctgttacccacttgaaatcgagttctggggcttggtttttcatttttcctgaacgcactgtactgtggtatttgctccaatatgtagttaatatgtgtactggttcatactatatattttcaaagtggggtgccgaagcagcgtgcggccaatctgctgtgtcaatgtgtttttcttttttatcgtttccaatttgtttttgaagtacttctccaatttctggtcaccaaatggggggccaaggattcttctatttgtagggtagtggcactttcaaagaaggccaaggattctatttgtagggtagtggcactttcaaagagtttctttctcttttaaaaactcgttaatcttttatgtttactgttaacagctcgagattacgaatttctgatttctgaaagtgaatttaagctctcttgtctctt

SEQ ID NO: 14223 - DNA, 1924 bp, Glycine max
  Clone ID: PAT_MRT3847_112851C.1
cagaaacccacaaggacctgagacatgaattgaacggtactgaggtttacttataccagcctcaacctcaaccctcgttttctttctttcagcctcgagccgaatcggctcgagtgagaattccaagttctgttctgagaagaattcacaacaaccacccttctctgttttattttattccttcactctgtgaaaacaaaacatcatgtctcagaaccagaatggcaagtgggtgcgaattgccccagaacaagttcgaggctcctccaatggacacgtggaagtgggaggttccaacaggctctgcataaaccctcagaaagatcacaagtccgaaagctatgaggaccttcaattggagttcaaccctcttgtgttcagctctctggagcagtatttgcctcctcacatgttgaacctctcacgtgaggttaaggttcagtatatgaggaacattctgcttcgctatttgcccgagagtgagcgcattcggattcaaaaacacaaggaatacaggcacaggatcatgctgaactatccaccgctatgtaagcagatatatagtatggatgctgagaaatttttcacaccctcatttctcttcggctttgaagaaaattcagaagcaagttttagaagtataatggctgaacctcgtaaaggactttatacatttgaaatgcttcaaccccaattttgtgagatgctgatgtctgaggtggataattttgaaagatgggttcatgacaccaagttcagaatcatgcgaccaaatataatgaatcaatatggtgccgttcttgatgattttggcatggaatccatgctcgagagattgatgaatgatttcataagtcccatatctcgagttttctacactgaaattggtggaacctcgctggactcccatcacgggtttgttgttgaatatggaatcaatcgggatgtggaacttggcttccatgtggatgatgcagaagtcaccttaaatatttgcttgggaaacgaattttctggtggagaactgttcttccagggtgttcgatgtgatgcacatgtaactacaaatacgcaacaagaggaggccttcaattattcccatgtcccaggacacgcaattcttcatcctggtcgtaaccggcatggcactagacctacaacatctgggaatcggatgaatttaattctctggtgtagaagttcggcttttatagagttgaagcgatatcaaagagatttttatagctggtgtgcagaatgcagacgcaagaaggcagagagagtgcgtttgtcagttgtggccgccaaacaggaattactaaagagcgaaatataatttgcctcatgaacttgcacatgtgaattgtgcttgtatagttgattcacatcattgaacttcttttctgtttctagattctgtattatttttaacgaaatgaaatatgattgaagttgcaagttataagcatgatgaacttgatacccgacccaaaaaaaaaaaaaaaaaaagggcggccggctggtgagcacaatgcagacggaagaaggagctacatgtaggaacaccgaccaagatttattgttaatgttgtcatcttccatggaactaattgtgtattcaatttgctggaaacacaacattgagtttttttattgaagagggaaatgcaattggcctcgtgaaccagttgattcacatgcaagtcgtgcttgtatagttgattcaccattgagcttctttactgattcggacagtgttgtcatctttgactgaaagtaaccgtgcaactagaaaaggcatttaatatgccatgaaaaagttcactctttacagtagccaacttgacaacttgattcagttgtgacaaactatgttggttttatgaccttatcactacaataattgaacacgacttttacaggt

SEQ ID NO: 14224 - DNA, 257 bp, Glycine max
  unsure (1)..(257): unsure at all n locations
  Clone ID: PAT_MRT3847_112852C.1
tgatcacaggatgatgctctctgcgnnnnnnnaancagaggttatgggtgcacctaagaacgttgaaatttttgcattatctgttaaagacgccacagataaaaactcacaacacacagggcgtgataatttattttatacacaatctcattctcatggcgctcaaaagggatggggtaggtatacgacgatgtgggtatgataggggaagcccccgggtttactgggtacccagaaagaggacttgtttcagggaa

SEQ ID NO: 14225 - DNA, 425 bp, Glycine max
  Clone ID: PAT_MRT3847_112853C.1
tttttttttattttttatatttttttttttttttttattttatattatttgttttttttttaaattttattgttttttttttaaatatattaatttttttattttgaaaaatatttttttaaatttgataatattttattggttattaaaaaaaaaggagggggcgtttcaacaggggaaaaaaaaaaaataaatatcaaagggtagaaaatagggaaagggaaaaaggccccctatgcctaaaaaaaaagaatgacaaaaagggaaaaagtgcgcgggggacaaaaaaaatgaggaaaactggggggggaaccatttattaaaaagcgggatgattttttcaaaacaaaatttgagtgggacaaacgatttttaagtggggataattgcgggcctccacaaaaaatatctctggcttggtctat

SEQ ID NO: 14226 - DNA, 855 bp, Glycine max
  Clone ID: PAT_MRT3847_112854C.1
ccaagtcacaattcatatttttttatgagcagaaataaaaaaaaatatcaaaaaatttataataattcactcattttatttaactaactgaaatagaactcattgataagtcacactgtatataaaatatcactgtcttttatgaaaacaaagatcattatttaatatagcccaagtacactgcatgaaaaagtatcatagacgtgaatgttctcccaaattgatcatctactctacttactgctactccttgacaatggtcactgggcatggagcatgagtcatcacgaagttgctaacacttcccaatatcatcctttgaattgttccaagacctctgcttcccaagaccaaagagtttagcttcagatcttcaatggaatctagaagtttctctcttacatcaccccagtacaatttcaccacaacgttgacctctttttgcctggcagcagtgtcaagcaaatcaagaacctctgcatcagtttgcacgccatagtgcttcgtaacctctgcatctctgaactctgtcaaaggaacaagaggagaaccagatttgacccacaactggttacgatcatcagaagaattagggttgacgtggatgatgtacaaggtctggcctttatcagccaagttttcgatggcccatttgagagcaatcttgctgctcttggagaagtccaatgcaacgccaacgttcctatcctttaccatggtttctagctcttcttttttttggttgagtttcaagagtcaaatctgaagaatgaacaatttgatgctaaaaagaaaacactcaaaacagaatcatgattgtgggcaggaataggatcactgaatttatctcgagcc

SEQ ID NO: 14227 - DNA, 550 bp, Glycine max
  unsure (1)..(550): unsure at all n locations
  Clone ID: PAT_MRT3847_112855C.1
gaaatcacgaccatgtcgtcgcagaatcagaataggtcgttggagcaagctggaccctccggctccggtggacaggtgggagtgagagtagtgaattggagtggttccgataggctttgcataagccctaagcgagatcacaagcccgaaaactatgacgaccttcaattcgagttcaatcctaatatcttcgcctctctcgagcactatttgcctcctcatatgctcaacctctcacgtgatgttaagcttcactacatcaggaacattcttcttcgctatttgcctgagaatgaccgcatttggattcaaaagctgagggaatacaggctaaagatcatattgaattatccaccgctgcataaggagatatttactatggatgctgagagctttttcgtaccatcatttctcagagcaataaaagaaaacacagaagcgagttttagaagtataatggctgaaccttgtanaggagtttatacatttgaaatgcttcaaccacaattttgtaaaaaactgatgtctgaggtgggatcatttgaaagat

SEQ ID NO: 14228 - DNA, 722 bp, Glycine max
  Clone ID: PAT_MRT3847_112856C.1
ccacgcgtccgcactcacaaacccaaccctttctcaactccttcttactccttgccccttctcagatcgcctattctgttaagtcccaaaacacaaaccctaaccctaaccctaaccttagctattcgaattccactcctcttcgcgaaatcatggcgacgactttggtgagctccgcgggtgggatgcttgcgatgctgaacgagccacatctctcgctgaagcttcacgctctctccaacctcaacaacttggtcgacaccttctggcccgagatctccaccagtctcccgaagatagagagtttgcatgaagatgaggagtttgatcaacatcaaaggcaacttgctgcacttcttgtatcaaaggtcttttattacttgggtgaacttaatgattcgttatcttatgcccttggagctggtcctctgtttgatgtctcagaggattctgactatgtgcacactcttcttgctaaagccatagatgaatatgctagccttaagtctaaggcagcagagtcaagtgatgaatctatcaaaatggacccaaggttggaagcaattgtggagaggctgttggataagtgtatcgtggatgggaaataccaacaagctatgggaactgctattgaatgcaggagattagacaaactagaggaggcaattccaaggggagtgacatgttcaaggaactctatcatattgcatttatgtatctca

SEQ ID NO: 14229 - DNA, 246 bp, Glycine max
  Clone ID: PAT_MRT3847_112857C.1
ttgttgggagcggtgtattggaaagacatattccaaatcaaggtggctatcaccacaatcaccaagctttgtaggtgggcatgacacaatgtcagcaccattacaatttgtccactcaactaatggtgaggtatcagttaaattgccattagaaatgaccttatcatccaaaaggtgaccttcactaaaaatgcatgcatctatttcgtcaggtaggatggatatagaagagcagaattctacaga

SEQ ID NO: 14230 - DNA, 1289 bp, Glycine max
  Clone ID: PAT_MRT3847_112858C.1
gtcgtcgcagaatgagaataggtcgttggaggaagctggaccctccggctcctccgatggaggggtaggagtgaattggctctgcatgagccctaagcgagatcacaaccccgaaaactatgacgaccttcaattcgagttcaatcctaatctcttcgcctctctcgagcactatttgcctcctcatatgctcaacctctcacgcgatgttaagcttcactacatcaggaacattcttcttcgctatttgcctgagaatgaccgcaactggattcaaaagctgagggaatacaggctaaagatcatattgaattatccatcgttgcataaggagatatttactatggatgctgagaactttttcgtaccatcatttctcagagcaattaaagaaaacacagaagcgaattttagaagtataatggctgaaccttgtaaaggagtttatacatttgaaatgcttcaaccgcaattttgtaaaaaactgatgtctgaggtggatcattttgaaagatgggtccatggtaccaaactcaaaatcatgcgtcctaatgcaatgaataaaaataaacatggtgttatccttgatgattttgcctttgaagccatgcttgacagatttatgtgtgatttcatacgtcctatatctcaagttttctaccctgaacttggtggatcctcattggactcccatcatggttttgttgttgaatatggaatcaataaggatgtggaacttggcttacatgaggatgaggcagaagtcaccttaaatgtttgcttgggaaaagaattttctggtggagaactgttcttccagggtgttcgatgtgatgcacatgtaacttcaaatgcgcaaccagaggaggccttcaattattcccatgttccaggacacgcaattcttcatcctggtcgtaaccggcatggtgctagacctacaacatctgggaatcggatgaatttaattctctggtgtagaagttcggcttttagagagttgaagagatatcagagagatttttatagctggtgtggagaatgcaaacagaagaaggcggagagagtgtgtttgtcagttatggccaccaaacaggaattactaaagagcgaaatataattggcctcgtgaactttcacatgtgaattgtgcttgtatagttgattcccaccattgaacttcttttctgtttctagattatggattatttttaacaaaatgaaatatattgaagttgcaagttattgaagttgcaagttataagcatgatgaacttgatacccgaacc

SEQ ID NO: 14231 - DNA, 193 bp, Glycine max
  Clone ID: PAT_MRT3847_112859C.1
tacaccactcataccaatctattcacacttcaactaattaccaaaacccttcattacatttctaaaaccaacaatgattctaaatacttactcccatctcataactcatctataatctccaattatacttttcatcctccctatcactctattaatcatctcaaactctatctatcccatcatcccaccatta

SEQ ID NO: 14232 - DNA, 341 bp, Glycine max
  Clone ID: PAT_MRT3847_11285C.1
acgtctgcatgcacgcgttcctcgcctacgtatgctggtaatgcggctcgaggcaaagagggcttgatgcggaaatatttatagacagaactgatgtaggactggtccagatgctactagttaacgtggttctggcttggaactcttcaacacagcacgagactcgtagtagcgactacgagtaacctcagatggttataacttggctatagagttcgtgtatgcgcgtgaaactatataatggttgattacgttgctcaataagtttgatagcggtgtctatagctttgttaagtggcggaggcagcatagcgtgtggtatacgatatctgacgatataa

SEQ ID NO: 14233 - DNA, 6866 bp, Glycine max
  Clone ID: PAT_MRT3847_112860C.1
cttgcgttactgaagcaacatacatcaattttaccttcatgttgtcatgcagtattcggctggtgtggagaatgcagacgcaagaagaagctccatgtaggaacaacgcccaagatttattgttaatgttgtcatctcccatggaactaattgtgtcttcaatttgctggaaacacaacattgagtttctttattgaagagggaaatgcaattggcctcgtgaaccagttgattcacatgcaagtcgtgcttgtatagttgattcaccattgagcttctttactgattcggacagtgttgtcatctttggcggacgcgtgggccgcgggtgggatgcttgcgatgctgaacgagccacatctctcgctgaagcttcacgctctctccaacctcaacaacttggtcgacaccttctggcccgagatctccaccagtctcccgaagatagagagtttgcatgaagatgaggagtttgatcaacatcaaaggcaacttgctgcacttcttgtatcaaaggtcttttattacttgggtgaacttaatgattcgttatcttatgcccttggagctggtcctctgtttgatgtctcagaggattctgactatgtgcacactcttcttgctaaagccatagatgaatatgctagccttaagtctaaggcagcagagtcaagtgatgaatctatcaaaatggacccaaggttggaagcaattgtggagaggctgttggataagtgtatcgtggatgggaaataccaacaagctatgggaactgctattgaatgcaggagattagacaaactagaggaggcaattacaaggagtgacaatgttcaaggaactctatcatattgcatttatgtatctcattcctttccgtacagaccgtctccttggtccttttattatctgaactttgactcgatgtcttatgcccttggagctggtcctctatcacaggattctgactatgacactcttcttgctaaagccattgatgaatatgccagccttaagtctacaaggctcgagacatcaaaactcccttcctccttgccccttctcagatcgccggttccgttaagtcccaaaactcgaaccctagccctaaccctaaccataaccctaaccccagctattcgaattcccctcctcttcgcgcaatcatggcgacgtctttggtgagctccgcgggtgggatgctggcgatgctgaatgagccacatctctcgctgaagcttcacgctctctccaacctcaacaacttggtcgacaccttctggccagagatctccactagtctcccaaagatagagagtttgcatgaagatgaggagtttgatcaacatcaaaggcaacttgctgcacttcttgtatcaaaggtcttttattacctgggtgaacttaatgactcgttgtcttatgcccttggagctggtcctctgtttgatgtttcagaggattctgactatgtgcacactcttcttgctaaagccattgatgaatatgccagccttaagtctaaggcagcagagtcaagtgatgaatctatcaaagtggacccaaggttggaagcaattgtggagaggctgttggataagtgtatcgtggatggaaaataccaacaagctatgggaactgctaccgaatgcaggagattagataaactagaggaggcaattacaaggagtgacaatgttcaaggaactttatcatattgcatttacatctctcattcctttgtaaaccttagggagtacagacaggaggttctccgtctccttgttaaagtatttcaaaagcttccttcaccagattatctgagcatttgccaatgtcttatgttcttggatgagtcagagggtgttgcaagcatactagagaagcttttacattctgaaaacaaagatgatgcacttttggcatttcaaatagcttttgatctggtagagaatgagcaccaagcttttcttctaaatgttagagatcgccttgcaccacctaagtctcagcctttggaaactgcacagccaaaacccagtgagacagcttctactcaaaatgctagtgcgaatggacaggatgatgttcagatgaccgatgatgattctgttcctatggtcaatgtgccagaggatccgattgaaaccatgtatgctgagaggttgaacaaaataaagggaattttgtctggggaaacctcaatacagttgactctgcagttcctttacagtcataacaagtctgacctccttattctaaagacaaaatcgggcgacgctggacccgtcggtgccccctccggctccttcggtggtacgggaggagtgaattggccccgcaagagtcataagcctgataacaactacgacgacaattccaagttctattctgagaagaattcacaacacctccccttctctgtgttcttttattctctcactctgtgaaaacaaaacaccatatgtcagaactagaatggtcagtgggtgtctactgccccagaacaagaacaaggatcctaaaatggacacgtggaagtgggaggttccaacaggctctgcataaaccctcagaaagatcacaagtccgaaagctatgaggaccttcaattggagttcaaccctagagtgtaaagcagtctgtggagatgaggaatagtgtctgtcatagtgctacaatatatgccaatgcaataatgcatgctggaacaactgtggatactttcctcagggaaaatttggattggttgagcagagctactaattgggccaaatttagtgcaacggctggtcttggtgttatccatagaggccatttgcagcaggggaggtcactgatggcgccctacttacctcagggtgggactggagctggtggtagtccatactcagaaggtggtgctctctatgcccttggtcttattcatgctaaccatggagagggcatcaaacaatttcttcgtgatagcctgcgcagtactactgttgaggttatacaacatggtgcatgtttaggtcttggtttggcatcgttaggaactgctgatgaggatatttatgaagaaataaaaaatgttctctacaccgatagtgctgttgctggcgaggctgctggtattagtatgggcttactcatggttggaactggcagcgagaaagcaaatgagatgctcacttatgcccatgagactcaacatgaaaagattattagggggttagcattgggaatcgctcttacagtttatggaagagaagaagaagctgacactttgattgagcagatgactcgggatcaagatccaatattgcgttatggtggcatgtatgctttggccttggcgtataggggaacagcaaacaataaggccattcgccagttactgcactttgctgtgtctgatgtgagtgatgatgtcaggaggactgcagttctagcattagggtttgtgttgtactctgatccagagcagactccacgaattgtttccctcctatcagaatcttacaatccacatgttcgatatggagcagctcttgctgtgggtatttcctgtgcgggtacaggtctcagcgaggctatctctttattggagcctttgacatcggatgttgttgattttgttcgtcaaggtgcccttatagcaatggctatggtcatggttcagatcagtgaagctagtgactcacgcgttggaacatttaggcgacaattggagaaaattattctggacaagcatgaggataccatgagcaagatgggagcaattttggcatcaggaatccttgatgctggtggcagaaatgtgaccataaggttactttctaagacaaaacatgataaaattactgcagtggttggtcttgcagttttcagccagttttggtattggtaccctcttatctattttataagcctgtccttttcgcctacggcttttattgggttgaactatgatctgaaatctccaaagtttgagttcttgtcacatgcaaagccttcactttttgaataccccaagcctactactgttcccaccactacttcaaccgtgaaacttcccactgctgttctgtcaacctcagctaaggctaaagctagggctaagaaagctgaagaacagaaggctaatgctgaaatttcatctgctcccgactctgcatcagctgtcccaagtggtggaaaaggaaagtcgtctggtgagaaggatggagactcaatgcaggttgatagcccaacaacggagaagaaatcagagcctgagccatcgtttgagattctgactaatcctgcaagggtggttcctgcacaggagaagtttattaaatttttgcaggacagcagatatgttccagttaagttggcaccatcaggatttgtgcttctcaaagacttgcgtcctactgagccagaagtgcttgctctcactgacacaccttcatctaccacttcggctgctggtgggtcagcaacaggattgcagagttcttcatcagccatggctgtggatgaggaacctcagcctcctcaaccatttgaatacacctcatgagtttggtcctgattcattaagttcaaatattcatcatggtgcttatgaaaattggttcttctgaggagagtagctacccgaatggatcaactctactgctctgttgcccacttgaaaacgagttctggggcttggattttcatttttccttaaagcactgcactgtggtatttgctccaatatgtagttaatgtgtgaactggttcatatttcatactatatattttcaaggtggggtgcagaagcagcgtgcggccaatctgctgtgttaatgtgtttttttgttttttatcgtttccgatttgtttttgaagtacttatccaatttctggtcatcaaatggggggccaaggattctatttgtagggtagtggcactgttaaagagattctttctctttttatgtttactattaacagctcgagattacgaatttctgaaagtgaatttaagctcccttatatattaataaaaactattaaatcttacgctatcacttcgagattgctcgtaattccactctggggacaattaagattatcaatatgttattcttcataatagttgtcaaggtgggtagtaaagaggatcgccgcgacctgcgtactaaacggcgggcgatgggacctgctttccctctcggaaactttttttaaaacttgttcttgggttcgttttttcgggtatctgcagcgatatgtactctacttgttgcttaattatattgctacttctgattttggttcttactaaactgcgtccgactgagctttcgtcgcctcgtgtctctctaaaattgtgtctttgctcttgtttttccatttgttttggaatggctcttccaatgtcctctctcatttgtgtccgccaaatgtgtgccgcttggttcctcaattgttctaatagtcgtgatttgtgagggtgtgtctgatttggtgtgactatttgtgtttcttttaagctgtttccaagtcagggattttactactagtctagcctcttctctctgaatggctggcctctgcttcagttttttcttctgctgatggagcgtcggtgattggttcgtgctgtggttggtacgtcctggatttgagcctataagccgatatcttcccactccgtgggacagttctgacgatcttgtctcacactgcattgacggctcctgatcctgaatcggtatccccagattctgaaagctctcttttcccgatcggtgtattttgggtcccaaaaaatgtataagtgtcgtcagtcggtcacctgaatggcatttcatggttgttcgatagcccacctcccttgtatacctctagccctgctactgctcccacgactactactgagatgacatctgcgcctgctgctccggaggaggtgccttagactcctgcaagggcttagatagctcacgagcagaaggcttaccaccatgcctcatcctcctccgactctgcatctgcccccccctgtgctggcaaccccagcttagccggtggctagggcggagactcctggcgggctgatggctctcctcagagttcatcggcgcctgtctctccggcacttgcaccaggtgctccatgagcaaggtgggcccgtgtgtggcatcgggactccttgctgctggtggccccaacgtcaccgtaggcttccgtgcctggaccatccttggtgattctgccgcagccggcgggctgctgcctgcacccgggttgggtttggtaccctctaatttattttataagcttggcctttcacccacggcttttattgggttgaactatgatctaggagtcgcattattaggaactgctgatgaagatatttatgaagaaataaaaaatgttctctacactgatagtgctgttgctggcgagacaaatggtattactatgggcttactcatggttggaactgtccctgatcacgcaaatgagatgctcacttatgcccatgagactcaacatgaaaagattattgggaagcggataaatttaatagcttgttgtagaagttgggcttttatagagttgaagcgatatcaaagagatttttatagctggtgtgcagaatgcagacgcaaaaaggcagagagagtgcgtttgtcagttgtggccgccaaacaggaattactaaagagcgaaatataatttgcctcatgaacttgcacatgtgaattgggcttgtatagttgattcacatcattgaacttcttttctgtttctagattctgtattatttttaacgaaatgaaatatgattgaagttgcaagttataagcatgatgaacttgatacccgaaccaaaa

SEQ ID NO: 14234 - DNA, 410 bp, Glycine max
  Clone ID: PAT_MRT3847_112861C.1
ttgtaattaaaatgtgcagcaatccaaacgccaaagttttgtcttcgatttgcggcttcagtcggatggggccgaaccgcgagttgaaaacgcgcgttgaaacgttttggaaagagcaggcgaagctgcacatggacggtgcaaccgaaggcgaattgaccgtttcaatcgatcaatttgagagggacattgaacagttgcaaatccaacgttggcagcaattgcaggcaacgggcatcgatctgatcccatccggcgacttctctctctatgaccacgtgttggactgcgcgtgtcttttcaatgccattccgacgagatacaaatcggctgctcagctcagcggtgttccgtcccatctgcgcctttactttgcgatggcacgcggtcttcaggagaagggggcggat

SEQ ID NO: 14235 - DNA, 286 bp, Glycine max
  Clone ID: PAT_MRT3847_112862C.1
acgtgtgagaacaaatcagaaaaggcttctttttttcttttataaaccccgccttctttgacattctctttcatcttcaacccatcatccatcccattctaaaactgattcctgcctatgcttttgtctataccttcatttacattgctacctactattcctttctatccaaaaattcctgaacctagaacccccaaaaccaccctcccctcaaaaaatgatacctgttactacgcacacccactcaactcccccatatcaaaataaatctcatgtacacccaatc

SEQ ID NO: 14236 - DNA, 713 bp, Glycine max
  Clone ID: PAT_MRT3847_112863C.1
ggagattttatcttagtattgctcaccttgcttcagatgtactcgctgtctctgttgagcttcttcttagttttatttgtcctccctcttggtgtcctatttccatttccatctggaatcagcgctttgtttagtcaaggacctaggagatcagctgggcttgctcgactgtatgctttgtggaatctaatgtccctagtcaacgtagtagttgccttcttttgtggctttatacattatacagctcgttcacataagctttacaactttcaatcctggaattttagtatggatgaaagtgaatggtggatacttccatctggtctggccctctgcaaaatcattcaagcgcgtcttgttgattgtcatgtggccaaccaggaaatacaagatccctcattgtatagcagtgacactaacgtcttttggaattcttgaaagttttacttttttggtctttttttttttttttttgcatttattgaagtgtaaagctttaatgggtgggagcagtcacgttaagtggcattgtgtaaattctaaaatgttaggaaaggttcggtaaaatgtgtcgtgtggagtgtgttgattatattgtttgtttgatgatcatctgttactatagttgtacaattgacataagaatttaaggctttagcccttctgtaaaggttggcgattctgttaatatatttatctgacgcatactgatt

SEQ ID NO: 14237 - DNA, 1672 bp, Glycine max
  unsure (1)..(1672): unsure at all n locations
  Clone ID: PAT_MRT3847_112864C.1
gatgccttcaatagatttgtggatgacatcaatagtttagctacttatcactggtgggaagggtctatttacagtatcctttgcatcattgcatatcccctaatttggtcatggcttcgaatgtgtcggaataagaaattatagagccttagagaatttgttcgatcagagtatgaccatgcatgcttgcgttcttgccgttcacgagcactttatgaagggctgaaggtaggtgcaacatctgatctgatgctgggatatctggatttcttccttggtggggatgagaaaagacctgatctgcctcctcgtctttatcaaagatttcccatgtctataatttttgggggagatggaagttacatgagtcctttctctcttcacagtgataatatagctcttagtatcatcatggagtcagtagatccaacgggcttgctcgactatatggtttgtcgtaatgctcaactacgattggttcgccgtggacatctaaaaataacttttggccctgttatcagctggcttgatgtatatgcaaaccctaagttggctacgtatggtgtatgtgttgatcttgcatggtttcagcctacagcctctggatattgccaatttggacttgtggtatatgctactgagaatgaaagcatgtcctcatcatgcgaaggttatgatgattcaagaataactgaaaagcagacatgtttactttcttgtcccagaaatccagtgcatcacattagaagcaatgaacacctgaagatgcctgctttaatgggtgggagcatattacataagtggcattgtgtaaattctaaaatgttagaactgcttccgttccgtgtgccgtgtgcagtgtgtatacaaagcccttcggtcatcaggatctagttggtctggttatctctataatactcctgggagattttttcgcccttctgctcaccttgccgctgctgttctctctgtcactgtttatttgtccttcctcttggtgtcctttttcatcttccatctggaagtatagccttgtttagtcaaggacccaggagatcagctgggcttgctcgactgtatgctttgtggaatctaatgtccctagtcaacgnnntagttgccttcttttgtggatttatacattatacagctcgttcacataagctttccaactttcaatcctggaattttagtatggatgaaagtgaatggtggatacttccttctggtctggccctctgcaaaatcattcaagcgcgtcttgttgattgtcatgtggctaaccaggaaatacaagatccctcattgtatagcagtgacactaacgtcttctggaattcttgaaagttttacttttttggtctcattattttccttttttttttggaatttattaaagtgtagagcttaaatgggtgggagcagtcacgttaagtggcattgtgtataaattgtataatgttaggaaaggttcggtaaaatgtgtcgtgtggagtgcgttgattatattgtctgcttgatgatcatccgttactatagttgcacaatttttaggcactacagatgtacaattgatataagaatttgaggccttttagcttttctgtaaaggatggcgattctgttaatatatttatctgacgtatactgattaaaaaaaaaaaaaaaaaaa

SEQ ID NO: 14238 - DNA, 478 bp, Glycine max
  Clone ID: PAT_MRT3847_112865C.1
agcaacgtgaacctaacctaaccaccatgtctttcttctctttcttgaagtataaacaccttgtctttggtcatcttatatatgttaattgtggtgcctaggttcaagaagacctcagcttcatccaacacgtggagaccttcttcatagaccacctcaaccctttgccaccgaagcctgccttgtcggagcactcaacctcaaaccccgcctcctcctctgaacacatccccgccgtcatgtataccgtcgtggatccacttgccgccaatcccaacctaaatgatgacatggatgaggatattgaggaggaagaggaggaggaagaggaagatgaggagccggaatctggttccgaagacaaagccggatacggcatcgctcgccaaactccgacaccagccatggcggcagagcccagcgagctgatacaactagagatgccggaggacatccggcttgggtctccaaacgatgg

SEQ ID NO: 14239 - DNA, 116 bp, Glycine max
  Clone ID: PAT_MRT3847_112866C.1
ggtgtcacgcccgcatcaaacgagtattggtggctaggacagcttaacagggagggtatccattttcatatcatgatccttccgggtaagacaaggaagaggcattcggagaggaa

SEQ ID NO: 14240 - DNA, 294 bp, Glycine max
  unsure (1)..(294): unsure at all n locations
  Clone ID: PAT_MRT3847_112867C.1
caacttcagagaaccggaccccgcccacgacacncnagagagccccagaaacgcggaaaggccggggaaggaacccgccaaggagcgcagcccccaccgaccaaagggaaaagcaccggacggggagaacaggaggaacacgaggagaaacacagcccaacagcgcgacgccccgaagagaagcaccggcgcagaaacccgcaggagcgaggcaggacaaaaaaaaggcgaacaagggaagaaaaccaggagngagaaccaacacggggaggcgaagaaaanaccacacccgag

SEQ ID NO: 14241 - DNA, 288 bp, Glycine max
  Clone ID: PAT_MRT3847_112868C.1
gaattctattttttttttttttccttttttttttttttaactaaaacaaaacgggttttcttacccggcctgagacctcccctaaaattggggttttttcatcaaaaaaaaacaaggggttccttttacaaactaaaaaaaaacatgatctttaaaacccctcccttactttttccaggaatttggtccacccttttttttcaataccaccacggcggtgaccaattcgcgggtggattgcatttcttttgagagcgccaccccccggccttttcttcttgtcttgct

SEQ ID NO: 14242 - DNA, 288 bp, Glycine max
  Clone ID: PAT_MRT3847_112869C.1
tggttttcaagtctgctgagataactctgggcagggggattaaaatgaaagggctggttttgtttgtttctacaattttggtagcatatgaatgccatggctcatactaccagaagtttcctttccaaatgaaaactttgtttggtgggcaatacaccaattaggtggcatttgccatttggaggcttggcgtggaaacaaacaacgttgtcaaattgcttactgttctttcattttttcggtagaataacataacttgacttacctttcttagtacaaccaattttt

SEQ ID NO: 14243 - DNA, 369 bp, Glycine max
  Clone ID: PAT_MRT3847_11286C.1
acaatttcagcacactggcggtcgttactagcggatctgagattcattaacaggccaaatcgaacgctatggacagcccagcaatcgtgcacttataggatattgatgcgactgtcacagggtacacaacacgagtaaaaatatagagatagcgaatagatgaccttgacatcgtggcgcatatatacagatgcagcagctgtattcttgactgcctggaaatcttgcgcaagtactttggtgctagacttgaaaagaagatctatgtcgataaaccatcctgggtatccaagttttaccaactcgattatcttcggacgaaaagggaccgagaaagtggcactaatagaaattgatgatagccaaccg

SEQ ID NO: 14244 - DNA, 1975 bp, Glycine max
  Clone ID: PAT_MRT3847_112870C.1
ggctcgagcttggtaaacgcaacagcgatagaactctagacatagaatagtaaacggtgttagcttcgatagattaaacgaacacagagcgagcgaaagtagaatctgaaaaacaatggcggcgaagctagacacccacgccgtggcttccgatctgatcgacttcctcaacgcttctccaacggctttccacgccgtcgacgaggcaaagaggcgtttgcgtagcgcggggtaccaccaactctctgagagggaagtgtgggaactgcaaccgggcaacaagtacttcttcaccagaaatcactccaccatcgtcgccttcgccatcggcaaaaagtacgttgctggaaatggattctacataattggggctcacacggatagtccttgtctcaaactcaagcctgtcaccaaggttgttaaggctgggattttggaggttggtgtccaaacctatggaggtggtctgtggcacacatggtttgatcgagacttgactgtggcggggagggtcattgtgcgggaagagaatgctggttctgtttcgtactcacatcgccttgttagaattgaggaacctataatgcgaataccgactttggcaattcacttggacaagactgttaatgatggattcaaatttaacaacgagaatcaccttattcccatcttggcaacatcgctgaagggtgagctcaataaagtgtcctctgaaaatggtcctgttgaaagtggaaatcagaccgatggaaagaaagcaaatgataaaacaggcaccagcaatacgaagcatcaccttcttcttctacagttgcttgcaagcaagcttgggtgtgaaccagatgacatatgtgattttgaattgcaagcttgcgatacacaaccaagtactattgctggagctgcaaaggaattcattttttcaggacggcttgataacctctgcatgtcattttgctcgctgaaggcattaatagatgctacatcctctgacagcagtcttgaggaagagtcaggtgttagaatggtggctttatttgatcatgaggaagttggatctaactctgcccaaggagctggctctcctgttatgctaaatgctgtgacaagggttaccaattccttcagctccaatcccaaccttctggagaaagcagcacaattaagctaccttgtatctgccgacatggcacatgcactacacccaaattacatggacaagcatgaagcaaaccatcagcccaaactacatggaggacttgtcattaaaaccaacgctagccaacgctatgcaaccaatgttgtcacatccttcatattcagggagatagcatcaaaacataaacttcccgttcaggactttgtggtgcgcaatgacatgtcatgtggttcaaccattggtcctattcttgctagtggcgtaggtattcgcactgttgatgtaggtgcaccgcagttgtcaatgcatagcatacgagaaatttgtgctgttgatgatgtgaagtattcatatgagcacttcaaggcattttaccaagaattctctcatgttgatggtaagatggtcgtggatatataggaatatctctaatcacgaaatcctcattaatcctttgctctagaagctgttgctgaaatggtcgtgtttcgtaatttagtaccattataatgccgacgttattatgatgaaattttcaataaaattagactccctgaatgaaatattagcaactacttgaagtgtgttgtttacttgaatagtccaagttcttgcttctaaaatgtgatcgtgttcgggagagtaacgtactagagtagaagttgaaataaatatactattttttcgagcaatattaaaaaaaaaaaatgtatggtagactgtgttattttccaaaaaaaaaaaaaaaaaaaataatccgacaaaaaattaaaaaaaaaaaaaaggggcggccagtataaaggaatccaaagttta

SEQ ID NO: 14245 - DNA, 316 bp, Glycine max
  Clone ID: PAT_MRT3847_112871C.1
acgctggagagaccgcaggataattattcacgagtctaaccgaggactacgactaacggtactggttactagaccaaacgctagcaagttttctgtctaagacttgttcagttaatacatgaacaaaacacatcgcttcgctttgtactagaggagcggattgcctagccgtagctgcaaagagaggacggggatgccgagctacagttttacagacatgattctgtgcgacagcatacaactttggatgatataagagagagaaacatgctggcttgttaagaggcggggaagcccacaagaagggtttgggagc

SEQ ID NO: 14246 - DNA, 249 bp, Glycine max
  unsure (1)..(249): unsure at all n locations
  Clone ID: PAT_MRT3847_112872C.1
cccacgcgtccgttttaaaataacatctatatgtcagtttgatntacataattatagaataatcaactggtctctttctaattttttagtactccaatctgggtcatcacaatgctttttcttctgggtcacaccgattgctggtactcttaatattggctaccatttgctcctttgatcattggtctattaattggagcccaattgccaggtgttattaccaagattggtcaaaggattcaaccacca

SEQ ID NO: 14247 - DNA, 414 bp, Glycine max
  Clone ID: PAT_MRT3847_112873C.1
gggattaaatccttagagttaggatggccttacaggtggtacctgggttttgttcactaacttattgtttcttggggatatggtgttgaggttgaggtctcattttccatagtgccgacttggcaatcctgacaaatgcaagacataactagctagtgagagcttgccatcataccatggcatagggtgtactcctggtaatcactcaaaataaaattttgtaactccaatgagttttgggagtttcagtggcagttgcctaatgtgatctatatgattgagttagtaaaaagagacaccttaggatgcatgtaagacctagtgaataaccacaatgcagtggttgttatccttgtgtgttttgacttgacttaaggtttttgtgttttggctaatgaagcaaaatgactcacc

SEQ ID NO: 14248 - DNA, 407 bp, Glycine max
  Clone ID: PAT_MRT3847_112874C.1
ctctattctcagttgtctctacaacatcaagacagaacctgatttttacattcaacttatctaaaacgatgcggtcggttctattgatcatgttgtgacatctaactctctagaactgatcacaccctctttaaattaggtctgacatttatatcaatattcactacttttcatttaatataaatacatctgcatattatattgctaacgtcttaaaataatggttaaagccttttctatttaactagaactactacacatgtgccattattgatacataaatgacatgaaaatcttatctccgtatataaggttcatcattgaactattgaatatgaattgggtggctactctggtgtcgaacaatctgttcggagttactgacccagtaattattgacttctttt

SEQ ID NO: 14249 - DNA, 302 bp, Glycine max
  Clone ID: PAT_MRT3847_112875C.1
catggacacccggtcccaagaaaaagttttaatattggcgcgtacagaaattacctaacccaacggttgtataaactctcggacctttcgcgaagatggtattcggacaaacaaattccattaagggtttgaacaactgacctggctttttttttaaaaaagaaataaaaaaaaagaagggtggagaagaaccttatatgggtggggggggctgaaaaacaaagcttgtaaaaggcctagagggggcgcattcgccgactaggaggactaaagagggtggcagcaatggggcttaaaacccg

SEQ ID NO: 14250 - DNA, 917 bp, Glycine max
  Clone ID: PAT_MRT3847_112876C.1
atccacgcgtccgtcctccctcgccactttcttcctaattctctcaataagggttttacttttttgcttaaacccgcggccatggcgacgagggcagcagtggcggcgccgcgcgtttttcggcggtttttctgcacaaactcagcctctccttctttccccttcgttcctacgccgcctcctggcgccacccccactccaactcgacccacggcggagcccaaccccaacctcttcgtctctggtcttagcaaacgtactactacagaaaggcttcgagaggagtttgcaaagtttggtgaagttgttcatgcaagggttgtaactgatcgagtctcaggttactctaagggttttggttttgttcaatatgctacaatagaagaggctgcaaagggcattgaaggcatggatggcaagtttttggacggttgggttatatttgcagagtatgcgagaccaagaccaccaccaggccaatctctaaataacaacagtcctcagtatggccggcagtgattcctgttatttatctgaaacattcttatgcctcattgaactggttgtctcaattagcaattgcaattcaaaaagagtattatttacaagggcatggatgctcgggtgatctttaattatctatataagttctagattattgtaatggaagaataacttatgacattgttgtaatgcaagatttctcgttgatagccttgcatattttgttgttatggttactccaaagtagcttcctttttgtacttgagtattgatgccaatgtctgaactcaatggggttactctggtctgataatcccttatacttgaaacgagataaaaatgattaattgcctacgataaaaaaaaaaaaaaaaaaaaaaaagggcggccctcgcgatctagaacctcgagcc

SEQ ID NO: 14251 - DNA, 346 bp, Glycine max
  Clone ID: PAT_MRT3847_112877C.1
gccatgtgaaacaggcatagcatgctacactcgcggccctcacttgcctagtgattcttccaagcactctccaccttccatttctacatctttaggcttgaggagtctgaaatcaagctcttaatatggagaatcgctaaaagtggcctccaaatcaacaataaaggttacaaagacatagaacacttcactcgggaccagatgtgaaacaggtgacagcctcgaagaattactcacaaaagcaacaccagataaggggatgaacaggttgacggtgacacaagggagaagcatagaaaacaaaatccttaaaagagaaaacggatacatgtggaggaaacacaaa

SEQ ID NO: 14252 - DNA, 580 bp, Glycine max
  Clone ID: PAT_MRT3847_112878C.1
aagatgagttgatgacagtgtcagtgtcaacttttatgcttccgccttttcagttactgacatctgcctattacaatatatcaactgtgaaatatgaatggataatagagaaacatatagtatgatgctgcaactataagttgtttatggtgctatgataatataagaatgatgcaattgcgtgtgtttggatagctttcaaaatcactatagacgatggtgaggtgagtcaaccttgattttgatcaaattttgcatgtttgtattgttttcaaaattatggtagaatcaattatgatgcaaaaaaaccacggtagagttgaagcaagtaggagtagcttctacttctaccaaaattaattctagaaaatcaattttattcgaaatcaattttgtcaccatctatccaaacacacatgctccagtttcctttattatcacaggagactatgcagtatgcacttgactatatcaattttgcttaagatgttcaaacaagtgaagatacccaaacaaatgaagcatagtacttgtctgaaatctgaatagattatctcaattgctcaaccttgatttcata

SEQ ID NO: 14253 - DNA, 1156 bp, Glycine max
  Clone ID: PAT_MRT3847_112879C.1
tccggaattcccggctcgaccccgcgtccggacgcgatcacgctgaagacccattttttgtattatttattaataatttatttttgtgtgtgtagttgaaggagcaccagaagaagaagagaaggtggtaccgccttcaattctctctctccatttctcatcctcatcatcttattatacctcttccatctccataacatccacttgtgaaaaaaacccattaatatatatcacacacacatgtatctctgagctccaatccaatccaagaccacaccttgtcgcgtcggacgaaccttggtgtctgtctttttttttttttttgtttcattagtttctccgaagagatgcggaagggcagaggaggaggagcctcggcggcggcggcggcggcggtgaacggatccgttttaaaggagcctcggtaccggggcgtgcggaagagaccgtgggggagattcgcggcggagatcagagacccgttgaagaaagccagggtttggttgggaaccttcgattctgccgaggatgctgcacgtgcctacgacaccgccgctcggaatctccgaggttccaaggccaaaaccaatttccctctctcacctttttgctatcaacaccccaccacggatcctttcttctacgctggtttccacgaccaccaaaacaacagcaacaacaacaacgacaaccttaacaaccctcaaagaccaacttcaagtggcatgagtagcaccgttgagtccttcagtgggccccgccctcccaccacaaccacaaccaccacgacgccgtttttgaccactacgcggagatacccgcgcactccccctcttgtccccgaagactgccacagtgactgcgactcttcctcctccgtcgttgacgacagcgacgacaacatcgtttcctcgtcgtttcgacctcccttgccgttcgatctcaacgcgctgccgtttgatgatgatgctgccgtcgtggatgatgatctacgctgcaccgcgctttgtctctgatgattatcgtgcgatgatgatttttaatttctcattttttttatctcttcaacttgattttttgttattgctatgagggaaaaaatatattaaaaaaatgatcagatgtaagattatggtaatatgatcttaattctgtc

SEQ ID NO: 14254 - DNA, 271 bp, Glycine max
  unsure (1)..(271): unsure at all n locations
  Clone ID: PAT_MRT3847_11287C.1
acttcatgnataaagatcttgctaccaaagttgcaacccctattgctagtattgatgatactccgatgatccatcctacaagaatgtgctttgcacgtgagctcccatgacttaatggatatgctgaggtttggccacatggagggagaaccccaccacataagccagcatttcccacaagatcattcgggtttattgttcttagcacgccattttctgggacaggaccttctagcttgttgtgtgagacattgaatgtttctagagctgg

SEQ ID NO: 14255 - DNA, 360 bp, Glycine max
  unsure (1)..(360): unsure at all n locations
  Clone ID: PAT_MRT3847_112880C.1
ccaagccctatacaaccaaaccctaacacacacccatttgattcagtttccatggctagcctcaaggttgcatttttggctgcagtgctctgcatggttgtggtgagtgcacccatggcacatgcagctatcacgtgcggggcaggtggagaagtagcctggcccaatgccatcggntacctccagaagggaagaaacgccgncttcgggaatgctgcaacggaaatggaaaaccttaatggccgcccccaaaaaccccgcccaaccgcccaaaaggggggaaattgctaaaattggccggccagccaaattccggtttttaagccaaaaaagggcctccctcccccgggaagggggggg

SEQ ID NO: 14256 - DNA, 206 bp, Glycine max
  Clone ID: PAT_MRT3847_112881C.1
ggatgaatggcctccgtccatggtaaatgatgaagtaaaaattccaaatggatttgaggaagagtctgtaataaattaattgatttagatactagatacagaggcacggaatttataattcttaatttaaatttcttttttttcagttttaaaagaaattctctgtaaaatcccgtcatttgtaaaattttgaatattcagaatcc

SEQ ID NO: 14257 - DNA, 243 bp, Glycine max
  Clone ID: PAT_MRT3847_112882C.1
cggctgcaggacccggatcccgaatcacaagaagaaaaccgccctcccgaaaaaagtgctcaggaagacaagctctagctgcaataagcccctgcaagatccggacgccaaagctcccgaatacctgtatggaagcctaataccagactacccaaaagacccatataggctagggaagcccctccagtacctgcagaacgagtaggacatcgctggaccagaaccatgcgaaaaacaaggctg

SEQ ID NO: 14258 - DNA, 315 bp, Glycine max
  Clone ID: PAT_MRT3847_112883C.1
atcaggggaagaacataaaaatcccattctcagacgggggaaaacttattcaaaaatcaaatttggcaaaattaatagctctgacactaacttatacaggtttcatctttcttaaagcttttgtttcgctatctacctccaatatctggaatactaatagcattgggggagcaaaatctatgactttctttaaatgatactgaccccgaattcaacatattggggctctggatgaatgctggttgacttggaaaaggaaaaaagacaacttccctgttaaacatacaaattactgcagccattgtgggtctgtct

SEQ ID NO: 14259 - DNA, 160 bp, Glycine max
  Clone ID: PAT_MRT3847_112884C.1
ggctcgagctcaaaggcaacccaaaacggaactttcgatacccaacaaagaccaccccaaaagacaggacggggcataatccagaagcaagccccagcagacacggccacgacccacccaacacggctcaacaacaactaggaaggcacaggaagtccga

SEQ ID NO: 14260 - DNA, 551 bp, Glycine max
  Clone ID: PAT_MRT3847_112885C.1
cggaattcccgggtcgacccacgcgtccgcaaaattcattcaagtcgaaagagagcgcagtttcacggattttctaatcacactcatagcgttaggtttagggttttacacagagagagtgcacgaatggcgattgcgcaagatttgtatccctcagaagacgaccttttgtacgaagaggagttgcttcgaaaccctttcagcctcaagctatggtggcgctacctgattgcgcgttctgaagctccgttcaagaagcgcttcgtcatttacgagcgggcactgaaggcgcttcccggaagctacaagctgtggcacgcctacctccgcgagcgcctcgacctcgttcgcaacctccccgtcactcactcacagtacgacacgctcaacaacaccttcgagcgcgccctcgtaactatgcacaaaatgccgcgaatttggatcatgtatctgaaaaccctaacgaatcagatattggtcactcgcacacgcaggacattcgatagggctctctgcgctctccttgttacccagcacgaccgtatttggta

SEQ ID NO: 14261 - DNA, 330 bp, Glycine max
  Clone ID: PAT_MRT3847_112886C.1
cccacgcgtccgcccacgctttctccttcgcgtacgtggacgcatgggctggttcaacaccctagttttaggacccacccttttccaagtgtatgacatttggaggatgcaaaacgtgagattttacagctgggttacgagtgggtccacataaaaaccctttatatttctctgtctctgaggctgatgatatatgttagcatatgtaacttgatattcgcgttctggcatgtaagctatctatgctaagcggtgccacagtgaatattgtattctaccgttcattatgcttttgtgtaactcctgcagataggcgaagcacaatgaatc

SEQ ID NO: 14262 - DNA, 340 bp, Glycine max
  Clone ID: PAT_MRT3847_112887C.1
agaaacttacatagcacatatattggtggacaatcctcattcaaaaaccacacatgataaaaccttgtccaaaagaaaacgtaaaagtgcacatcatcaaacacgatttaggagatatttggcccactctaatcatgaaacacgatataggagatatttgacacactctaataatcatcatctccttcaccatcatcatttccattaccagacttgggaacaaccttctaaaaatccttcttcatagcagaaagggtctcacgagccttccagaactcaccctcttacataccttaacccacataccagtgcacgaatgcccttttagcatacatgagat

SEQ ID NO: 14263 - DNA, 767 bp, Glycine max
  Clone ID: PAT_MRT3847_112888C.1
cacgcgtccgcaaaaatgaaagagaagagggtgagttatctcctaatggagactttgaagaagataactttgcattttatggaggtaatggtttggatgcagtgcataaaggaaaagatggtggtgtgagtcggcaataccaaaataggcacggggaagaagtttgtggtgaaactagaggagaaaacgatgctgatgctgatgatgaaggtgaagaaagccatcacaggtcatcagaggacagtgaaaatgcatctgaaaatgttgatgtttctggaagcgagtctgctgatggtgaggagtgttctcgagaagagcacgaggatggggaacatgataacaaggctgagagtgaaggtgaagctgaaggaatagctgatgcccatgatgttgaaggagatggaatgtcattgccatattctgaacgctttctactaactgtgaagcctctagcaaagcatgttcctccaatgttacatgagaaggacaggaattcacgagttttctatggaaatgattccttttatgtgctgcttagacttcatcagacattgtatgagaggatacaatcagcaaagataaactcatcatctgctgataggaaatggaaggcttcaagtgatacaagctccactgatcaatatgacaggttcatgaatgccctttacagtttgctggatggttcttctgataatacaaaatttgaggatgattgtcgagctataattggaattcaatcatatgtcttattcacattagacaagctg

SEQ ID NO: 14264 - DNA, 516 bp, Glycine max
  Clone ID: PAT_MRT3847_112889C.1
cgacccactatagggatgagctggaacgcctgccagtaccggggcggacccacgcgtccgcccgcacgcaaatttatagaaaccttttcgaggagaaagacggaggggaaggagcaggacggggcgacgggagcgaacaagatccccgagagacagccgattgggacggcggcgcaaagccaagacgacggcaaggactaccaggagccggcgccggcgccgatggttgacccgacggagtccacgtcatggccgtggtacagagcagggatagcagagccggaggccacttaactggggctctacatgaccgcctcaaccgaaatgggagccgccggggctaagtccaagcggagtaccgttgggacccaaggaatcgctagggccttcgggggcatgatctgcaacctcggtgactgcaccgctggcatctcagggggacacataaacccggcggcgacatccgggctgaatcgggcgaggaaagagaccgtgcccacagcgacgcgctacagc

SEQ ID NO: 14265 - DNA, 413 bp, Glycine max
  Clone ID: PAT_MRT3847_11288C.1
ggtggtttttttttttttttttttttttttttttttttttttttttttttttttggcaaaaaaatacattgactttggggggttttttttttttgggaaaaaccctctgtgaactttattattacccatttcctttgttgaattacaaggggaaatgaaacccataccttttcgggggtaaggggtaccccccgttttttgataaaaagccggggaaaaaaaaaaggggaaaaagggggggaaaaaaaacaaactatggccataactgggattttgcaaaccccctggggccaaaaatgggggatccaatttttacatggggaccacccctttgaaagggttactcaaaatcccccaaacggcccatgggaagttaaaattccttcgcggggctttaaagggccttgcttact

SEQ ID NO: 14266 - DNA, 403 bp, Glycine max
  Clone ID: PAT_MRT3847_112890C.1
ttattttttgttaataacaacagatataaagtgttaaagaatgaaagagaacgtaggggaaattgagactacaaagacttatatttatttagatatgaaacaacatatttataaacataataataaataaaaaaaataattgctaacatagagataaaatcactaaccggtcatgtctagagaataggactaaaataactttatcctatcactcaacgtgacttttatttttcctaaaatataacataaagatctgatctactgaagtttgttagaccgttcctatagtcacatcttcaacagaacttgagtctccctatattcttgtaaaaagaagtcattttcttggaagttcaacgatcaaaatgtaaaagaaattgaaatatgaaccattgatgtcgaa

SEQ ID NO: 14267 - DNA, 359 bp, Glycine max
  unsure (1)..(359): unsure at all n locations
  Clone ID: PAT_MRT3847_112891C.1
ctccaatcgattttttatctcccnctaanatagaaagaacagaaatagcttatatgcctaccatagcacaccctgnnncgttccattcgatgcagaagatgatgaatgctcctgattcaaatgataatattagatttactgacgagcatggacttgctgggtttacaaagagcatgtaaagctattccaaacaaatatattcttgatgataagcttgcgttggctcacacacatgaatactcacatagaaattttccggtagactcttagttaccaatttttagtgaatggggctttatcctgtaaagtcaattatcctatataagcctttcatttataatatgttaccattttggtac

SEQ ID NO: 14268 - DNA, 207 bp, Glycine max
  Clone ID: PAT_MRT3847_112892C.1
ttaaacttaatttttcatcagtcaagaaatcgccttacaaaacattgaccaaatctcgtgtattaaccgccagtagtaaaaaacgaaaagcatcactccagtctcctgttaaaccttcctatgatattcaatttgaagataacccggaaagagccgttgaaaagttgaaagtcattctagatgaattgactgaaagaaggaaacagt

SEQ ID NO: 14269 - DNA, 477 bp, Glycine max
  unsure (1)..(477): unsure at all n locations
  Clone ID: PAT_MRT3847_112893C.1
cccgctggcgggggggnggggggccgttcccttccggggctcccctcttccccccctttgggcccccctttgccttttttcccccggggtttttntttgcncccccggaccccttttttttgccttccaaccggggcccccccctgcctgtgggttcaacattctctttccctaaaacttttgggctaagaatttaggttttttcccccccccccccctttttttaaaaaaaaatttttccccattattgttatggccacccccggtgaacccccccacccttattcgacccccttgtaaccctcccccttccttttttcaacccggtttggttttaaaacaaatcccgcccaccccaaggggttccccccccggaaaaaaagaatttttttctttttcccccccccttgttttcccctcgaaaagttggccttaaaaaaaaaaccaatttcctccccaaaaaccccccttttaccc

SEQ ID NO: 14270 - DNA, 325 bp, Glycine max
  Clone ID: PAT_MRT3847_112894C.1
tttttaacacaatgcatttgtattatagaaagggcaagaaggaacaaaacttcttttacggagttccatcaaacatacattcgttacaacccttatcttttaagtaagtcccacacaaatgtggggcctaagttagaggtcctaaagaatgaaaggtaggccaagggaaaactcatattcaaagcgattgtcgctcagccacaagtgctgacccacaaatttggaacgcatgattctgcggaggataaacaaaaaaaggtgtggcgacttaataaattcccacccgtaggggagaaaacccgatgttattgcaaataaaggcaaa

SEQ ID NO: 14271 - DNA, 330 bp, Glycine max
  Clone ID: PAT_MRT3847_112895C.1
ggctcgagccagaatgatatcagactccgggatccatgctttggccggtgcagctggcggtgccctgtccatggccgtgacatatccgctcgtcaatctatcgactcgcgcccaggtggagacaaagaaacagggcaacgagtcgacgcttggagcggttcgccggatcatacaggccgaagggatcgcaggcctctttgacgggctcgagtcgagcattgtgggcattgcagtcacgaacggtgtctactatctctttttcgaagaaacgagagcagtcatcctgcgaaggaaggtgtcatctgctactgcgggacaggccgcgcgaac

SEQ ID NO: 14272 - DNA, 286 bp, Glycine max
  Clone ID: PAT_MRT3847_112896C.1
ctagttggcattcgaatgcattgtatttatatattaatattattttcaagggaaataaaaggattttaagggatcctaattataagaattggaaggggaaattataaaggtattaaaggggtaaacaatgtttttctaccgggcccggggggaaaaagaggtccatctggtcttgaatagcttgcttcaaaaggacttctggttccccagggaaggtctggggagaggatatgatttcttggaattgggggtgattcggggttaaggaagcgcgggactcaacagg

SEQ ID NO: 14273 - DNA, 375 bp, Glycine max
  Clone ID: PAT_MRT3847_112897C.1
tttgttctcacaggggtatactgtactgactcacctcatgatcttgcaaatccaaaggggatacatggctacggatactgtatctgcggccaaactagccattgaggcaggtgggaaaggctgctctgaattgtttggactcagcagcctattacgcatccttctcttttgtcgaaagacattagaggatccccatgctgacatcgagttcaagacctatgcagccggaagcaggggcggatacttgtatggatgtgccaggagcaccactgcagggtggcatatacggctttgcaaggagtggaaggaatcttctgtggtgctggcacggtcgacacgactaacctcttgaggccattgctatcaacgacaccg

SEQ ID NO: 14274 - DNA, 834 bp, Glycine max
  unsure (1)..(834): unsure at all n locations
  Clone ID: PAT_MRT3847_112898C.1
atggtagcacatttaaatattcatacttcttttgacctgttagattctagtttaagaattgatgcattaatagatanagctaanaaagaaggatatcgtgcgcttgcaataaccgatacaaatgtattgtacggttatccaaagttntatgatgcttgtattgcagctcacatacatccaatctttggtatgactatatatttaacggatggtctctatactattgaaacggttgttttagcaaaaaataatcaaggactcaagtcattatatcaactttcttctgctataatgatgagaaataaagaagaagtgccaattgaatggctaaaaagatacgacgaacatttaattatcatatttaaagaggctgagttgtctcataagcaagttattgatgcttttgaagcgttacatgccataagagataatactaagttagatttaatacatgagaaagaaacacttgatgaacattttcctagtatagaagaacttcaaacactaaatcttagtgaagatatgattactaacgcgaatgaaattgaagaattatgccaagcagaaattgcataccatcaatccctgttgccacaatttgtgacacctaatggtgaaacttcgaaagattatctttggacgatacttatacataggttacgagaatgggaacttaatgataaaacttatttcaatcggttgaaacatgaatataaaattattactgatatgggtttcgaggattattttcttattgtaagtgatttgattcattttgctaaaacacatgaagtgatggttgggccaggtcgtggttcatcagcagggtcatta

SEQ ID NO: 14275 - DNA, 259 bp, Glycine max
  Clone ID: PAT_MRT3847_112899C.1
ggcggctgagcgacggcgagggacaggcagttgtattgtagaacttaacaagggtttctcttgctctttctctggctgcttcttcactttctctcggttcagatcgaaaaaatcatgggcagaaaattcttcgtcggtggcaactggaaatgcaatgggaccactgaggaggtgaagaagattgttactagcttgaaatgaagctaaagtcgctggagaagagttgtagaagttgttgtgagcctccttttgggtgcct

SEQ ID NO: 14276 - DNA, 357 bp, Glycine max
  Clone ID: PAT_MRT3847_11289C.1
gccgcacaaccaaacaccctttacataaatttccgaacaaaaccccctagtgcgggtttcgcagatctcactacccaatttaaacaaatcaacactctaccctaaccccactctctaccttcctcccatgtatcgccccataccagatatcttttcctatttgttgatcgcagccacgacacccacataagcccacgactactgactaagtccgcactattaaaaaatatcacttatctaaagacaatactgtattgaaatacaaaatttgaaccaatctcataacctattccgcagatcactcagcagttctttaactatgacacgattctactgcatatcaaatgtctcacaaaa

SEQ ID NO: 14277 - DNA, 588 bp, Glycine max
  Clone ID: PAT_MRT3847_1128C.1
ccacgcgtccggcactttaaatagtgaaaaaacgttatctaaagccttataatataaggacagaaaccaaaactaacatactttgcaaggactaaaaaaaaattgtaaggatgaaaagcaaaaaaatgttatattggaaggactaaaaagatatttaagtcctgttattattaatttgtgtttttgtcatgttggggatagggatatccggtaatgccaactgcagcatctggcattactttctttccttttctctgtgcttggcttcttgttttcatcttgaaatgttgccaattttcccacaggtattgaaggagcgagggattgatgatgttgcaatcaacaattatgatgtggttgagcattcaaacaggtaaggacttgttttgtctgtctgtaccaatctatttggctcaatggtgatccaagtctgattcaatgcttgccaattgccaataaatcgtgttctgtgaagggttgaaaacaatatttcgagggttgagaaacttcctgaccattcaacccagactcgatatggtgaaaagactgaggacgctcatcttgatcaaaagacaggcagaaaacccg

SEQ ID NO: 14278 - DNA, 362 bp, Glycine max
  Clone ID: PAT_MRT3847_112900C.1
gtgcttgggggggggggggggggggggggggggggccaaggccggccaaaaaaaaaaggagtagctgtaggctcctaggaattcaccataaatacggtcctagtatgcgaatgtaaaggaggcagcattaacggatacatagcagtacagctacgcggcctaaagccgccttagccaccaaacctcgcctcaagggggcaaaaaagcttattcaagactccgcctcgcatcccggctaaagccacctcgtagcctccgtagccgcctagcctccaaaagactcccggaggacccgattgggggtctccgtagccacctggccactatgttgattataagccataccatagaatctactttat

SEQ ID NO: 14279 - DNA, 226 bp, Glycine max
  Clone ID: PAT_MRT3847_112901C.1
agtatcttttagaaatttttttttttttttgggggacaaagaacaaaacactaatggtattgattctagtgtcaacacagatgtagaataagcatattacaaaaggccacacacacaagggaaaaaaagattattatttatttgcaccgagtatttagccttatatgaaagcattggaactatcatttgccatcaccaagaatgaagagagtgcactttatacaca

SEQ ID NO: 14280 - DNA, 758 bp, Glycine max
  Clone ID: PAT_MRT3847_112902C.1
atttatggcctccatggaaataacagtagagcatccgcgcaccccttgaaaaccgtgtgttttcaatcaaagccaaggtcctcaccgatgagatgaggggttggaaccaatttgagaccatctacgaggaagaacaggagctttcttcaacctcctctccctttctttcaccatcttcctcctcttctcctcctcctcctccatcactccactccatagtcaatgcttggtctcttgactccgggtctgaaccagatgtcttgatatgtgttcaaggaacctcttttcgtctgcacaaggttcgtttgatatcacgaagttcatacctcaaacgacacctaacgggagtttctgacttaactctctccccgccgttaaacttaacggccgagactttcgccgcggtagccgaattctgttacagccgcagagtccacttaacgccgagcaacgttgccgccgttagagtggcggcggagttattgggcatgacgggggaagagaatctccgtgaagtaacggaatcgtactttgagagagtcgttggcattggcgcgtcgatggttctgcgttcgtgcgtggctctgcttcccgaagccgaaacgacggcgtcgcttgccagcaggtgcattgaagcgttggtttgggaagacgacgtttcgtgtatgagcgacgtcgtaggaatgcaccctcaggattttcaaacgggttcgtattcactgaacagacgggtacccaaccacgacgttctatacaag

SEQ ID NO: 14281 - DNA, 387 bp, Glycine max
  Clone ID: PAT_MRT3847_112903C.1
ctcactcttctaacatggcgactcagagcctctctggcatgttgcccaaaaccctagccccctgtcctctcgccgtgactctgctccaccgtgcccctcatcctgcgctccctctcacgcgctgctcccttactctcgccgagatggtacgtatgccggccagacccctccactccaccgcgtccctatctccccaactggttccgccctccggggccctggtccacacggcgccagtacctacctaacctcaacgacgcgcaccccgtaagtggatccaaccggtaccccggaaagagaccatacttgctgcgacggctgcgatctcgaacactggctacgccacatggagaagccctgagggagaccgcgcgacgcgatgacacc

SEQ ID NO: 14282 - DNA, 282 bp, Glycine max
  unsure (1)..(282): unsure at all n locations
  Clone ID: PAT_MRT3847_112904C.1
ctcaggagccacccacaaaacattagacatctgcttaaagctgangngcctaccatancacagattgangagttccattgcgntgcagaggatgatgaatnctcctgattcaaatgataatattgatctacngttgagcattgatntgtngggtnnacaaggngcaggtaaagccntnccaaacaanattgnctntgatgataagctgtgnnggctaacacncaaganntcnntgatggaaattntccagtggattcttggntaccangtttgtnaattgtc

SEQ ID NO: 14283 - DNA, 303 bp, Glycine max
  Clone ID: PAT_MRT3847_112905C.1
tcttttttttttttttcaaaaaacaacgcataagggccacatattttagcggggcaggtttctcatgtgtgtacaaaatatgatatgattccaccctagcttggaggtagaatcacaccaagtgtgctgagaacaaagctaattaattgattctgcgtgtctataactacggacacatgaatttgcacataaaaaagaaacttgtgcccatatttaaccctacagcggtaccatgcttgttgatggataatccatggcttggtgaaaccaatggtgtatggatcgccggctgcctgtaaccaa

SEQ ID NO: 14284 - DNA, 605 bp, Glycine max
  Clone ID: PAT_MRT3847_112906C.1
aagctttcttcaaggactttgctgatgccatggagaaactttctgtgtttagagtcaaaactggcgacaaaggagaggtgaggaacaggtgtgaccaattcaacagtattcctgcctaaatgaccgaagttactgaggttgaaattattagataattcgaaactatttcctattcttgcatttatatatgacacgtgcatacttaaaagtattgacaattgatgatatatatatacatgtcatatataaagattaattaagatggtatagtctcggattatctgataatttctagagattttgtgtatctagagagtcactatggatatacattgtcatttgtgtccttgtcaaaagaaaattgtgagaaacttattacctatatacatttgaattttttgtttgtttccatttgatattttttgttttgtgaaagaggcgaaaaacataagacttgtgatggagaagatccagttttacccatctgatcatatttgttctctggtgttgctactctatatgatttgatataatggataaattatatatgataataattgtattgattactggaaagttcaattcatattgtttttagataaaaa

SEQ ID NO: 14285 - DNA, 286 bp, Glycine max
  Clone ID: PAT_MRT3847_112907C.1
gggcggaatagtattgaatattataagcagggaggcataattcagattagccgaactttatacagaagcgagcaatttccaaacattaaaaaaaaaaaaaagaagcaaccatgagcttaacacacccatcacaagttcaaaacacttgaacttgctgaaaggcaagacatgaccactttattataaggatgtttgtttaacacaaaacaccagagtgcgcgaaaaccatcacagacataatacataagtttttagctacacattaatagcggatgattatttctaa

SEQ ID NO: 14286 - DNA, 356 bp, Glycine max
  Clone ID: PAT_MRT3847_112908C.1
atattgagtagcagtaccactattttggagggcgaaaaagtaaatttaccataggccactcttacagaaagaaggcaatagactggtgactgtgataacaaaaattgatattactttaaaaaactttacttatcgcaaagcacaggttctgtaacatccaacaggtgaagatcctataaataaatgtttgatctggcattccaacattatttaattggtgggaacaatggacaacgcttgctctatttgggatggccataatccttataagctgcccactgatcatagtggtatctgatttttaaaatgctcggccatgactcaatcatacagcttgtttttctaacattgatcaa

SEQ ID NO: 14287 - DNA, 319 bp, Glycine max
  Clone ID: PAT_MRT3847_112909C.1
actcatacttttgtcctctttgatgctgcattagcgttgttagcatggccattccatgaccgatactgccaaaatttccctgctccaaatgaaaactggctattgtgacccttcttctcatgtaaaatgcacatgtcttacgcttgctgcgtaagcccacaacatcctatcctttaaaaccattccttgatagcgcttttaaccaacatattactacattaatctctaacaattaatatcacactcttaaacatttaaccaacaatctttcttttatgctacttaactcctaattcatcacatctacatatttatattc

SEQ ID NO: 14288 - DNA, 1155 bp, Glycine max
  Clone ID: PAT_MRT3847_11290C.1
cctctttgttctatggagaacgaggttagagaacatgcacaaaaacttttggaaaaacacttgaagaagcctttctttaatgaacgttacggtgaaagtgttgaacggatgagtgtggaggaatttgaacagggcaagctctggttaagtgatactttctctctcataaggtgtgaagataactcccttccaaatataagttgggttcttgatcttgcaaaagctgctgtattaaggcatggggtgcgtggacttgtaattgatccttacaatgagctggatcatcaacgacccccaaaccagactgaaacagaatatgtgagcctgctgcttaccttaatcagtcgttttgcacaacatcatggatgccatgtttggtttgtggcacatcctaggcagctgcataattgggttggggatcctcctaatctctatgatataagtggaagtgcacacttcataaataagtgtgacaatggaattgttattcaccgtaatcgggatcctgaatctgggcctattgatcaagtacaggtttgtgttcgaaaggtacggaataaggttgcagggacaataggtgaagccatgttgttgtataatagggttactggtgagtacacgccatctgataacaacagaccagctgatagaaagagatagcaatgagacaagtaatattttggtaggcttgtatagtggtcactgatcagcaagaatgttgtataatcaagtaacatcggatactcggatcggatcgtgtctaaacatggctacgattttttcacttggggtgccaggtcgggatcaacaacaatgctggataacatcttaacatcggttgtgaaaattggctgtatcatatcattatttgacttggttatttgaagatcttgtttcctatatgcatccttttatacgtgttaggattacatcttaatttaattttgaagtactgcattttaatccttgtataggtatagaaagatttctttgttgcaatcccttggatctcaattggacgagagctataattgctttttttagaggctgtttataattctgcaagtcctattttagtccatgcagttcttgactttagaaaacactcattttaatgattttataaaattgttatttgctttggtccttaaaaaa

SEQ ID NO: 14289 - DNA, 249 bp, Glycine max
  Clone ID: PAT_MRT3847_112910C.1
atgcaccaacaaaacaaaagacaaatattcttcaagttttgctggggaaggtaaacaggtaaaacagccatacaactatacaagaaaaagatgtcaaaagagagaggctgttatttcctccttgttttgtttggttcacctgaaataataaacctcttaatatttcaacaccaacaacgttgttgtcaattgttcacaaagctagccggctgtgttatttagttaccattctatagttttagtgtgatc

SEQ ID NO: 14290 - DNA, 278 bp, Glycine max
  Clone ID: PAT_MRT3847_112911C.1
aaaaccaaccaaaagggctccctgggttactataaattttaattaaattaacggtttgttgttcaaagggttaataaaaaaaaattttttcccgctacaaggtgggattgttgggaaaaaaaaaacaaggttgatttccccctttttcacctcactcaaaaacacaattgattacttactagggattgtttatagctgaactttttactactaattccgggatttccaaaattgaacggatactttttcgggccattttttttattgattcaaagcat

SEQ ID NO: 14291 - DNA, 2371 bp, Glycine max
  Clone ID: PAT_MRT3847_112912C.1
aagtcgagcttgggtaatctgatcgtccagacttaatatcacatgttaaggggatcattacttttcaacatttacacacagataacaaagctaagatgattccacattcctgattccactcacaattcacagttcatagttcatagtccatattcatacaccgtttctttgttctcgctgcctagcatggcatcaacttctctcttcaacttcagactccctctgttcaacttcaacccactgcaccatcgacggataaagaggccaaaatctctgctctcctctcctcgcaacagtccacgcctcgtttcttccattaacgaccatttggcgctcacacgtgtcacatatccgcttctccaatctcactctgctccgaagcgcagattccacgttggtgtacagaaagagtattctgatggggaaagctctgagtcgattgtttctgacgctacataccaagaggaattttcctggtcttctgtagttcttccgtttctattccccgcattgggtggcttgttatttggttatgatattggtgccacctctggcgctacaatctcactgcagtcacctgagcttagcggtatatcatggttcaatctttctgccattcagcttggactagtggttagtggttccctatacggggctcttcttggctcgcttgttgcatttgcgatagctgatttccttgggaggaagaaacaactcattactgcagcactgttgtatttgtttggtggtgtgattactgcctatgcaccagaacttggtgttctcttaccaggaaggctgatttatggacttggtatgggtttgagcatgcatggggctcctttatatattgcggagacttgcccatcacaaatccgtgggacattagtatcattaaaagaactcttcattgtccttgggattctgcttggttattttgtgggaagctttctgattgagacagttggaggatggcggttcatgtacggatttagtgctccagttgctgtattaatggggcttggaatgtggactctccccaattctccacggtggttgcttctcagagcagtgcaaggaaaaggttcttttcaagatttgaaggaacaggcaattgcttccctgagcaaattaaggggccgaccacctggtgacaaagaatctgagaagcaaatagaagagacccttgtctcattgaaatctgtctatgcagaccaggaatccgaggggaatttcttagaggtgtttcagggtcccaatctgaaagctttcataattggtggggggctagtcctatttcaacagataacaggtcaaccaagtgttctgtattatgcaggcccaattcttcagagtgctggattttctgctgcatctgatgctacaaaagtttcagttgttattggcctattcaagttactaatgacttggattgctgtcctgaaaggggatgatttggggagaagacctctgctgattggaggtgtcagtggcattgccctttctctagttctcctttctgcttattataaatttcttggaggttttccacttgttgctgttggagctttacttctttatgttggttgctaccagatatcatttgggccaataagttggctaatggtatcagaggtcttcccacttcgcactagaggcaaggggattagtctggctgttcttaccaacttcgcttcaaatgctgttgttacctttgcattctccccgctaaaggagtttctaggagctgaaaatctttttctcctttttggggctattgctactctatcacttttgttcattatcttttctgttccagagacaaaaggcatgagtttagaagatatagaatccaaaatcttgaagtgacaacttaatctcgcaccttttgatgtgaatgctgtatattttgtattcatgatgaattgcaacgagggctaccatgctaatggaggacttatagctgggcaccaatcttttgaagacatatattaccagtttaccacagtccacagtgctaatgtgctacatgttagtatggcacccctctttgtgctttgctagcagtatttatcagtggtaaacatgagcagacatttgtgactaattttattctcaagattgaagatagcatagcatggcttttggggagtttatgcattgaccgagaaaattgttcattaattcctaatcttctgatggcgaacttgtatttcctctaatattggaggtcaaatttaaccaattaattggggattatgttgaaaaataagtagtgcttgttcggctttgcttcttagttcttgatttgcttgtgtaatgcagctgctgttttgatgctgacttgctccaacacgaaaactttgtttta

SEQ ID NO: 14292 - DNA, 692 bp, Glycine max
  Clone ID: PAT_MRT3847_112913C.1
tagcaaagccgaacaagcactacttatttttcaacataatccccaattaattggttaaatttgacctccaatattagaggaaatacaagttcgccatcagaagattaggaattaatgaacaattttctcggtcaatgcataaactccccaaaagccatgctatgctatcttcaatcttgagaataaaattagtcacaaatgtctgctcatgtttaccactgataaatactgctagcaaagcacaaagaggggtgccatactaacatgtagcacattagcactgtggactgtggtaaactggtaatatatgtcttcaaagattggtgcccagctataagtcctccattagcatggtagccctcgttgcaattcatcatgaatactaaaaccatgatttgagtatcttggttacaggttaaaaattccaatgtttatagagcaaacgtaaccataactatcaaattccacacaggagatatatacacaaggtggcatactcaccaaaatatacagcattcacatcaaaaggtgcgagaataagttgtcacttcaagattttggattctatatcttctaaactcatgccttttgtctttggaacagaaaagataatgaccaaaagtgatagaggagcaatagcccccaaaaggagaaaaagattttcagctcctagaaacttccttagcggggag

SEQ ID NO: 14293 - DNA, 463 bp, Glycine max
  Clone ID: PAT_MRT3847_112914C.1
agagagttctggtttcccatctaacggtttggttttggcattccacgacacgagggtagggctaggctcggtagatcgaatccaattctctctctgagcatttgaatttgtatttccatcaaatcatcttcatctcaacccaatccctttcctcttctccccaattccacaccgcgtttaattcttccacgtcaggttagggttcctttctattttctcttctcttgttcaatccataatcaattcatttacttgttaattcatcatcattctattcaatgacaggagtgggagaggaggaaccatcatcaacatattgaattgcatcgtttattcccaggcaaaactagctctctttgttttagcatccatctcagttggaaagtctatcgctctcagcagcagttccttggtcatacatcatcaattcatcataatgatggatgcaatgcaatgaaataat

SEQ ID NO: 14294 - DNA, 324 bp, Glycine max
  Clone ID: PAT_MRT3847_112915C.1
ggaaaggaggacgatatccacctctctataacataaatatgaatggatccatccaaacagctctagctagtaacacctaaaaaaccgtggatacaaccgggattctggtcatattaaacttcggaagctttgaatgatatgaacattcttaaaatattcaaagataacctattgcttttctggattataatggacacccactttgagtgtcttttatcgagtattttggactattggcttggtttatgcgcacaaactgtaagcttataacagggttatccaaatttctaccctgaatttactctaataccgaatggtgttaaa

SEQ ID NO: 14295 - DNA, 177 bp, Glycine max
  Clone ID: PAT_MRT3847_112916C.1
ctctcttgcacaaattatcccttccttcttatcatttacttcctaaattctctaattaatctcgaacctaatccttttaattaaacccttacctaaccaaaccggtgggcggtttggggttaataattaaaaggaaaaggggtgggaggaacctcttatgggggggggataattttt

SEQ ID NO: 14296 - DNA, 972 bp, Glycine max
  Clone ID: PAT_MRT3847_112917C.1
taagggcgcagacaaaacacgagtatttaaagacgtaacatccgactagtcgacaacgagaccaaccaaatttctcttactataataggtctacactagttctcacatgggaggagggagaggatgccccataccctcgtaatagaaatagaatgaatctaggtaagcagtcaacaagcagacatcaaaccattcaattctcttcccacactcattatgtaggcctgtcagaagggattttccacccagtcaatgcaagatccacaaacatctcccaaacccttcaatgttgaccctagaccaatggttgggtccagaatcttctcaagaccatataaatctttagtcttatcaatttctttcctaaccaccttcacaatatacttccctcgttcaattggtctttttgcagttatcaactccaacattaacactccatagctataaacatcactcttctccgtcaattgctgacttgtataatactctggatctaagtatcccatcgtcccttttacttgagtggtaacatgatcctttccaaaatcaaccatcttggaaagaccaaaatcagcaactttagcattcaaacactcgtccagcaaaatgttgcttgatttgatgtccctgtggatgatagcaggatgggcatgttgatgaagataatccaagccccttgcaatatcaagtgctatttttagtcgtctagtccagtccaacctaattactgaattccctaagatagcatcctttaaagttccatttgaaacatactcatacaccagaatttgttctcctcgctcaaaacagaaacccaaaaggctgacaagattcttatggtggacccttgatagaagctcaacctcagctttaaactggagccctccatgaatagattcttttttagctcgttttatggctatgagtcgcccattgggtagaattcctcgataaacctttccatagcccccg

SEQ ID NO: 14297 - DNA, 574 bp, Glycine max
  Clone ID: PAT_MRT3847_112918C.1
atgggttactccaaggagcacattattggtgctttcactgaagtttccaaaagccatccaaataaagatgtctcatctctgtggcctgctgttttatgtcatcttcgagaggaacaagtctatggttcacagccagaatctcaaaggtccagagacctcattgtaaaagacagcagagctgtgagcttgcatgtgcgaaacatttgttctcatgatattcctcctttcaccttgagagcttgctcatcagctgaccgacccatgcaaaatcctaacaaggatgagcttgtatcaaagttgaacattttaaatgtgccaccattgagcttgggggagagatttgaggatgcttatgacgtagttttaattttggatgatcgggagcaatttgccacacagggatcaagatccaggaaaattattgagaatatccgcagccagttcaaaatccagatagaggttcgacgattgccagtcggagatgggatttggatagcgcgccataaaactctgaacagtgaatatgtgttggattttattgttgagaggaagaaaactaatgatctatgcagtt

SEQ ID NO: 14298 - DNA, 465 bp, Glycine max
  Clone ID: PAT_MRT3847_112919C.1
acggctgcgagaagacgacagaaggggagctacaacaaaaacattggcagaaggaggagtagttctagcttgtttccatttcacggattgattgcataacagatttgagggtaaaatgaataggaagttcaacatagttccaaaccttttgattccttatctgccagagggcctaaatggtagaaatgaatttatcagttttaacacctatgagggtattaaggataaggaagatgcagtccttagtagattcgacccttgacaccaacgaatgatgtaaaggccatagtctagaatttctccaaacagtgaatgcttgatcacacccgaaaaatatgtgccactcattcttaattaatagaaaacctagtaatttattttaattgaaaataaaactcattaatagtgaccattagaaatagtcactattattaaaagtaattatttcaaatacatgtatttagt

SEQ ID NO: 14299 - DNA, 181 bp, Glycine max
  Clone ID: PAT_MRT3847_11291C.1
cacatgctgccactgccactgctctgacacaactcgctgcgccaacggaaacggctattgtgtcattgcatatactgataagagttacgtagatactgatgtcgtcgatgtatcatcagctgagcatgctgggaagtgcaagtgtggcactaactgggcttgcacggactgcacctgtggc

SEQ ID NO: 14300 - DNA, 230 bp, Glycine max
  unsure (1)..(230): unsure at all n locations
  Clone ID: PAT_MRT3847_112920C.1
aggaagcanagccgagaacgatgtcgtttcggtcggagaacgtgaaaccctaaccctagtcccantnctgccattgaagaagcggtggtcagacatntggacgaaatcgaaacccctaanccanatggtaatggcgntgaagctnnantcnctctnttcttctcntcgcatcagnacnacngacaanacnaancctnttctctnngnattgnccatnancgatcgaanca

SEQ ID NO: 14301 - DNA, 182 bp, Glycine max
  unsure (1)..(182): unsure at all n locations
  Clone ID: PAT_MRT3847_112921C.1
tgattgaagaagatgccgatcagaaacatcgccatcggnaggcctgaagaggcnacttcaccccgaaangtnnaaggngganttgggntaagtncatctccaccttgatctncgnatncgccggtnnaggttccggnatggcctanaacaanctcaccgacnacggcgccgnnactcccgcc

SEQ ID NO: 14302 - DNA, 293 bp, Glycine max
  Clone ID: PAT_MRT3847_112922C.1
tgcaaaaataaaaatcactaaagtcagaacgagtacatgatgttcagtaattcaacaagtgagaacttttcgtcaataattcctaaaaatgctttatgcaaaccaaattaaatttttcatattccctgaaatttctacacaaaattgtattgatgagtttcacgagaaataatacaattttatttatcttatttgagctttgaccctattccgtctatttagatgccttgtttatgtgtttcttttttaaagtataacttatttggttatgttttttaatttttttattatgt

SEQ ID NO: 14303 - DNA, 281 bp, Glycine max
  Clone ID: PAT_MRT3847_112923C.1
tgttagattgagtgatacgcgtcacattgtgaggtaatataaaaatggcaggggcggctgccgtgaccgtgctactcccacctaggattccgaccaccaccaacggtacccgctgctctgctttgccttctataactactagcgcttacaacaaaaaatccattttgtcactacccttactacaacactagatgacgctcttaaccacttatgctgtgtaaaacagaactgctcaaaaggaatcgtcctcagtagatgccaatgatgcgttcacagatttg

SEQ ID NO: 14304 - DNA, 794 bp, Glycine max
  unsure (1)..(794): unsure at all n locations
  Clone ID: PAT_MRT3847_112924C.1
gggggccccctnttttttttttttttttttttttttttttccctcccttttttttttttttttttttttttttttttttttttttttttttttttttttttttttttttgaaccaaaaggagatttatctaacacatattcataaacaaaataagctacaatgaggatgcagcaagttacaaagaaaattgaacatcacgagacaaaatcaagaggagaggaaagcaaaacagacctcaaggatccgcgtcaaatatcctacattctatacattttttgtgatttttaggtacaagaatcctccaccttaccacttcacgtggtggcatcatcttcatttcaaatcactagcctttgtcattcttccacttattatctccattgattgtttgcttcttcatttcgtagtcttccatttctatggaagcataattaggctatgatatcatctcagtttctattttcatcacagcacccacaaataaatgatgggggcaacaagttactcagcattgcttggcctgccaagtgagtcaagcccttctgttcggctgcgcacaattctatggaagacatccctcacttggcgctccaaagggtctagtccacctttcaaagcatcacagacttgtgaaacctcctgcactatctgtctaacctctcgttctttcccctccgtcaatgggaagtggacagaatcagccaaatcattcatcactctagcacatttctcaatctgatgaatctccttaagcaagccacaagaattcttccgctcccgtttcttcgactcc

SEQ ID NO: 14305 - DNA, 1049 bp, Glycine max
  Clone ID: PAT_MRT3847_112925C.1
aaaggctgacggtgtcttgtcctttgatgtgcctacctccctgcacaggagcaacacaaatcatgaacatgatcaacctcctcatcttcgtttgagagacccaaagattcctgaacttgtaaatttaccagtgtatgctgcacctgaatcgcgatattgtcctgcccgagtatatgagtatgttgcagatgagcagaatcagatgaagttgcaaattaatgcacaaaattgcttacattgcaaggcttgtgatatcaaagatccaaagcaaaatattgagtggacagtgcctgaagggggtggaggcccaggatactcagtcatgtagtcatggtattgttcacgcaaatacgtgcgtgtattattaccctctgcgttgggaaaaaaatgaaaaagctgcccctgtattttgttgcctcccccaaaaaataaagcctcaccccttccatacgcaacacaaacaccaaaagtgggctacatactaaaatagtgtatttgctgaaataaaatgtactatagatacagattactcgccatacagtcaacaaatgttacattattctattaaaattatgactgttaattatttttcattccttaaaaaccgattcctcctcctccgtcgagaatatcgaagaggaggaggaagaggataatattcaccgtgtgaattgtgttgtccctcctatgacagcaaccgatgagatcagtcttctcatcggctgctgcaaccagaacggacaacatcagccttcctcaatggagagtaataatttccagctgctggacgacgacgacgttttcacgccccagatgattgagaacatctccgccctgctcccagcaagtgtattctatgaatcccctcatcttaatcactggtgataccacggatggatgcagtgtaattagttattatattatattagttccttctcctcggtaaggtcaaactcaaatttaaaaaagcaagttttctttgctctccatctatataaacagattgatggataataattgttcttaattattgttgatttcggcccctt

SEQ ID NO: 14306 - DNA, 193 bp, Glycine max
  Clone ID: PAT_MRT3847_112926C.1
atcccccccttctcctttcaaaccttccactgtgtgtaactactgcttcacctgtgctaatatagctacttatagctgtattgaaaaggctcaaaatactatcttggagtgtggtcgtggggaccttgaggatgcatcctgctttgatgaccactacaagcgttgccctgaaaactatcctactatgaatacc

SEQ ID NO: 14307 - DNA, 2071 bp, Glycine max
  Clone ID: PAT_MRT3847_112927C.1
atctaacacatattcataaacaaaataagctacaatgaggatgcagcaaggtgacaaagaaaattgaacatcacgagacaaaatcaagaggagaggaaagcaaaacagacctcaaggatccgcgtcaaatatcctacattctatacattttttgtgatttttaggtacaagaatcccgatggagtgtatttattctttatttttatctactgcttttcaactcacacacgcgaccgaaataatgaaaaagtacaacctaagagagaagggaggttctgaacatcagacatatgctttgggaattaaagaggtttgggaaattgatgagaaaaagcatcaacctggtgctgtaatccacacattgggatggcccttggatcataaaacatacggaggatcttttctgtatcacatgagagataaacaaatatctataggccttgtgtttgctttaaactatctgaaccctttcatgaatccttatgaggaattctagaaacaaaatccaccttaccacttcacgtcgtgtcatcatcttcatttcaaatcactagcctttgtcattcttccacttattatctccattgattgtttgcttcttcatttcgtagtcttccatttctatggaagcataattaggctatgatatcatctcagtttctattttcatcacagcacccacaaataaatgatgcgtgcaacaagttactcagcattgcttggcctgccaagtgagtcaagccattctgttcgggttgcctcgattctatggaggatttgggaagaattgcataaatctcggaactaccgaccagcctttgaatacgggcttattccaggactggccttaagtggtctggaacattacatattcaaggggaggcacccagttactttgaagcatggtaaacctgatcatgaggctatgaatgctgccaaatcacattctccaattcactatccaaaggctgacggtgtcttgtcctttgatgtgcctacctccctgcacaggagcaacacaaatcatgaacatgatcaacctcctcatcttcgtttgagagacccaaagattcctgaacttgtaaatttaccagtgtatgctgcacctgaatcgcgatattgtcctgcccgagtatatgagtatgttgcagatgagcagaatcagatgaagttgcaaattaatgcacaaaattgcttacattgcaaggcttgtgatatcaaagatccaaagcaaacctttattcatttcatttctcttatcctatgaacactcattatcctcttctctaacaaagccatagtacgacacttttagttcattagttcttcttatcctatggataccattcgtaccaccaccatcacccgcgtgcaacaaacaaccccaacaaagaaaaccaagcccaagaagaagaactcaccccacccagtgaaggtagtctacatatccaaccccatgaagatcaagaccagcgcctccgagtttagggctttggtgcaagagctcaccggccaggacgccgagtccccaccagatccctctcgcttccacggccatcaccccgattcctcctcctccgtcgagaatatcgaagaggaggaggaagaggataatattcaccgtgtgaattgtgttgtccctcctatgacagcaaccgatgagatcagtcttctcatcggctgctgcaaccagaacggacaacatcagccttcctcaatggagagtaataatttccagctgctggacgacgatgacgttttcacgccccagatgattgagaacatctctgccctgctcccagcaagtgtattctatgaatcccctcatcttaatcactggtgataccacggatggatgcagtgtaattagttattatattatattacgctccttctcctcggtaaggtcaaactcaaattgaaaaaagttagttttctctccatgactccatctatataaacagattgatggataataattgtacttaattgttgatttttgaccattaatttgcgaggtatattattgcttgtttatatagtaaaaaaaaaaaaacagttactttatgtg

SEQ ID NO: 14308 - DNA, 418 bp, Glycine max
  Clone ID: PAT_MRT3847_112928C.1
ccacgcgtccgcagaggtgaatcttcataaaatgccttttcccctcaaccaaccttttctctttggaattttgtgcattgctttggtcctgacttcaggatcagtgacatgtttgggtggggatcaatcggggataatctgtataggagattgctcaccaacttgcagcggtgactgtgttggccgtggttataagaacggaggctcatgtttcttatttttctcatcttttatgtgttgttgtaacgaaaattgactactttttacccctctccgaagcatgaaaaaaaataaaacattggttgcataccaattggctaccaagaataatgcatttatccatggctatgagaatggatgtgcttctatgggttttaatttgctgtattttgttataagaattcactacttcgtaccc

SEQ ID NO: 14309 - DNA, 488 bp, Glycine max
  Clone ID: PAT_MRT3847_112929C.1
caagaccttgacgcacgcgcacgcaagcgtggagccgtagagcgtgacgcgctcgcccttttttttttaagaagaggcacattaatgtttcttcagcaggctatgtagaaagaaaacaaggagacgtgagctaagcattaggatgcgagggatacattggaccatttgtaagcatagatctggccagcatctaatagacataccatatggatgcacatgtcaacgaatcatcactcgcaatgaggactgcatgctcgcctagcataaagggtgaccagacaacgaagggaacatccaaaagcttccgaaaaacaaggtgcctaggaagggcattgcaatcctggacgagctagaccatgctgatcaaattatgacctgtggttgaggccccctgaggaacagtagccgtgatcgtggcaaccgagacctcaattgttggacgggcctgggttctaatgctgacacatgcaaatgacacagttccagtt

SEQ ID NO: 14310 - DNA, 223 bp, Glycine max
  unsure (1)..(223): unsure at all n locations
  Clone ID: PAT_MRT3847_11292C.1
gagaggcaatgggcaaaaagcacatatggcacgcgagagcaacctctataagcttaatgcctcctcaacgggaagccagctggattcaaacaacaaagcaatgtccattcagtgcaacgtgtgcatgcaaacatttatgtgcaccacatctgaagtgaagtgtagggagcatgctgaagccaaactccctanatctgatggttatgcttgttttcctcatctg

SEQ ID NO: 14311 - DNA, 591 bp, Glycine max
  Clone ID: PAT_MRT3847_112930C.1
ttttttttttttttttttttttttttttttttttttttttttttttttttcttattttcttttttttattttttttatttattattttattgttttttttttttatattgtcatccaaaactaaacattctctatcaatcaatttatatataatcccaaaagccaaaaatcgatattttttttttacgcattaaagacggagaaacaaagaaacaaagggggcacaccaccacaccacgcccactagtaagttagaaagagaaacaaaaaaaaacccacaaaaaaacacaattccgcgaatataaccaaacacccaaacgagactccgaaaatagccattatgcccgccaaacccccaaacaccaagggagcccaaaaacccaacaaaccaactgaaaaaaggaaaaaaggaggaaaaagccccccggcctcctgagaacataaaaacaaccgggtacaaaggcccaccgaacacaaaagcatatcagctagtaaaaggggcaaaggctcccacaatcgcaaaagggcaacgcgcaaacccggagacataattagggaaacaacccagcaagaccctacaatcaggcaatt

SEQ ID NO: 14312 - DNA, 492 bp, Glycine max
  Clone ID: PAT_MRT3847_112931C.1
caagtggtgaagaaggagaatccaaagtaacagagcaaaccagcaacaagaatggcaaatccaacgcaaataaaaacaacaacagagaaacaacctctgcggagacttccaaggataattcgaaaggctccgaggttcaaaatcagaagccagagtacattcatgtccgagcgcgtcgtggacaagccacggatagtcatagcttagctgaaagagttaggagggagaagattagtgagagaatgaagtatttgcaagatttagtaccgggttgcaacaaagttgcagggaaagctggaatgcttgatgaaattattaactatgttcagtctcttcaacgccaagttgagttcttgtcaatgaaattagcggctgtaaacccaaggcttgacttcaaccttgacgaactatttaccaaagaggtgtttccttcttgtgctcaaagttttccaaacattgggatgccattagatatgagtatgagtaacaacc

SEQ ID NO: 14313 - DNA, 311 bp, Glycine max
  Clone ID: PAT_MRT3847_112932C.1
tttataattttttttgtttttttttatttttaaacaaaggggtgtaatacttggatccatacaactttttgacatacctactgagacaatgtggaaaactacctaaaacttcattattggaaaatcgtgaagaaaacaattcaaccccaccttaaaaaaggacttgagtgcaccaaaacccaccccaaacccctcgcaatccatccgttgattcaaccaacgcaagttgaaaagtgccaaacaaccagttcgaccgcattattaatgaccatgtccgctgccatgagaaccactggctccaagggacccca

SEQ ID NO: 14314 - DNA, 396 bp, Glycine max
  Clone ID: PAT_MRT3847_112933C.1
ggttgtttgttcgtttgctacggttctctcactttctgggtgcaacatttttttttctgtttctccaaggttccatcgcaaagagtcaagagggggtgaagaagttattgctactcaatcacctactccttttgagtatgagatcttggatagtgatgctgaagtccttagaactgttagagcctcatccaattgtgctaatccatggattgaacctgaaaggttgaaacttagacatagaattggccgagggcccttttgtgtatgtttgcctagcaacttatcatcaatcaacttaagattttgatgagtaccattaaattgctgctaatatgttgcattctatcagagaggatcatgtgaagaatgttttatattaattcaatgaattgtatt

SEQ ID NO: 14315 - DNA, 654 bp, Glycine max
  Clone ID: PAT_MRT3847_112934C.1
cccacgcggcggggcagatttgagggactagcacagaaagatattgtttggtgtacggtggttgagtgtcgacgctgccaatatggaatctgaagcactgatatggggtgacaaactcatactgaagggattgtcattccatggttttcatggagcactaccggaagaaaggaagctaggccagaagttcgtggtagatgttgatgcatggatggatctgaaagcagctggcaaatctgatcacttatcagatacaattagttacacagatatatatgatatagctaaggaaattcttgaagggtcacctcaaaaccttctggagtcagtggcacaaaaaattgcagtgactactctgacaaatcataagcaaatatctgctgttcgagtgaaggttgaaaagcctcatgtggcagttcaaggtccacttgattacttaggcgttgagatacttagacgcagaagcgatttgtcagaatagaaatttcatagttttgttctctctggtttttgttgctctcattctgatttgtattgtttgttttcattgaatgtttcttcttgccattcagtttgatacatcgtcaagttccatttgatataaaggtaactctttccctgagtaccctattagttttcaaaaaatttttttat

SEQ ID NO: 14316 - DNA, 395 bp, Glycine max
  Clone ID: PAT_MRT3847_112935C.1
agggatcaaaggatcggagagggtcctataaaagaaggtctttttttttctttctccttctccgatctaaactgattttacgttatgcataagttaattttagtttccggcaattttttctttctcttcacttaagaatagttgtagtgaaacttatctaaatggggttatattatgtggatgttgttatcttatgatttcctcagtcaacaaaggttgtgtgtcaggaatttggggtggcgcctataccatttggtgaattgcgatgtgaacggacaggatacttgttctaggcgaattatacgtctgtatacctcaaagacgaactggaccatcaaaaccaccaccattgaagtactgcggcacgtgagcctcctgggtcgacccgattcttt

SEQ ID NO: 14317 - DNA, 221 bp, Glycine max
  unsure (1)..(221): unsure at all n locations
  Clone ID: PAT_MRT3847_112936C.1
tttttaagagctttttttgctattgattttgtttgaagatctttaaaggttcttgatcttgtttggccttgtttttttttgaagtataaaatggggccaactaaccttttgaatgtgggggggggggaaaaaancccagtgcaaaaccctggaggctagaaggccactattaaaaaccctaatacctcgggcgctagaagaataaaacccgctaacacaac

SEQ ID NO: 14318 - DNA, 199 bp, Glycine max
  unsure (1)..(199): unsure at all n locations
  Clone ID: PAT_MRT3847_112937C.1
cccttgggactanttttcataaccgggtttctgtttgtctgtgtgttttttttttaaaactcaataactgcgcactcgtgttgatccttttgttgtgattcaaaacagagatgttcgtgctcttttagtcctgccgattctgattttacgaccatgcatcctgtagatgggggtccgacggtcttacattattgaaagg

SEQ ID NO: 14319 - DNA, 163 bp, Glycine max
  Clone ID: PAT_MRT3847_112938C.1
caagagtggtttttacagttgatcctgaggataaacatacagaaatgtcttcagctgtcatcagtttgataagagcatcatttacaaccctggttatacgcccatcaattcttcaccttacttcttcatccttgtttggagatccctactcttttgaagtgct

SEQ ID NO: 14320 - DNA, 265 bp, Glycine max
  Clone ID: PAT_MRT3847_112939C.1
tcgatattccccctatacccgtttgcgttgctgttggcaaacaaatggctactaacaggagcgtgcaaacgttatttgacggcgattagaaaggaaagacggtgttattgagggtctatctgaacgtgcctttggatgacaaccattacatcatcgatgactctacagtctgtgctgttgatccaccatcaagtactgaactggtcatggacccaaagtgatcttttctagccactggcgacgtcctaaaggtgtatcacctaaa

SEQ ID NO: 14321 - DNA, 265 bp, Glycine max
  Clone ID: PAT_MRT3847_11293C.1
taactctcttttctagaagaatcagaagctgttattgtataaaataccgtatctttgcggtatttagaacaaggctactacaatagttatgttgtatgacattcattattctgatctgattgttcccatttttggtcctatctaaggtgaccccagctctattcgacatatcagattagagattgctggattaaagagcctttctagagcttccaagttgccaagctaggataggcggtcttgtctttaatgttgtatgagatat

SEQ ID NO: 14322 - DNA, 338 bp, Glycine max
  Clone ID: PAT_MRT3847_112940C.1
actggtggaatcttgtgattcgatgctagtaaagaacttaatgtcttcaactagagaatgagttgctccttgccttcagtattatgttatttacttatatagagtcagggattctggatcatgatgctgagataagtgataagattactactattttactggttcctagctagaaatgtccaataagcatgataatgatgacattatttatttggataaatcatgatgattatcagtgttaagtgatgaccaaaattgaagcaaaaagtcttgttttatttaatatgaacaatcagaattccatgaatatcttacttttatgtcttgaatctcttggg

SEQ ID NO: 14323 - DNA, 403 bp, Glycine max
  Clone ID: PAT_MRT3847_112941C.1
agcgaacaacaaacacaatatctcatcttattgggacttgacgtggactatcaaattatgtaaaacacaaagtattacattgattgccaaataaagctcaaagactttatgaataacttctgcgacatgccgtaagcaaaggaatggctgcctctgagagagcaccatgatgaacatgatcaaagacgaacgggctacctgtctacgtgatatggatcccagacccaatatactctagctgacggccttgaccggaacgcacgaaaattcgagttccattgacctctagtggttttgcacatacaacactacgacgggtggtgtattctgcttcgtggccacatcaagcgacctgtgggagtttcaatgcatgtttcgtggggtgggtaaatagagaggcctt

SEQ ID NO: 14324 - DNA, 432 bp, Glycine max
  Clone ID: PAT_MRT3847_112942C.1
ctgaactcttggttcactctgtcttgatgtcttccattttatgcttttctgatatggctcttcaaccactacattcactttattggcctagacccaaccaccaaagcaccaagagaccttaggtgaaccttttctctctagctctgtttgcagaaattcaagcgcaggaatggaggttgcaacaaacacaaccgcgaccacgtcaaattcattcgatgctctaactgtggaaaatgctgccctaaggacaaggctattaagaggtttctggtgaggaacattgttgaacaggctgcagtcagagatgtgttggaagcctgtgtctatgagcataattttcttctttaccttctctcttttttttgaggaaaatttcacatgtgtttatgttatttatttagtttttaattgttatttacagaatatactctt

SEQ ID NO: 14325 - DNA, 858 bp, Glycine max
  Clone ID: PAT_MRT3847_112943C.1
aagagaaatgaaattagatgaatcttatggtaaataagagtgatccattgtacaccacttgtttgggtggttcaccctagaattggcctcaaaattaggcaacaaaaaaagttttagcttatggttcaagcttaaaatgaaggctttttcttaggatttgcttttaggttcggacaggtgctccaatgccagcaggacgaggtgcttgaccactaaccaggctgaccgggcctttgtgcatcatcctgatgaatcgctttggaggctcacaattattcttatcagtgcaggagcataccctagcatggagtggatatcacaggaaacacaatactgcatcttcacatacagtttgggaaagagtatattctgtaaataacaattaaaaactaaataaataacataaacacatgtgaaattttcctcaaaaaaaagagagaaggtaaagaagaaaattatgctcatagacacaggcttcccaacacatctctgactgcagcctgttcaacaatgttcctcaccagaaacctcttaatagccttgtcctgttattaatttgaagaaaaaaaaaatccacaaagcgcaaaaactttaactgaaatgccttgcacaaaactttaaaggtataagaaagtaaaataaaaaaaccttagggcagcattttccacagttagagcatcgaatgaatttgacgtggtcgcggttgtgtttgttgcaacctccattcctgcgcttgaatttctgcaaacagagctagagagaaaaggttcacctaaggtctcttggtgctttggtggttgggtctaggccaataaagtgaatgtagtggttgaagagccctcgagccgaattccgagc

SEQ ID NO: 14326 - DNA, 813 bp, Glycine max
  Clone ID: PAT_MRT3847_112944C.1
cgaaactctccaaattccaaaaatgctagtcttccgtaggactagcccatgaaacttgtcaaagcagaatccctcaatcataaatcattggtcaaattatgttatataatacattagggatgttcagaaagaaaaagggtaacttggtaattcttggcagtctccatcgaaggatttcttacattattatgtgatagacaaaaacagaaacatggtattcagtttacttaagtttacaatgatatattataggcttttacctagatataatgatgcaacatagtggtcatcctactgtttttgacattttgtatacaaatgcgtgcacatatcacacgaaagatgatatgcctccataattccatccaaccacaaatacgtctttgattaaggagacaactctcctttgcaaggaatattggtgcagcggcaaacgggtctaccagaagcttcccacccattgaagccacgttccaagaccataatgttctttatcccagtatcttccttgttctcctcaagataattgacaagcctcctagcacaagttgggccacgaacctgacttagagcgcagtggaagacgagagtgtctttgcctttaactgcctgaatgagatttgagatgttatcggagaaagtgtcgcttgcgtaatgaagagaccccgatatgtgtccgtcgtagctcctctcatcgtcccttacatcgacgacggcgatgcttggatggcgtctgagagagagaagctgcgaccccgttatgtacgatatactgcgagccattatctcatacctcctcccccttctgtcgtc

SEQ ID NO: 14327 - DNA, 332 bp, Glycine max
  Clone ID: PAT_MRT3847_112945C.1
ctacaaccgtctaccatcctttctgctcataccaaggattttctatctctctggcgcactctgtcatcatttttctacccataactttcattttaatttcattctttcaacctcaaatttatttcttcaacctagattatacgttaaatcactctaattggaaccaatgaaaaacgatacaatactaattactcaagaaattaaaattcttactaattactccaatttgaagacactatttgctaatctttttttacccaatttggggacacttaccaaatcctatttttattaacctaaccacctgaattttgattgcgatgataaatctc

SEQ ID NO: 14328 - DNA, 792 bp, Glycine max
  Clone ID: PAT_MRT3847_112946C.1
caccctgcaaatctgtatgaccccatggctgctgctactgctactgcggacagcgtgtcctcgcaggcataccttgaaggaaacgcagtgaaggaaacgagaattctgatatcagaactctgtcgccacttctattctctcggatgggtctctggaactggtggcagcatcaccatcaaagtccacgatgactctatttccaaaccccaccaactcatactcatgtccccttcaggtgttcagaaggaaagaatggaaccagaggacatgtatgtgttatctcacactggatcagtcttgtctgctccatctcccaaaccttaccctcataaacctcccaagtgttctgattgtggtccacttttcatgaaggcatatgaaatgtgtgatgctggggcagttatccacagtcatggaatagaatcttgtcttgtaacaatgctcaatcctttagcaaaggaatttaaaataactcacatggaaatgataaaaggaatcaaggggcatggttattatgatgaacttgtgatccccataatagagaacacagcctacgaatatgagcttacagaatctctagctaaagctattgaagcctaccctaaaacaacagcagtgcttgtacgcaatcatggaatatatatttggggagactcgtggatcagtgctaaaactcaggctgagtgttatcattacctgtttgatgctgctatcaaacttcaccaattaggattggactggtctactcctaatcatgtcccaataaaaagtcttagaagtctaatgattgct

SEQ ID NO: 14329 - DNA, 418 bp, Glycine max
  Clone ID: PAT_MRT3847_112947C.1
gggattaaattttattttataaatttttaaaaaataatttgatttgttctcgtgtttttattaaatcatttatcacatgacattgttctttaatattctaaattagttttactattgttcttcaatatatttatcgagaatgccttcaataccttaaccgtattagatttttattttatagattaattttttgcaaataatatactaataacatatttgactacaatgaccttaataaaactaaaatatgtatttcattgtttataaaattttaaaacatgaaaaacaataaatatcatcaaagttagatagacaatgttattttatcaaatatattatatattttaattttattagttttttttctcatttaataaattatgcatagttacaattaaatgtatgtatataattatat

SEQ ID NO: 14330 - DNA, 231 bp, Glycine max
  Clone ID: PAT_MRT3847_112948C.1
aaaaacaaaatccttaaagggcctttttttgaaggggaaggaaccctttttaccggttttggttcatcccggggccttttcccctcaaaaggaaaaaggggacccagcccctccctttttttcatttggggttttgataacccccttaatcatgctgtttttcattaaccacatcctttatgattttttcagaatttttcttttggcccaccaaagcttttgccttatccc

SEQ ID NO: 14331 - DNA, 572 bp, Glycine max
  Clone ID: PAT_MRT3847_112949C.1
cacgaaagagttcttaaaatttatttatttctaatgaaattttaggtgtttaacagattttactatccacttaagtagtcaattgagatcttacgtgggttttagataataaaatactcaaataaaaaaatataatgacaatagcaatattaataaaatcataacactagccacatgaagaaagttgaccaaagggtaactgctactgccgccaaaatatatgtccaaagcatgatcacagaacattcactttcgccagctccgaacaattgagcaatggtgcctatattcatggcaggcggaagtgcatattgaagtagaagcacgaactgatacaaggcatctgaatgcaccaaactaaagtgtatggcccctttgacaactgcaacgcccaaaagaggcaggaaaatatagcgaacagctacaattcccacaacggtccacactggagtagttgatcctttcaaacctttaagtaggtttgctcccattataagagtgagagtggggacagctgcatcacccaacatgaacacagattcttcaaccacatgaagcggagcactacttcc

SEQ ID NO: 14332 - DNA, 292 bp, Glycine max
  unsure (1)..(292): unsure at all n locations
  Clone ID: PAT_MRT3847_11294C.1
caaaccccaaaaggaagaaccaancgcacccggagaagggcggaaggcagagccagaggcaggcacaacccaaggccaaaaaaccggcggaggaccaaacgcaggcgacgcagacacaaggaacggacccacagggacagcggaaaacagatccgacaaagagacacccaagcagaaggcgaagttttttaagaaaaaccggaaacgcaagatcagagacgctttgaatgaggaggtatggggcagaattgcgaaccacattataacaggaggcgaagcagaagcagcctac

SEQ ID NO: 14333 - DNA, 482 bp, Glycine max
  Clone ID: PAT_MRT3847_112950C.1
ctcactcgttggaccacacgcacggtcatgcttagacaaccactatagagattatgcaacacaacctcctgtcacatcagctggggatctatgacactaatcgcccacagaggatgcaatgctcccatgtgactacgactcacgcatatatgttgtggaaattgcatatcaaacaggctggagagatagaggacctgcccactgcgcctggctgatgacaaacccgcaaaccttatgacactgggggatggctatactaactggtgctcccaggaaatctgaagacatgtctgaacacccaccatgaaagcactcatatgtagaaacctgtacttattccaagcaggattcactgcctatctacattgactaccatataccgctttatatgcatcaggactgccactctgcgaaaatgactgcaactgtatactgtgcatccgatcatatatcgcaccttcatacaaggtatagtgtgtcta

SEQ ID NO: 14334 - DNA, 380 bp, Glycine max
  Clone ID: PAT_MRT3847_112951C.1
gggaacaggggcccataatttattaaagccacgaaagggaaaacaacttagtgaagtcttttacatgacttgttaacacacagtttaaacaccttaaagtgaagctggggcccctatttgaacccattttattacatatagatagataggaccaacctaaattgttgagaggtgaaggacctactggatgtattccaggggattaggaaccttaaagggcctgctttcgcctttaaggcctccgaggagagcgctcatttggtctacaaagaccccacacaaggtgagcccctgccttataagattctttctcgctgcagttttgaatgaaccgatctttggaggggaaggattttcgaaacccttgagaattaattttt

SEQ ID NO: 14335 - DNA, 304 bp, Glycine max
  Clone ID: PAT_MRT3847_112952C.1
acgaccaataattccaattcatatatgaacatctctgactccttaattcttgacaatggggacatcgaatatccgcgggaattcctctcttatttaccgggggtctaggctaggcctaataagaaaacaaatgataccgatgcatatatgaacatgccagacatcgtatcattcgaaaatgaagagttgggatcaccccgggaattccatactcagggcctgagagtttaggattggtctagctagacagcttagaaatcgcatatgtaggcggacatttaagccttcttagaagctgcaaatg

SEQ ID NO: 14336 - DNA, 1527 bp, Glycine max
  Clone ID: PAT_MRT3847_112953C.1
ccacgcgtccggcaggccctgcgtccgtcctgatgcatgtagaccatggagaggagacctgtactacccaacactccgcgaaaggagacttagaaaaaaaacagaacaaacaaagtcgtcgtcttcgtctccccttagtcttttccgttaccgcgaaatatcaatcttcgttagcacccttcccatttcctatttcgagcgcaaggaacagaacaaagcaatcaccaccttccaacgtcaccaagcctaaagaagaacacattagggttttgcgtgccagagagcgaaggagaagatggcagtggggaaggaagacgtggagatcgtgaaggcgcgcatcgacaagagggattacagaagagtcgtgctccgcaactcgctccaagtgctcctcattagcgatcccgacaccgataagtgtgctgcttccatggacgttggcgtcggttacttcagtgaccctgctggcctcgaaggcctcgcccatttcctcgagcacatgctgttttatgcgagtgaaaaatacccagttgaagatagctactccaagtatattactgagcatggaggaagcaccaatgcttttacatcttctgaacacaccaactatttttttgatgttaacacagatggctttgaagaggctctggacagattcgctcagttcttcaataaaccattgatgtctgctgatgccactatgagggaaattaaagctgttgactctgaaaaccagaagaatttattatctgatgcatggagaatgaaccagcttcagaaacatctcagtgatgaagatcatccgtatcataaatttagtacagggaactgggacactttggaagttagaccaaaagcaaaaggattagatacaaggagcgagcttctcaaattctatgaagaaaactattctgctaatctaatgcatctagttatatacacaaatgaaagccttgataaaattcaaaaccttgtagaagaaaagttccaggatattagaaacatcaacaaaagttgtttccgtgctcgtgttcagccgtgcaaatcagagcatttgcaaattcttgtcaggactgtcccaataaagcaaggtcataaattgagaattgtatggccagtaacccctgaaattcatcattacactgaagggccatgcaggtatcttggtcatctaattggtcatgaaggagaagggtctttatattacatcttgaaaaaattgggatgggctacggccttgtatgcgggcgaatcagattggggtttggacttttctttctttaaagttgtaattgatcttactgatgctggtcatgagcacatacaagatatcattgggttgttgttcaaatacattgagcttctacaacggtccggtgtttgcaaatggatttttgaagagctttctgcggtttgtgagaccaagtttcattatcaggacaaaattcgtcctagtgattatgctgttgatattgcatcaaatatgcagttctatcctgtaaaagattggttgacaggatcatcctt

SEQ ID NO: 14337 - DNA, 603 bp, Glycine max
  Clone ID: PAT_MRT3847_112954C.1
ggtttccgagtttttcatgtcaataaaataaaaaggaaaagctaaagaggagaaagaagcttcaatgcttttgttgactcagagcattcaaatgttccttcgatcgtagaaaacactctgcaatggcggttactgttcctgtccccagccattcctcaactctctgctttttttctttctctaactcacaagtgttgttgtttcggaggagaggttattaaggcggcatcatggggagtagggctaggcaggggaggagattgcagacgatgatgaagtgcatgtgcctgagggagccgttgaagggagaagatgaaacggttccttcttctgattctcttgcaatcagggaattctattcttcaacggcaagtgggcgttctggccccgacggagaaattgagatgatggggtcgggttctgggaacatggatgaagccgaattgtccttgcgtgagagtggcatcatggacatcatgggcaatgaggaagcaagagctttgttaggaaaagatgaatatcaggaaagaaatatagaagctgctttacatgtttatgagaggataaatataagtgctgtgacttccaagatgaaaatttcct

SEQ ID NO: 14338 - DNA, 776 bp, Glycine max
  Clone ID: PAT_MRT3847_112955C.1
cagccgaattcaccgataaatctatctaggataattattgtgatttttattactgtatttattgaggatttgtgtgtgaatttcaattttgtgacggtatttaacttttattttaattggtctggttgattaattccgataacttcgcggtctaatctaaccttataaggatttttttttttattatttaaaaccgattctattcgaacctaaaataggaaactgatcaaactgaattgattatgaaatcaaaatcagaaaattcggtgtgaattaattgaaataagagttaggagactgtggtgattgtggttttgaatcgaattcaatgtgtgacagtgttgttgcggaggcggcatcatggggagtagggctaagcaggggaggagattgcagaagatgatgaagtgcatgtgcctgagggagccgttgaagaaaggaggagaagatgaaacggttccttcctcggattctcttgcaatcacggagttttattcttcaacggcgagtggggcgttctggcctcgacggagaaattgagaagatgggggtcgggttctgggaacatgggatgaaagctggaattgtcctttgcgttgagaagtgggcatcatggattatcatggacaaatgaggaagctagagctttggtaggaaaaagatgaatatcaggaaagggaatatagaagcagttttacgtatttatgagaggataaatataagtgctgtgacttccaagatgaaaatttcccttgccaaaagcagagaacatcata

SEQ ID NO: 14339 - DNA, 495 bp, Glycine max
  Clone ID: PAT_MRT3847_112956C.1
ctctccattcagttcctttttttcccttccctcaaaccctaattcacgcaaaaagccaacgagatctactccttagtgagtacctcctcgtaattcacgccccactctgccctcaatcctttcccaattatgcatcataattaagatctacatgcatagtttccttttttttctttttccagaagccaggtttctcaattggatttcgtggaaacttcatctccaaacacgtaattaggttctcaattccaccctttttcttactactttcaaaccccttctagtatccgtaccccccctaagctttctcttcttttttgcttaagcaatggattctatcaacagtggaagcatctcttctagcgatgatgaatacgattcatcatcacacgctgatccaccgttccacaatcatttcggttccatctctcacccgcaacaaccacccctggttccatctcatccttcaatgtttgatctttcctcaagctacct

SEQ ID NO: 14340 - DNA, 593 bp, Glycine max
  Clone ID: PAT_MRT3847_112957C.1
aactaagcagggggggcctaaaccaaaagaaccccaaagccccccttaattgcgcttttacaaacagatggggaactaaatcctaacattcactcaattttgattctaacaactttttttgttctgcccccggaatcgggccctgccttatagttggagggaaatcctttagatcttccgggggggtccaaaaactgaaggggccaaacctgctttttgttatgcttgcccctggtaaaatttgcaacggtgctgggctcttaactcaaacaatttttaattaaacctttcgtggtaaaatcagccatgaataaacaaggattttacctatatttttgggaaaattgggacccggtttaaatatcttgggtctgtaatacagggggatggaaaaattgagggggatgtgaatcatcgctttcaaccttgagggataaaatggaaaaaagcctcgggggggttttgtgatgcaaagggacccaccaagctaaagggaaagttttttcggactgggggaagaccggcgattttgtacggaacaaaatgttgggcggtcaaaagccaacatgaaactaaaataggtgtaacggaaa

SEQ ID NO: 14341 - DNA, 159 bp, Glycine max
  Clone ID: PAT_MRT3847_112958C.1
tgcttcatgattgtataatttgataccattcattgtggaggaaatctctttgagtcggtgtgctggtcttaataaatttaaaagcggataaacaccaccttattttttttttcagtagcataaaaagttggaacaaccacaactatcttttttaaataa

SEQ ID NO: 14342 - DNA, 914 bp, Glycine max
  Clone ID: PAT_MRT3847_112959C.1
attatattgcgattattgttgagctgattaatcatttgactcgcatatcaaaaggcttgtggaaattaagtatggagagatgatgcgaaactctgatgtatatttttgcttgtttatataaatatgcgtctgtaaaatctgatatgttttccgtatttgttctgatcctgtttacgttgcaaataatcaaatttagtccatatacgatgtttaaattaatgtgctgttggatcaatcataacgtactctctatcctttgttttcagtaatgaacttgtcctatgctgatagttgccttaatcatttaattaagaagtccagcgcaagattgaccttgacccctctatatctggtgcagactttgtatgtcagatagctgccaatttgaaagaatgctgatactggtagtgatctgagttcagtcagttgtagtgtgataagtagtaactcaaataaattttccagtgatactttagcaggtctgccaggaagaagatacccttagtgatgcagaatctctagatgttggagatgtggataaaggaggctctacttctcccaaagaggttgtagcagaaattattcataggttagagttgcatgcctatcacagtacccttgaagttttgtatgcttctggtcctttaagttgggaacatgaagaattgttgactaaccttcgtatttcactccatatttcaaatgatgaacatttgatggagataaagaacttagtttcatctggtcagaatttttaaatgtttacatatgaattcatcatttgtacagccttatttgattctgaactagagtgcatagttttgaataattattttttctttaatatttctattttcgggaaattatgttgctatactcattatgaatatatcaagttatgacgctctttattt

SEQ ID NO: 14343 - DNA, 638 bp, Glycine max
  Clone ID: PAT_MRT3847_11295C.1
tacggctgcggaagacgacagaagggggaatgacaaaatatttttagttaaaaatattgagagaagtataataattttgagcatccaaaacggttatcggtaattcccagcttcacaaaatactgttacaaccattctggcgtagaatccggttccagacaaacacacactcccacatccaaatccaaatagaaaacacaaacacactctcactttttctcattcacaccgacacacgcattccccccatacgccgtcgttttccaaagcttcgcgccttcaaatccaatccacattcccatcaatcagcactggagtcgctccaagtgctgaagcctccctccccctccgccgccggccagattcgcttccgctccccttcctccgccgaactcctcgccaccgccgagctggatctcgaaaccaccaaaatgctgaaacgctccggccggcccccgccgccgacgccggagtcgctcaccgacaagatctaccacctccggggtgcgtttctgatggtggcggtgccgctcctcctcgtcacgctcgtgctctacgccatgccttccgcctcctccagcgagtccgtggaggactacgccctcacgcaccgccaggtcggcaacgaacgatccacc
